(19) United States
(12) Patent Application Publication
(10) Pub. No.: US 2007/0016974 A1
(43) Pub. Date: Jan. 18, 2007

(54) Nucleic acid molecules and other molecules associated with plants

(76) Inventors: Joseph R. Byrum, Des Moines, IA (US); Yijun G. Ruan, Davis, CA (US); Kevin C. Wallick, Verona, WI (US)

Correspondence Address: ARNOLD & PORTER LLP;ATTN: IP DOCKETING DEPT., 555 TWELFTH STREET, N.W., WASHINGTON, DC, 20004-1206, US

(21) Appl. No.: 11/521,349

(22) Filed: Sep. 15, 2006

Related U.S. Application Data
(63) Continuation of application No. 09/669,817, filed on Sep. 26, 2000.
(60) Provisional application No. 60/156,951, filed on Sep. 30, 1999.
(60) Provisional application No. 60/197,872, filed on Apr. 19, 2000.

(51) Int. Cl. A01H 5/00; C07H 21/04; C12N 15/82; C12N 5/04

(52) U.S. Cl. 800/278; 800/312; 800/320.1; 800/320.2; 435/468; 435/412; 435/415; 536/23.6

(57) ABSTRACT

Expressed Sequence Tags (ESTs) isolated from rice are disclosed. The ESTs provide a unique molecular tool for the targeting and isolation of novel genes for plant protection and improvement. The disclosed ESTs have utility in the development of new strategies for understanding critical plant developmental and metabolic pathways. The disclosed ESTs have particular utility in isolating genes and promoters, identifying and mapping the genes involved in developmental and metabolic pathways, and determining gene function. Sequence homology analyses using the ESTs provided in the present invention, will result in more efficient gene screening for desirable agronomic traits. An expanding database of these select pieces of the plant genomics puzzle will quickly expand the knowledge necessary for subsequent functional validation, a key limitation in current plant biotechnology efforts.

### CROSS-REFERENCE TO RELATED APPLICATIONS

[0001] This application is a continuation of U.S. patent application Ser. No. 09/669,817, filed Sep. 26, 2000, which claims the benefit of U.S. Provisional Application No. 60/156,951, filed Sep. 30, 1999; and of U.S. Provisional Application No. 60/197,872, filed Apr. 19, 2000, each of which is incorporated herewith by reference in its entirety.

### INCORPORATION OF SEQUENCE LISTING

[0002] This application contains a sequence listing, which is contained on three identical CD-ROMs: two copies of the sequence listing (Copy 1 and Copy 2) and a sequence listing in Computer Readable Form (CRF), all of which are herein incorporated by reference. All three sequence listing CD-ROMs each contain one file called “51469C seq.txt” which is 28,830,324 bytes in size (measured in MS-DOS) and which was created on Sep. 15, 2006.

### FIELD OF THE INVENTION

[0003] The present invention is in the field of plant biochemistry. More specifically the invention relates to nucleic acid molecules that encode proteins and fragments of proteins produced in plant cells, in particular, rice plants. The invention also relates to proteins and fragments of proteins so encoded and antibodies capable of binding the proteins. The invention also relates to methods of using the nucleic acid molecules, proteins and fragments of proteins.

### BACKGROUND OF THE INVENTION

I. Expressed Sequence Tag Nucleic Acid Molecules

[0004] Expressed sequence tags, or ESTs, are short sequences of randomly selected clones from a cDNA (or complementary DNA) library which are representative of the cDNA inserts of these randomly selected clones. McCombie, et al., Nature Genetics, 1:124-130 (1992); Kurata, et al., Nature Genetics, 8: 365-372 (1994); Okubo, et al., Nature Genetics, 2: 173-179 (1992), all of which references are incorporated herein in their entirety.

[0005] Using conventional methodologies, cDNA libraries can be constructed from the mRNA (messenger RNA) of a given tissue or organism using poly dT primers and reverse transcriptase (Efstratiadis, et al., Cell 7:279-288 (1976); Higuchi, et al., Proc. Natl. Acad. Sci. (U.S.A.) 73:3146-3150 (1976); Maniatis, et al., Cell 8:163 (1976); Land, et al., Nucleic Acids Res. 9:2251-2266 (1981); Okayama, et al., Mol. Cell. Biol. 2:161-170 (1982); Gubler, et al., Gene 25:263 (1983); all of which are herein incorporated by reference in their entirety).

[0006] Several methods may be employed to obtain full-length cDNA constructs. For example, terminal transferase can be used to add homopolymeric tails of dC residues to the free 3′ hydroxyl groups (Land, et al., Nucleic Acids Res. 9:2251-2266 (1981), herein incorporated by reference in its entirety). This tail can then be hybridized by a poly dG oligo which can act as a primer for the synthesis of full length second strand cDNA. Okayama and Berg, report a method for obtaining full length cDNA constructs. This method has been simplified by using synthetic primer-adapters that have both homopolymeric tails for priming the synthesis of the first and second strands and restriction sites for cloning into plasmids (Coleclough, et al., Gene 34:305-314 (1985), herein incorporated by reference in its entirety) and bacteriophage vectors (Krawinkel, et al., Nucleic Acids Res. 14:1913 (1986); and Han, et al., Nucleic Acids Res. 15:6304 (1987); both of which are herein incorporated by reference in their entirety).

[0007] These strategies have been coupled with additional strategies for isolating rare mRNA populations. For example, a typical mammalian cell contains between 10,000 and 30,000 different mRNA sequences. Davidson, Gene Activity in Early Development, 2nd ed., Academic Press, New York (1976). The number of clones required to achieve a given probability that a low-abundance mRNA will be present in a cDNA library is N=(ln(1−P))/(ln(1−1/n)) where N is the number of clones required, P is the probability desired, and 1/n is the fractional proportion of the total mRNA that is represented by a single rare mRNA. (Sambrook, et al., Molecular Cloning: A Laboratory Manual, 2nd ed., Cold Spring Harbor Laboratory Press (1989), herein incorporated by reference in its entirety).

[0008] A method to enrich preparations of mRNA for sequences of interest is to fractionate by size. One such method is to fractionate by electrophoresis through an agarose gel (Pennica, et al., Nature 301:214-221 (1983), herein incorporated by reference in its entirety). Another such method employs sucrose gradient centrifugation in the presence of an agent, such as methylmercuric hydroxide, that denatures secondary structure in RNA (Schweinfest, et al., Proc. Natl. Acad. Sci. (U.S.A.) 79:4997-5000 (1982), herein incorporated by reference in its entirety).

[0009] A frequently adopted method is to construct equalized or normalized cDNA libraries (Ko, Nucleic Acids Res. 18:5705-5711 (1990); Patanjali, S. R. et al., Proc. Natl. Acad. Sci. (U.S.A.) 88:1943-1947 (1991); both of which are herein incorporated by reference in their entirety). Typically, the cDNA population is normalized by subtractive hybridization (Schmid, et al, J. Neurochem. 48:307-312 (1987); Fargnoli, et al., Anal. Biochem. 187:364-373 (1990); Travis, et al., Proc. Natl. Acad. Sci (U.S.A.) 85:1696-1700 (1988); Kato, Eur. J. Neurosci. 2:704 (1990); and Schweinfest, et al., Genet. Anal. Tech. Appl 7:64 (1990); all of which are herein incorporated by reference in their entirety). Subtraction represents another method for reducing the population of certain sequences in the cDNA library (Swaroop, et al., Nucleic Acids Res. 19:1954 (1991), herein incorporated by reference in its entirety).

[0010] ESTs can be sequenced by a number of methods. Two basic methods may be used for DNA sequencing, the chain termination method of Sanger et al., Proc. Natl. Acad. Sci. (U.S.A.) 74: 5463-5467 (1977), the entirety of which is herein incorporated by reference and the chemical degradation method of Maxam and Gilbert, Proc. Nat. Acad. Sci. (U.S.A.) 74: 560-564 (1977), the entirety of which is herein incorporated by reference. Automation and advances in technology such as the replacement of radioisotopes with fluorescence-based sequencing have reduced the effort required to sequence DNA (Craxton, Methods, 2: 20-26 (1991); Ju et al., Proc. Natl. Acad. Sci. (U.S.A.) 92: 4347-4351 (1995); Tabor and Richardson, Proc. Natl. Acad. Sci. (U.S.A.) 92: 6339-6343 (1995); all of which are herein incorporated by reference in their entirety). Automated sequencers are available from, for example, Pharmacia Biotech, Inc., Piscataway, N.J. (Pharmacia ALF), LI-COR, Inc., Lincoln, Nebr. (LI-COR 4,000) and Millipore, Bedford, Mass. (Millipore BaseStation).

[0011] In addition, advances in capillary gel electrophoresis have also reduced the effort required to sequence DNA and such advances provide a rapid high resolution approach for sequencing DNA samples (Swerdlow and Gesteland, Nucleic Acids Res. 18:1415-1419 (1990); Smith, Nature 349:812-813 (1991); Luckey et al., Methods Enzymol. 218:154-172 (1993); Lu et al., J. Chromatog. A. 680:497-501 (1994); Carson et al., Anal. Chem. 65:3219-3226 (1993); Huang et al., Anal. Chem. 64:2149-2154 (1992); Kheterpal et al., Electrophoresis 17:1852-1859 (1996); Quesada and Zhang, Electrophoresis 17:1841-1851 (1996); Baba, Yakugaku Zasshi 117:265-281 (1997), all of which are herein incorporated by reference in their entirety).

[0012] ESTs longer than 150 bases have been found to be useful for similarity searches and mapping. (Adams, et al., Science 252:1651-1656 (1991), herein incorporated by reference.) EST sequences normally range from 150-450 bases. This is the length of sequence information that is routinely and reliably generated using single run sequence data. Typically, only single run sequence data is obtained from the cDNA library, Adams, et al., Science 252:1651-1656 (1991). Automated single run sequencing typically results in an approximately 2-3% error or base ambiguity rate. (Boguski, et al., Nature Genetics, 4:332-333 (1993), herein incorporated by reference in its entirety).

[0013] EST databases have been constructed or partially constructed from, for example, C. elegans (McCombrie, et al., Nature Genetics 1: 124-131 (1992)), human liver cell line HepG2 (Okubo, et al., Nature Genetics 2:173-179 (1992)), human brain RNA (Adams, et al., Science 252:1651-1656 (1991); Adams, et al., Nature 355:632-635 (1992)), Arabidopsis, (Newman, et al., Plant Physiol. 106:1241-1255 (1994)); and rice (Kurata, et al., Nature Genetics 8:365-372 (1994).

II. Sequence Comparisons

[0014] A characteristic feature of a protein or DNA sequence is that it can be compared with other known protein or DNA sequences. Sequence comparisons can be undertaken by determining the similarity of the test or query sequence with sequences in publicly available or propriety databases (“similarity analysis”) or by searching for certain motifs (“intrinsic sequence analysis”)(e.g. cis elements)(Coulson, Trends in Biotechnology, 12: 76-80 (1994); Birren, et al., Genome Analysis, 1: 543-559 (1997); both of which are herein incorporated by reference in their entirety).

[0015] Similarity analysis includes database search and alignment. Examples of public databases include the DNA Database of Japan (DDBJ)(available on the worldwide web at: ddbj.nig.ac.jp/); Genebank (available on the worldwide web at the NCBI website at: /web/Genbank/Index.htlm); and the European Molecular Biology Laboratory Nucleic Acid Sequence Database (EMBL) (available on the worldwide web at: ebi.ac.uk/ebi_docs/embl_db.html). A number of different search algorithms have been developed, one example of which are the suite of programs referred to as BLAST programs. There are five implementations of BLAST, three designed for nucleotide sequences queries (BLASTN, BLASTX, and TBLASTX) and two designed for protein sequence queries (BLASTP and TBLASTN) (Coulson, Trends in Biotechnology, 12: 76-80 (1994); Birren, et al., Genome Analysis, 1: 543-559 (1997)).

[0016] BLASTN takes a nucleotide sequence (the query sequence) and its reverse complement and searches them against a nucleotide sequence database. BLASTN was designed for speed, not maximum sensitivity, and may not find distantly related coding sequences. BLASTX takes a nucleotide sequence, translates it in three forward reading frames and three reverse complement reading frames, and then compares the six translations against a protein sequence database. BLASTX is useful for sensitive analysis of preliminary (single-pass) sequence data and is tolerant of sequencing errors (Gish and States, Nature Genetics, 3: 266-272 (1993), herein incorporated by reference). BLASTN and BLASTX may be used in concert for analyzing EST data (Coulson, Trends in Biotechnology, 12: 76-80 (1994); Birren, et al., Genome Analysis, 1: 543-559 (1997)).

[0017] Given a coding nucleotide sequence and the protein it encodes, it is often preferable to use the protein as the query sequence to search a database because of the greatly increased sensitivity to detect more subtle relationships. This is due to the larger alphabet of proteins (20 amino acids) compared with the alphabet of nucleic acid sequences (4 bases), where it is far easier to obtain a match by chance. In addition, with nucleotide alignments, only a match (positive score) or a mismatch (negative score) is obtained, but with proteins, the presence of conservative amino acid substitutions can be taken into account. Here, a mismatch may yield a positive score if the non-identical residue has physical/chemical properties similar to the one it replaced. Various scoring matrices are used to supply the substitution scores of all possible amino acid pairs. A general purpose scoring system is the BLOSUM62 matrix (Henikoff and Henikoff, Proteins, 17: 49-61 (1993), herein incorporated by reference in its entirety), which is currently the default choice for BLAST programs. BLOSUM62 is tailored for alignments of moderately diverged sequences and thus may not yield the best results under all conditions. Altschul, J. Mol. Biol. 36: 290-300 (1993), herein incorporated by reference in its entirety, uses a combination of three matrices to cover all contingencies. This may improve sensitivity, but at the expense of slower searches. In practice, a single BLOSUM62 matrix is often used but others (PAM40 and PAM250) may be attempted when additional analysis is necessary. Low PAM matrices are directed at detecting very strong but localized sequence similarities, whereas high PAM matrices are directed at detecting long but weak alignments between very distantly related sequences.

[0018] Homologues in other organisms are available that can be used for comparative sequence analysis. Multiple alignments are performed to study similarities and differences in a group of related sequences. CLUSTAL W is a multiple sequence alignment package available that performs progressive multiple sequence alignments based on the method of Feng and Doolittle, J. Mol. Evol. 25: 351-360 (1987), the entirety of which is herein incorporated by reference. Each pair of sequences is aligned and the distance between each pair is calculated; from this distance matrix, a guide tree is calculated, and all of the sequences are progressively aligned based on this tree. A feature of the program is its sensitivity to the effect of gaps on the alignment; gap penalties are varied to encourage the insertion of gaps in probable loop regions instead of in the middle of structured regions. Users can specify gap penalties, choose between a number of scoring matrices, or supply their own scoring matrix for both the pairwise alignments and the multiple alignments. CLUSTAL W for UNIX and VMS systems is available at: ftp.ebi.ac.uk. Another program is MACAW (Schuler et al., Proteins, Struct. Func. Genet, 9:180-190 (1991), the entirety of which is herein incorporated by reference, for which both Macintosh and Microsoft Windows versions are available. MACAW uses a graphical interface, provides a choice of several alignment algorithms, and is available by anonymous ftp at: ncbi.nlm.nih.gov (directory/pub/macaw).

[0019] Sequence motifs are derived from multiple alignments and can be used to examine individual sequences or an entire database for subtle patterns. With motifs, it is sometimes possible to detect distant relationships that may not be demonstrable based on comparisons of primary sequences alone. Currently, the largest collection of sequence motifs in the world is PROSITE (Bairoch and Bucher, Nucleic Acid Research, 22: 3583-3589 (1994), the entirety of which is herein incorporated by reference.) PROSITE may be accessed via either the ExPASy server on the World Wide Web or anonymous ftp site. Many commercial sequence analysis packages also provide search programs that use PROSITE data.

[0020] A resource for searching protein motifs is the BLOCKS E-mail server developed by S. Henikoff, Trends Biochem Sci., 18:267-268 (1993); Henikoff and Henikoff, Nucleic Acid Research, 19:6565-6572 (1991); Henikoff and Henikoff, Proteins, 17: 49-61 (1993); all of which are herein incorporated by reference in their entirety). BLOCKS searches a protein or nucleotide sequence against a database of protein motifs or “blocks.” Blocks are defined as short, ungapped multiple alignments that represent highly conserved protein patterns. The blocks themselves are derived from entries in PROSITE as well as other sources. Either a protein or nucleotide query can be submitted to the BLOCKS server; if a nucleotide sequence is submitted, the sequence is translated in all six reading frames and motifs are sought in these conceptual translations. Once the search is completed, the server will return a ranked list of significant matches, along with an alignment of the query sequence to the matched BLOCKS entries.

[0021] Conserved protein domains can be represented by two-dimensional matrices, which measure either the frequency or probability of the occurrences of each amino acid residue and deletions or insertions in each position of the domain. This type of model, when used to search against protein databases, is sensitive and usually yields more accurate results than simple motif searches. Two popular implementations of this approach are profile searches (such as GCG program ProfileSearch) and Hidden Markov Models (HMMs)(Krough et al., J. Mol. Biol. 235:1501-1531 (1994); Eddy, Current Opinion in Structural Biology 6:361-365 (1996), both of which are herein incorporated by reference in their entirety). In both cases, a large number of common protein domains have been converted into profiles, as present in the PROSITE library, or HHM models, as in the Pfam protein domain library (Sonnhammer et al., Proteins 28:405-420 (1997), the entirety of which is herein incorporated by reference). Pfam contains more than 500 HMM models for enzymes, transcription factors, signal transduction molecules, and structural proteins. Protein databases can be queried with these profiles or HMM models, which will identify proteins containing the domain of interest. For example, HMMSW or HMMFS, two programs in a public domain package called HMMER (Sonnhammer et al., Proteins 28:405-420 (1997)) can be used.

[0022] PROSITE and BLOCKS represent collected families of protein motifs. Thus, searching these databases entails submitting a single sequence to determine whether or not that sequence is similar to the members of an established family. Programs working in the opposite direction compare a collection of sequences with individual entries in the protein databases. An example of such a program is the Motif Search Tool, or MoST (Tatusov et al. Proc. Natl. Acad. Sci. 91: 12091-12095 (1994), the entirety of which is herein incorporated by reference.) On the basis of an aligned set of input sequences, a weight matrix is calculated by using one of four methods (selected by the user); a weight matrix is simply a representation, position by position in an alignment, of how likely a particular amino acid will appear. The calculated weight matrix is then used to search the databases. To increase sensitivity, newly found sequences are added to the original data set, the weight matrix is recalculated, and the search is performed again. This procedure continues until no new sequences are found.

### SUMMARY OF THE INVENTION

[0023] The present invention provides a substantially purified nucleic acid molecule that encodes a rice protein or fragment thereof comprising a nucleic acid sequence selected from the group consisting of SEQ ID NO: 1 through SEQ ID NO: 43701.

[0024] The present invention also provides one or more substantially purified nucleic acid molecules comprising a nucleic acid sequence selected from the group consisting of SEQ ID NO: 1 through SEQ ID NO:43701 or complements thereof.

[0025] The present invention also provides a substantially purified rice protein or fragment thereof, wherein said rice protein is encoded by a nucleic acid molecule that comprises a nucleic acid sequence selected from the group consisting of SEQ ID NO: 1 through SEQ ID NO: 43701.

[0026] The present invention further provides a substantially purified protein, peptide, or fragment thereof encoded by a nucleic acid sequence which specifically hybridizes to a nucleic acid molecule comprising a nucleic acid sequence selected from the group consisting of a complement of SEQ ID NO: 1 through SEQ ID NO:43701.

[0027] The present invention further provides a substantially purified antibody capable of specifically binding to a protein or fragment thereof encoded by a nucleic acid sequence which specifically hybridizes to a nucleic acid molecule having a nucleic acid sequence selected from the group consisting of a complement of SEQ ID NO:1 through SEQ ID NO:43701.

[0028] The present invention also provides a transformed plant transformed to contain a nucleic acid molecule which comprises: (A) an exogeneous promoter region which functions in plant cells to cause the production of an mRNA molecule; which is linked to (B) a structural nucleic acid molecule, wherein said structural nucleic acid molecule comprises a nucleic acid molecule that encodes a protein, peptide, or fragment thereof which hybridizes to a nucleic acid sequence selected from the group consisting of a complement of SEQ ID NO:1 through SEQ ID NO:43701 expressed in an effective amount to produce a desirable agronomic effect; which is linked to (C) a 3′ non-translated sequence that functions in plant cells to cause the termination of transcription and the addition of polyadenylated ribonucleotides to the 3′ end of the mRNA sequence.

[0029] The present invention also provides a transformed plant cell containing a nucleic acid molecule whose non-transcribed strand encodes a protein or fragment thereof, wherein the transcribed strand of said nucleic acid is complementary to a nucleic acid molecule that encodes a protein or fragment thereof. The present invention also provides bacterial, viral, microbial, and plant cells comprising a nucleic acid molecule of the present invention

[0030] The present invention also provides a method of producing a plant containing one or more proteins encoded by sequences comprising SEQ ID NO:1 or complement thereof through SEQ ID NO:43701 or complements thereof, expressed in a sufficient amount and/or fashion to produce a desirable agronomic effect.

[0031] In accomplishing the foregoing, there is provided, in accordance with one aspect of the present invention, methods of producing genetically transformed plants, comprising the steps of:
[0032] (a) inserting into the genome of a plant cell a recombinant, double-stranded DNA molecule comprising
   [0033] (i) a promoter which functions in plant cells to cause the production of an RNA sequence,
   [0034] (ii) a structural DNA sequence that causes the production of an RNA sequence which encodes a desired protein.
   [0035] (iii) a 3′ non-translated DNA sequence which functions in plant cells to cause the addition of polyadenylated nucleotides to the 3′ end of RNA sequence; where the promoter is homologous or heterologous with respect to the coding sequence and adapted to cause sufficient expression of a protein in desired plant tissues to enhance the agronomic utility of a plant transformed with said gene.
[0036] (b) obtaining a transformed plant cell with said nucleic acid molecule that encodes one or more proteins, wherein said nucleic acid molecule is transcribed and results in expression of said protein(s); and
[0037] (c) regenerating from the transformed plant cell a genetically transformed plant

[0038] The present invention also encompasses differentiated plants, seeds, and progeny comprising said transformed plant cells and which exhibit novel properties of agronomic significance.

[0039] The present invention also provides a method of producing a plant containing reduced levels of a protein comprising: (A) transforming a plant cell with a nucleic acid molecule that encodes a protein, wherein said nucleic acid molecule is transcribed and results in co-suppression of endogenous protein synthesis activity, and (B) regenerating plants and producing subsequent progeny from the transformed plant.

[0040] The present invention also provides a method of determining an association between a polymorphism and a plant trait comprising: (A) hybridizing a nucleic acid molecule specific for a polymorphism to genetic material of a plant, wherein said nucleic acid molecule comprising a nucleic acid sequence selected from the group consisting of SEQ ID NO:1 through SEQ ID NO:43701 or complements thereof; and (B) calculating the degree of association between the polymorphism and the plant trait.

[0041] The present invention also provides a method of isolating a genetic region, or nucleic acid that encodes a protein or fragment thereof comprising: (A) incubating under conditions permitting nucleic acid hybridization: a marker nucleic acid molecule, preferably an EST, with a complementary nucleic acid molecule obtained from a plant cell or plant tissue; (B) permitting hybridization between said marker nucleic acid molecule, preferably an EST, and said complementary nucleic acid molecule obtained from said plant cell or plant tissue; and (C) isolating said complementary nucleic acid molecule.

[0042] The present invention also provides a method for determining a level or pattern in a plant cell of a protein in a plant comprising: (A) incubating, under conditions permitting nucleic acid hybridization, a marker nucleic acid molecule, the marker nucleic acid molecule selected from the group of marker nucleic acid molecules which specifically hybridize to a nucleic acid molecule having the nucleic acid sequence selected from the group consisting of SEQ ID NO:1 through SEQ ID NO:43701 or complements thereof or fragments of either, with a complementary nucleic acid molecule obtained from the plant cell or plant tissue, wherein nucleic acid hybridization between the marker nucleic acid molecule and the complementary nucleic acid molecule obtained from the plant cell or plant tissue permits the detection of an mRNA for the enzyme; (B) permitting hybridization between the marker nucleic acid molecule and the complementary nucleic acid molecule obtained from the plant cell or plant tissue; and (C) detecting the level or pattern of the complementary nucleic acid, wherein the detection of the complementary nucleic acid is predictive of the level or pattern of the protein.

[0043] The present invention also provides a method for determining the level or pattern of a protein in a plant cell or plant tissue comprising: (A) incubating under conditions permitting nucleic acid hybridization: a marker nucleic acid molecule, the marker nucleic acid molecule comprising a nucleotide sequence selected from the group consisting of SEQ ID NO: 1 through SEQ ID NO:43701 or complements thereof, with a complementary nucleic acid molecule obtained from a plant cell or plant tissue, wherein nucleic acid hybridization between the marker nucleic acid molecule, and the complementary nucleic acid molecule obtained from the plant cell or plant tissue permits the detection of said protein; (B) permitting hybridization between the marker nucleic acid molecule and the complementary nucleic acid molecule obtained from the plant cell or plant tissue; and (C) detecting the level or pattern of the complementary nucleic acid, wherein the detection of said complementary nucleic acid is predictive of the level or pattern of the protein synthesis.

[0044] The present invention also provides a method for determining a level or pattern of a protein in a plant cell or plant tissue which comprises assaying the concentration of a molecule, whose concentration is dependent upon the expression of a gene, the gene having a nucleic acid sequence which specifically hybridizes to a protein marker nucleic acid molecule, the molecule being present in a plant cell or plant tissue, in comparison to the concentration of that molecule present in a plant cell or plant tissue with a known level or pattern of said protein, wherein an assayed concentration of the molecule is compared to the assayed concentration of the molecule in a plant cell or plant tissue with a known level or pattern of said protein.

[0045] The present invention also provides a method of determining a mutation in a plant whose presence is predictive of a mutation affecting a level or pattern of a protein comprising the steps: (A) incubating, under conditions permitting nucleic acid hybridization, a marker nucleic acid, the marker nucleic acid selected from the group of marker nucleic acid molecules which specifically hybridize to a nucleic acid molecule consisting of the nucleic acid sequence selected from the group consisting of SEQ ID NO: 1 through SEQ ID NO:43701 or complements thereof or fragments of either and a complementary nucleic acid molecule obtained from the plant, wherein nucleic acid hybridization between the marker nucleic acid molecule and the complementary nucleic acid molecule obtained from the plant permits the detection of a polymorphism whose presence is predictive of a mutation affecting the level or pattern of the protein in the plant; (B) permitting hybridization between the marker nucleic acid molecule and the complementary nucleic acid molecule obtained from the plant; and (C) detecting the presence of the polymorphism, wherein the detection of the polymorphism is predictive of the mutation.

[0046] The present invention also provides a method for determining a mutation in a plant whose presence is predictive of a mutation affecting the level or pattern of protein synthesis comprising the steps: (A) incubating under conditions permitting nucleic acid hybridization: a marker nucleic acid molecule, the marker nucleic acid molecule comprising a nucleic acid molecule that is linked to gene, the gene having a nucleic acid sequence which specifically hybridizes to a sequence selected from the group consisting of SEQ ID NO:1 through SEQ ID NO:43701 and complements thereof, and a complementary nucleic acid molecule obtained from a plant tissue or plant cell of the plant, wherein nucleic acid hybridization between the marker nucleic acid molecule and the complementary nucleic acid molecule obtained from the plant permits the detection of a polymorphism whose presence is predictive of a mutation affecting said level or pattern of a protein synthesis in the plant; (B) permitting hybridization between said marker nucleic acid molecule and said complementary nucleic acid molecule obtained from said plant; and; (C) detecting the presence of the polymorphism, wherein the detection of the polymorphism is predictive of the mutation.

[0047] The present invention also provides a method for reducing expression of a protein in a plant cell, the method comprising: growing a transformed plant cell containing a nucleic acid molecule whose non-transcribed strand encodes a protein or fragment thereof, wherein the transcribed strand of said nucleic acid is complementary to a nucleic acid molecule that encodes the protein in said plant cell, and whereby the strand that is complementary to the nucleic acid molecule that encodes the protein reduces or depresses expression of the protein.

[0048] The present invention provides rice nucleic acid molecules for use as molecular tags to isolate genetic regions (i.e. promoters and flanking sequences), isolate genes, map genes, and determine gene function. The present invention further provides rice nucleic acid molecules for use in determining if genes are members of a particular gene family.

[0049] The present invention also provides a method of obtaining full length genes using rice ESTs or complements thereof or fragments of either.

[0050] The present invention also provides a method of isolating promoters and flanking sequences using rice ESTs or complements thereof or fragments of either.

[0051] The present invention also provides rice ESTs or complements thereof or fragments of either for use in marker-assisted breeding programs.

[0052] The present invention also provides a method of identifying tissues comprising hybridizing nucleic acids from the tissue with rice ESTs or complements thereof or fragments of either.

[0053] The present invention also provides a method for production of antibodies targeted against the proteins, peptides, or fragments produced by the disclosed or complements thereof or fragments of either.

[0054] The present invention also provides a method for the transformation and regeneration of plants comprising sequences hybridizable to the disclosed ESTs or complements thereof or fragments of either.

[0055] The present invention also provides a method of modifying plant protein expression by inserting in a chimeric gene sense or antisense constructs of the rice ESTs.

### DETAILED DESCRIPTION OF THE INVENTION

Agents

[0056] (a) Nucleic Acid Molecules

[0057] Agents of the present invention include nucleic acid molecules and more specifically EST nucleic acid molecules or nucleic acid fragment molecules thereof. Fragment EST nucleic acid molecules may encode significant portion(s) of, or indeed most of, the EST nucleic acid molecule. Alternatively, the fragments may comprise smaller oligonucleotides (having from about 15 to about 250 nucleotide residues, and more preferably, about 15 to about 30 nucleotide residues).

[0058] A subset of the nucleic acid molecules of the present invention includes nucleic acid molecules that are marker molecules. Another subset of the nucleic acid molecules of the present invention include nucleic acid molecules that encode a protein or fragment thereof. Another subset of the nucleic acid molecules of the present invention are EST molecules.

[0059] The term “substantially purified”, as used herein, refers to a molecule separated from substantially all other molecules normally associated with it in its native state. More preferably a substantially purified molecule is the predominant species present in a preparation. A substantially purified molecule may be greater than 60% free, preferably 75% free, more preferably 90% free, and most preferably 95% free from the other molecules (exclusive of solvent) present in the natural mixture. The term “substantially purified” is not intended to encompass molecules present in their native state.

[0060] The agents of the present invention will preferably be “biologically active” with respect to either a structural attribute, such as the capacity of a nucleic acid to hybridize to another nucleic acid molecule, or the ability of a protein to be bound by antibody (or to compete with another molecule for such binding). Alternatively, such an attribute may be catalytic, and thus involve the capacity of the agent to mediate a chemical reaction or response.

[0061] The agents of the present invention may also be recombinant. As used herein, the term recombinant means any agent (e.g. DNA, peptide etc.), that is, or results, however indirect, from human manipulation of a nucleic acid molecule.

[0062] It is understood that the agents of the present invention may be labeled with reagents that facilitate detection of the agent (e.g. fluorescent labels (Prober, et al., Science 238:336-340 (1987); Albarella et al., EP 144914, chemical labels (Sheldon et al., U.S. Pat. No. 4,582,789; Albarella et al., U.S. Pat. No. 4,563,417, modified bases (Miyoshi et al., EP 119448, all of which are hereby incorporated by reference in their entirety).

[0063] It is further understood, that the present invention provides bacterial, viral, microbial, and plant cells comprising the agents of the present invention.

[0064] Nucleic acid molecules or fragment thereof of the present invention are capable of specifically hybridizing to other nucleic acid molecules under certain circumstances. As used herein, two nucleic acid molecules are said to be capable of specifically hybridizing to one another if the two molecules are capable of forming an anti-parallel, double-stranded nucleic acid structure. A nucleic acid molecule is said to be the “complement” of another nucleic acid molecule if they exhibit complete complementarity. As used herein, molecules are said to exhibit “complete complementarity” when every nucleotide of one of the molecules is complementary to a nucleotide of the other. Two molecules are said to be “minimally complementary” if they can hybridize to one another with sufficient stability to permit them to remain annealed to one another under at least conventional “low-stringency” conditions. Similarly, the molecules are said to be “complementary” if they can hybridize to one another with sufficient stability to permit them to remain annealed to one another under conventional “high-stringency” conditions. Conventional stringency conditions are described by Sambrook, et al., In: Molecular Cloning, A Laboratory Manual, 2nd Edition, Cold Spring Harbor Press, Cold Spring Harbor, N.Y. (1989), and by Haymes, et al. In: Nucleic Acid Hybridization, A Practical Approach, IRL Press, Washington, D.C. (1985), the entirety of which is herein incorporated by reference. Departures from complete complementarity are therefore permissible, as long as such departures do not completely preclude the capacity of the molecules to form a double-stranded structure. Thus, in order for an nucleic acid molecule or fragment of the present invention to serve as a primer or probe it need only be sufficiently complementary in sequence to be able to form a stable double-stranded structure under the particular solvent and salt concentrations employed.

[0065] Appropriate stringency conditions which promote DNA hybridization are, for example, 6.0× sodium chloride/sodium citrate (SSC) at about 45° C., followed by a wash of 2.0×SSC at 50° C., are known to those skilled in the art or can be found in Current Protocols in Molecular Biology, John Wiley & Sons, N.Y. (1989), 6.3.1-6.3.6. For example, the salt concentration in the wash step can be selected from a low stringency of about 2.0×SSC at 50° C. to a high stringency of about 0.2×SSC at 50° C. In addition, the temperature in the wash step can be increased from low stringency conditions at room temperature, about 22° C., to high stringency conditions at about 65° C. Both temperature and salt may be varied, or either the temperature or the salt concentration may be held constant while the other variable is changed.

[0066] In a preferred embodiment, a nucleic acid of the present invention will specifically hybridize to one or more of the nucleic acid molecules set forth in SEQ ID NO:1 through SEQ ID NO:43701 or complements thereof under moderately stringent conditions, for example, at about 2.0×SSC and about 65° C.

[0067] In a particularly preferred embodiment, a nucleic acid of the present invention will include those nucleic acid molecules that specifically hybridize to one or more of the nucleic acid molecules set forth in SEQ ID NO:1 through SEQ ID NO:43701 or complements thereof under high stringency conditions.

[0068] In one aspect of the present invention, the nucleic acid molecules of the present invention have one or more of the nucleic acid sequences set forth in SEQ ID NO:1 through SEQ ID NO:43701 or complements thereof. In another aspect of the present invention, one or more of the nucleic acid molecules of the present invention share between 100% and 90% sequence identity with one or more of the nucleic acid sequences set forth in SEQ ID NO: 1 through SEQ ID NO:43701 or complements thereof. In a further aspect of the present invention, one or more of the nucleic acid molecules of the present invention share between 100% and 95% sequence identity with one or more of the nucleic acid sequences set forth in SEQ ID NO: 1 through SEQ ID NO:43701 or complements thereof. In a more preferred aspect of the present invention, one or more of the nucleic acid molecules of the present invention share between 100% and 98% sequence identity with one or more of the nucleic acid sequences set forth in SEQ ID NO: 1 through SEQ ID NO:43701 or complements thereof. In an even more preferred aspect of the present invention, one or more of the nucleic acid molecules of the present invention share between 100% and 99% sequence identity with one or more of the sequences set forth in SEQ ID NO: 1 through SEQ ID NO:43701 or complements thereof. In a further, even more preferred aspect of the present invention, one or more of the nucleic acid molecules of the present invention exhibit 100% sequence identity with one or more nucleic acid molecules present within the cDNA libraries designated LIB3220. LIB3221, LIB3254, and LIB3255 (Monsanto Company, St. Louis, Mo., United States of America).

[0069] In a preferred embodiment of the present invention, a rice protein or fragment thereof of the present invention is a homologue of another plant protein. In another preferred embodiment of the present invention, a rice protein or fragment thereof of the present invention is a homologue of a fungal protein. In another preferred embodiment of the present invention, a rice protein or fragment thereof of the present invention is a homologue of mammalian protein. In another preferred embodiment of the present invention, a rice protein or fragment thereof of the present invention is a homologue of a bacterial protein. In another preferred embodiment of the present invention, a rice protein or fragment thereof of the present invention is a homologue of an algal protein. In another preferred embodiment of the present invention, a rice protein or fragment thereof of the present invention is a homologue of a maize protein. In another preferred embodiment of the present invention, a rice protein or fragment thereof of the present invention is a homologue of a soybean protein. In another preferred embodiment of the present invention, a rice protein or fragment thereof of the present invention is a homologue of a cotton protein. In another preferred embodiment of the present invention, a rice protein or fragment thereof of the present invention is a homologue of a wheat protein.

[0070] In a preferred embodiment of the present invention, the nucleic molecule of the present invention encodes a rice protein or fragment thereof where a rice protein or fragment thereof exhibits a BLAST probability score of greater than 1E-12, preferably a BLAST probability score of between about 1E-30 and about 1E-12, even more preferably a BLAST probability score of greater than 1E-30 with its homologue.

[0071] In another preferred embodiment of the present invention, the nucleic acid molecule encoding a rice protein or fragment thereof exhibits a % identity with its homologue of between about 25% and about 40%, more preferably of between about 40 and about 70%, even more preferably of between about 70% and about 90% and even more preferably between about 90% and 99%. In another preferred embodiment, of the present invention, a rice protein or fragment thereof exhibits a % identity with its homologue of 100%.

[0072] In a preferred embodiment of the present invention, the nucleic molecule of the present invention encodes a rice protein or fragment thereof where the rice protein exhibits a BLAST score of greater than 120, preferably a BLAST score of between about 1450 and about 120, even more preferably a BLAST score of greater than 1450 with its homologue.

[0073] Nucleic acid molecules of the present invention also include non-rice homologues. Preferred non-rice homologues are selected from the group consisting of alfalfa, Arabidopsis, barley, Brassica, broccoli, cabbage, citrus, cotton, garlic, oat, oilseed rape, onion, canola, flax, an ornamental plant, maize, pea, peanut, pepper, potato, rye, sorghum, soybean, strawberry, sugarcane, sugarbeet, tomato, wheat, poplar, pine, fir, eucalyptus, apple, lettuce, lentils, grape, banana, tea, turf grasses, sunflower, oil palm and Phaseolus.

[0074] The degeneracy of the genetic code, which allows different nucleic acid sequences to code for the same protein or peptide, is known in the literature. (U.S. Pat. No. 4,757,006, the entirety of which is herein incorporated by reference).

[0075] In an aspect of the present invention, one or more of the nucleic acid molecules of the present invention differ in nucleic acid sequence from those encoding a rice protein or fragment thereof in SEQ ID NO: 1 through SEQ ID NO: 43701 due to the degeneracy in the genetic code in that they encode the same protein but differ in nucleic acid sequence.

[0076] In another further aspect of the present invention, nucleic acid molecules of the present invention can comprise sequences, which differ from those encoding a protein or fragment thereof in SEQ ID NO: 1 through SEQ ID NO: 43701 due to fact that the different nucleic acid sequence encodes a protein having one or more conservative amino acid changes. It is understood that codons capable of coding for such conservative amino acid substitutions are known in the art.

[0077] It is well known in the art that one or more amino acids in a native sequence can be substituted with another amino acid(s), the charge and polarity of which are similar to that of the native amino acid, i.e., a conservative amino acid substitution, resulting in a silent change. Conserved substitutes for an amino acid within the native polypeptide sequence can be selected from other members of the class to which the naturally occurring amino acid belongs. Amino acids can be divided into the following four groups: (1) acidic amino acids, (2) basic amino acids, (3) neutral polar amino acids, and (4) neutral nonpolar amino acids. Representative amino acids within these various groups include, but are not limited to, (1) acidic (negatively charged) amino acids such as aspartic acid and glutamic acid; (2) basic (positively charged) amino acids such as arginine, histidine, and lysine; (3) neutral polar amino acids such as glycine, serine, threonine, cysteine, cystine, tyrosine, asparagine, and glutamine; and (4) neutral nonpolar (hydrophobic) amino acids such as alanine, leucine, isoleucine, valine, proline, phenylalanine, tryptophan, and methionine.

[0078] Conservative amino acid changes within the native polypeptides sequence can be made by substituting one amino acid within one of these groups with another amino acid within the same group. Biologically functional equivalents of the proteins or fragments thereof of the present invention can have 10 or fewer conservative amino acid changes, more preferably seven or fewer conservative amino acid changes, and most preferably five or fewer conservative amino acid changes. The encoding nucleotide sequence will thus have corresponding base substitutions, permitting it to encode biologically functional equivalent forms of the proteins or fragments of the present invention.

[0079] It is understood that certain amino acids may be substituted for other amino acids in a protein structure without appreciable loss of interactive binding capacity with structures such as, for example, antigent-binding regions of antibodies or binding sites on substrate molecules. Because it is the interactive capacity and nature of a protein that defines that protein's biological functional activity, certain amino acid sequence substitutions can be made in a protein sequence and, of course, its underlying DNA coding sequence and, nevertheless, obtain a protein with like properties. It is thus contemplated by the inventors that various changes may be made in the peptide sequences of the proteins or fragments of the present invention, or corresponding DNA sequences that encode said peptides, without appreciable loss of their biological utility or activity. It is understood that codons capable of coding for such amino acid changes are known in the art.

[0080] In making such changes, the hydropathic index of amino acids may be considered. The importance of the hydropathic amino acid index in conferring interactive biological function on a protein is generally understood in the art (Kyte and Doolittle, J. Mol. Biol. 157, 105-132 (1982), herein incorporated by reference in its entirety). It is accepted that the relative hydropathic character of the amino acid contributes to the secondary structure of the resultant protein, which in turn defines the interaction of the protein with other molecules, for example, enzymes, substrates, receptors, DNA, antibodies, antigens, and the like.

[0081] Each amino acid has been assigned a hydropathic index on the basis of its hydrophobicity and charge characteristics (Kyte and Doolittle, 1982); these are isoleucine (+4.5), valine (+4.2), leucine (+3.8), phenylalanine (+2.8), cysteine/cystine (+2.5), methionine (+1.9), alanine (+1.8), glycine (−0.4), threonine (−0.7), serine (−0.8), tryptophan (−0.9), tyrosine (−1.3), proline (−1.6), histidine (−3.2), glutamate (−3.5), glutamine (−3.5), aspartate (−3.5), asparagine (−3.5), lysine (−3.9), and arginine (−4.5).

[0082] In making such changes, the substitution of amino acids whose hydropathic indices are within ±2 is preferred, those which are within ±1 are particularly preferred, and those within ±0.5 are even more particularly preferred.

[0083] It is also understood in the art that the substitution of like amino acids can be made effectively on the basis of hydrophilicity. U.S. Pat. No. 4,554,101, incorporated herein by reference in its entirety, states that the greatest local average hydrophilicity of a protein, as govern by the hydrophilicity of its adjacent amino acids, correlates with a biological property of the protein.

[0084] As detailed in U.S. Pat. No. 4,554,101, the following hydrophilicity values have been assigned to amino acid residues: arginine (+3.0), lysine (+3.0), aspartate (+3.0±1), glutamate (+3.0±1), serine (+0.3), asparagine (+0.2), glutamine (+0.2), glycine (0), threonine (−0.4), proline (−0.5±1), alanine (−0.5), histidine (−0.5), cysteine (−1.0), methionine (−1.3), valine (−1.5), leucine (−1.8), isoleucine (−1.8), tyrosine (−2.3), phenylalanine (−2.5), and tryptophan (−3.4).

[0085] In making such changes, the substitution of amino acids whose hydrophilicity values are within ±2 is preferred, those which are within ±1 are particularly preferred, and those within ±0.5 are even more particularly preferred.

[0086] In a further aspect of the present invention, one or more of the nucleic acid molecules of the present invention differ in nucleic acid sequence from those encoding a rice protein or fragment thereof set forth in SEQ ID NO: 1 through SEQ ID NO: 43701 or fragment thereof due to the fact that one or more codons encoding an amino acid has been substituted for a codon that encodes a nonessential substitution of the amino acid originally encoded.

[0087] One aspect of the present invention concerns markers that include nucleic acid molecules SEQ ID NO: 1 through SEQ ID NO: 43701 or complements thereof or fragments of either that can act as markers or other nucleic acid molecules of the present invention that can act as markers. Genetic markers of the present invention include “dominant” or “codominant” markers “Codominant markers” reveal the presence of two or more alleles (two per diploid individual) at a locus. “Dominant markers” reveal the presence of only a single allele per locus. The presence of the dominant marker phenotype (e.g., a band of DNA) is an indication that one allele is present in either the homozygous or heterozygous condition. The absence of the dominant marker phenotype (e.g. absence of a DNA band) is merely evidence that “some other” undefined allele is present. In the case of populations where individuals are predominantly homozygous and loci are predominately dimorphic, dominant and codominant markers can be equally valuable. As populations become more heterozygous and multi-allelic, codominant markers often become more informative of the genotype than dominant markers. Marker molecules can be, for example, capable of detecting polymorphisms such as single nucleotide polymorphisms (SNPs).

[0088] SNPs are single base changes in genomic DNA sequence. They occur at greater frequency and are spaced with a greater uniformity throughout a genome than other reported forms of polymorphism. The greater frequency and uniformity of SNPs means that there is greater probability that such a polymorphism will be found near or in a genetic locus of interest than would be the case for other polymorphisms. SNPs are located in protein-coding regions and noncoding regions of a genome. Some of these SNPs may result in defective or variant protein expression (e.g., as a results of mutations or defective splicing). Analysis (genotyping) of characterized SNPs can require only a plus/minus assay rather than a lengthy measurement, permitting easier automation.

[0089] SNPs can be characterized using any of a variety of methods. Such methods include the direct or indirect sequencing of the site, the use of restriction enzymes (Botstein et al., Am. J. Hum. Genet. 32:314-331 (1980); Konieczny and Ausubel, Plant J. 4:403-410 (1993); both of which are herein incorporated by reference in their entirety), enzymatic and chemical mismatch assays (Myers et al., Nature 313:495-498 (1985), herein incorporated by reference in its entirety), allele-specific PCR (Newton et al., Nucl. Acids Res. 17:2503-2516 (1989); Wu et al., Proc. Natl. Acad. Sci. (U.S.A.) 86:2757-2760 (1989); both of which are herein incorporated by reference in their entirety), ligase chain reaction (Barany, Proc. Natl. Acad. Sci. (U.S.A.) 88:189-193 (1991), herein incorporated by reference in its entirety), single-strand conformation polymorphism analysis (Labrune et al., Am. J. Hum. Genet. 48: 1115-1120 (1991), herein incorporated by reference in its entirety), primer-directed nucleotide incorporation assays (Kuppuswami et al., Proc. Natl. Acad. Sci. USA 88:1143-1147 (1991), herein incorporated by reference in its entirety), dideoxy fingerprinting (Sarkar et al., Genomics 13:441-443 (1992), herein incorporated by reference in its entirety), solid-phase ELISA-based oligonucleotide ligation assays (Nikiforov et al., Nucl. Acids Res. 22:4167-4175 (1994), herein incorporated by reference in its entirety), oligonucleotide fluorescence-quenching assays (Livak et al., PCR Methods Appl. 4:357-362 (1995), herein incorporated by reference in its entirety), 5′-nuclease allele-specific hybridization TaqMan assay (Livak et al., Nature Genet. 9:341-342 (1995), herein incorporated by reference in its entirety), template-directed dye-terminator incorporation (TDI) assay (Chen and Kwok, Nucl. Acids Res. 25:347-353 (1997), herein incorporated by reference in its entirety), allele-specific molecular beacon assay (Tyagi et al., Nature Biotech. 16: 49-53 (1998), herein incorporated by reference in its entirety), PinPoint assay (Haff and Smirnov, Genome Res. 7: 378-388 (1997), herein incorporated by reference in its entirety) and dCAPS analysis (Neff et al., Plant J. 14:387-392 (1998), herein incorporated by reference in its entirety).

[0090] Additional markers, such as AFLP markers, RFLP markers and RAPD markers, can be utilized (Walton, Seed World 22-29 (July, 1993); Burow and Blake, Molecular Dissection of Complex Traits, 13-29, Paterson (ed.), CRC Press, New York (1988); both of which are herein incorporated by reference in their entirety). DNA markers can be developed from nucleic acid molecules using restriction endonucleases, the PCR and/or DNA sequence information. RFLP markers result from single base changes or insertions/deletions. These codominant markers are highly abundant in plant genomes, have a medium level of polymorphism and are developed by a combination of restriction endonuclease digestion and Southern blotting hybridization. CAPS are similarly developed from restriction nuclease digestion but only of specific PCR products. These markers are also codominant, have a medium level of polymorphism and are highly abundant in the genome. The CAPS result from single base changes and insertions/deletions.

[0091] Another marker type, RAPDs, are developed from DNA amplification with random primers and result from single base changes and insertions/deletions in plant genomes. They are dominant markers with a medium level of polymorphisms and are highly abundant. AFLP markers require using the PCR on a subset of restriction fragments from extended adapter primers. These markers are both dominant and codominant are highly abundant in genomes and exhibit a medium level of polymorphism.

[0092] SSRs require DNA sequence information. These codominant markers result from repeat length changes, are highly polymorphic and do not exhibit as high a degree of abundance in the genome as CAPS, AFLPs and RAPDs, SNPs also require DNA sequence information. These codominant markers result from single base substitutions. They are highly abundant and exhibit a medium of polymorphism (Rafalski et al., In: Nonmammalian Genomic Analysis, Birren and Lai (ed.), Academic Press, San Diego, Calif., pp. 75-134 (1996), herein incorporated by reference in its entirety). It is understood that a nucleic acid molecule of the present invention may be used as a marker.

[0093] A PCR probe is a nucleic acid molecule capable of initiating a polymerase activity while in a double-stranded structure with another nucleic acid. Various methods for determining the structure of PCR probes and PCR techniques exist in the art. Computer generated searches using programs such as Primer3 (available on the worldwide web at: genome.wi.mit.edu/cgi-bin/primer/primer3.cgi), STSPipeline (available on the worldwide web at: genome.wi.mit.edu/cgi-bin/www-STS_Pipeline), or GeneUp (Pesole et al., BioTechniques 25:112-123 (1998) the entirety of which is herein incorporated by reference), for example, can be used to identify potential PCR primers.

[0094] It is understood that a fragment of one or more of the nucleic acid molecules of the present invention may be a probe and specifically a PCR probe.

[0095] (b) Protein and Peptide Molecules

[0096] A class of agents comprises one or more of the protein or peptide molecules encoded by SEQ ID NO: 1 through SEQ ID NO:43701 or one or more of the protein or fragment thereof or peptide molecules encoded by other nucleic acid agents of the present invention. As used herein, the term “protein molecule” or “peptide molecule” includes any molecule that comprises five or more amino acids. It is well know in the art that proteins may undergo modification, including post-translational modifications, such as, but not limited to, disulfide bond formation, glycosylation, phosphorylation, or oligomerization. Thus, as used herein, the term “protein molecule” or “peptide molecule” includes any protein molecule that is modified by any biological or non-biological process. The terms “amino acid” and “amino acids” refer to all naturally occurring L-amino acids. This definition is meant to include norleucine, ornithine, homocysteine, and homoserine.

[0097] One or more of the protein or fragment of peptide molecules may be produced via chemical synthesis, or more preferably, by expression in a suitable bacterial or eukaryotic host. Suitable methods for expression are described by Sambrook, et al., (In: Molecular Cloning, A Laboratory Manual, 2nd Edition, Cold Spring Harbor Press, Cold Spring Harbor, N.Y. (1989)), or similar texts.

[0098] A “protein fragment” is a peptide or polypeptide molecule whose amino acid sequence comprises a subset of the amino acid sequence of that protein. A protein or fragment thereof that comprises one or more additional peptide regions not derived from that protein is a “fusion” protein. Such molecules may be derivatized to contain carbohydrate or other moieties (such as keyhole limpet hemocyanin, etc.). Fusion protein or peptide molecule of the present invention are preferably produced via recombinant means.

[0099] Another class of agents comprise protein or peptide molecules encoded by SEQ ID NO: 1 through SEQ ID NO:43701 or complements thereof or, fragments or fusions thereof in which non-essential, or not relevant, amino acid residues have been added, replaced, or deleted. An example of such a homologue is the homologue protein of all non- rice plant species, including but not limited to alfalfa, Arabidopsis, barley, Brassica, broccoli, cabbage, citrus, cotton, garlic, oat, oilseed rape, onion, canola, flax, maize, an ornamental plant, pea, peanut, pepper, potato, rye, sorghum, soybean, strawberry, sugarcane, sugarbeet, tomato, wheat, poplar, pine, fir, eukalyptus, apple, lettuce, peas, lentils, grape, banana, tea, turf grasses, etc. Particularly preferred non-rice plants to utilize for the isolation of homologues would include alfalfa, Arabidopsis, barley, cotton, oat, oilseed rape, corn, canola, ornamentals, soybean, sugarcane, sugarbeet, tomato, potato, wheat, and turf grasses. Such a homologue can be obtained by any of a variety of methods. Most preferably, as indicated above, one or more of the disclosed sequences (SEQ ID NO: 1 through SEQ ID NO:43701 or complements thereof) will be used to define a pair of primers that may be used to isolate the homologue-encoding nucleic acid molecules from any desired species. Such molecules can be expressed to yield homologues by recombinant means.

[0100] (c) Antibodies

[0101] One aspect of the present invention concerns antibodies, single-chain antigen binding molecules, or other proteins that specifically bind to one or more of the protein or peptide molecules of the present invention and their homologues, fusions or fragments. Such antibodies may be used to quantitatively or qualitatively detect the protein or peptide molecules of the present invention. As used herein, an antibody or peptide is said to “specifically bind” to a protein or peptide molecule of the present invention if such binding is not competitively inhibited by the presence of non-related molecules.

[0102] Nucleic acid molecules that encode all or part of the protein of the present invention can be expressed, via recombinant means, to yield protein or peptides that can in turn be used to elicit antibodies that are capable of binding the expressed protein or peptide. Such antibodies may be used in immunoassays for that protein. Such protein-encoding molecules, or their fragments may be a “fusion” molecule (i.e., a part of a larger nucleic acid molecule) such that, upon expression, a fusion protein is produced. It is understood that any of the nucleic acid molecules of the present invention may be expressed, via recombinant means, to yield proteins or peptides encoded by these nucleic acid molecules.

[0103] The antibodies that specifically bind proteins and protein fragments of the present invention may be polyclonal or monoclonal, and may comprise intact immunoglobulins, or antigen binding portions of immunoglobulins (such as (F(ab′), F(ab′)₂) fragments, or single-chain immunoglobulins producible, for example, via recombinant means). It is understood that practitioners are familiar with the standard resource materials which describe specific conditions and procedures for the construction, manipulation and isolation of antibodies (see, for example, Harlow and Lane, In Antibodies: A Laboratory Manual, Cold Spring Harbor Press, Cold Spring Harbor, N.Y. (1988), the entirety of which is herein incorporated by reference).

[0104] Murine monoclonal antibodies are particularly preferred. BALB/c mice are preferred for this purpose, however, equivalent strains may also be used. The animals are preferably immunized with approximately 25 μg of purified protein (or fragment thereof) that has been emulsified a suitable adjuvant (such as TiterMax adjuvant (Vaxcel, Norcross, Ga.)). Immunization is preferably conducted at two intramuscular sites, one intraperitoneal site, and one subcutaneous site at the base of the tail. An additional i.v. injection of approximately 25 μg of antigen is preferably given in normal saline three weeks later. After approximately 11 days following the second injection, the mice may be bled and the blood screened for the presence of anti-protein or peptide antibodies. Preferably, a direct binding Enzyme-Linked Immunoassay (ELISA) is employed for this purpose.

[0105] More preferably, the mouse having the highest antibody titer is given a third i.v. injection of approximately 25 μg of the same protein or fragment. The splenic leukocytes from this animal may be recovered 3 days later, and are then permitted to fuse, most preferably, using polyethylene glycol, with cells of a suitable myeloma cell line (such as, for example, the P3X63Ag8.653 myeloma cell line). Hybridoma cells are selected by culturing the cells under “HAT” (hypoxanthine-aminopterin-thymine) selection for about one week. The resulting clones may then be screened for their capacity to produce monoclonal antibodies (“mAbs), preferably by direct ELISA.

[0106] In one embodiment, anti-protein or peptide monoclonal antibodies are isolated using a fusion of a protein, protein fragment, or peptide of the present invention, or conjugate of a protein, protein fragment, or peptide of the present invention, as immunogens. Thus, for example, a group of mice can be immunized using a fusion protein emulsified in Freund's complete adjuvant (e.g. approximately 50 μg of antigen per immunization). At three week intervals, an identical amount of antigen is emulsified in Freund's incomplete adjuvant and used to immunize the animals. Ten days following the third immunization, serum samples are taken and evaluated for the presence of antibody. If antibody titers are too low, a fourth booster can be employed. Polysera capable of binding the protein or peptide can also be obtained using this method.

[0107] In a preferred procedure for obtaining monoclonal antibodies, the spleens of the above-described immunized mice are removed, disrupted, and immune splenocytes are isolated over a ficoll gradient. The isolated splenocytes are fused, using polyethylene glycol with BALB/c-derived HGPRT (hypoxanthine guanine phosphoribosyl transferase) deficient P3x63xAg8.653 plasmacytoma cells. The fused cells are plated into 96-well microtiter plates and screened for hybridoma fusion cells by their capacity to grow in culture medium supplemented with hypothanthine, aminopterin and thymidine for approximately 2-3 weeks.

[0108] Hybridoma cells that arise from such incubation are preferably screened for their capacity to produce an immunoglobulin that binds to a protein of interest. An indirect ELISA may be used for this purpose. In brief, the supernatants of hybridomas are incubated in microtiter wells that contain immobilized protein. After washing, the titer of bound immunoglobulin can be determined using, for example, a goat anti-mouse antibody conjugated to horseradish peroxidase. After additional washing, the amount of immobilized enzyme is determined (for example through the use of a chromogenic substrate). Such screening is performed as quickly as possible after the identification of the hybridoma in order to ensure that a desired clone is not overgrown by non-secreting neighbors. Desirably, the fusion plates are screened several times since the rates of hybridoma growth vary. In a preferred sub-embodiment, a different antigenic form of immunogen may be used to screen the hybridoma. Thus, for example, the splenocytes may be immunized with one immunogen, but the resulting hybridomas can be screened using a different immunogen. It is understood that any of the protein or peptide molecules of the present invention may be used to raise antibodies.

[0109] As discussed below, such antibody molecules or their fragments may be used for diagnostic purposes. Where the antibodies are intended for diagnostic purposes, it may be desirable to derivatize them, for example with a ligand group (such as biotin) or a detectable marker group (such as a fluorescent group, a radioisotope or an enzyme).

[0110] The ability to produce antibodies that bind the protein or peptide molecules of the present invention permits the identification of mimetic compounds of those molecules. A “mimetic compound” is a compound that is not that compound, or a fragment of that compound, but which nonetheless exhibits an ability to specifically bind to antibodies directed against that compound.

[0111] It is understood that any of the agents of the present invention can be substantially purified and/or be biologically active and/or recombinant.

[0112] Uses of the Agents of the Invention

[0113] The nucleic acid molecules and fragments thereof of the present invention from the cDNA libraries LIB3220 and LIB3221 are isolated from rice panicles and flower tissue, which are collected from plants when panicles are just opening and when panicles have ¾ of florets open. The ESTs of the present invention can enable the acquisition of, including but not limited to, genes involved in floral development, reproduction, female reproduction and development (ovary/ovule development, stigma development and style development), pollen production and development, seed production, glume development, lemma development, palea development, and pathogen resistance or susceptibility, therefore, the ESTs of the present invention will find great use in the isolation of a variety of agronomically significant genes, including but not limited to, non-regulatory genes and genes that regulate microsporogenesis, meiosis, cell cycle, signal transduction, cell-cell communication, carotenoids, floral biogenesis, embryogenesis, protein, amino acids, sterols, oils, minerals, isoflavones, saponins, vitamins, tocopherols, antinutrient components, carbohydrates, starch metabolism, and seed composition and function. Such genes are associated with plant growth, grain quality and yield, and could also serve as links in important developmental, metabolic, and catabolic pathways. Libraries from this tissue can enable the acquisition of a variety of agronomically significant genes involved in the synthesis and catabolism of commercially important traits. The ESTs of the present invention can also enable the acquisition of promoters and cis-regulatory elements which will be useful to express agronomically significant genes in these tissues and/or other tissues. The ESTs of the present invention can also enable the acquisition of molecular markers, which can be used in, including but not limited to, breeding schemes, genetic and molecular mapping, and cloning of agronomically significant genes.

[0114] The nucleic acid molecules and fragments thereof of the present invention from the cDNA libraries LIB3254 and LIB3255 are generated from rice roots. Roots play a critical role in major vegetative organs which supply water, minerals, and nutrients essential for plant growth and development, therefore, the ESTs of the present invention will find great use in the isolation of a variety of agronomically significant genes, including but not limited to genes that are necessary for absorption, anchorage, storage, transport, propagation, production and secretion of root exudates, chemicals, or compounds, and resistance to entry and infection of plant pathogens. Such genes are associated with plant growth, grain quality and yield, and could also serve as links in important developmental, metabolic, and catabolic pathways. Libraries from this tissue can enable the acquisition of a variety of agronomically significant genes involved in the synthesis and catabolism of commercially important traits. The ESTs of the present invention also can enable the acquisition of promoters and cis-regulatory elements which will be useful to express agronomically significant genes in these tissues and/or other tissues. The ESTs of the present invention can also allow the acquisition of genes that confer resistance to root-infecting plant pathogens and genes that prevent entry of plant pathogens that infect different plant parts. The ESTs of the present invention can also enable the acquisition of genes involved in the production and secretion of exudates, compounds, and chemicals that affect other plants' and other organisms' growth and development. The ESTs of the present invention also can enable the acquisition of molecular markers, which can be used in, including but not limited to, breeding schemes, genetic and molecular mapping, and cloning of agronomically significant genes.

[0115] Nucleic acid molecules and fragments thereof of the present invention may be employed to obtain other nucleic acid molecules. Such molecules include the nucleic acid molecules of other plants or other organisms (e.g., alfalfa, rice, potato, cotton, oat, rye, barley, maize, wheat, Arabidopsis, Brassica, etc.) including the nucleic acid molecules that encode, in whole or in part, protein homologues of other plant species or other organisms, and sequences of genetic elements such as promoters and transcriptional regulatory elements. Such molecules can be readily obtained by using the above-described nucleic acid molecules or fragments thereof to screen cDNA or genomic libraries obtained from such plant species. Methods for forming such libraries are well known in the art. Such homologue molecules may differ in their nucleotide sequences from those found in one or more of SEQ ID NO:1 through SEQ ID NO:43701 or complements thereof because complete complementarity is not needed for stable hybridization. The nucleic acid molecules of the present invention therefore also include molecules that, although capable of specifically hybridizing with the nucleic acid molecules may lack “complete complementarity.”

[0116] Any of a variety of methods may be used to obtain one or more of the above-described nucleic acid molecules (Zamechik et al., Proc. Natl. Acad. Sci. (U.S.A.) 83:4143-4146 (1986); Goodchild et al., Proc. Natl. Acad. Sci. (U.S.A.) 85:5507-5511 (1988); Wickstrom et al., Proc. Natl. Acad. Sci. (U.S.A.) 85:1028-1032 (1988); Holt, et al., Molec. Cell. Biol. 8:963-973 (1988); Gerwirtz, et al., Science 242:1303-1306 (1988); Anfossi, et al., Proc. Natl. Acad. Sci. (U.S.A.) 86:3379-3383 (1989); Becker, et al., EMBO J. 8:3685-3691 (1989); all of which are herein incorporated by reference in their entirety). Automated nucleic acid synthesizers may be employed for this purpose. In lieu of such synthesis, the disclosed nucleic acid molecules may be used to define a pair of primers that can be used with the polymerase chain reaction (Mullis, et al., Cold Spring Harbor Symp. Quant. Biol. 51:263-273 (1986); Erlich et al., EP 50,424; EP 84,796, EP 258,017, EP 237,362; Mullis, EP 201,184; Mullis et al., U.S. Pat. No. 4,683,202; Erlich, U.S. Pat. No. 4,582,788; and Saiki, R. et al., U.S. Pat. No. 4,683,194, all of which are hereby incorporated by reference in their entirety) to amplify and obtain any desired nucleic acid molecule or fragment.

[0117] Promoter sequence(s) and other genetic elements including but not limited to transcriptional regulatory elements associated with one or more of the disclosed nucleic acid sequences can also be obtained using the disclosed nucleic acid sequences provided herein.

[0118] In one embodiment, such sequences are obtained by incubating EST nucleic acid molecules or preferably fragments thereof with members of genomic libraries (e.g. rice, cotton, wheat, maize and soybean) and recovering clones that hybridize to the EST nucleic acid molecule or fragment thereof. In a second embodiment, methods of “chromosome walking,” or inverse PCR may be used to obtain such sequences (Frohman, et al., Proc. Natl. Acad. Sci. (U.S.A.) 85:8998-9002 (1988); Ohara, et al., Proc. Natl. Acad. Sci. (U.S.A.) 86: 5673-5677 (1989); Pang et al., Biotechniques, 22(6); 1046-1048 (1977); Huang et al., Methods Mol. Biol. 69: 89-96 (1977); Hartl et al., Methods Mol. Biol. 58: 293-301 (1996), all of which are hereby incorporated by reference in their entirety). In one embodiment, the disclosed nucleic acid molecules are used to identify cDNAs whose analogous genes contain promoters with desirable expression patterns. The nucleic acid molecules isolated from the library of the present invention are used to isolate promoters of tissue-enhanced, tissue-specific, developmentally- or environmentally-regulated expression profiles. Isolation and functional analysis of the 5′ flanking promoter sequences of these genes from genomic libraries, for example, using genomic screening methods and PCR techniques would result in the isolation of useful promoters and transcriptional regulatory elements. These methods are known to those of skill in the art and have been described (See for example Birren et al., Genome Analysis:Analyzing DNA, 1, (1997), Cold Spring Harbor Laboratory Press, Cold Spring Harbor, N.Y., the entirety of which is herein incorporated by reference).

[0119] Promoters obtained utilizing the nucleic acid molecules of the present invention could also be modified to affect their control characteristics. Examples of such modifications would include but are not limited to enhancer sequences as reported by Kay et al., Science 236:1299 (1987), herein incorporated by reference in its entirety. Such genetic elements could be used to enhance gene expression of new and existing traits for crop improvements.

[0120] The nucleic acid molecules of the present invention may be used to isolate promoters of tissue enhanced tissue specific, cell-specific, cell-type, developmentally or environmentally regulated expression profiles. Isolation and functional analysis of the 5′ flanking promoter sequences of these genes from genomic libraries, for example, using genomic screening methods and PCR techniques would result in the isolation of useful promoters and transcriptional regulatory elements. These methods are known to those of skill in the art and have been described (See, for example, Birren et. al., Genome Analysis: Analyzing DNA, 1, Cold Spring Harbor Laboratory Press, Cold Spring Harbor, N.Y. (1997), herein incorporated by reference in its entirety). Promoters obtained utilizing the nucleic acid molecules of the present invention could also be modified to affect their control characteristics. Examples of such modifications would include but are not limited to enhancer sequences as reported by Kay, et al Science 236:1299 (1987), herein incorporated reference in its entirety. Such genetic elements could be used to enhance gene expression of new and existing traits for crop improvements.

[0121] In an aspect of the present invention, one or more of the nucleic molecules of the present invention are used to determine whether a plant (preferably rice, corn, cotton, soybean and wheat) has a mutation affecting the level (i.e., the concentration of mRNA in a sample, etc.) or pattern (i.e., the kinetics of expression, rate of decomposition, stability profile, etc.) of the expression encoded in part or whole by one or more of the nucleic acid molecules of the present invention (collectively, the “Expression Response” of a cell or tissue). As used herein, the Expression Response manifested by a cell or tissue is said to be “altered” if it differs from the Expression Response of cells or tissues of plants not exhibiting the phenotype. To determine whether a Expression Response is altered, the Expression Response manifested by the cell or tissue of the plant exhibiting the phenotype is compared with that of a similar cell or tissue sample of a plant not exhibiting the phenotype. As will be appreciated, it is not necessary to re-determine the Expression Response of the cell or tissue sample of plants not exhibiting the phenotype each time such a comparison is made; rather, the Expression Response of a particular plant may be compared with previously obtained values of normal plants. As used herein, the phenotype of the organism is any of one or more characteristics of an organism (e.g. disease resistance, pest tolerance, environmental tolerance, male sterility, yield, quality improvements, etc.). A change in genotype or phenotype may be transient or permanent. Also as used herein, a tissue sample is any sample that comprises more than one cell. In a preferred aspect, a tissue sample comprises cells that share a common characteristic (e.g. derived from leaf, root, or pollen etc).

[0122] In one sub-aspect, such an analysis is conducted by determining the presence and/or identity of polymorphism(s) by one or more of the nucleic acid molecules of the present invention and more specifically, one or more of the EST nucleic acid molecules or fragments thereof which are associated with phenotype, or a predisposition to phenotype.

[0123] Any of a variety of molecules can be used to identify such polymorphism(s). In one embodiment, one or more of the EST nucleic acid molecules (or a sub-fragment thereof) may be employed as a marker nucleic acid molecule to identify such polymorphism(s). Alternatively, such polymorphisms can be detected through the use of a marker nucleic acid molecule or a marker protein that is genetically linked to (i.e., a polynucleotide that co-segregates with) such polymorphism(s).

[0124] In an alternative embodiment, such polymorphisms can be detected through the use of a marker nucleic acid molecule that is physically linked to such polymorphism(s). For this purpose, marker nucleic acid molecules comprising a nucleotide sequence of a polynucleotide located within 1 mb of the polymorphism(s), and more preferably within 100 kb of the polymorphism(s), and most preferably within 10 kb of the polymorphism(s) can be employed.

[0125] The genomes of animals and plants naturally undergo spontaneous mutation in the course of their continuing evolution (Gusella, Ann. Rev. Biochem. 55:831-854 (1986)). A “polymorphism” is a variation or difference in the sequence of the gene or its flanking regions that arises in some of the members of a species. The variant sequence and the “original” sequence co-exist in the species' population. In some instances, such co-existence is in stable or quasi-stable equilibrium.

[0126] A polymorphism is thus said to be “allelic,” in that, due to the existence of the polymorphism, some members of a species may have the original sequence (i.e., the original “allele”) whereas other members may have the variant sequence (i.e., the variant “allele”). In the simplest case, only one variant sequence may exist, and the polymorphism is thus said to be di-allelic. In other cases, the species' population may contain multiple alleles, and the polymorphism is termed tri-allelic, etc. A single gene may have multiple different unrelated polymorphisms. For example, it may have a di-allelic polymorphism at one site, and a multi-allelic polymorphism at another site.

[0127] The variation that defines the polymorphism may range from a single nucleotide variation to the insertion or deletion of extended regions within a gene. In some cases, the DNA sequence variations are in regions of the genome that are characterized by short tandem repeats (STRs) that include tandem di- or tri-nucleotide repeated motifs of nucleotides. Polymorphisms characterized by such tandem repeats are referred to as “variable number tandem repeat” (“VNTR”) polymorphisms. VNTRs have been used in identity analysis (Weber, U.S. Pat. No. 5,075,217; Armour, et al., FEBS Lett. 307:113-115 (1992); Jones, et al., Eur. J. Haematol. 39:144-147 (1987); Horn, et al., PCT Application WO91/14003; Jeffreys, European Patent Application 370,719; Jeffreys, U.S. Pat. No. 5,699,082; Jeffreys. et al., Amer. J. Hum. Genet. 39:11-24 (1986); Jeffreys. et al., Nature 316:76-79 (1985); Gray, et al., Proc. R. Acad. Soc. Lond. 243:241-253 (1991); Moore, et al., Genomics 10:654-660 (1991); Jeffreys, et al., Anim. Genet. 18:1-15 (1987); Hillel, et al., Anim. Genet. 20:145-155 (1989); Hillel, et al., Genet. 124:783-789 (1990), all of which are herein incorporated by reference in their entirety).

[0128] The detection of polymorphic sites in a sample of DNA may be facilitated through the use of nucleic acid amplification methods. Such methods specifically increase the concentration of polynucleotides that span the polymorphic site, or include that site and sequences located either distal or proximal to it. Such amplified molecules can be readily detected by gel electrophoresis or other means.

[0129] The most preferred method of achieving such amplification employs the polymerase chain reaction (“PCR”) (Mullis, et al., Cold Spring Harbor Symp. Quant. Biol. 51:263-273 (1986); Erlich, et al., European Patent Appln. 50,424; European Patent Appln. 84,796, European Patent Application 258,017, European Patent Appln. 237,362; Mullis, European Patent Appln. 201,184; Mullis, et al., U.S. Pat. No. 4,683,202; Erlich., U.S. Pat. No. 4,582,788; and Saiki, et al., U.S. Pat. No. 4,683,194, all of which are herein incorporated by reference), using primer pairs that are capable of hybridizing to the proximal sequences that define a polymorphism in its double-stranded form.

[0130] In lieu of PCR, alternative methods, such as the “Ligase Chain Reaction” (“LCR”) maybe used (Barany, Proc. Natl. Acad. Sci. (U.S.A.) 88:189-193 (1991), the entirety of which is herein incorporated by reference). LCR uses two pairs of oligonucleotide probes to exponentially amplify a specific target. The sequences of each pair of oligonucleotides is selected to permit the pair to hybridize to abutting sequences of the same strand of the target. Such hybridization forms a substrate for a template-dependent ligase. As with PCR, the resulting products thus serve as a template in subsequent cycles and an exponential amplification of the desired sequence is obtained.

[0131] LCR can be performed with oligonucleotides having the proximal and distal sequences of the same strand of a polymorphic site. In one embodiment, either oligonucleotide will be designed to include the actual polymorphic site of the polymorphism. In such an embodiment, the reaction conditions are selected such that the oligonucleotides can be ligated together only if the target molecule either contains or lacks the specific nucleotide that is complementary to the polymorphic site present on the oligonucleotide. Alternatively, the oligonucleotides may be selected such that they do not include the polymorphic site (see, Segev, PCT Application WO 90/01069, the entirety of which is herein incorporated by reference).

[0132] The “Oligonucleotide Ligation Assay” (“OLA”) may alternatively be employed (Landegren, et al., Science 241:1077-1080 (1988), herein incorporated by reference in its entirety). The OLA protocol uses two oligonucleotides which are designed to be capable of hybridizing to abutting sequences of a single strand of a target. OLA, like LCR, is particularly suited for the detection of point mutations. Unlike LCR, however, OLA results in “linear” rather than exponential amplification of the target sequence.

[0133] Nickerson, et al. have described a nucleic acid detection assay that combines attributes of PCR and OLA (Nickerson, et al., Proc. Natl. Acad. Sci. (U.S.A.) 87:8923-8927 (1990), the entirety of which is herein incorporated by reference). In this method, PCR is used to achieve the exponential amplification of target DNA, which is then detected using OLA. In addition to requiring multiple, and separate, processing steps, one problem associated with such combinations is that they inherit all of the problems associated with PCR and OLA.

[0134] Schemes based on ligation of two (or more) oligonucleotides in the presence of nucleic acid having the sequence of the resulting “di-oligonucleotide”, thereby amplifying the di-oligonucleotide, are also known (Wu, et al, Genomics 4:560 (1989), the entirety of which is herein incorporated by reference), and may be readily adapted to the purposes of the present invention.

[0135] Other known nucleic acid amplification procedures, such as allele-specific oligomers, branched DNA technology, transcription-based amplification systems, or isothermal amplification methods may also be used to amplify and analyze such polymorphisms (Malek, et al., U.S. Pat. No. 5,130,238; Davey, et al., European Patent Application 329,822; Schuster et al., U.S. Pat. No. 5,169,766; Miller, et al., PCT Application WO 89/06700; Kwoh, et al., Proc. Natl. Acad. Sci. (U.S.A.) 86:1173-1177 (1989); Gingeras, et al., PCT Application WO 88/10315; Walker, et al., Proc. Natl. Acad. Sci. (U.S.A.) 89:392-396 (1992), all of which are herein incorporated by reference in their entirety).

[0136] The identification of a polymorphism can be determined in a variety of ways. By correlating the presence or absence of it in a plant with the presence or absence of a phenotype, it is possible to predict the phenotype of that plant. If a polymorphism creates or destroys a restriction endonuclease cleavage site, or if it results in the loss or insertion of DNA (e.g., a VNTR polymorphism), it will alter the size or profile of the DNA fragments that are generated by digestion with that restriction endonuclease. As such, individuals that possess a variant sequence can be distinguished from those having the original sequence by restriction fragment analysis. Polymorphisms that can be identified in this manner are termed “restriction fragment length polymorphisms” (“RFLPs”). RFLPs have been widely used in human and plant genetic analyses (Glassberg, UK Patent Application 2135774; Skolnick, et al., Cytogen. Cell Genet. 32:58-67 (1982); Botstein, et al., Ann. J. Hum. Genet. 32:314-331 (1980); Fischer, et al. (PCT Application WO90/13668); Uhlen, PCT Application WO90/11369).

[0137] Polymorphisms can also be identified by Single Strand Conformation Polymorphism (SSCP) analysis. The SSCP technique is a method capable of identifying most sequence variations in a single strand of DNA, typically between 150 and 250 nucleotides in length (Elles, Methods in Molecular Medicine: Molecular Diagnosis of Genetic Diseases, Humana Press (1996); Orita et al., Genomics 5: 874-879 (1989); both of which are herein incorporated by reference in their entirety). Under denaturing conditions a single strand of DNA will adopt a conformation that is uniquely dependent on its sequence conformation. This conformation usually will be different, even if only a single base is changed. Most conformations have been reported to alter the physical configuration or size sufficiently to be detectable by electrophoresis. A number of protocols have been described for SSCP including, but not limited to Lee et al., Anal. Biochem. 205: 289-293 (1992), the entirety of which is herein incorporated by reference; Suzuki et al., Anal. Biochem. 192: 82-84 (1991), the entirety of which is herein incorporated by reference; Lo et al., Nucleic Acids Research 20: 1005-1009 (1992), the entirety of which is herein incorporated by reference; Sarkar et al., Genomics 13: 441-443 (1992), the entirety of which is herein incorporated by reference). It is understood that one or more of the nucleic acids of the present invention, may be utilized as markers or probes to detect polymorphisms by SSCP analysis.

[0138] Polymorphisms may also be found using a DNA fingerprinting technique called amplified fragment length polymorphism (AFLP), which is based on the selective PCR amplification of restriction fragments from a total digest of genomic DNA to profile that DNA. Vos, et al., Nucleic Acids Res. 23:4407-4414 (1995), the entirety of which is herein incorporated by reference. This method allows for the specific co-amplification of high numbers of restriction fragments, which can be visualized by PCR without knowledge of the nucleic acid sequence.

[0139] AFLP employs basically three steps. Initially, a sample of genomic DNA is cut with restriction enzymes and oligonucleotide adapters are ligated to the restriction fragments of the DNA. The restriction fragments are then amplified using PCR by using the adapter and restriction sequence as target sites for primer annealing. The selective amplification is achieved by the use of primers that extend into the restriction fragments, amplifying only those fragments in which the primer extensions match the nucleotide flanking the restriction sites. These amplified fragments are then visualized on a denaturing polyacrylamide gel.

[0140] AFLP analysis has been performed on Salix (Beismann, et al., Mol. Ecol. 6:989-993 (1997), herein incorporated by reference in its entirety); Acinetobacter (Janssen, et al., Int. J. Syst. Bacteriol 47:1179-1187 (1997), herein incorporated by reference in its entirety), Aeromonas popoffi (Huys, et al., Int. J. Syst. Bacteriol. 47:1165-1171 (1997), herein incorporated by reference in its entirety), rice (McCouch, et al., Plant Mol. Biol. 35:89-99 (1997); Nandi, et al., Mol. Gen. Genet. 255:1-8 (1997); Cho, et al., Genome 39:373-378 (1996), all of which are herein incorporated by reference in their entirety), barley (Hordeum vulgare) (Simons, et al, Genomics 44:61-70 (1997); Waugh, et al., Mol. Gen. Genet. 255:311-321 (1997); Qi, et al., Mol. Gen Genet. 254:330-336 (1997); Becker, et al., Mol. Gen. Genet. 249:65-73 (1995), all of which are herein incorporated by reference in their entirety), potato (Van der Voort, et al., Mol. Gen. Genet. 255:438-447 (1997); Meksem, et al., Mol. Gen. Genet. 249:74-81 (1995), both of which are herein incorporated by reference in their entirety), Phytophthora infestans (Van der Lee, et al., Fungal Genet. Biol. 21:278-291 (1997), herein incorporated by reference in its entirety), Bacillus anthracis (Keim, et al., J. Bacteriol. 1 79:818-824 (1997), herein incorporated by reference in its entirety), Astragalus cremnophylax (Travis, et al., Mol. Ecol. 5:735-745 (1996), herein incorporated by reference in its entirety), Arabidopsis (Cnops, et al., Mol. Gen. Genet. 253:32-41 (1996), herein incorporated by reference in its entirety), Escherichia coli (Lin, et al., Nucleic Acids Res. 24:3649-3650 (1996), herein incorporated by reference in its entirety), Aeromonas (Huys, et al., Int. J. Syst. Bacteriol. 46:572-580 (1996), herein incorporated by reference in its entirety), nematode (Folkertsma, et al., Mol. Plant Microbe Interact. 9:47-54 (1996), herein incorporated by reference in its entirety), tomato (Thomas, et al., Plant J 8:785-794 (1995), herein incorporated by reference in its entirety), and human (Latorra, et al., PCR Methods Appl. 3:351-358 (1994), herein incorporated by reference in its entirety). AFLP analysis has also been used for fingerprinting mRNA (Money, et al., Nucleic Acids Res. 24:2616-2617 (1996); Bachem, et al., Plant J. 9:745-753 (1996), both of which are herein incorporated by reference in their entirety). It is understood that one or more of the nucleic acids of the present invention, may be utilized as markers or probes to detect polymorphisms by AFLP analysis for fingerprinting mRNA.

[0141] Polymorphisms may also be found using random amplified polymorphic DNA (RAPD) (Williams et al., Nucl. Acids Res. 18: 6531-6535 (1990), herein incorporated by reference in its entirety) and cleaveable amplified polymorphic sequences (CAPS) (Lyamichev et al., Science 260: 778-783 (1993), herein incorporated by reference in its entirety). It is understood that one or more of the nucleic acids of the present invention, may be utilized as markers or probes to detect polymorphisms by RAPD or CAPS analysis.

[0142] Polymorphisms are useful, through linkage analysis, to define the genetic distances or physical distances between polymorphic traits. A physical map or ordered array of genomic DNA fragments in the desired region containing the gene may be used to characterize and isolate genes corresponding to desirable traits. For this purpose, yeast artificial chromosomes (YACs), bacterial artificial chromosomes (BACs), and cosmids are appropriate vectors for cloning large segments of DNA molecules. Although fewer clones are needed to make a contig for a specific genomic region by using YACs (Agyare et al., Genome Res. 7: 1-9 (1997); James et al., Genomics 32: 425-430 (1996), both of which are herein incorporated by reference in their entirety), chimerism in the inserted DNA fragment can arise. Cosmids are convenient for handling smaller-size DNA molecules and may be used for transformation in developing transgenic plants. BACs also carry DNA fragments and are less prone to chimerism.

[0143] Through genetic mapping, a fine scale linkage map can be developed using DNA markers and, then, a genomic DNA library of large-sized fragments can be screened with molecular markers linked to the desired trait. Molecular markers are advantageous for agronomic traits that are otherwise difficult to tag, such as resistance to pathogens, insects and nematodes, tolerance to abiotic stress, quality parameters and quantitative traits such as high yield potential.

[0144] The essential requirements for marker-assisted selection in a plant breeding program are: (1) the marker(s) should co-segregate or be closely linked with the desired trait; (2) an efficient means of screening large populations for the molecular marker(s) should be available; and (3) the screening technique should have high reproducibility across laboratories and preferably be economical to use and be user-friendly.

[0145] The genetic linkage of marker molecules can be established by a gene mapping model such as, without limitation, the flanking marker model reported by Lander and Botstein, Genetics 121:185-199 (1989) and the interval mapping, based on maximum likelihood methods described by Lander and Botstein, Genetics 121:185-199 (1989) and implemented in the software package MAPMAKER/QTL (Lincoln and Lander, Mapping Genes Controlling Quantitative Traits Using MAPMAKER/QTL, Whitehead Institute for Biomedical Research, Massachusetts, (1990). Additional software includes Qgene, Version 2.23 (1996), Department of Plant Breeding and Biometry, 266 Emerson Hall, Cornell University, Ithaca, N.Y., the manual of which is herein incorporated by reference in its entirety). Use of Qgene software is a particularly preferred approach.

[0146] A maximum likelihood estimate (MLE) for the presence of a marker is calculated, together with an MLE assuming no QTL effect, to avoid false positives. A log₁₀ of an odds ratio (LOD) is then calculated as: LOD=log₁₀ (MLE for the presence of a QTL/MLE given no linked QTL).

[0147] The LOD score essentially indicates how much more likely the data are to have arisen assuming the presence of a QTL than in its absence. The LOD threshold value for avoiding a false positive with a given confidence, say 95%, depends on the number of markers and the length of the genome. Graphs indicating LOD thresholds are set forth in Lander and Botstein, Genetics 121:185-199 (1989) the entirety of which is herein incorporated by reference and further described by Arús and Moreno-González, Plant Breeding, Hayward et al., (eds.) Chapman & Hall, London, pp. 314-331 (1993), the entirety of which is herein incorporated by reference.

[0148] Additional models can be used. Many modifications and alternative approaches to interval mapping have been reported, including the use of non-parametric methods (Kruglyak and Lander, Genetics 139:1421-1428 (1995), the entirety of which is herein incorporated by reference). Multiple regression methods or models can be also be used, in which the trait is regressed on a large number of markers (Jansen, Biometrics in Plant Breeding, van Oijen and Jansen (eds.), Proceedings of the Ninth Meeting of the Eucarpia Section Biometrics in Plant Breeding, The Netherlands, pp. 116-124 (1994); Weber and Wricke, Advances in Plant Breeding, Blackwell, Berlin, 16 (1994), both of which are herein incorporated by reference in their entirety). Procedures combining interval mapping with regression analysis, whereby the phenotype is regressed onto a single putative QTL at a given marker interval and at the same time onto a number of markers that serve as ‘cofactors,’ have been reported by Jansen and Stam, Genetics 136:1447-1455 (1994), the entirety of which is herein incorporated by reference and Zeng, Genetics 136:1457-1468 (1994) the entirety of which is herein incorporated by reference. Generally, the use of cofactors reduces the bias and sampling error of the estimated QTL positions (Utz and Melchinger, Biometrics in Plant Breeding, van Oijen and Jansen (eds.) Proceedings of the Ninth Meeting of the Eucarpia Section Biometrics in Plant Breeding, The Netherlands, pp.195-204 (1994), the entirety of which is herein incorporated by reference, thereby improving the precision and efficiency of QTL mapping (Zeng, Genetics 136:1457-1468 (1994)). These models can be extended to multi-environment experiments to analyze genotype-environment interactions (Jansen et al., Theo. Appl. Genet. 91:33-37 (1995), the entirety of which is herein incorporated by reference).

[0149] Selection of an appropriate mapping population is important to map construction. The choice of an appropriate mapping population depends on the type of marker systems employed (Tanksley et al., Molecular mapping plant chromosomes. Chromosome structure and function: Impact of new concepts, Gustafson and Appels (eds.), Plenum Press, New York, pp 157-173 (1988), the entirety of which is herein incorporated by reference). Consideration must be given to the source of parents (adapted vs. exotic) used in the mapping population. Chromosome pairing and recombination rates can be severely disturbed (suppressed) in wide crosses (adapted×exotic) and generally yield greatly reduced linkage distances. Wide crosses will usually provide segregating populations with a relatively large array of polymorphisms when compared to progeny in a narrow cross (adapted×adapted).

[0150] An F₂ population is the first generation of selfing after the hybrid seed is produced. Usually a single F₁ plant is selfed to generate a population segregating for all the genes in Mendelian (1:2:1) fashion. Maximum genetic information is obtained from a completely classified F₂ population using a codominant marker system (Mather, Measurement of Linkage in Heredity, Methuen and Co., (1938), the entirety of which is herein incorporated by reference). In the case of dominant markers, progeny tests (e.g. F₃, BCF₂) are required to identify the heterozygotes, thus making it equivalent to a completely classified F₂ population. However, this procedure is often prohibitive because of the cost and time involved in progeny testing. Progeny testing of F₂ individuals is often used in map construction where phenotypes do not consistently reflect genotype (e.g. disease resistance) or where trait expression is controlled by a QTL. Segregation data from progeny test populations (e.g. F₃ or BCF₂) can be used in map construction. Marker-assisted selection can then be applied to cross progeny based on marker-trait map associations (F₂, F₃), where linkage groups have not been completely disassociated by recombination events (i.e., maximum disequillibrium).

[0151] Recombinant inbred lines (RIL) (genetically related lines; usually >F₅, developed from continuously selfing F₂ lines towards homozygosity) can be used as a mapping population. Information obtained from dominant markers can be maximized by using RIL because all loci are homozygous or nearly so. Under conditions of tight linkage (i.e., about <10% recombination), dominant and co-dominant markers evaluated in RIL populations provide more information per individual than either marker type in backcross populations (Reiter et al., Proc. Natl. Acad. Sci. (U.S.A.) 89:1477-1481 (1992), the entirety of which is herein incorporated by reference). However, as the distance between markers becomes larger (i.e., loci become more independent), the information in RIL populations decreases dramatically when compared to codominant markers.

[0152] Backcross populations (e.g., generated from a cross between a successful variety (recurrent parent) and another variety (donor parent) carrying a trait not present in the former) can be utilized as a mapping population. A series of backcrosses to the recurrent parent can be made to recover most of its desirable traits. Thus a population is created consisting of individuals nearly like the recurrent parent but each individual carries varying amounts or mosaic of genomic regions from the donor parent. Backcross populations can be useful for mapping dominant markers if all loci in the recurrent parent are homozygous and the donor and recurrent parent have contrasting polymorphic marker alleles (Reiter et al., Proc. Natl. Acad. Sci. (U.S.A.) 89:1477-1481 (1992)). Information obtained from backcross populations using either codominant or dominant markers is less than that obtained from F₂ populations because one, rather than two, recombinant gametes are sampled per plant. Backcross populations, however, are more informative (at low marker saturation) when compared to RILs as the distance between linked loci increases in RIL populations (i.e. about 15% recombination). Increased recombination can be beneficial for resolution of tight linkages, but may be undesirable in the construction of maps with low marker saturation.

[0153] Near-isogenic lines (NIL) created by many backcrosses to produce an array of individuals that are nearly identical in genetic composition except for the trait or genomic region under interrogation can be used as a mapping population. In mapping with NILs, only a portion of the polymorphic loci are expected to map to a selected region.

[0154] Bulk segregant analysis (BSA) is a method developed for the rapid identification of linkage between markers and traits of interest (Michelmore et al., Proc. Natl. Acad. Sci. (U.S.A.) 88:9828-9832 (1991), the entirety of which is herein incorporated by reference). In BSA, two bulked DNA samples are drawn from a segregating population originating from a single cross. These bulks contain individuals that are identical for a particular trait (resistant or susceptible to particular disease) or genomic region but arbitrary at unlinked regions (i.e. heterozygous). Regions unlinked to the target region will not differ between the bulked samples of many individuals in BSA.

[0155] It is understood that one or more of the nucleic acid molecules of the present invention may be used as molecular markers. It is also understood that one or more of the protein molecules of the present invention may be used as molecular markers.

[0156] In accordance with this aspect of the present invention, a sample nucleic acid is obtained from plants cells or tissues. Any source of nucleic acid may be used. Preferably, the nucleic acid is genomic DNA. The nucleic acid is subjected to restriction endonuclease digestion. For example, one or more EST nucleic acid molecule or fragment thereof can be used as a probe in accordance with the above-described polymorphic methods. The polymorphism obtained in this approach can then be cloned to identify the mutation at the coding region which alters the protein's structure or regulatory region of the gene which affects its expression level.

[0157] In one aspect of the present invention, an evaluation can be conducted to determine whether a particular mRNA molecule is present. One or more of the nucleic acid molecules of the present invention, preferably one or more of the EST nucleic acid molecules of the present invention are utilized to detect the presence or quantity of the mRNA species. Such molecules are then incubated with cell or tissue extracts of a plant under conditions sufficient to permit nucleic acid hybridization. The detection of double-stranded probe-mRNA hybrid molecules is indicative of the presence of the mRNA; the amount of such hybrid formed is proportional to the amount of mRNA. Thus, such probes may be used to ascertain the level and extent of the mRNA production in a plant's cells or tissues. Such nucleic acid hybridization may be conducted under quantitative conditions (thereby providing a numerical value of the amount of the mRNA present). Alternatively, the assay may be conducted as a qualitative assay that indicates either that the mRNA is present, or that its level exceeds a user set, predefined value.

[0158] A principle of in situ hybridization is that a labeled, single-stranded nucleic acid probe will hybridize to a complementary strand of cellular DNA or RNA and, under the appropriate conditions, these molecules will form a stable hybrid. When nucleic acid hybridization is combined with histological techniques, specific DNA or RNA sequences can be identified within a single cell. An advantage of in situ hybridization over more conventional techniques for the detection of nucleic acids is that it allows an investigator to determine the precise spatial population (Angerer et al., Dev. Biol. 101: 477-484 (1984); Angerer et al., Dev. Biol. 112:157-166 (1985); Dixon et al., EMBO J. 10: 1317-1324 (1991), all of which are herein incorporated by reference in their entirety). In situ hybridization may be used to measure the steady-state level of RNA accumulation. It is a sensitive technique and RNA sequences present in as few as 5-10 copies per cell can be detected (Hardin et al., J. Mol. Biol. 202: 417-431.(1989), the entirety of which is herein incorporated by reference). A number of protocols have been devised for in situ hybridization, each with tissue preparation, hybridization, and washing conditions (Meyerowitz, Plant Mol. Biol. Rep. 5: 242-250 (1987); Cox and Goldberg, In: Plant Molecular Biology: A Practical Approach (ed. C. H. Shaw), pp.1-35. IRL Press, Oxford (1988); Raikhel et al., In situ RNA hybridization in plant tissues. In Plant Molecular Biology Manual, vol. B9: 1-32. Kluwer Academic Publisher, Dordrecht, Belgium (1989), all of which are herein incorporated by reference in their entirety).

[0159] In situ hybridization also allows for the localization of proteins within a tissue or cell (Wilkinson, In Situ Hybridization, Oxford University Press, Oxford (1992); Langdale, In Situ Hybridization 165-179 In: The Maize Handbook, eds. Freeling and Walbot, Springer-Verlag, New York (1994), both of which are herein incorporated by reference in their entirety). It is understood that one or more of the molecules of the present invention, preferably one or more of the EST nucleic acid molecules of the present invention or one or more of the antibodies of the present invention may be utilized to detect the level or pattern of a protein or fragment thereof by in situ hybridization.

[0160] Fluorescent in situ hybridization also enables the localization of a particular DNA sequence along a chromosome which is useful, among other uses, for gene mapping, following chromosomes in hybrid lines or detecting chromosomes with translocations, transversions or deletions. In situ hybridization has been used to identify chromosomes in several plant species (Griffor et al., Plant Mol. Biol. 17: 101-109 (1991); Gustafson et al., Proc. Nat'l. Acad. Sci. (U.S.A). 87: 1899-1902 (1990); Mukai and Gill, Genome 34: 448-452. (1991); Schwarzacher and Heslop-Harrison, Genome 34: 317-323 (1991); Wang et al., Jpn. J. Genet. 66: 313-316 (1991); Parra and Windle, Nature Genetics, 5: 17-21 (1993), all of which are herein incorporated by reference in their entirety). It is understood that the nucleic acid molecules of the present invention may be used as probes or markers to localize sequences along a chromosome.

[0161] It is also understood that one or more of the molecules of the present invention, preferably one or more of the EST nucleic acid molecules of the present invention or one or more of the antibodies of the present invention may be utilized to detect the expression level or pattern of a protein or mRNA thereof by in situ hybridization.

[0162] Another method to localize the expression of a molecule is tissue printing. Tissue printing provides a way to screen, at the same time on the same membrane many tissue sections from different plants or different developmental stages. Tissue-printing procedures utilize films designed to immobilize proteins and nucleic acids. In essence, a freshly cut section of an organ is pressed gently onto nitrocellulose paper, nylon membrane or polyvinylidene difluoride membrane. Such membranes are commercially available (e.g. Millipore, Bedford, Mass.). The contents of the cut cell transfer onto the membrane, and the molecules are immobilized to the membrane. The immobilized molecules form a latent print that can be visualized with appropriate probes. When a plant tissue print is made on nitrocellulose paper, the cell walls leave a physical print that makes the anatomy visible without further treatment (Varner and Taylor, Plant Physiol. 91: 31-33 (1989), the entirety of which is herein incorporated by reference).

[0163] Tissue printing on substrate films is described by Daoust, Exp. Cell Res. 12: 203-211 (1957), the entirety of which is herein incorporated by reference, who detected amylase, protease, ribonuclease, and deoxyribonuclease in animal tissues using starch, gelatin, and agar films. These techniques can be applied to plant tissues (Yomo and Taylor, Planta 112:35-43 (1973); Harris and Chrispeels, Plant Physiol. 56: 292-299 (1975). Advances in membrane technology have increased the range of applications of Daoust's tissue-printing techniques allowing (Cassab and Varner, J. Cell. Biol. 105: 2581-2588 (1987), the entirety of which is herein incorporated by reference; the histochemical localization of various plant enzymes and deoxyribonuclease on nitrocellulose paper and nylon (Spruce et al., Phytochemistry, 26: 2901-2903 (1987); Barres et al. Neuron 5: 527-544 (1990); Reid and Pont-Lezica, Tissue Printing: Tools for the Study of Anatomy, Histochemistry, and Gene Expression, Academic Press, New York, N.Y. (1992); Reid et al. Plant Physiol. 93: 160-165 (1990); Ye et al. Plant J. 1: 175-183 (1991), all of which are herein incorporated by reference in their entirety).

[0164] It is understood that one or more of the molecules of the present invention, preferably one or more of the EST nucleic acid molecules of the present invention or one or more of the antibodies of the present invention may be utilized to detect the presence or quantity of a protein by tissue printing.

[0165] Further, it is also understood that any of the nucleic acid molecules of the present invention may be used as marker nucleic acids and or probes in connection with methods that require probes or marker nucleic acids. As used herein, a probe is an agent that is utilized to determine an attribute or feature (e.g. presence or absence, location, correlation, etc.) or a molecule, cell, tissue or plant. As used herein, a marker nucleic acid is a nucleic acid molecule that is utilized to determine an attribute or feature (e.g., presence or absence, location, correlation, etc.) or a molecule, cell, tissue or plant.

[0166] A microarray-based method for high-throughput monitoring of plant gene expression may be utilized to measure gene-specific hybridization targets. This ‘chip’-based approach involves using microarrays of nucleic acid molecules as gene-specific hybridization targets to quantitatively measure expression of the corresponding plant genes (Schena et al., Science 270: 467-470 (1995); Shalon, Ph.D. Thesis. Stanford University (1996), both of which are herein incorporated by reference in their entirety). Every nucleotide in a large sequence can be queried at the same time. Hybridization can be used to efficiently analyze large amounts of nucleotide sequence.

[0167] Several microarray methods have been described. One method compares the sequences to be analyzed by hybridization to a set of oligonucleotides representing all possible subsequences (Bains and Smith, J. Theor. Biol. 135: 303 (1989), the entirety of which is herein incorporated by reference). A second method hybridizes the sample to an array of oligonucleotide probes. An array consisting of oligonucleotides complementary to subsequences of a target sequence can be used to determine the identity of a target sequence, measure its amount, and detect differences between the target and a reference sequence. Nucleic acid molecules microarrays may also be screened with protein molecules or fragments thereof to determine nucleic acid molecules that specifically bind protein molecules or fragments thereof.

[0168] The microarray approach may be used with polypeptide targets (U.S. Pat. No. 5,445,934; U.S. Pat. No. 5,143,854; U.S. Pat. No. 5,079,600; U.S. Pat. No. 4,923,901, all of which are herein incorporated by reference in their entirety). Essentially, polypeptides are synthesized on a substrate (microarray) and these polypeptides can be screened with either protein molecules or fragments thereof or nucleic acid molecules in order to screen for either protein molecules or fragments thereof or nucleic acid molecules that specifically bind the target polypeptides. Implementation of these techniques rely on recently developed combinatorial technologies to generate any ordered array of a large number of oligonucleotide probes (Fodor et al., Science 251:767-773 (1991), the entirety of which is herein incorporated by reference).

[0169] It is understood that one or more of the molecules of the present invention, preferably one or more of the nucleic acid molecules or protein molecules or fragments thereof of the present invention may be utilized in a microarray based method.

[0170] In a preferred embodiment of the present invention microarrays may be prepared that comprise nucleic acid molecules where preferably at least 10%, preferably at least 25%, more preferably at least 50% and even more preferably at least 75%, 80%, 85%, 90% or 95% of the nucleic acid molecules located on that array are selected from the group of nucleic acid molecules that specifically hybridize to one or more nucleic acid molecule having a nucleic acid sequence selected from the group of SEQ ID NO: 1 through SEQ ID NO: 43701 or complement thereof or fragments of either.

[0171] A particular preferred microarray embodiment of the present invention is a microarray comprising nucleic acid molecules encoding genes or fragments thereof that are homologues of known genes or nucleic acid molecules that comprise genes or fragment thereof that elicit only limited or no matches to known genes. A further preferred microarray embodiment of the present invention is a microarray comprising nucleic acid molecules having genes or fragments thereof that are homologues of known genes and nucleic acid molecules that comprise genes or fragment thereof that elicit only limited or no matches to known genes. Site-directed mutagenesis may be utilized to modify nucleic acid sequences, particularly as it is a technique that allows one or more of the amino acids encoded by a nucleic acid molecule to be altered (e.g. a threonine to be replaced by a methionine). Three basic methods for site-directed mutagenesis are often employed. These are cassette mutagenesis (Wells et al., Gene 34:315-23 (1985), the entirety of which is herein incorporated by reference), primer extension (Gilliam et al., Gene 12:129-137 (1980), the entirety of which is herein incorporated by reference); Zoller and Smith, Methods Enzymol. 100:468-500 (1983), the entirety of which is herein incorporated by reference; and Dalbadie-McFarland et al., Proc. Natl. Acad. Sci. (U.S.A.) 79:6409-6413 (1982), the entirety of which is herein incorporated by reference) and methods based upon PCR (Scharf et al., Science 233:1076-1078 (1986), the entirety of which is herein incorporated by reference; Higuchi et al., Nucleic Acids Res. 16:7351-7367 (1988), the entirety of which is herein incorporated by reference). Site-directed mutagenesis approaches are also described in European Patent 0 385 962, the entirety of which is herein incorporated by reference, European Patent 0 359 472, the entirety of which is herein incorporated by reference, and PCT Patent Application WO 93/07278, the entirety of which is herein incorporated by reference.

[0172] Site-directed mutagenesis strategies have been applied to plants for both in vitro as well as in vivo site-directed mutagenesis (Lanz et al., J. Biol. Chem. 266:9971-6 (1991); Kovgan and Zhdanov, Biotekhnologiya 5:148-154; No. 207160n, Chemical Abstracts 110:225 (1989); Ge et al., Proc. Natl. Acad. Sci. (U.S.A.) 86:4037-4041 (1989); Zhu et al., J. Biol. Chem. 271:18494-18498 (1996); Chu et al., Biochemistry 33:6150-6157 (1994); Small et al., EMBO J. 11:1291-1296 (1992); Cho et al., Mol. Biotechnol. 8:13-16 (1997); Kita et al., J. Biol. Chem. 271:26529-26535 (1996); Jin et al., Mol. Microbiol. 7:555-562 (1993); Hatfield and Vierstra, J. Biol. Chem. 267:14799-14803 (1992); Zhao et al., Biochemistry 31:5093-5099 (1992), all of which are herein incorporated by reference in their entirety).

[0173] Any of the nucleic acid molecules of the present invention may either be modified by site-directed mutagenesis or used as, for example, nucleic acid molecules that are used to target other nucleic acid molecules for modification. It is understood that mutants with more than one altered nucleotide can be constructed using techniques that practitioners skilled in the art are familiar with such as isolating restriction fragments and ligating such fragments into an expression vector (see, for example, Sambrook et al., Molecular Cloning: A Laboratory Manual, Cold Spring Harbor Press (1989)).

[0174] Sequence-specific DNA-binding proteins play a role in the regulation of transcription. The isolation of recombinant cDNAs encoding these proteins facilitates the biochemical analysis of their structural and functional properties. Genes encoding such DNA-binding proteins have been isolated using classical genetics (Vollbrecht et al., Nature 350: 241-243 (1991), the entirety of which is herein incorporated by reference) and molecular biochemical approaches, including the screening of recombinant cDNA libraries with antibodies (Landschulz et al., Genes Dev. 2: 786-800 (1988), the entirety of which is herein incorporated by reference) or DNA probes (Bodner et al., Cell 55: 505-518 (1988), the entirety of which is herein incorporated by reference). In addition, an in situ screening procedure has been used and has facilitated the isolation of sequence-specific DNA-binding proteins from various plant species (Gilmartin et al., Plant Cell 4: 839-849 (1992); Schindler et al., EMBO J. 11: 1261-1273 (1992), both of which are herein incorporated by reference in their entirety). An in situ screening protocol does not require the purification of the protein of interest (Vinson et al., Genes Dev. 2: 801-806 (1988); Singh et al., Cell 52: 415-423 (1988), both of which are herein incorporated by reference in their entirety).

[0175] Steps may be employed to characterize DNA-protein interactions. The first is to identify promoter fragments that interact with DNA-binding proteins, to titrate binding activity, to determine the specificity of binding, and to determine whether a given DNA-binding activity can interact with related DNA sequences (Sambrook et al., Molecular Cloning: A Laboratory Manual, 2^{nd} edition. Cold Spring Harbor Laboratory Press, Cold Spring Harbor, N.Y. (1989). Electrophoretic mobility-shift assay is a widely used assay. The assay provides a simple, rapid, and sensitive method for detecting DNA-binding proteins based on the observation that the mobility of a DNA fragment through a nondenaturing, low-ionic strength polyacrylamide gel is retarded upon association with a DNA-binding protein (Fried and Crother, Nucleic Acids Res. 9: 6505-6525 (1981), the entirety of which is herein incorporated by reference). When one or more specific binding activities have been identified, the exact sequence of the DNA bound by the protein may be determined. Several procedures for characterizing protein/DNA-binding sites are used, including methylation and ethylation interference assays (Maxam and Gilbert, Methods Enzymol. 65: 499-560 (1980); Wissman and Hillen, Methods Enzymol. 208: 365-379 (1991), both of which are herein incorporated by reference in their entirety) and footprinting techniques employing DNase I (Galas and Schmitz, Nucleic Acids Res. 5: 3157-3170 (1978), herein incorporated by reference in its entirety), 1,10-phenanthroline-copper ion methods (Sigman et al., Methods Enzymol. 208: 365-379 (1991), herein incorporated by reference in its entirety) or hydroxyl radical methods (Dixon et al., Methods Enzymol. 208: 380-413 (1991), herein incorporated by reference in its entirety). It is understood that one or more of the nucleic acid molecules of the present invention, preferably one or more of the EST nucleic acid molecules of the present invention may be utilized to identify a protein or fragment thereof that specifically binds to a nucleic acid molecule of the present invention. It is also understood that one or more of the protein molecules or fragments thereof of the present invention may be utilized to identify a nucleic acid molecule that specifically binds to it.

[0176] The two-hybrid system is based on the fact that many cellular functions are carried out by proteins that interact (physically) with one another. Two-hybrid systems have been used to probe the function of new proteins (Chien et al., Proc. Natl. Acad. Sci. (U.S.A.) 88: 9578-9582 (1991); Durfee et al., Genes Dev. 7: 555-569 (1993); Choi et al., Cell 78: 499-512 (1994); Kranz et al., Genes Dev. 8: 313-327 (1994), all of which are herein incorporated by reference in their entirety).

[0177] Interaction mating techniques have facilitated a number of two-hybrid studies of protein-protein interaction. Interaction mating has been used to examine interactions between small sets of tens of proteins (Finley and Brent, Proc. Natl. Acad. Sci. (U.S.A.) 91: 12098-12984 (1994), herein incorporated by reference in its entirety), larger sets of hundreds of proteins, (Bendixen et al., Nucl. Acids Res. 22: 1778-1779 (1994), herein incorporated by reference in its entirety) and to comprehensively map proteins encoded by a small genome (Bartel et al., Nature Genetics 12: 72-77 (1996), herein incorporated by reference in its entirety). This technique utilizes proteins fused to the DNA-binding domain and proteins fused to the activation domain. They are expressed in two different haploid yeast strains of opposite mating type, and the strains are mated to determine if the two proteins interact. Mating occurs when haploid yeast strains come into contact and result in the fusion of the two haploids into a diploid yeast strain. An interaction can be determined by the activation of a two-hybrid reporter gene in the diploid strain. The primary advantage of this technique is that it reduces the number of yeast transformations needed to test individual interactions. It is understood that the protein-protein interactions of protein or fragments thereof of the present invention may be investigated using the two-hybrid system and that any of the nucleic acid molecules of the present invention that encode such proteins or fragments thereof may be used to transform yeast in the two-hybrid system.

[0178] Synechocystis 6803 is a photosynthetic Cyanobacterium capable of oxygenic photosynthesis as well as heterotrophic growth in the absence of light. The entire genome has been sequenced, and it is reported to have a circular genome size of 3.57 Mbp containing 3168 potential open reading frames. Open reading frames (ORFs) were identified based upon their homology to other reported ORFs and by using ORF identification computer programs. Sixteen hundred potential ORFs were assigned based on their homology to previously identified ORFs. Of these 1600 ORFs, 145 were identical to reported ORFs (Kaneko et al., DNA Research 3:109-36 (1996), herein incorporated by reference in its entirety).

[0179] Several prokaryote promoters have been used in Synechocystis to express heterologous genes including the tac, lac, and lambda phage promoters (Bryant (ed.), The Molecular Biology of Cyanobacteria, Kluwer Academic Publishers, (1994); Ferino and Chauvat, Gene 84:257-266 (1989), both of which are herein incorporated by reference in their entirety). Several bacterial origins of replication such as RSF1010 and ACYC are reported to replicate in Synechocystis (Mermet-Bouvier and Chauvat, Current Microbiology 28:145-148 (1994); Kuhlemeier et al., Mol. Gen. Genet. 184:249-254 (1981), both of which are herein incorporated by reference in their entirety).

[0180] Synechocystis has been used to study gene regulation by gene replacement through homologous recombination or by gene disruption using antibiotic resistance markers (Pakrasi et al., EMBO 7:325-332 (1988), herein incorporated by reference in its entirety). In such gene regulation studies, double reciprocal homologous regions of the host genome flanking the gene of interest recombine to stably integrate the gene of interest into the genome. The gene of interest can be expressed once that gene has been stably integrated into the genome. Biochemical analysis can be performed to study the effect of the replaced or deleted gene.

[0181] It is understood that the agents of the present invention may be employed in a Synechocystis system.

[0182] Exogenous genetic material may be transferred into a plant cell and the plant cell regenerated into a whole, fertile or sterile plant. Exogenous genetic material is any genetic material, whether naturally occurring or otherwise, from any source that is capable of being inserted into any organism. Such genetic material may be transferred into either monocotyledons and dicotyledons including but not limited to the crops, maize and soybean (See specifically, Chistou, Particle Bombardment for Genetic Engineering of Plants, pp 63-69 (maize), pp50-60 (soybean), Biotechnology Intelligence Unit. Academic Press, San Diego, Calif. (1996), the entirety of which is herein incorporated by reference and generally Chistou, Particle Bombardment for Genetic Engineering of Plants, Biotechnology Intelligence Unit. Academic Press, San Diego, Calif. (1996), the entirety of which is herein incorporated by reference).

[0183] Transfer of a nucleic acid that encodes for a protein can result in overexpression of that protein in a transformed cell or transgenic plant. One or more of the proteins or fragments thereof encoded by nucleic acid molecules of the present invention may be overexpressed in a transformed cell or transformed plant. Such overexpression may be the result of transient or stable transfer of the exogenous material.

[0184] Exogenous genetic material may be transferred into a plant cell by the use of a DNA vector or construct designed for such a purpose. Design of such a vector is generally within the skill of the art (See, Plant Molecular Biology: A Laboratory Manual eds. Clark, Springer, New York (1997), herein incorporated by reference in its entirety).

[0185] A construct or vector may include a plant promoter to express the protein or protein fragment of choice. A number of promoters which are active in plant cells have been described in the literature. These include the nopaline synthase (NOS) promoter (Ebert et al., Proc. Natl. Acad. Sci. (U.S.A.) 84:5745-5749 (1987), herein incorporated by reference in its entirety), the octopine synthase (OCS) promoter (which are carried on tumor-inducing plasmids of Agrobacterium tumefaciens), the caulimovirus promoters such as the cauliflower mosaic virus (CaMV) 19S promoter (Lawton et al., Plant Mol. Biol. 9:315-324 (1987), herein incorporated by reference in its entirety) and the CAMV 35S promoter (Odell et al., Nature 313:810-812 (1985), herein incorporated by reference in its entirety), the figwort mosaic virus 35S-promoter, the light-inducible promoter from the small subunit of ribulose-1,5-bis-phosphate carboxylase (ssRUBISCO), the Adh promoter (Walker et al., Proc. Natl. Acad. Sci. (U.S.A.) 84:6624-6628 (1987), herein incorporated by reference in its entirety), the sucrose synthase promoter (Yang et al., Proc. Natl. Acad. Sci. (U.S.A.) 87:4144-4148 (1990), herein incorporated by reference in its entirety), the R gene complex promoter (Chandler et al., The Plant Cell 1:1175-1183 (1989), herein incorporated by reference in its entirety), and the chlorophyll a/b binding protein gene promoter, etc. These promoters have been used to create DNA constructs which have been expressed in plants; see, e.g., PCT publication WO 84/02913, herein incorporated by reference in its entirety.

[0186] Promoters which are known or are found to cause transcription of DNA in plant cells can be used in the present invention. Such promoters may be obtained from a variety of sources such as plants and plant viruses. It is preferred that the particular promoter selected should be capable of causing sufficient expression to result in the production of an effective amount of a protein to cause the desired phenotype. In addition to promoters which are known to cause transcription of DNA in plant cells, other promoters may be identified for use in the current invention by screening a plant cDNA library for genes which are selectively or preferably expressed in the target tissues or cells.

[0187] For the purpose of expression in source tissues of the plant, such as the leaf, seed, root or stem, it is preferred that the promoters utilized in the present invention have relatively high expression in these specific tissues. For this purpose, one may choose from a number of promoters for genes with tissue- or cell-specific or -enhanced expression. Examples of such promoters reported in the literature include the chloroplast glutamine synthetase GS2 promoter from pea (Edwards et al., Proc. Natl. Acad. Sci. (U.S.A.) 87:3459-3463 (1990), herein incorporated by reference in its entirety), the chloroplast fructose-1,6-biphosphatase (FBPase) promoter from wheat (Lloyd et al., Mol. Gen. Genet. 225:209-216 (1991), herein incorporated by reference in its entirety), the nuclear photosynthetic ST-LS1 promoter from potato (Stockhaus et al., EMBO J. 8:2445-2451 (1989), herein incorporated by reference in its entirety), the phenylalanine ammonia-lyase (PAL) promoter and the chalcone synthase (CHS) promoter from Arabidopsis thaliana. Also reported to be active in photosynthetically active tissues are the ribulose-1,5-bisphosphate carboxylase (RbcS) promoter from eastern larch (Larix laricina), the promoter for the cab gene, cab6, from pine (Yamamoto et al., Plant Cell Physiol. 35:773-778 (1994), herein incorporated by reference in its entirety), the promoter for the Cab-1 gene from wheat (Fejes et al., Plant Mol. Biol. 15:921-932 (1990), herein incorporated by reference in its entirety), the promoter for the CAB-1 gene from spinach (Lubberstedt et al., Plant Physiol. 104:997-1006 (1994), herein incorporated by reference in its entirety), the promoter for the cab1R gene from rice (Luan et al., Plant Cell. 4:971-981 (1992), herein incorporated by reference in its entirety), the pyruvate, orthophosphate dikinase (PPDK) promoter from maize (Matsuoka et al., Proc. Natl. Acad. Sci. (U.S.A.) 90: 9586-9590 (1993), herein incorporated by reference in its entirety), the promoter for the tobacco Lhcb1*2 gene (Cerdan et al., Plant Mol. Biol. 33: 245-255. (1997), herein incorporated by reference in its entirety), the Arabidopsis thaliana SUC2 sucrose-H+ symporter promoter (Truemit et al., Planta. 196: 564-570 (1995), herein incorporated by reference in its entirety), and the promoter for the thylacoid membrane proteins from spinach (psaD, psaF, psaE, PC, FNR, atpC, atpD, cab, rbcS). Other promoters for the chlorophyl a/b-binding proteins may also be utilized in the present invention, such as the promoters for LhcB gene and PsbP gene from white mustard (Sinapis alba; Kretsch et al., Plant Mol. Biol. 28: 219-229 (1995), herein incorporated by reference in its entirety).

[0188] For the purpose of expression in sink tissues of the plant, such as the tuber of the potato plant, the fruit of tomato, or the seed of maize, wheat, rice, and barley, it is preferred that the promoters utilized in the present invention have relatively high expression in these specific tissues. A number of promoters for genes with tuber-specific or -enhanced expression are known, including the class I patatin promoter (Bevan et al., EMBO J 8: 1899-1906 (1986); Jefferson et al., Plant Mol. Biol. 14: 995-1006 (1990), both of which are herein incorporated by reference in their entirety), the promoter for the potato tuber ADPGPP genes, both the large and small subunits, the sucrose synthase promoter (Salanoubat and Belliard, Gene. 60: 47-56 (1987), Salanoubat and Belliard, Gene. 84: 181-185 (1989), both of which are incorporated by reference in their entirety), the promoter for the major tuber proteins including the 22 kd protein complexes and proteinase inhibitors (Hannapel, Plant Physiol. 101: 703-704 (1993), herein incorporated by reference in its entirety), the promoter for the granule bound starch synthase gene (GBSS) (Visser et al., Plant Mol. Biol. 17: 691-699 (1991), herein incorporated by reference in its entirety), and other class I and II patatins promoters (Koster-Topfer et al., Mol Gen Genet. 219: 390-396 (1989); Mignery et al., Gene. 62: 27-44 (1988), both of which are herein incorporated by reference in their entirety).

[0189] Other promoters can also be used to express a fructose 1,6bisphosphate aldolase gene in specific tissues, such as seeds or fruits. The promoter for β-conglycinin (Chen et al., Dev. Genet. 10: 112-122 (1989), herein incorporated by reference in its entirety) or other seed-specific promoters such as the napin and phaseolin promoters, can be used. The zeins are a group of storage proteins found in maize endosperm. Genomic clones for zein genes have been isolated (Pedersen et al., Cell 29: 1015-1026 (1982), herein incorporated by reference in its entierty), and the promoters from these clones, including the 15 kD, 16 kD, 19 kD, 22 kD, 27 kD, and gamma genes, could also be used. Other promoters known to function, for example, in maize, include the promoters for the following genes: waxy, Brittle, Shrunken 2, Branching enzymes I and II, starch synthases, debranching enzymes, oleosins, glutelins, and sucrose synthases. A particularly preferred promoter for maize endosperm expression is the promoter for the glutelin gene from rice, more particularly the Osgt-1 promoter (Zheng et al., Mol. Cell Biol. 13: 5829-5842 (1993), herein incorporated by reference in its entirety). Examples of promoters suitable for expression in wheat include those promoters for the ADPglucose pyrophosphorylase (ADPGPP) subunits, the granule bound and other starch synthases, the branching and debranching enzymes, the embryogenesis-abundant proteins, the gliadins, and the glutenins. Examples of such promoters in rice include those promoters for the ADPGPP subunits, the granule bound and other starch synthases, the branching enzymes, the debranching enzymes, sucrose synthases, and the glutelins. A particularly preferred promoter is the promoter for rice glutelin, Osgt-1. Examples of such promoters for barley include those for the ADPGPP subunits, the granule bound and other starch synthases, the branching enzymes, the debranching enzymes, sucrose synthases, the hordeins, the embryo globulins, and the aleurone specific proteins.

[0190] Root specific promoters may also be used. An example of such a promoter is the promoter for the acid chitinase gene (Samac et al., Plant Mol. Biol. 25: 587-596 (1994), herein incorporated by reference in its entirety). Expression in root tissue could also be accomplished by utilizing the root specific subdomains of the CaMV35S promoter that have been identified (Lam et al., Proc. Natl. Acad. Sci. (U.S.A.) 86:7890-7894 (1989), herein incorporated by reference in its entirety). Other root cell specific promoters include those reported by Conkling et al. (Conkling et al., Plant Physiol. 93:1203-1211 (1990), herein incorporated by reference in its entirety).

[0191] Additional promoters that may be utilized are described, for example, in U.S. Pat. Nos. 5,378,619, 5,391,725, 5,428,147, 5,447,858, 5,608,144, 5,608,144, 5,614,399, 5,633,441, 5,633,435, and 4,633,436, all of which are herein incorporated in their entirety. In addition, a tissue specific enhancer may be used (Fromm et al., The Plant Cell 1:977-984 (1989), herein incorporated by reference in its entirety).

[0192] Constructs or vectors may also include, with the coding region of interest, a nucleic acid sequence that acts, in whole or in part, to terminate transcription of that region. For example, such sequences have been isolated including the Tr7 3′ sequence and the nos 3′ sequence (Ingelbrecht et al., The Plant Cell 1:671-680 (1989); Bevan et al., Nucleic Acids Res. 11:369-385 (1983), all of which are herein incorporated by reference in their entirety), or the like.

[0193] A vector or construct may also include regulatory elements. Examples of such include the Adh intron 1 (Callis et al., Genes and Develop. 1:1183-1200 (1987), herein incorporated by reference in its entirety), the sucrose synthase intron (Vasil et al., Plant Physiol. 91:1575-1579 (1989), herein incorporated by reference in its entirety) and the TMV omega element (Gallie et al., The Plant Cell 1:301-311 (1989), herein incorporated by reference in its entirety). These and other regulatory elements may be included when appropriate.

[0194] A vector or construct may also include a selectable marker. Selectable markers may also be used to select for plants or plant cells that contain the exogenous genetic material. Examples of such include, but are not limited to, a neo gene (Potrykus et al., Mol. Gen. Genet. 199:183-188 (1985), herein incorporated by reference in its entirety) which codes for kanamycin resistance and can be selected for using kanamycin, G418, etc.; a bar gene which codes for bialaphos resistance; a mutant EPSP synthase gene (Hinchee et al., Bio/Technology 6:915-922 (1988), herein incorporated by reference in its entirety) which encodes glyphosate resistance; a nitrilase gene which confers resistance to bromoxynil (Stalker et al., J. Biol. Chem. 263:6310-6314 (1988), herein incorporated by reference in its entirety); a mutant acetolactate synthase gene (ALS) which confers imidazolinone or sulphonylurea resistance (European Patent Application 154,204 (Sep. 11, 1985), herein incorporated by reference in its entirety); and a methotrexate resistant DHFR gene (Thillet et al., J. Biol. Chem. 263:12500-12508 (1988), herein incorporated by reference in its entirety).

[0195] A vector or construct may also include a transit peptide. Incorporation of a suitable chloroplast transit peptide may also be employed (European Patent Application Publication Number 0218571, herein incorporated by reference in its entirety). Translational enhancers may also be incorporated as part of the vector DNA. DNA constructs could contain one or more 5′ non-translated leader sequences which may serve to enhance expression of the gene products from the resulting mRNA transcripts. Such sequences may be derived from the promoter selected to express the gene or can be specifically modified to increase translation of the mRNA. Such regions may also be obtained from viral RNAs, from suitable eukaryotic genes, or from a synthetic gene sequence. For a review of optimizing expression of transgenes, see Koziel et al., Plant Mol. Biol. 32:393-405 (1996), herein incorporated by reference in its entirety.

[0196] A vector or construct may also include a screenable marker. Screenable markers may be used to monitor expression. Exemplary screenable markers include a β-glucuronidase or uidA gene (GUS) which encodes an enzyme for which various chromogenic substrates are known (Jefferson, Plant Mol. Biol, Rep. 5: 387-405 (1987); Jefferson et al., EMBO J. 6: 3901-3907 (1987), both of which are herein incorporated by reference in their entirety); an R-locus gene, which encodes a product that regulates the production of anthocyanin pigments (red color) in plant tissues ((Dellaporta et al., Stadler Symposium 11:263-282 (1988), herein incorporated by reference in its entirety); a β-lactamase gene (Sutcliffe et al., Proc. Natl. Acad. Sci. (U.S.A.) 75: 3737-3741 (1978), herein incorporated by reference in its entirety), a gene which encodes an enzyme for which various chromogenic substrates are known (e.g., PADAC, a chromogenic cephalosporin); a luciferase gene (Ow et al., Science 234: 856-859 (1986), herein incorporated by reference in its entirety) a xylE gene (Zukowsky et al., Proc. Natl. Acad. Sci. (U.S.A.) 80:1101-1105 (1983), herein incorporated by reference in its entirety) which encodes a catechol diozygenase that can convert chromogenic catechols; an α-amylase gene (Ikatu et al., Bio/Technol. 8:241-242 (1990), herein incorporated by reference in its entirety); a tyrosinase gene (Katz et al., J. Gen. Microbiol. 129:2703-2714 (1983), herein incorporated by reference in its entirety) which encodes an enzyme capable of oxidizing tyrosine to DOPA and dopaquinone which in turn condenses to melanin; an α-galactosidase, which will turn a chromogenic α-galactose substrate.

[0197] Included within the terms “selectable or screenable marker genes” are also genes which encode a scriptable marker whose secretion can be detected as a means of identifying or selecting for transformed cells. Examples include markers which encode a secretable antigen that can be identified by antibody interaction, or even secretable enzymes which can be detected catalytically. Secretable proteins fall into a number of classes, including small, diffusible proteins detectable, e.g., by ELISA, small active enzymes detectable in extracellular solution (e.g., α-amylase, β-lactamase, phosphinothricin transferase), or proteins which are inserted or trapped in the cell wall (such as proteins which include a leader sequence such as that found in the expression unit of extension or tobacco PR-S). Other possible selectable and/or screenable marker genes will be apparent to those of skill in the art.

[0198] Methods and compositions for transforming a bacteria and other microorganisms are known in the art (see for example Sambrook et al., Molecular Cloning: A Laboratory Manual, Second Edition, Cold Spring Harbor Laboratory Press, Cold Spring Harbor, N.Y., (1989), the entirety of which is herein incorporated by reference).

[0199] There are many methods for introducing transforming nucleic acid molecules into plant cells. Suitable methods are believed to include virtually any method by which nucleic acid molecules may be introduced into a cell, such as by Agrobacterium infection or direct delivery of nucleic acid molecules such as, for example, by PEG-mediated transformation, by electroporation or by acceleration of DNA coated particles, etc. (Pottykus, Ann. Rev. Plant Physiol. Plant Mol. Biol. 42:205-225 (1991); Vasil, Plant Mol. Biol. 25: 925-937 (1994), both of which are herein incorporated by reference in their entirety). For example, electroporation has been used to transform maize protoplasts (Fromm et al., Nature 312:791-793 (1986), herein incorporated by reference in its entirety).

[0200] Other vector systems suitable for introducing transforming DNA into a host plant cell includes but is not limited to binary artificial chromosome (BIBAC) vectors (Hamilton et al., Gene 200:107-116, (1997), herein incorporated by reference in its entirety, and transfection with RNA viral vectors (Della-Cioppa et al., Ann. N.Y. Acad. Sci. (1996), 792 (Engineering Plants for Commercial Products and Applications), 57-61, the entirety of which is herein incorporated by reference.

[0201] Technology for introduction of DNA into cells is well known to those of skill in the art. Four general methods for delivering a gene into cells have been described: (1) chemical methods (Graham and van der Eb, Virology, 54:536-539 (1973), the entirety of which is herein incorporated by reference); (2) physical methods such as microinjection (Capecchi, Cell 22:479-488 (1980), electroporation (Wong and Neumann, Biochem. Biophys. Res. Commun., 107:584-587 (1982); Fromm et al., Proc. Natl. Acad. Sci. USA, 82:5824-5828 (1985); U.S. Pat. No. 5,384,253; and the gene gun (Johnston and Tang, Methods Cell Biol. 43:353-365 (1994), all of which the entirety is herein incorporated by reference; (3) viral vectors (Clapp, Clin. Perinatol., 20:155-168 (1993); Lu et al., J. Exp. Med., 178:2089-2096 (1993); Eglitis and Anderson, Biotechniques, 6:608-614 (1988), all of which the entirety is herein incorporated by reference); and (4) receptor-mediated mechanisms (Curiel et al., Hum. Gen. Ther., 3:147-154 (1992); Wagner et al., Proc. Natl. Acad. Sci. USA, 89:6099-6103 (1992), all of which the entirety is herein incorporated by reference).

[0202] Acceleration methods that may be used include, for example, microprojectile bombardment and the like. One example of a method for delivering transforming nucleic acid molecules to plant cells is microprojectile bombardment. This method has been reviewed by Yang and Christou, eds., Particle Bombardment Technology for Gene Transfer, Oxford Press, Oxford, England (1994), the entirety of which is herein incorporated by reference). Non-biological particles (microprojectiles) that may be coated with nucleic acids and delivered into cells by a propelling force. Exemplary particles include those comprised of tungsten, gold, platinum, and the like.

[0203] A particular advantage of microprojectile bombardment, in addition to it being an effective means of reproducibly, and stably transforming monocotyledons, is that neither the isolation of protoplasts (Cristou et al., Plant Physiol. 87:671-674 (1988), herein incorporated by reference in its entirety) nor the susceptibility of Agrobacterium infection is required. An illustrative embodiment of a method for delivering DNA into maize cells by acceleration is a biolistics g-particle delivery system, which can be used to propel particles coated with DNA through a screen, such as a stainless steel or Nytex screen, onto a filter surface covered with corn cells cultured in suspension. Gordon-Kamm et al., describes the basic procedure for coating tungsten particles with DNA (Gordon-Kamm et al., Plant Cell 2: 603-618 (1990), herein incorporated by reference in its entirety). The screen disperses the tungsten nucleic acid particles so that they are not delivered to the recipient cells in large aggregates. A particle delivery system suitable for use with the present invention is the helium acceleration PDS-1000/He gun which is available from Bio-Rad Laboratories (Bio-Rad, Hercules, Calif.)(Sanford et al., Technique 3:3-16 (1991), herein incorporated by reference in its entirety).

[0204] For the bombardment, cells in suspension may be concentrated on filters. Filters containing the cells to be bombarded are positioned at an appropriate distance below the microprojectile stopping plate. If desired, one or more screens are also positioned between the gun and the cells to be bombarded.

[0205] Alternatively, immature embryos or other target cells may be arranged on solid culture medium. The cells to be bombarded are positioned at an appropriate distance below the macroprojectile stopping plate. If desired, one or more screens are also positioned between the acceleration device and the cells to be bombarded. Through the use of techniques set forth herein one may obtain up to 1000 or more foci of cells transiently expressing a marker gene. The number of cells in a focus which express the exogenous gene product 48 hours post-bombardment often range from one to ten and average one to three.

[0206] In bombardment transformation, one may optimize the prebombardment culturing conditions and the bombardment parameters to yield the maximum numbers of stable transformants. Both the physical and biological parameters for bombardment are important in this technology. Physical factors are those that involve manipulating the DNA/microprojectile precipitate or those that affect the flight and velocity of either the macro- or microprojectiles. Biological factors include all steps involved in manipulation of cells before and immediately after bombardment, the osmotic adjustment of target cells to help alleviate the trauma associated with bombardment, and also the nature of the transforming DNA, such as linearized DNA or intact supercoiled plasmids. It is believed that pre-bombardment manipulations are especially important for successful transformation of immature embryos. In another alternative embodiment, plastids can be stably transformed. Methods disclosed for plastid transformation in higher plants include the particle gun delivery of DNA containing a selectable marker and targeting of the DNA to the plastid genome through homologous recombination (Svab et al., Proc. Natl. Acad. Sci. (U.S.A.) 87:8526-8530 (1990); Svab and Maliga, Proc. Natl. Acad. Sci. (U.S.A.) 90:913-917 (1993); Staub and Maliga, EMBO J. 12:601-606 (1993); U.S. Pat. Nos. 5, 451,513 and 5,545,818, all of which are herein incorporated by reference in their entirety).

[0207] Accordingly, it is contemplated that one may wish to adjust various aspects of the bombardment parameters in small scale studies to fully optimize the conditions. One may particularly wish to adjust physical parameters such as gap distance, flight distance, tissue distance, and helium pressure. One may also minimize the trauma reduction factors by modifying conditions which influence the physiological state of the recipient cells and which may therefore influence transformation and integration efficiencies. For example, the osmotic state, tissue hydration and the subculture stage or cell cycle of the recipient cells may be adjusted for optimum transformation. The execution of other routine adjustments will be known to those of skill in the art in light of the present disclosure.

[0208] Agrobacterium-mediated transfer is a widely applicable system for introducing genes into plant cells because the DNA can be introduced into whole plant tissues, thereby bypassing the need for regeneration of an intact plant from a protoplast. The use of Agrobacterium-mediated plant integrating vectors to introduce DNA into plant cells is well known in the art. See, for example the methods described (Fraley et al., Biotechnology 3:629-635 (1985); Rogers et al., Meth. In Enzymol, 153:253-277 (1987), both of which are herein incorporated by reference in their entirety. Further, the integration of the Ti-DNA is a relatively precise process resulting in few rearrangements. The region of DNA to be transferred is defined by the border sequences, and intervening DNA is usually inserted into the plant genome as described (Spielmann et al., Mol. Gen. Genet., 205:34 (1986), the entirety of which is herein incorporated by reference).

[0209] Modern Agrobacterium transformation vectors are capable of replication in E. coli as well as Agrobacterium, allowing for convenient manipulations as described (Klee et al., In. Plant DNA Infectious Agents, T. Hohn and J. Schell, eds., Springer-Verlag, New York, pp. 179-203 (1985), the entirety of which is herein incorporated by reference. Moreover, recent technological advances in vectors for Agrobacterium-mediated gene transfer have improved the arrangement of genes and restriction sites in the vectors to facilitate construction of vectors capable of expressing various polypeptide coding genes. The vectors described have convenient multi-linker regions flanked by a promoter and a polyadenylation site for direct expression of inserted polypeptide coding genes and are suitable for present purposes (Rogers et al., Meth. In Enzymol., 153:253-277 (1987), the entirety of which is herein incorporated by reference). In addition, Agrobacterium containing both armed and disarmed Ti genes can be used for the transformations. In those plant strains where Agrobacterium-mediated transformation is efficient, it is the method of choice because of the facile and defined nature of the gene transfer.

[0210] A transgenic plant formed using Agrobacterium transformation methods typically contains a single gene on one chromosome. Such transgenic plants can be referred to as being heterozygous for the added gene. More preferred is a transgenic plant that is homozygous for the added structural gene; i.e., a transgenic plant that contains two added genes, one gene at the same locus on each chromosome of a chromosome pair. A homozygous transgenic plant can be obtained by sexually mating (selfing) an independent segregant transgenic plant that contains a single added gene, germinating some of the seed produced and analyzing the resulting plants produced for the gene of interest.

[0211] It is also to be understood that two different transgenic plants can also be mated to produce offspring that contain two independently segregating added, exogenous genes. Selfing of appropriate progeny can produce plants that are homozygous for both added, exogenous genes that encode a polypeptide of interest. Back-crossing to a parental plant and out-crossing with a non-transgenic plant are also contemplated, as is vegetative propagation.

[0212] Transformation of plant protoplasts can be achieved using methods based on calcium phosphate precipitation, polyethylene glycol treatment, electroporation, and combinations of these treatments. See for example (Potrykus et al., Mol. Gen. Genet., 205:193-200 (1986); Lorz et al., Mol. Gen. Genet., 199:178, (1985); Fromm et al., Nature, 319:791,(1986); Uchimiya et al., Mol. Gen. Genet.:204:204, (1986); Callis et al., Genes and Development, 1183,(1987); Marcotte et al., Nature, 335:454, (1988), all of which are herein incorporated by reference in their entirety).

[0213] Application of these systems to different plant strains depends upon the ability to regenerate that particular plant strain from protoplasts. Illustrative methods for the regeneration of cereals from protoplasts are described (Fujimura et al., Plant Tissue Culture Letters, 2:74,(1985); Toriyama et al., Theor Appl. Genet. 205:34. (1986); Yamada et al., Plant Cell Rep., 4:85, (1986); Abdullah et al., Biotechnology, 4:1087, (1986), all of which are herein incorporated by reference in their entirety).

[0214] To transform plant strains that cannot be successfully regenerated from protoplasts, other ways to introduce DNA into intact cells or tissues can be utilized. For example, regeneration of cereals from immature embryos or explants can be effected as described (Vasil, Biotechnology, 6:397,(1988), herein incorporated by reference in its entirety). In addition, “particle gun” or high-velocity microprojectile technology can be utilized (Vasil et al., Bio/Technology 10:667, (1992), herein incorporated by reference in its entirety).

[0215] Using the latter technology, DNA is carried through the cell wall and into the cytoplasm on the surface of small metal particles as described (Klein et al., Nature, 328:70, (1987); Klein et al., Proc. Natl. Acad. Sci. USA, 85:8502-8505, (1988); McCabe et al., Biotechnology, 6:923, (1988), all of which are herein incorporated by reference in their entirety). The metal particles penetrate through several layers of cells and thus allow the transformation of cells within tissue explants.

[0216] Other methods of cell transformation can also be used and include but are not limited to introduction of DNA into plants by direct DNA transfer into pollen (Hess et al., Intern Rev. Cytol., 107:367, (1987); Luo et al., Plant Mol Biol. Reporter, 6:165, (1988), all of which are herein incorporated by reference in their entirety), by direct injection of DNA into reproductive organs of a plant (Pena et al., Nature, 325:274, (1987), herein incorporated by reference in its entirety), or by direct injection of DNA into the cells of immature embryos followed by the rehydration of dessicated embryos (Neuhaus et al., Theor. Appl. Genet., 75:30, (1987), herein incorporated by reference in its entirety).

[0217] The regeneration, development, and cultivation of plants from single plant protoplast transformants or from various transformed explants is well known in the art (Weissbach and Weissbach, In: Methods for Plant Molecular Biology, (Eds.), Academic Press, Inc. San Diego, Calif., (1988), herein incorporated by reference in its entirety). This regeneration and growth process typically includes the steps of selection of transformed cells, culturing those individualized cells through the usual stages of embryonic development through the rooted plantlet stage. Transgenic embryos and seeds are similarly regenerated. The resulting transgenic rooted shoots are thereafter planted in an appropriate plant growth medium such as soil.

[0218] The development or regeneration of plants containing the foreign, exogenous gene that encodes a protein of interest is well known in the art. Preferably, the regenerated plants are self-pollinated to provide homozygous transgenic plants, as discussed before. Otherwise, pollen obtained from the regenerated plants is crossed to seed-grown plants of agronomically important lines. Conversely, pollen from plants of these important lines is used to pollinate regenerated plants. A transgenic plant of the present invention containing a desired polypeptide is cultivated using methods well known to one skilled in the art.

[0219] There are a variety of methods for the regeneration of plants from plant tissue. The particular method of regeneration will depend on the starting plant tissue and the particular plant species to be regenerated.

[0220] Methods for transforming dicots, primarily by use of Agrobacterium tumefaciens, and obtaining transgenic plants have been published for cotton (U.S. Pat. No. 5,004,863, U.S. Pat. No. 5,159,135, U.S. Pat. No. 5,518,908, all of which herein incorporated by reference in their entirety); soybean (U.S. Pat. No. 5,569,834, U.S. Pat. No. 5,416,011, McCabe et al., Biotechnology 6:923, (1988), Christou et al., Plant Physiol., 87:671-674 (1988), all of which are herein incorporated by reference in their entirety); Brassica (U.S. Pat. No. 5,463,174, herein incorporated by reference in its entirety); peanut (Cheng et al., Plant Cell Rep. 15: 653-657 (1996); McKently et al., Plant Cell Rep. 14:699-703 (1995), all of which are herein incorporated by reference in their entirety); papaya (Yang et al., (1996), herein incorporated by reference in its entirety); pea (Grant et al., Plant Cell Rep. 15:254-258, (1995), herein incorporated by reference in its entirety).

[0221] Transformation of monocotyledons using electroporation, particle bombardment, and Agrobacterium have also been reported. Transformation and plant regeneration have been achieved in asparagus (Bytebier et al., Proc. Natl. Acad. Sci. USA 84:5345, (1987), herein incorporated by reference in its entirety); barley (Wan and Lemaux, Plant Physiol 104:37, (1994), herein incorporated by reference in its entirety); maize (Rhodes et al., Science 240: 204, (1988), Gordon-Kamm et al., Plant Cell, 2:603, (1990), Fromm et al., Bio/Technology 8:833, (1990), Koziel et al., Bio/Technology 11:194, (1993), Armstrong et al., Crop Science 35:550-557, (1995), all of which are herein incorporated by reference in their entirety); oat (Somers et al., Bio/Technology, 10:1589, (1992), herein incorporated by reference in its entirety); orchardgrass (Horn et al.,Plant Cell Rep. 7:469, (1988), herein incorporated by reference in its entirety); rice (Toriyama et al., Theor Appl. Genet. 205:34, (1986); Park et al., Plant Mol. Biol.,32: 1135-1148, (1996); Abedinia et al., Aust. J. Plant Physiol24:133-141, (1997); Zhang and Wu, Theor. Appl. Genet. 76:835, (1988); Zhang et al. Plant Cell Rep. 7:379, (1988); Battraw and Hall, Plant Sci. 86:191-202, (1992); Christou et al., Bio/Technology 9:957, (1991), all of which are herein incorporated by reference in their entirety); sugarcane (Bower and Birch, Plant J. 2:409, (1992), herein incorporated by reference in its entirety); tall fescue (Wang et al., Bio/Technology 10:691, (1992), herein incorporated by reference in its entirety), and wheat (Vasil et al., Bio/Technology 10:667, (1992); U.S. Pat. No. 5,631,152, both of which are herein incorporated by reference in their entirety).

[0222] Assays for gene expression based on the transient expression of cloned nucleic acid constructs have been developed by introducing the nucleic acid molecules into plant cells by polyethylene glycol treatment, electroporation, or particle bombardment (Marcotte, et al., Nature, 335: 454-457 (1988); Marcotte, et al., Plant Cell, 1: 523-532 (1989); McCarty, et al., Cell 66: 895-905 (1991); Hattori, et al., Genes Dev. 6: 609-618 (1992); Goff, et al., EMBO J. 9: 2517-2522 (1990), all of which are herein incorporated by reference in their entirety). Transient expression systems may be used to functionally dissect gene constructs (See generally, Mailga et al., Methods in Plant Molecular Biology, Cold Spring Harbor Press (1995)).

[0223] Any of the nucleic acid molecules of the present invention may be introduced into a plant cell in a permanent or transient manner in combination with other genetic elements such as vectors, promoters enhancers etc. Further any of the nucleic acid molecules of the present invention may be introduced into a plant cell in a manner that allows for over expression of the protein or fragment thereof encoded by the nucleic acid molecule.

[0224] Cosuppression is the reduction in expression levels, usually at the level of RNA, of a particular endogenous gene or gene family by the expression of a homologous sense construct that is capable of transcribing mRNA of the same strandedness as the transcript of the endogenous gene (Napoli et al., Plant Cell 2: 279-289 (1990); van der Krol et al., Plant Cell 2: 291-299 (1990), both of which are herein incorporated by reference in their entirety). Cosuppression may result from stable transformation with a single copy nucleic acid molecule that is homologous to a nucleic acid sequence found with the cell (Prolls and Meyer, Plant J. 2:465-475 (1992), herein incorporated by reference in its entirety) or with multiple copies of a nucleic acid molecule that is homologous to a nucleic acid sequence found with the cell (Mittlesten et al., Mol. Gen. Genet. 244: 325-330 (1994), herein incorporated by reference in its entirety). Genes, even though different, linked to homologous promoters may result in the cosuppression of the linked genes (Vaucheret, C.R. Acad. Sci. III 316: 1471-1483 (1993), herein incorporated by reference in its entirety).

[0225] This technique has, for example been applied to generate white flowers from red petunia and tomatoes that do not ripen on the vine. Up to 50% of petunia transformants that contained a sense copy of the chalcone synthase (CHS) gene produced white flowers or floral sectors; this was as a result of the post-transcriptional loss of mRNA encoding CHS (Flavell, Proc. Natl. Acad. Sci. (U.S.A.) 91:3490-3496 (1994)), herein incorporated by reference in its entirety). Cosuppression may require the coordinate transcription of the transgene and the endogenous gene, and can be reset by a developmental control mechanism (Jorgensen, Trends Biotechnol, 8:340344 (1990); Meins and Kunz, In: Gene Inactivation and Homologous Recombination in Plants (Paszkowski, J., ed.), pp. 335-348. Kluwer Academic, Netherlands (1994), both of which are herein incorporated by reference in their entirety).

[0226] It is understood that one or more of the nucleic acids of the present invention including those comprising SEQ ID NO:1 through SEQ ID NO:43701 or complement thereof or fragments of either or other nucleic acid molecules of the present invention may be introduced into a plant cell and transcribed using an appropriate promoter with such transcription resulting in the co-suppression of an endogenous protein.

[0227] Antisense approaches are a way of preventing or reducing gene function by targeting the genetic material (Mol et al., FEBS Lett. 268: 427-430 (1990), herein incorporated by reference in its entirety). The objective of the antisense approach is to use a sequence complementary to the target gene to block its expression and create a mutant cell line or organism in which the level of a single chosen protein is selectively reduced or abolished. Antisense techniques have several advantages over other ‘reverse genetic’ approaches. The site of inactivation and its developmental effect can be manipulated by the choice of promoter for antisense genes or by the timing of external application or microinjection. Antisense can manipulate its specificity by selecting either unique regions of the target gene or regions where it shares homology to other related genes (Hiatt et al., In Genetic Engineering, Setlow (ed.), Vol. 11, New York: Plenum 49-63 (1989), the entirety of which is herein incorporated by reference).

[0228] The principle of regulation by antisense RNA is that RNA that is complementary to the target mRNA is introduced into cells, resulting in specific RNA:RNA duplexes being formed by base pairing between the antisense substrate and the target mRNA (Green et al., Annu. Rev. Biochem. 55: 569-597 (1986), herein incorporated by reference in its entirety). Under one embodiment, the process involves the introduction and expression of an antisense gene sequence. Such a sequence is one in which part or all of the normal gene sequences are placed under a promoter in inverted orientation so that the ‘wrong’ or complementary strand is transcribed into a noncoding antisense RNA that hybridizes with the target mRNA and interferes with its expression (Takayama and Inouye, Crit. Rev. Biochem. Mol. Biol. 25: 155-184 (1990), herein incorporated by reference in its entirety). An antisense vector is constructed by standard procedures and introduced into cells by transformation, transfection, electroporation, microinjection, or by infection, etc. The type of transformation and choice of vector will determine whether expression is transient or stable. The promoter used for the antisense gene may influence the level, timing, tissue, specificity, or inducibility of the antisense inhibition.

[0229] It is understood that protein synthesis activity in a plant cell may be reduced or depressed by growing a transformed plant cell containing a nucleic acid molecule whose non-transcribed strand encodes a protein or fragment thereof.

[0230] Antibodies have been expressed in plants (Hiatt et al., Nature 342:76-78 (1989); Conrad and Fielder, Plant Mol. Biol. 26: 1023-1030 (1994), both of which are herein incorporated by reference in their entirety). Cytoplamic expression of a scFv (single-chain Fv antibodies) has been reported to delay infection by artichoke mottled crinkle virus. Transgenic plants that express antibodies directed against endogenous proteins may exhibit a physiological effect (Philips et al, EMBO J. 16: 4489-4496 (1997); Marion-Poll, Trends in Plant Science 2: 447-448 (1997), both of which are herein incorporated by reference in their entirety). For example, expressed anti-abscisic antibodies reportedly result in a general perturbation of seed development (Philips et al., EMBO J. 16: 4489-4496 (1997)).

[0231] Antibodies that are catalytic may also be expressed in plants (abzymes). The principle behind abzymes is that since antibodies may be raised against many molecules, this recognition ability can be directed toward generating antibodies that bind transition states to force a chemical reaction forward (Persidas, Nature Biotechnology 15:1313-1315 (1997); Baca et al., Ann. Rev. Biophys. Biomol. Struct. 26:461-493 (1997), both of which are herein incorporated by reference in their entirety). The catalytic abilities of abzymes may be enhanced by site directed mutagensis. Examples of abzymes are, for example, set forth in U.S. Pat. No. 5,658,753; U.S. Pat. No. 5,632,990; U.S. Pat. No. 5,631,137; U.S. Pat. No. 5,602,015; U.S. Pat. No. 5,559,538; U.S. Pat. No. 5,576,174; U.S. Pat. No. 5,500,358; U.S. Pat. No. 5,318,897; U.S. Pat. No. 5,298,409; U.S. Pat. No. 5,258,289 and U.S. Pat. No. 5,194,585, all of which are herein incorporated in their entirety.

[0232] It is understood that any of the antibodies of the present invention may be expressed in plants and that such expression can result in a physiological effect. It is also understood that any of the expressed antibodies may be catalytic.

[0233] In addition to the above discussed procedures, practitioners are familiar with the standard resource materials which describe specific conditions and procedures for the construction, manipulation and isolation of macromolecules (e.g., DNA molecules, plasmids, etc.), generation of recombinant organisms and the screening and isolating of clones, (see for example, Sambrook et al., Molecular Cloning: A Laboratory Manual, Cold Spring Harbor Press (1989); Mailga et al., Methods in Plant Molecular Biology, Cold Spring Harbor Press (1995); Birren et al., Genome Analysis: Analyzing DNA, 1, Cold Spring Harbor, New York, all of which are herein incorporated by reference in their entirety).

[0234] The nucleotide sequence provided in SEQ ID NO:1, through SEQ ID NO:43701 or fragment thereof, or complement thereof, or a nucleotide sequence at least 90% identical, preferably 95%, identical even more preferably 99% or 100% identical to the sequence provided in SEQ ID NO:1 through SEQ ID NO:43701 or fragment thereof, or complement thereof, can be “provided” in a variety of mediums to facilitate use fragment thereof. Such a medium can also provide a subset thereof in a form that allows a skilled artisan to examine the sequences.

[0235] In one application of this embodiment, a nucleotide sequence of the present invention can be recorded on computer readable media. As used herein, “computer readable media” refers to any medium that can be read and accessed directly by a computer. Such media include, but are not limited to: magnetic storage media, such as floppy discs, hard disc, storage medium, and magnetic tape: optical storage media such as CD-ROM; electrical storage media such as RAM and ROM; and hybrids of these categories such as magnetic/optical storage media. A skilled artisan can readily appreciate how any of the presently known computer readable mediums can be used to create a manufacture comprising computer readable medium having recorded thereon a nucleotide sequence of the present invention.

[0236] As used herein, “recorded” refers to a process for storing information on computer readable medium. A skilled artisan can readily adopt any of the presently known methods for recording information on computer readable medium to generate media comprising the nucleotide sequence information of the present invention. A variety of data storage structures are available to a skilled artisan for creating a computer readable medium having recorded thereon a nucleotide sequence of the present invention. The choice of the data storage structure will generally be based on the means chosen to access the stored information. In addition, a variety of data processor programs and formats can be used to store the nucleotide sequence information of the present invention on computer readable medium. The sequence information can be represented in a word processing text file, formatted in commercially-available software such as WordPerfect and Microsoft Word, or represented in the form of an ASCII file, stored in a database application, such as DB2, Sybase, Oracle, or the like. A skilled artisan can readily adapt any number of data processor structuring formats (e.g. text file or database) in order to obtain computer readable medium having recorded thereon the nucleotide sequence information of the present invention.

[0237] By providing one or more of nucleotide sequences of the present invention, a skilled artisan can routinely access the sequence information for a variety of purposes. Computer software is publicly available which allows a skilled artisan to access sequence information provided in a computer readable medium. The examples which follow demonstrate how software which implements the BLAST (Altschul et al., J. Mol. Biol. 215:403-410 (1990)) and BLAZE (Brutlag et al., Comp. Chem. 17:203-207 (1993), the entirety of which is herein incorporated by reference) search algorithms on a Sybase system can be used to identify open reading frames (ORFs) within the genome that contain homology to ORFs or proteins from other organisms. Such ORFs are protein-encoding fragments within the sequences of the present invention and are useful in producing commercially important proteins such as enzymes used in amino acid biosynthesis, metabolism, transcription, translation, RNA processing, nucleic acid and a protein degradation, protein modification, and DNA replication, restriction, modification, recombination, and repair.

[0238] The present invention further provides systems, particularly computer-based systems, which contain the sequence information described herein. Such systems are designed to identify commercially important fragments of the nucleic acid molecule of the present invention. As used herein, “a computer-based system” refers to the hardware means, software means, and data storage means used to analyze the nucleotide sequence information of the present invention. The minimum hardware means of the computer-based systems of the present invention comprises a central processing unit (CPU), input means, output means, and data storage means. A skilled artisan can readily appreciate that any one of the currently available computer-based system are suitable for use in the present invention.

[0239] As indicated above, the computer-based systems of the present invention comprise a data storage means having stored therein a nucleotide sequence of the present invention and the necessary hardware means and software means for supporting and implementing a search means. As used herein, “data storage means” refers to memory that can store nucleotide sequence information of the present invention, or a memory access means which can access manufactures having recorded thereon the nucleotide sequence information of the present invention. As used herein, “search means” refers to one or more programs which are implemented on the computer-based system to compare a target sequence or target structural motif with the sequence information stored within the data storage means. Search means are used to identify fragments or regions of the sequence of the present invention that match a particular target sequence or target motif. A variety of known algorithms are disclosed publicly and a variety of commercially available software for conducting search means are available and can be used in the computer-based systems of the present invention. Examples of such software include, but are not limited to, MacPattern (EMBL), BLASTIN and BLASTIX (NCBIA). One of the available algorithms or implementing software packages for conducting homology searches can be adapted for use in the present computer-based systems.

[0240] The most preferred sequence length of a target sequence is from about 10 to 100 amino acids or from about 30 to 300 nucleotide residues. However, it is well recognized that during searches for commercially important fragments of the nucleic acid molecules of the present invention, such as sequence fragments involved in gene expression and protein processing, may be of shorter length.

[0241] As used herein, “a target structural motif,” or “target motif,” refers to any rationally selected sequence or combination of sequences in which the sequences or sequence(s) are chosen based on a three-dimensional configuration which is formed upon the folding of the target motif. There are a variety of target motifs known in the art. Protein target motifs include, but are not limited to, enzymatic active sites and signal sequences. Nucleic acid target motifs include, but are not limited to, promoter sequences, cis elements, hairpin structures and inducible expression elements (protein binding sequences).

[0242] Thus, the present invention further provides an input means for receiving a target sequence, a data storage means for storing the target sequences of the present invention sequence identified using a search means as described above, and an output means for outputting the identified homologous sequences. A variety of structural formats for the input and output means can be used to input and output information in the computer-based systems of the present invention. A preferred format for an output means ranks fragments of the sequence of the present invention by varying degrees of homology to the target sequence or target motif. Such presentation provides a skilled artisan with a ranking of sequences which contain various amounts of the target sequence or target motif and identifies the degree of homology contained in the identified fragment.

[0243] A variety of comparing means can be used to compare a target sequence or target motif with the data storage means to identify sequence fragments sequence of the present invention. For example, implementing software which implement the BLAST and BLAZE algorithms (Altschul et al., J. Mol. Biol. 215:403-410 (1990)) can be used to identify open frames within the nucleic acid molecules of the present invention. A skilled artisan can readily recognize that any one of the publicly available homology search programs can be used as the search means for the computer-based systems of the present invention. Having now generally described the invention, the same will be more readily understood through reference to the following examples which are provided by way of illustration, and are not intended to be limiting of the present invention, unless specified.

### EXAMPLE 1

[0244] The cDNA library of the present invention designated LIB3220, is prepared from rice panicles and flower tissue. The Oryza sativa variety Cypress is used for the collection. Seeds are seeded directly into 500 size pots filled with rice rooting media (44 Liters topsoil (Green-Gro): 26.43 Liters Perlite (Krum): 1 bag sand (26.43 L Green-Gro): 26.43 L peat (Fafard)) plus 4 TBLs sulfur (to 220 l of rice mix)). Seedlings are thinned to 3 plants per pot after germination. Pots are watered with tempered fertilizer solution (1000 umhos Peters 20-10-20 Pete Lite Special) as needed. Fe drench supplied as DTPA (1 tsp/9 gal), 1/16 tsp of MicroMax micronutrients, and ⅛ tsp superphosphate is added into pots about 10 to 14 days after germination. Plants are grown in a greenhouse in 16 hours day/8 hours night cycles. The daytime temperature is approximately 78° F. and the nighttime temperature is approximately 70° F. Supplemental lighting is provided by 1000 W sodium vapor lamps (GE Lucalux). After four weeks, the plants are moved to a greenhouse with a 10 hour day length, 85 degree F./78 degree F. day/night temperature, and the fertilizer solution is increase to 2000 umhos. Panicles and flower tissue are harvested from plants both when panicles is just cracking open and when panicles have ¾ of the florets open. The collected tissue is frozen immediately in liquid nitrogen, shipped on dry ice, and stored at −80° C. until total RNA preparation. The RNA is purified from the stored tissue and the cDNA library are constructed as described in Example 2.

[0245] The cDNA library of the present invention designated LIB3221, is prepared from rice panicles and flower tissue. The Oryza sativa variety M202 is used for the collection. Seeds are seeded directly into 500 size pots filled with rice rooting media (44 Liters topsoil (Green-Gro): 26.43 Liters Perlite (Krum): 1 bag sand (26.43 L Green-Gro): 26.43 L peat (Fafard)) plus 4 TBLs sulfur (to 220 l of rice mix)). Seedlings are thinned to 3 plants per pot after germination. Pots are watered with tempered fertilizer solution (1000 umhos Peters 20-10-20 Pete Lite Special) as needed. Fe drench supplied as DTPA (1 tsp/9 gal), 1/16 tsp of MicroMax micronutrients, and ⅛ tsp superphosphate is added into pots about 10 to 14 days after germination. Plants are grown in a greenhouse in 16 hours day/8 hours night cycles. The daytime temperature is approximately 78° F. and the nighttime temperature is approximately 70° F. Supplemental lighting is provided by 1000 W sodium vapor lamps (GE Lucalux). After four weeks, the plants are moved to a greenhouse with a 10 hour day length, 85 degree F./78 degree F. day/night temperature, and the fertilizer solution is increase to 2000 umhos. Panicles and flower tissue are harvested from plants both when panicles is just cracking open and when panicles have ¾ of the florets open. The collected tissue is frozen immediately in liquid nitrogen, shipped on dry ice, and stored at −80° C. until total RNA preparation. The RNA is purified from the stored tissue and the cDNA library are constructed as described in Example 2.

[0246] The cDNA library of the present invention designated LIB3254, is prepared from rice roots. The Oryza sativa variety Cypress is used for the collection. Seeds are seeded directly into 500 size pots filled with rice rooting media (44 Liters topsoil (Green-Gro): 26.43 Liters Perlite (Krum): 1 bag sand (26.43 L Green-Gro): 26.43 L peat (Fafard)) plus 4 TBLs sulfur (to 220 l of rice mix)). Seedlings are thinned to 3 plants per pot after germination. Pots are watered with tempered fertilizer solution (1000 umhos Peters 20-10-20 Pete Lite Special) as needed. Fe drench supplied as DTPA (ltsp/9gal), 1/16 tsp of MicroMax micronutrients, and ⅛ tsp superphosphate is added into pots about 10 to 14 days after germination. Plants are grown in a greenhouse in 16 hours day/8 hours night cycles. The daytime temperature is approximately 78° F. and the nighttime temperature is approximately 70° F. Supplemental lighting is provided by 1000 W sodium vapor lamps (GE Lucalux). After four weeks, the plants are moved to a greenhouse with a 10 hour day length, 85 degree F./78 degree F. day/night temperature, and the fertilizer solution is increase to 2000 umhos. Roots are harvested from plants at different development stages. The collected tissue is frozen immediately in liquid nitrogen, shipped on dry ice, and stored at −80° C. until total RNA preparation. The RNA is purified from the stored tissue and the cDNA library are constructed as described in Example 2.

[0247] The cDNA library of the present invention designated LIB3255, is prepared from rice roots. The Oryza sativa variety M202 is used for the collection. Seeds are seeded directly into 500 size pots filled with rice rooting media (44 Liters topsoil (Green-Gro): 26.43 Liters Perlite (Krum): 1 bag sand (26.43 L Green-Gro): 26.43 L peat (Fafard)) plus 4 TBLs sulfur (to 220 l of rice mix)). Seedlings are thinned to 3 plants per pot after germination. Pots are watered with tempered fertilizer solution (1000 umhos Peters 20-10-20 Pete Lite Special) as needed. Fe drench supplied as DTPA (ltsp/9gal), 1/16 tsp of MicroMax micronutrients, and ⅛ tsp superphosphate is added into pots about 10 to 14 days after germination. Plants are grown in a greenhouse in 16 hours day/8 hours night cycles. The daytime temperature is approximately 78° F. and the nighttime temperature is approximately 70° F. Supplemental lighting is provided by 1000 W sodium vapor lamps (GE Lucalux). After four weeks, the plants are moved to a greenhouse with a 10 hour day length, 85 degree F./78 degree F. day/night temperature, and the fertilizer solution is increase to 2000 umhos. Roots are harvested from plants at different development stages. The collected tissue is frozen immediately in liquid nitrogen, shipped on dry ice, and stored at −80° C. until total RNA preparation. The RNA is purified from the stored tissue and the cDNA library are constructed as described in Example 2.

### EXAMPLE 2

[0248] The total RNA is purified using Trizol reagent from Life Technologies (Gibco BRL, Life Technologies, Gaithersburg, Md. U.S.A.), essentially as recommended by the manufacturer. Poly A+RNA (mRNA) is purified using magnetic oligo dT beads essentially as recommended by the manufacturer (Dynabeads, Dynal Corporation, Lake Success, N.Y. U.S.A.).

[0249] Construction of plant cDNA libraries is well-known in the art and a number of cloning strategies exist. A number of cDNA library construction kits are commercially available. cDNA libraries are prepared using the Superscript™ Plasmid System for cDNA synthesis and Plasmid Cloning (Gibco BRL, Life Technologies, Gaithersburg, Md. U.S.A.), as described in the Superscript II cDNA library synthesis protocol. The cDNA libraries are quality controlled for a good insert:vector ratio.

[0250] Target cDNA library is generated as described above from the target tissues described in Example 1. Once a library of satisfactory construction has been made, 10⁶ colony forming units are grown in a large culture and then plasmid target cDNA is isolated for library subtraction. The poly A region of the target plasmid cDNA is blocked with poly T, which is generated using Not I-oligo dT primer following standard PCR procedures.

[0251] Driver cDNA is prepared from mRNA isolated from leaf and root tissues and driver first strand cDNA is covalently linked to Dynabeads, following a protocol similar to that described in the Dynal literature. The single strand driver cDNA is then stored on ice until subtraction.

[0252] For subtraction, the mixture of the target plasmid cDNA and poly T is heat denatured for 4 minutes at 94° C., immediately placed on ice for 2 minutes, and then mixed with driver cDNA-dynabeads in about 400 μl of 4× SSPE solution. The hybridization solution is heated for 1 minute at 94° C. prior to hybridization at 68° C. for 20 hours. The driver is trapped with a magnetic holder and the hybridization solution is removed from the system for the next round of hybridization with the refreshed driver cDNA-Dynabeads. The driver cDNA-Dynabeads is refreshed by heat denaturation at 94° C. in distilled water for 4 minutes, followed by trapping with a magnetic holder. The water containing the eluted plasmids is removed. The driver cDNA-Dynabeads is then resuspended in the previously removed hybridization solution for a second round of hybridization. This process is repeated a third time. After the third hybridization, the remaining unsubtracted plasmid is concentrated from the hybridization solution by filtration and used to transform E. coli.

### EXAMPLE 3

[0253] The cDNA libraries are plated on LB agar containing the appropriate antibiotics for selection and incubated at 37° for a sufficient time to allow the growth of individual colonies. Single colonies are individually placed in each well of a 96-well microtiter plates containing LB liquid including the selective antibiotics. The plates are incubated overnight at approximately 37° C. with gentle shaking to promote growth of the cultures. The plasmid DNA is isolated from each clone using Qiaprep plasmid isolation kits, using the conditions recommended by the manufacturer (Qiagen Inc., Santa Clara, Calif. U.S.A.).

[0254] The template plasmid DNA clones are used for subsequent sequencing. For sequencing the cDNA libraries LIB3220. LIB3221, LIB3254, and LIB3255, a commercially available sequencing kit, such as the ABI PRISM dRhodamine Terminator Cycle Sequencing Ready Reaction Kit with AmpliTaq® DNA Polymerase, FS, is used under the conditions recommended by the manufacturer (PE Applied Biosystems, Foster City, Calif.). The ESTs of the present invention are generated by sequencing initiated from the 5′ end of each cDNA clone.

[0255] A number of sequencing techniques are known in the art, including fluorescence-based sequencing methodologies. These methods have the detection, automation and instrumentation capability necessary for the analysis of large volumes of sequence data. Currently, the 377 DNA Sequencer (Perkin-Elmer Corp., Applied Biosystems Div., Foster City, Calif.) allows the most rapid electrophoresis and data collection. With these types of automated systems, fluorescent dye-labeled sequence reaction products are detected and data entered directly into the computer, producing a chromatogram that is subsequently viewed, stored, and analyzed using the corresponding software programs. These methods are known to those of skill in the art and have been described and reviewed (Birren et al., Genome Analysis: Analyzing DNA, 1, Cold Spring Harbor, New York, the entirety of which is herein incorporated by reference).

The application's sequence listing, which the Patent Office published only in electronic form, follows.

SEQUENCE LISTING (43701 sequences)

SEQ ID NO: 1 - DNA, 501 bp, Oryza sativa
  Clone ID: uC-osflcyp001a01b1
ccctcgcgttcgccggaggcgcctccgcctccacggccactataagagcgcggcggcggcggcggcgggggcggggggccatggcggggaagaaggaggaggaggaggctgttgtgtacaggggcgacaagctgatcctgcgggggctgcggttccatggcacccacggggtgaagccagaggagaagaagctgggccagaagttcgtcatcgacgtcgacgcctggatggatctcgccgccgccggggactccgacgacatctccgacaccgtcagctacaccgaaatctacaggatagccaagaatgtagtcgaaggcccgtcgcacaatctgttggaatcggtggctcagtcgattgcaaactcaaccctgctcaagttccctcagatttctgcagttcgagtgaaggttgagaaacctcatgttgctgttcagggagtcctcgactatttgggcgtggagatattcaggcagagaaaagcatgaacaacacctatac

SEQ ID NO: 2 - DNA, 577 bp, Oryza sativa
  unsure (1)..(577): unsure at all n locations
  Clone ID: uC-osflcyp001a03b1
ctctcatatataaaagctcgcaccaccgccacaatccctgctcctccccaacccatcgcttcccccctccacccgtctcctccgtctccggcgccggcgccggcgagctcgccccccgcgattcgtgccctccgatcagaggcgaggcgggagaagagatggggctcacgttcaccaagctgttcagccggctcttcgccaagaaggagatgcggatcctgatggtgggtcttgacgcggccggaaagaccacaatcctctacaagctcaagctcggcgagatcgtcaccaccatccccaccatcggattcaatgttgaaaccgtggagtacaagaacatcagcttcaccgtctgggatgtggggggtcaggacaagatcaggcctctgtggaggcattatttccagaacacccagggtctcatctttgctgtggacagcaatgatagggaccgtgttgtcgaagccagtgatgagctccacaggatgctgaacgaggatgagctacgtgatgctgtgctgctngtcttgctacaagcagatctgccaacgctatgatgctgctggacactgatagc

SEQ ID NO: 3 - DNA, 232 bp, Oryza sativa
  Clone ID: uC-osflcyp001a05b1
ctcctccatttttgctaatcccgacctctctccctcgctaatccgccgcgacgcgcacgcgcgcgcagtacaaatccgcgccgccgacctcgcctcgccgagcttgcgaggtggttccccgttcggcccccggggggcccgccatgggctagggtttgcgggcgatggagtgggacagcgactcggaggggagcggagacgaggaggaggaggaggaggaggaggagggggt

SEQ ID NO: 4 - DNA, 523 bp, Oryza sativa
  Clone ID: uC-osflcyp001a06b1
atctgatcagcagatcaccaagtctccttcacactcccactccagcggcagctgagcagagagctccaccgccgccggccaccatgagttctcaccaccgttacgcccacctcctcgacgaccccttcttccccttcccaccgccgtcctcctcctcctgccccttcctctccccacccgccgtttcctccacctgcccattcttcgccctcgactcccccttcgctgctgaccctttccatctccaccccttcctccccacgccgaccactagctccctcctcgaccccttcctcctccacaccctcaccgaccgcgtctcccaactcgagctcgccctcgccgcccgcgccccacaccccaggcccaccagcaggaagtgcacctatgtcaccgagtccaccggccgcatggtcaagtggaccaccgaggacaagcctcgcgccggcgagagggtgctcaagtgggaggctgagctcgactccccctacgacgatggattcgaccgcaagtggaagtggga

SEQ ID NO: 5 - DNA, 511 bp, Oryza sativa
  Clone ID: uC-osflcyp001a08b1
ttgcttcaaaaaaaatcaaacaaaaagaaaaaatattccccatctgtgaaattcgcaaaaccctagcgcggcggcgatgtcgaacacgagggtgttcttcgacatgaccgtcggcggagctccggcggggcggatcgtgatggagctgtacgcgaaggacgtgccgcggacggcggagaacttccgcgcgctctgcaccggcgagaagggcgtgggcaagagcggcaagccgctgcactacaaggggagcaccttccaccgcgtgatcccggagttcatgtgccagggcggcgacttcacccgcggcaacggcacgggaggggagtcgatctacggcgagaagttcgccgacgaggtgttcaagttcaagcacgacagccccggcatcctgtccatggcgaacgccgggcccaacactaacgggtcccagttcttcatctgcaccgtgccctgcagctggctggacgggaagcacgtcgtgttcggccgcgtcgtcgagggcatggacgtc

SEQ ID NO: 6 - DNA, 500 bp, Oryza sativa
  Clone ID: uC-osflcyp001a11b1
tcgctcgcctctcctcctcccccgtcttcccttcgcgcgcgccacccccacacacgcgaccatggcggcagcggcaggaggcgcagcgcgggcgctgtcgcaggcggagcaggacgtgcagatgatgctcgccgccgacgtccacctcggcaccaagaactgcgacttccagatggagcgctacgtctacaagcgccgctccgatggtatctacatcatcaacctcggcaagacatgggagaagctgcagctcgcggcgagggtgattgttgccattgagaacccccaggacatcattgtccagtcggcccgcccctacggccagcgcgccgtcctcaagttcgcgcagtacactggcgcgcacgccattgctggaaggcatacgcctggtacatttaccaatcagctgcagacctgcttcagcgagccccgtctgctcatcctcaccgacccaaggaccgatcaccagccaatcaaggagtctgctctgggaaacatcc

SEQ ID NO: 7 - DNA, 464 bp, Oryza sativa
  Clone ID: uC-osflcyp001a12b1
ggtgtcccactgatggtgctagtatggacaggagtttcctacattccatatggtagtgttccaaaaggaattccacggcgccttttcagccccaacccatggtcccctggtgcatatgataattggacagtcatcagggacatgccaaatgtgccactcctctacattattggtgccttcataccagcaacgatgatagccgtcctgtactacttcgatcacagtgttgcttctcagcttgctcagcagaaggagttcaatttgaggaagcccccatctttccattatgatttgcttctcctgggtttcctgacattattgtgtggccttattggtatccctccggcgaatggtgtcattccacagtctccaatgcatacgaagagtttggctactctcaaacatcaactactccgtaaccgactagtagccacagcccgacaaagcatgagccagaatgcgag

SEQ ID NO: 8 - DNA, 446 bp, Oryza sativa
  Clone ID: uC-osflcyp001b01b1
gcctagattcaggagcgatcggctccgcggcgttcgtcgctgtaaaatccattgttcatcgtctccctcaccggcgtttgtgttcgtgagtgtgagagtgttcctgggctgagccaacatcgaagtcagcaactccatctccaaggttctctggatggccaccctcagccccacctcgctgcccaactggaacaggatgcggatctcggtgaacaccatcacgcagaaccgcgccaagtcgctgcggcggctgcttgcgtcactgcggaacacgtactacgtcgacgacgaggtggtgccgatcagcttcaacatggacagccgcgtcgacgcggcgacgctgaacgccgtcaactcctccgacgctgaaccagtactaatgtgattcactccacctgactgacattgctcaaagttgagcaacaagacttgtccatcgtgatgaa

SEQ ID NO: 9 - DNA, 327 bp, Oryza sativa
  Clone ID: uC-osflcyp001b02b1
ctttaggttctcaccaccaaaggagctaggtatcagattggttttcgtgggcttaaatgaaaggaagacatggcggatatccctgagtgaacgctgcctttttacgtatcgaaactatatagtcatgacagataatgatgtggatgttttgggaagataaagctctttaggttccaccaccaaaggagctaggtatcagattgtttttcgtggggtgttaaaaaatcgtgcgtgtttcagtttggtttttaatcgaaaggcttacggtgcctgacttttgtacctctgtactcgccacagatgttgaagtattgacttgtcttgggc

SEQ ID NO: 10 - DNA, 458 bp, Oryza sativa
  Clone ID: uC-osflcyp001b03b1
cgccgccgcgccactcccatggccacgcaacggcctctcgccgtcctcctcctcctcctcctcgccgtctgcgcgctgccgctcgctcgatcccgcgcggcgccaagaacggccgtgggtggcggtggtggcgcggcggcggccgacacgatacacgagctcctgcggacgcacgggctgccgggggggctgctgccgcgaggggtggagtcgtacagcctcgacgaggcgaacgggctgctggaggcgcggctgtcggcgccgtgctacgccaagtacgacgacggcgacctggccttcttcgacaccgtggtgcggggcaacctcagcttcggcgcgctccgcggcgtggagggcctgtcccaggaggagctcttcgtgtggctccccgtcaagggcatcggcgacgccgacccgggctccggcgacattctctttgacatcggctacacccacaa

SEQ ID NO: 11 - DNA, 536 bp, Oryza sativa
  Clone ID: uC-osflcyp001b09b1
gcttcgacatgacgacgacgacgacgaggtttgttcagcttgccgcgtgcgcggcggcgtcgctgctcgccgtggcggcgagtggcgcggcggcgcagggcgtcgggtcggtcatcacgcaggcggtgttcaacagcatgctgcccaaccgcgacaactcgcagtgcccggcgaggggcttctacacgtacgacgccttcatcgccgccgacaactccttcccggcgttcggcacctccggcggcagcgccgagctcatccggcgggagctcgccgccttcttcggccagacctcccacgagaccaccggtggaacgaggggtagttctgaccagttccagtggggttactgcttcaaagaggagataaacaaggcgacttctccaccctactatggacgtggcccaattcaattgacagggcaatcgaactaccaagcagccgggaacgcgctggggctggacctggtgggcaacccagacctggtgtccaccgacgccgtgtctccttcaagacggccatctggttctggatga

SEQ ID NO: 12 - DNA, 481 bp, Oryza sativa
  Clone ID: uC-osflcyp001b12b1
ggtggtcatgattggctattcggactcgggtaaggacgccggtcgtctctgggcagcttggcagctgtacaagtctcaggaggagctcatcaacgttgccaaggagtttggggtgaagtctgacaatgctccatggacgcggtggaactgtcccaagaggcggaggtcccagtcatcttgccatcttgtgtcagccaccagacacattccatggatctctccgggtcactgtccagggtgaagtcattgagcagtcctttggtgaggagcacctttgtttcaggacactgcagcgtttcacggctgccactctggagcatggcatgcatccaccaattgcgccgaaaccagaatggcgtgctctgcttgatgagatggctgtggtggctacaaaggaataccggtccatgcgttgccaggaaccacgctttgtcgagtatttccggcttgcaacaccagagatggagtatggcaggatgaa

SEQ ID NO: 13 - DNA, 486 bp, Oryza sativa
  Clone ID: uC-osflcyp001c01b1
gttttcattgagatggactgtgaaaaaaatactgattctgttgacaaggagttaaagagcttgaaggatgctatgctgcaagaaggtgataaagaagggacattggctgaagaatttgaccctataaaacatattgaagcacatttgcctgttcgagtgaatgagcagagactaagtaacttgctgcaatccttattagttggtgcttgtgttggagctatgccagtcatcaagatgataccgacatcggtcctctggggttactttgcttatatggccattgacagtctacctggcaaccagttttgggaaagaataagacttatattcatcccatcaagccgacgctacaaggttttggagggtccccatgcgtctttcatggagtcagtgccttcaaaaacaattactgtctttacgatcttccagttggtttacctcttgatatgcttcggcataacatggataccaatagcagggatcctg

SEQ ID NO: 14 - DNA, 368 bp, Oryza sativa
  unsure (1)..(368): unsure at all n locations
  Clone ID: uC-osflcyp001c04b1
attcatctttagttacttaccactatatattcaataaattagctagcaccctagttctcttgctgattcctttcaataaaatcttcagttacttgctccttctaatccttttttattagttatttcactccatgaagtttcaatcaacgagcatgcagctagctagatagttttaaaaaatagcataaataattttgatgatatagattattctcagtggtggagccaggataaaattacagtgggggctcctcagccttttgggccttctaaccatctcagacaaagtctattttagcccccttgcaatagatttatagatttacattttagggggggggngggtctcaatggagggctctaatgat

SEQ ID NO: 15 - DNA, 497 bp, Oryza sativa
  Clone ID: uC-osflcyp001c05b1
gctgcagcagctgagcttgaagcagcagagcgaggtagacatggccgccgccaccatggccctctcgtccccggcgctggccggcaaggccgccgcgaaggtgttcggcgaggggcgcatcaccatgcgcaagtcggcggcgaagcccaagcccgccgcgtcggggagcccgtggtacggcgccgaccgcgtgctctacctcggcccgctctccggcgagccgccgagctacctgaccggcgagttccccggcgactacgggtgggacaccgcggggctctccgccgacccggagacgttcgccaagaaccgggagctggaggtgatccactccaggtgggcgatgctcggcgcgctgggctgcgtgttcccggagctcctcgcccgcaacggcgtcaagttcggcgaggcagagtggttcaaggcggcgtcgcagatcttcagcgagggcgggctcgactacctcggcaacccgagcctgatccacgcgcagagca

SEQ ID NO: 16 - DNA, 525 bp, Oryza sativa
  Clone ID: uC-osflcyp001c07b1
cataatcctgttccaatttcaaatgcaagccctctagaagcatatagagacttgacaatggaacggaaattgtctaaaccagcgaataaattgctgccactaaactgcagaaagaagaggcgtggtaaggagtttgttgccctaagccctgcagcgctcgagggatcagattgcgttgcgggtggagatgaactcaaagagaagttaaaaaatcattttgcggtactaagaggtatgtcagagaatgagagattgagagctgagctgaaccacacgttgtcatgcatcaacttgtacaaggaatacacgatgcagaagaaaagcaggaaatcaaaggctgccaagaaaaaggtttcaagggcttaagctgtgctgcgtttgggggaaatttttgcacaccagggaccaaaggtgtgcagaatgaacaattttgccatacccactttgtagcttatcgtagcttttgggtgtaacacatttgcagttccaagcatttgtctttaagctggttctatttcctgacat

SEQ ID NO: 17 - DNA, 465 bp, Oryza sativa
  Clone ID: uC-osflcyp001c08b1
tcgtattgatccgtcgacgccgcagccgcagccgctgccgcggcagggaccgaggcgacgccgacgggctcggtgctcacgggcgcggcacgtcaagcgccggctgccgctgttctgattcgcgtccgatggtggtgtccttactagctcccatggcggttccatcgtcgttggaaccggcagcaacgctggagaagaaagatctgaggcagaagctgatcgtggacgatcaagtgccgccggcgcctacatcagcggctgcctcgcacgaggctgcagtggcggctacggagttggcgtccacttccaaggatgggctcgtcgacctttcgctgtctcggtgttttctgatggataaggagaaagagggtacttggaggtatctaggaaatatggcatttttgcagataaagaagtcttctgaacaaggtgagagtgaagttactgatactgattaaaagctga

SEQ ID NO: 18 - DNA, 545 bp, Oryza sativa
  Clone ID: uC-osflcyp001c09b1
cttccagcttcttctcaactcgacataagagctccctggcttctctgtaggggggtcactttggtcgatggagggggggacgaagaaagttttcacagttcaggtggaggatggaaagcccaggaaggacggccggccggcggtagggccagtgttcaggagtgcactgtcaaaggatggattcccgccacttgagcctgacatgaaaacatcatgggacgtgttcagggtcgcagcaggcaagtacccagataatcggatgctcggatggcgtcctgtaaaagatggagtgatagggccatacatatggaaatcatacagggaagtgtatgaagaagtcctgcaagttggatctgctttgcagcagctgggggtgaagccaggttcccggattggaatatatggatcaaactgccctcagtggatagtagcaatgcaggcttgcaatggttacagcttaatttgtgtcccactctacgatacgttaggtgcaggagcttgtgacttcattattgaccatgctgaaatcgatgttatctttgttc

SEQ ID NO: 19 - DNA, 486 bp, Oryza sativa
  Clone ID: uC-osflcyp001c10b1
tcggtcatctcctcttgctcccgatcgctgcggcctactttgcagctcacacccaccccccacgcaaatctagaaccttctggatccgccgcttcctcgatccgatcgcctgccccgacgaccgtccgatcggatccccaagggtctccggcttgccgcccccgcaatccagatggcttacgatggcgccgggtaggcccaggagagctcggctaacccggcgtcggaggtaacagcggctgccgcggcgggggcgggggctggggcggcggaggagggggcggctgcgagtgggcgaccgccgaggcctccccacgacaagcggctcggcgtgcggcatcccttgaagcaccgcaggttccgcgccggggggaaggtgatggtggagcccggggatccgccgtccgcccaggaggtggcggatgaggaggccagcctggtggagcaggaggccggcccccggagagggaaccaccacaggaggag

SEQ ID NO: 20 - DNA, 566 bp, Oryza sativa
  Clone ID: uC-osflcyp001c12b1
tcgctccgtctccccctccggccgccgcaaggagaagcagcagcagcgatgcaggccgccgccgggcgcgcgcgccgcctcctcacgtcgccggcggcctccggtatcctctccgcgccgcgccccgggtgcgcggcgctcgccgggagcggcgcccttcttccccgtctcgatggtgtcccgtcctcgccgtcgccgtcaccggcccctccgctcctggctaggagcttctccgccacgtcctcgtctcgcctaccccgtaacttgctatcgccaagtatatcttctcaatggcggaatgagaaatcggtgtgctatcacatggctgcaactcactactcaacagaagcaagtgacattgatcaacctacagaggctgtagtggagctgtatcagaaaatgttgaaatctgttgaagccgagaccatgcctccgaatgcctggttgtggtcaatgataagtagctgttccaataaggaggacatcaaactacttattcagattttgcagaagctaagagtatttagactatcatatcttcgcatcgacgcaaaccttcacgatca

SEQ ID NO: 21 - DNA, 562 bp, Oryza sativa
  unsure (1)..(562): unsure at all n locations
  Clone ID: uC-osflcyp001d01b1
ccgtcgctttcgccgcaagtagccacccgcgccgccgccgccgccgtcgccggagaaggagaggagcagccatgggtcgcgtgcggaccaagacggtgaagaagacctcgaggcaggtgatcgagaagtactactcgcggatgacgctcgacttccacaccaacaagaaggtgctcgaggaggtgtccatcctgccgtcgaagcggctgcgcaacaaggtggccgggttcaccacccacctgatgcgccgcatccagcgcgggcccgtgcggggcatctcgctgaagctgcaggaggaggagcgcgagcgccgcatggacttcgtcccggagaagtcggcgctcgaggtggaggagatccgcgtcgacaaggagaccatggagatgctcgccgcgctcggcatggccgacctccccggcgtcgagcgccagcatgaggtcttcgtgccgacctactcccgtccgccgtacggtggcccccgccgcgaccgcgtctagatcgtcgtcgcctctttgcncgcgtcgtcgccatggctcgcctagctctgcgtactactgagttc

SEQ ID NO: 22 - DNA, 290 bp, Oryza sativa
  Clone ID: uC-osflcyp001d02b1
gtttccgtttcagaacagcccaagcccttcttcgatgggggcaggatgatcctgcccgagaagaagctcgcatcgtgaggagaacgaccaacgatggtcgatatcatgaacaagctgtggggctactggctcggtcagacggccaacatggagatctcctgcgccggccacaacataaagacattgtcgacgggcggatgagagggggcaacgtgactggcgtacaagctgaatgggatgccgtagaagccgttgtaggagctgctactgcagcactacctgacctaggg

SEQ ID NO: 23 - DNA, 520 bp, Oryza sativa
  Clone ID: uC-osflcyp001d03b1
gtgtgaagttgaatcaaccgccgccgctcgtcgcaagtcaccacacacaccctcgccgcgccgccgctcaattcagtgatgcaggcggcagcacccgcgtgggctccgcccatcgtctcctcggcttccgccgtcttcgcgcggccccgccgtggcgcgcgcgccggcgccggcgccgtccggtgcgagctcgccgcctccgcgccatcgtcggccgccggctcgttggccccacgctgggcccagaggaccgtcgtcatcccgcgcagcgccgcggctgccacctcatcacccccaagattgtgaacgggataagagacgacctctccgagttcaagtgcggcatggcacatctgttcttgcagcacaccagtgcttcgttgactatcaatgagaactatgactccgatgtccagtttgacactgaaacatttcttagtcgcattgtcccagagggtccatctgctccatggaggcacaccatagaagggccagacgacatgccagcacatattaaatc

SEQ ID NO: 24 - DNA, 417 bp, Oryza sativa
  Clone ID: uC-osflcyp001d04b1
actgtagttatccacaatgggcaaagatatatctctcggtaattggtgtttacgattggtcagggaacaatccaattattccagaactatggttgcttccacattttcttcccattcatccaggaagattttggtgcttttgccggatggtttatatgccaatgtcttatatatatgcaaaaagatttattgggccaataactccaactatactggcactaagagaagagctctatgatgtaccatacaacaagatcaattggaacaatgctcgcatttcttgttgcaaggtattaaatatgatttgctgctggatagaaaatccgaactccaatgcattcagacgacacgttccaaggattcatgatttcctatggcttgcagacgatggaatgaagtcaaaggcggcgttgctgt

SEQ ID NO: 25 - DNA, 584 bp, Oryza sativa
  Clone ID: uC-osflcyp001d05b1
ccttgtctgcagccatactatatggacttagtgccaacagttgatgaaggatctacatctgctcgccgaccatctggttgtcaggtactgtctttccttaataagactgcaaagatgagtgaattttctccaagggaggttttcccaggtagctctaaccagagtcaaggtccggctccaatgccaacattgcttcaactgccaaaaagtccagtagcctgtacttccggtttatctcgtccacaacagcgcagcagtagcacaaaaaactgtacatacccaggatgtatgaaaggagccagaggttcttcagggcgttgcattgctcatggtgggggtagaaggtgccaaaaagatggttgtgacaagggggctgagggcaagacaatattttgtaaggcccatggtgggggaaggcgctgcgaacaccttggatgcaccaagagtgctgaaggtcgtactgacttctgcatagctcacggtggtggccgtcgttgtagccatgaaggatgcaaaagagcagcaagagggaaatctggtcgctgtattaaacatggtggtggcataggtgtcaacatgcaggc

SEQ ID NO: 26 - DNA, 594 bp, Oryza sativa
  Clone ID: uC-osflcyp001d06b1
ctctgcatgtacggcgagatcgagagcctccacgtgtgtgacaacttcgccgaccacatgatcggcaatgtgtatgttcaattcagggaggaggatcaggccgccagagcgctgcaggcgctgacggggcggtactactccggccgtcctatcattgtcgagttctcgccggtgtccgatttccgggaggccacctgccggcaatatgaagagaacagctgcaaccgtggtgggtactgcaacttcatgcacgtcaaggagatcggcagagacctgaggaagaggttgtttgggcacctgcataggtcccggagaagccatagccatggccggagccgcagcccgagcccgtaccattaccggagggactatgatcggaggagctcatcgcggtccagggagcacgacgattactaccgtggaggtagccacgattactaccgtggaggtagccggaggagcagcgagaggcaccgcagcagctacgacagcgatggcagcaggcggctgcacaggtccaggactaggagtcctgtcagggatggtagcgaggagaggagagctcatattgagcagtggaaccgtgaagggagg

SEQ ID NO: 27 - DNA, 578 bp, Oryza sativa
  Clone ID: uC-osflcyp001d07b1
ctttgatccccatccatccggcgagcgagcagggcgccgttgttcttcctgccacatccatcctggtgagcacatcctccgccaccgccgacccccaaccatcgcgcgagcgagcgagcgaccgtcgctcgtcctgctgcttccgccacatcggtggaccgtggacatgcacactacaaatgtcagggtttaatcggatgggttctgatggcaattttggcaaaggtccacgggagctcactggtgctgttgacttaattagccgttacaagctcctgaaccatcatagtttcttttgcaagaaacctttgccactggcaatttccgatacaaattatcttcacaatgttgtgggagacacagaaatacgtaaaggggaaggaatggagcttgatcaactctttcaggatgcatacctaagggagaagacctcttacattcaaccctttgacatggaaacacttggacaagcatttcagctgcgagatacagcaccaatagatttgccttctgctgaaaaaggtacgccaactatatcgggtaaatcatagatcaagtcccaagacaaagtaaagaag

SEQ ID NO: 28 - DNA, 579 bp, Oryza sativa
  unsure (1)..(579): unsure at all n locations
  Clone ID: uC-osflcyp001d09b1
aaatttctcttgagaccgtagagagagagagaggcgccaaccatggccggcatcatccacaagatcgaggagaagctccacatgggcggaggcgagcacaagaaggaagacgagcacaagaaggagggggagcaccacaagaaggacggggagcacaaggaaggcgtggtggagaagatcaaggacaagatcaccggcgaccacggcgacggcggcgagcacaaggagaagaaggacaagaagaagaagaaggagaagaagcacggcgaggagggccaccaccacgacggccacagcagcagcagcagcgacagcgactgagccgccgcgcccccacaccggcgccgtgcgtgcgtgcatgcaggtgatgctgcagatgattggaggagttcgtagcaggattaattagtatctgtgcaatacgtgatgcagtgatctgtctcatgcatgtatctgtgcttgattgcaagaaaaaaaaaaggcatggtttgcctttgtgatgtactgataataattgctgcacggtgcctngtatatgaacgctaattatgatgaaattgagtgtattatcctggcgtc

SEQ ID NO: 29 - DNA, 455 bp, Oryza sativa
  Clone ID: uC-osflcyp001d10b1
tcggctacgccgattcctctcctccttctccgcctcctcctccggcgtcgtctgcgtcagcagcggccccggccatgggttgcggcggctccaaggaggacgtgtccaccggcaacaccaccgcccccgccgccgccggcagcagcaagctcttccggaggaagtcctccgtctccgccagccaccgctcctcctcctcgtcgtcttccaatggatgcacctccgtctccgtcaaggacgtcgcgacgaagaaggaggaggagaccgaggccgacgccgtcgaggtgacgtcggccgaggaggcggcggcggcggcggtggtggtcaagaaggacgtcaccatcgccgctgccacgctcgcggtgaccgaggcgatggcgacggcggcggaacccaaagaggaggaagaggaggaggaggtagcttccctagtccaccatggccgacgaggcccc

SEQ ID NO: 30 - DNA, 515 bp, Oryza sativa
  Clone ID: uC-osflcyp001d12b1
gtcaaatcgactagccatggctgctccccgcacgcctctccccctcgtcctcctcctcgtctccgccgcgctcctcgcggcggctcccctctcgccggcggccgagaccggtgccgacgcgttcgacgtacgccgccacctatccaccgtcaccaggtacgatgtggcgaggggatccaatagtgtgtcctgcgcgccgtctatgtcggatgagtgccgagtgatccacctcaatctcgtggcaagacatgggactcgcgcacctaccaaaaagagaatcaaagagctggatagactggcggctcggttgaaggctcttatcgatgaagcaaaacaagggcctgaaagtgactccctgaaaaaaattccttcatggatgaaagggcgggagtcaccctggaaaggtagggtgaaaggtggagagctggtcagtgaaggtgaggaagagctatacaaccttgctatcagagtcaaggagaggtttcaaggcctattcgatgaggaatatcaccctg

SEQ ID NO: 31 - DNA, 493 bp, Oryza sativa
  Clone ID: uC-osflcyp001e01b1
ggttacatttcgatccttcttgcgctccggcgccgccgtctccccctcgcgcggttgcctgagccaagaacaggatcggaggccaggccccatgcatgcatgttaattagtctgtcactgatcacttcatcccattagccattagctgtttctcatccagacggacgcgccatccaacacacatcgatcgatcggaggttgattggccggccatgacgacgacggccgccggcggagccaccctgtgcgcggcgagggaggagcaggagctcctggccacccgcctgaatgtgaacggcatccggccgccgcattgcgccgtggaatccatcctcatctacctcaccgggccggggctctccatgatgcccatgcgggtgatggcctccgactccatcgcctccgtcaagctccgcgtccagacctccaagggcttcgtcgtccgcatgcagaagctcgtcttcgatggccgggagctcgcccggaacgacag

SEQ ID NO: 32 - DNA, 428 bp, Oryza sativa
  Clone ID: uC-osflcyp001e02b1
ctttaacctgcagaagagcctctcctcttcttcgatcgtcgcatgaagatactaccagagaagcagatcgcagcgagaggagaaagatcaaagatggacgatatcatgaacaagctggggggctactggctcgggcagaaggccaacaaggagatctcctccggcggcgacgacatcgagtcgctgtcgacgagcgtcggagagggggcaaagtggctggtgaacaagctgaaggggatgatgcagaagccgttgcaggagctgctccgggagcacgacctgccggagggcttgctcccgcgggaggcgaccaactactagttctcgccggatactcggctgctgacggtgcacatcccggcggcgtgcgaggtctgctacagggacggctccgtgcttgggttcgacgccacagtgtccgggactct

SEQ ID NO: 33 - DNA, 271 bp, Oryza sativa
  Clone ID: uC-osflcyp001e03b1
gtcgctgtttccggacacgccgctgtcggacctggaccggaggttctccgtcgccatcagggacctcaactccaggctcgccgccgacccgcgcatcgacgtctgccagctcgccatcgccgacggcatcaccatctgccgccgcctcgtgtgaggtcgagaccgagaccttaccggccgatccatccatcgctctcgcgtgattaattaacgtgtgttgctgtactcttctactgctacaactatactattacttccttaattgccgctt

SEQ ID NO: 34 - DNA, 542 bp, Oryza sativa
  unsure (1)..(542): unsure at all n locations
  Clone ID: uC-osflcyp001e04b1
agtttgtctgtgttgtcttccggtttcagatctttaagatgatgaagattttttttaaaataaatgcttgaattttaatattttattatttctaatgttctaaactgttttatactttgtaatacatgtatcatgggcattgtttgaggaaattagttttgcattcagtgttaaaaagttaactcggttgtttttttttgtcacgttctagatagaaattacttttctagaataaattgcatttgtcagaattgattctagtaagatgctcttatgtttttttttgtcacattctagatagaaattacttttctggaataaattgcatttgtcagtattgattctagtaagatgctcttatgctgcatctgtttatatatcctttaaaggcttatatttgtgcttactaagatgctcttatgctgcgtccgtttgcagagaattctacagtgtgatccctcatgacttcngttttaagaaaatgagtgagcttttaacgctctaactaattgatctttaagtcatgattaaataattagggc

SEQ ID NO: 35 - DNA, 182 bp, Oryza sativa
  Clone ID: uC-osflcyp001e05b1
gtttccagttacctctgttcgtaacagtgattgagacttgaattgatatctatgctagaattggatcaactatgctacaaatctactctagtttgtactcgctacaattttggtctgctgtgtcattgttcacgttgcacttgataatagcagctaagctaatgtcatcaaattgctggtgc

SEQ ID NO: 36 - DNA, 501 bp, Oryza sativa
  Clone ID: uC-osflcyp001e06b1
atttaaggctcttaatgaatgagatcatgactgggtcagtggatacaagatcagtggtgtcaaagatgactttagcattactggaggacagcgggtggtatcaagctaattatagcatggctgagcatttagattggggtcgcaatcagggaacagagttcgttatctctccctgcaatttatggaaaggggcataccgctgcaacacaactcagttatcaggatgcacatataatagggaggcagaaggttactgccctatagtaagctatagtggggacctgcccaaatgggctcaatatttccctcaagctaataaaggtggccagtcttcgttagcagattactgtacatattatgttgcttattcagatggttcgtgcactgatgtaaatagtgcacgagcacctgacagaatgttaggtgaagtgcggtgaagcaactcaaggtgtatggcctcaactctagtgcgaactgggtttgttcgcggatctatgacac

SEQ ID NO: 37 - DNA, 461 bp, Oryza sativa
  Clone ID: uC-osflcyp001e07b1
cctaaaggaaattaggctagggttttcgccatggctaccacccaccacctcgagctccccctctccattcccaatctctccgactcctcctaattaatcccgtattcccaccccccaagccaaggacagcatctcgcatccgcgtcctttaattgatttgattgggttccccccctccatttcagggtttcgtttcgcatcgcagcaatcttcccgacccagcaagcttcttcttcccttgggtccgttagggtttgagattgagaggggcggcgctggcgatcgagattggtacggcggcggaggcggaggtgggcggataatgtgtatactgtgcgccgtgcaacggtggtcgcggcgcgtcgccaccatgctgccatggctggtgctcccgctcatcctcctctgggcgctctcccagctcctccccgccgcctaccgcttcgaggtcacctcccctc

SEQ ID NO: 38 - DNA, 491 bp, Oryza sativa
  Clone ID: uC-osflcyp001e09b1
gtgccatcagcccatcaccaacggaagccgcgaaaaataggcaaaaaaatccccaaatccaacaacctgtagcccgcttcagtccgacgaccatggccactcctttgctcgccgcgctcctcgccgccgcgctgctcgcctcgccggcggcgccggcggcgtcggccagcggcggcaccatcgtcttcaccaccctcggccgcagccgctacgagttcgacatcttctccctccccctcgcgccctccccccataaccccgccgccgtcgtcgagctccgcctcaccgatggcgtctccgtcaactacaacggcaacttcgcccccgcctccgattccatcctcttcgtctccgagcgcaacggctccctcaacctctacctgtccccggttccctcctcccgccgcgaggcgctcgagtcggcgtcgtcgtcgtcgtcttcggcggcggcgacgatctcgccgctcctcccatgggagccaatcgcgctc

SEQ ID NO: 39 - DNA, 342 bp, Oryza sativa
  Clone ID: uC-osflcyp001e10b1
tcgcttcggcggtcaccacggcggcaagttcaagcatggcaagcacggccaccatggcaagttcaagcatggcaagcatgggcacggcatgttcggtggtggcaagttcaagaagtggaagtaatgcgcatgatctgatcatgctggaactctgtttaggctttaactgaagtgcttgcgcttggctggttaaaagcctaaaaaaagcctctcgaatgtatctaagcaggatggagctttgctcagttgctgctcccatccttcctctatgatttggtactctagtatgtggctcagtgacaatatggcttgctaataattaattaaataccttctgacgct

SEQ ID NO: 40 - DNA, 540 bp, Oryza sativa
  Clone ID: uC-osflcyp001e11b1
gtctcgggggaccatctctcggcatcgatcgatcgccgccggtgtcggcggcgaggggcggcgcggggatggcgagcggcaacagcggcgagccgagcacggcgccgcagccgaatcggtggtacgagctccggctgggctcctcctgccgcgacccctcccccaccgccaagttctgcacgctccgctatgaatttaagccagcatcaattgataagactcaagctgggtctctgcagaagaccaaagataacagggttactgtggaattccacaacaatcagcctggcaagccaaaggtgacatttgaaggaagccaagaagagtacaaggataatgatggtgtcttgttttttgatggtgaaacctttcgtctggagcggttgcatcgggctgtcaagagattaaggcatgtccgagttccaggagagtcttcggcagccacttcggctactactggaatgggcgaatcacattcccctccattaccgaaagttggaaagtcaccggccatgagtaaacctgctgtacactcagttc

SEQ ID NO: 41 - DNA, 60 bp, Oryza sativa
  Clone ID: uC-osflcyp001f04b1
attttggtttgatgaacagactagagataaaaaagggaaaggaaatccaaagaaagctaa

SEQ ID NO: 42 - DNA, 567 bp, Oryza sativa
  Clone ID: uC-osflcyp001f05b1
gcatggatctcactgagagtaagtgcgatggcgggcaagaagttagcttgctggacgctcagctcgagctctactggaacaccttcgccgtcatcaagtccatggctctcaagtcggcgctagacctccgcatcgccgacgcagtccacctccacggcggcgccgccaccttggccgagatagccagcgaggtggccctccacccgtccaagatcccctgcctccgccgcctcatgcgcgcgctcaccgtctccggcgtcttcgccgccgccgtcaagcccggagacggggggtggtgagcccgtgtacgagctcacgccgtcgtcgcggctcctcgtcggctcctcgaacctgtccggcatcatgtccatgatcctccacccgacgctcgtcgtccccttcctcggcgtcggcgagtggctccgccgcgaccgcgagccgccggaggaggacccgtactgcatcttcaagcaggcgcacggccggagcctgtgggagctggccggccgcgacgcggtgttcgacgcgctcatcaacgacgggatggtctcggacagccgcgtcatc

SEQ ID NO: 43 - DNA, 482 bp, Oryza sativa
  Clone ID: uC-osflcyp001f06b1
atttttagttgcttttttgggtctctactcttttagctgtagaaaatttgcagtgcaaatcatgcaaccctttttagctgcagagcaaatgcaacactgcacactgcaacattgtcatccagaaaaagaacagaaatacatactggtattataaaaaaaaaaggggtaatcagattactgtgacaagtttgtttttcctgcagggttggctgtgatcacagtgatgctggtgaccacctgcctgacgtccctggtgatcatgctgtgctggcgcaggccgccggtgcttgcgctgtgcttcctcctcttcttcggctccgtggaggcgctctacttctcggcgtcgctcatcaagttcctggagggcgcgtggctgcccatcctgctggcgctcttcctcatggccgtcatgctggtgtggcactacaccaccatcaagaagtacgagttcgacctgcacaacaaggtcaccctggagtggc

SEQ ID NO: 44 - DNA, 527 bp, Oryza sativa
  Clone ID: uC-osflcyp001f07b1
ccttagcacaccccacgcttccgctccgcgcatctccgtgggtgggttgggcatataccttgcttcagtcgctttcccatctcttgcttcgtcctgccttcttctttcttccgtgatcccggaacccggtggtcgccgccgcctcggtggatcttgctcggccctgcggggtgctcaggattaacagtgaggggacattctgtattcagtaatatcaagtttctacaaataaataggtgtaggaatacctttgatgccccatttacactgtttgtgcaatgtctttatattctattttctgtgggaacttccatcaactaaggaattcaataggaagctgttctagtaccagtttgcttaaatgcggattaatctatagaactgtacttcagaacagaggaaataaaactcgaccaatcagtacgacaatactagcaagaagtccaagaaaagaaagtaagcagtcattcaaaaccagccgtcatttgcatagtgaatcggttgagtcatcgattgaagtgctcaaa

SEQ ID NO: 45 - DNA, 150 bp, Oryza sativa
  Clone ID: uC-osflcyp001f08b1
tcgcgttatttactgcatacacgataaatgttgtactgttacttgatttttttgtatcttggagagacagaacagaattagttaattatttgtccaaacaataaaaaagctaaaaaaaaaaaaaaaaaatgttaacaatattcaagtaag

SEQ ID NO: 46 - DNA, 518 bp, Oryza sativa
  Clone ID: uC-osflcyp001f09b1
atttctattgcgaaggccattgcaattgttatggagagaaatccacacttgaggcaagaagggattgctcatgatgttcttcagtggtatttgtgccgcatggaaggttggtttgctactgatgcggacgcaatctctcttcagggttgggaccaggaggtactgcttcctggtggccatggtctcatggttcgtggatatcgtccagtaataaatactctggcaaaaggcctagatatacgccttggccacagggttgttgagattgttcgccacaggaatagggtggaggttactgtaagcagtggtaaaacatttgttgcggatgctgcagtcattgctgtccccttaggtgttcttaaagcaaacaccattaaatttgaacctaggctgccagagtggaaggaggaagcaataagagaactctcagttggagtcgagaacaaaataattctccacttcagcgaggttttctggcctaatgtggagttccttggagtagtttcatccaccacata

SEQ ID NO: 47 - DNA, 540 bp, Oryza sativa
  unsure (1)..(540): unsure at all n locations
  Clone ID: uC-osflcyp001f11b1
cctagcgctcgagcgaaccgtgagcgaccctcgcccaccgcctccgttccccatgacgatatcgctgccggcgacggcggcggctctgtccgtcgtcctcgccgcgctctgcctccttgtggtcccggccgccggattctacctcccgggcgtcgcgcccaacgacttcgaaaagaaagaccatctccctgtgaaagtcaataaactgacttcaattaagacacaacttccctactccttctactctctcccattctgcaagccagatacgatcgttgacagtgctgaaaatctgggtgaagttctccgtggggatcgcattgagaactctccatatgtgtttgaaatgagggtacctcagatgtgtcaaatagtctgcaagatttcagttggggaaaaagaaggaaaggttctcaaggaaaagattgaagatgagtaccgcgtgaacatgattcttgacaacctacctctagttgttcctattcaaagagtggatcaagaaggtgcttatttctatcaacatggngtccatgttggagc

SEQ ID NO: 48 - DNA, 572 bp, Oryza sativa
  Clone ID: uC-osflcyp001f12b1
gccgccgccgccgccaccaccgttgccgttgccgcctccaccacccgccctcgaccacagccattccgccgaagctcgacccgacccaggtggtggatgtgttcgtccgcgtgaccggcggtgaggtcggcgcggcgtcgtcgctcgcccccaagatcgggccgctcggtctctccccgaagaagatcggagaggacatcgccaaggagaccgccaaggactggaagggcctccgcgtcaccgtgaagctcaccgtccagaaccggcaggccaaggtctccgtcgtcccctccgccgcggcgctcgtcatcaaggcgctcaaggagcccgagagggaccgcaagaaggtgaagaacatcaagcacagcggcaacatcagcctcgacgacgtcatcgagatcgcgagggtcatgaggcccaggtccatggccaaggagatggccggcaccgtcaaggagatcctcggcacctgcgtcagcgtcggctgcaccgtggacggcatggaccccaaggacctgcagctagagatctccgacggcgaggtcgagatcccctcagcttaagcaggtttg

SEQ ID NO: 49 - DNA, 510 bp, Oryza sativa
  Clone ID: uC-osflcyp001g01b1
gtttggttttggtagagaggaaagggagaggagggcggaggaagattatcgcaaacggcctgaacatggtggcggaggtggccgcgaaggccgggaaggcgatcgactgggaggggatggccaagatgctcttctccgacgaggcgcgcaaggtgttcaacaccctgcgtcgcaccttcgaggacgtcaaccaccagctccagaccaagttctctcaggagccccaaccgattgactgggagcactacagaaaaggaatggggtctaaagttgtagatatgcacaaggaagcttatgaaagcattgaaatccccaagtacgttgacaccaggactgctcagtacaagccaaagtttgatgcgctgcttgttgagctgaaagaagcacaataggagtctctgaaggagtcagagaggatagagaaggagcttgctgaattgcaggagatgaagataaatatcagcacattgacagcagatgaatactttgcaaagcatcctgaggtcaagc

SEQ ID NO: 50 - DNA, 447 bp, Oryza sativa
  Clone ID: uC-osflcyp001g02b1
ctcctcttcttcctcctctctacgacctcttcccgccgctccctccccctccatttcctcttctccaccgcctccaagaacagcaaacccaactcctcccccctcctctcctcgcatttcttcgacctgccattccacacccgcgcgcgcctcaaactctatgtgagggaagggaaacaatcgacttcccagctgagaaaccaagaagcagcagcagcagccatgcgtccgtccttcctcctcctcctcgtcgtgtttgccggcgtcttggccggcggggcgcgcgcggggccgccgttggcgggcgagaatctgccggtgcagctgttgccgggcgagaagccgccggggcagccgttgccggggcagccgttgccggggcaaccgttgccagggcaatcgttgccggggcagccgttgccagggcagccgttgccagggcaatcg

SEQ ID NO: 51 - DNA, 422 bp, Oryza sativa
  Clone ID: uC-osflcyp001g07b1
gctaggtagagcaggacaaggaggaaattaaagatgtctgatcttacagggctgctgagcgtgagagtgctgccaggggtaaaccctgttagccgagatgccagcggcggtgatccctatgttgtgcttcacctggacactcagaaactaaagacaggtgtggtaacgaacacaactgacccagattggaacgaagagctgactgtagctgacaggaatccaaatgcacctatccaggtagaggtatttgacatggacacattcgtttacgatgaccagctgggcgacgcagaattcaacattgacgcgctgatgcaaatcgtgaggatggatccgcatgacatcctcagtgacgccgcggtccacaccgttcgagccggcagacagtgctgtctagcagaccagagtcacattgtgcggga

SEQ ID NO: 52 - DNA, 508 bp, Oryza sativa
  Clone ID: uC-osflcyp001g08b1
cggacgcgtgggctcgcggaataataaccttttttttttctttttccaagcgcccttcaaacccatctcctctcccctctccctcccaattcgatgcagccgcggtagcaattcgcatcgccccgccctcctcgccgcgcggattcgctcgccgcccccgccaccgcacccccatggacgcctccgccggatccggcaatgcctccggtggcgccggcgccggcgcgtccgcgtgctgctactactccctgctcggcatccggaagaacgcgtccgccaccgacgtgcgcgccgcctaccggaggctcgccatgaagtggcacccggaccggtgcgtgagcgaccccggcgaggccaatcggcggttccagcggatccaagaggcgtactccgttctgtccgacaaggggatgcgagccatgtacgacgccgggctgttcgatcccctcgacgacgacgaccaggatttctccgatttcatgcaagagatgctggtgatgatggataa

SEQ ID NO: 53 - DNA, 587 bp, Oryza sativa
  unsure (1)..(587): unsure at all n locations
  Clone ID: uC-osflcyp001g10b1
ccctcgcgtccggcaagaagaagccgagcagcagcagcagagcttagcagcattccatggcgatctcctccgtcttcctgcgtccatcgctgttctcttccccgccggcggcggcggcggcttcctctccccggcgacatgcagcagtgctacgcgtcacctcgagcaagaggagaccactcttctcaagggcggcgacgtcgctgacggtgagatgcgagcagacggcgaagccaggcggcggcaccggcgccggcgccgccgacgtgtggctgagccgcctcgccatggtcagcttctccaccgccgtcgtcgtcgaggtctccaccggcgaaggcctcgtcgcgaacttgggcgtggcgacgccggcgccgacgctggcgctggtggtgacgtcactcgccgccggcctcgccgtctacttcatcttccaggccggctcccgcaactgaagaaacaaaccgaactgaatcgctgaaacatccaagaactngacatctcaacatgttcttctcaactgatgatgagactcaagattatatctctgggatcggactagttctggcaaatatacaagcatatataga

SEQ ID NO: 54 - DNA, 523 bp, Oryza sativa
  Clone ID: uC-osflcyp001g12b1
ggtggaggaacgggctccggtctcggttcccttctccttgagcgtctctctgtggactatggcaagaagtccaagctcgggttcaccgtgtacccgtcccctcaggtctccacctctgtggttgagccatacaacagtgtcctctccacccactccctccttgagcacaccgatgtcgctgtcctgctcgacaatgaggccatctatgacatctgccgccgctccctcgacattgagcgcccaacctacaccaacctcaacaggcttgtgtcccaggtcatctcctcactgactgcctccctgaggttcgatggtgctctgaatgtggatgtcaacgagttccagaccaacctggtgccctacccgaggatccacttcatgctttcctcctacgccccggtgatctcggccgagatggcctaccacgagcagctctccgtggcggagatcaccaacagcgccttcgagccgtcctccatgatggccaagtgcgacccgcgccactgcaagtacatggcgtgct

SEQ ID NO: 55 - DNA, 471 bp, Oryza sativa
  Clone ID: uC-osflcyp001h01b1
atcgccggcggaggagaagcaggagcagtcggcggcggaggcgtacagcgggggagcagtaggcagcggatgcgcacagcgggggatgcgacggacggccaggcgaagcaggcggcgtcgcacggaagggttggaaagatgacagataatctaataggtgattgctcaacaagctcaaagaaaaggaagaaagcttgcaaaagtagaggagagacaagaaaattgcatgaagataacatttttgaagaggagtttggcagcttgaagaactctggtcaaggagcatggagtgaactgagtaaagtagtagcgtcaaacttatctgaaagtgttgtctcgctggcttcattcgatggggatattatgcattctgcatgcacaggcgtagttatcaaaactgatttatttggcacaagttacctgacttcagctagcctgattagatcttttgatgatgacagcaagatcatg

SEQ ID NO: 56 - DNA, 437 bp, Oryza sativa
  Clone ID: uC-osflcyp001h02b1
attctgtgtgtgtgtcttggttgcaaaaaccaagacatacacacagaatcaaataataacaaaggtttcctagcctcaaaggatacatatatatagttgccctacaatacaatggagcctgtcaatgacttccaggaaggcatttgaacagagcatgcctttgaggcagagcctgtgccatcattgtcggaaacattaacgccacgatcaatggaggtgagcttcatccttagtgtaactctcagcatcgtcgccatgaaggtcaccttgagctctggctgtattccgtcgttcaccatgccagccggcctcctcggtttttgtgtatgccgtgcgtcgatccgcattcttgactactttgcagtggcacatctaccattcacacgccaagagaacaccatcatccatacctgtgttgtccatgcacctcgagacat

SEQ ID NO: 57 - DNA, 517 bp, Oryza sativa
  Clone ID: uC-osflcyp001h03b1
agtgagaactgcaaaggttctgattctccaactatggaagggaaaccaaaaggatcgccattttcttctgaaaagtggaaagggcaaatagagaaggatttgcctagaacgttcccaggtcatcccgcactagatgaggatggcagaaatgctttaagacgcttgctcacagcttatgcgagacataacccatcagttggttactgtcaggcaatgaatttctttgctggtctgttacttctcctaatgccagaggagaatgcattttgggcattgacaggcattatggatgattattttgatggctacttttctgaagaaatgatagaatgtcaggttgatcagcttgttttagaggagttagtccgggagaaatttccaaaactagtaaatcacctggattacctcggcgttcaagttgcatgggttactggaccatggtttctatctatattcatgaacatgctaccatgggaaagtgtccttcgagttggggatgtgcttctgtttgatggaa

SEQ ID NO: 58 - DNA, 442 bp, Oryza sativa
  Clone ID: uC-osflcyp001h06b1
tgctgcgggtgcttcggctacgcggccttcggcgacgccacgcccggtaacctcctcaccggcttcggcttctacgagccctactggctcatcgacttcgccaacctctgcgtcgccgtccacctcctcggcggctatcaggtgtactcgcagccagtgttcgcggcggtggagcggcggatgggcggcgcgggggcgggcgtggtggaggtggcggtgccggcggcggtggcgtggccgtcgcggtggcggcgcggctgccgcgtgaacgtgtacaggctgtgcttccggacggcgtacgtggcggcgacgacggcgctggccgtgtggttcccctacttcaaccaggtggtcgggctgctcggcgccttcaccttctggccgctgtccatccacttccccgtcgagatgtacctcgtgcagaagaaggtggcgccgtgga

SEQ ID NO: 59 - DNA, 452 bp, Oryza sativa
  Clone ID: uC-osflcyp001h07b1
gttggatcttgttcagaagtctgtgagaaaccttgactacaggacaacactaaacaaacaccaattggacactttgaagaatgaactcaaaggccagcgtgtcactgtaaatcataggaggacaaagcagaagtacattgttaaaggtttgactgataaacctgcaagtcagataacttttgtagattctgaatcaggacagaccaagaagcttcttgattactattcgcagcagtatggcaaggttattgagtatcaaatgcttccatgcttggatttgagcaagagcaaggacaagcaaaactatgtgccgattgaattgtgtgatcttcttgaagggcagagatacccaaaagcaagcttaaataggaattctgataaaacactgaaagaaatggctttgatccctgcctcaaggagggaggaggagattctggagttggtgatgctga

SEQ ID NO: 60 - DNA, 435 bp, Oryza sativa
  unsure (1)..(435): unsure at all n locations
  Clone ID: uC-osflcyp001h09b1
cccctcttcctcccttccctctttctctccccttttctccctttcgaccggtcgccgccgcacgggctggagcgatgacgggcgggggccagagcggcggcggccggcgggagctgagatcagcaatggaaacgatggcgtgggcggcaccggggagcatggggaaggtgaggacgctgaggaggaaccagttgaggctgagcggcgcgacggcgtcggaggaggaggaggaggccggcctaccgccctggagcgcggcggcggactcgcggaggaagaagcgcgcgacgctacacatggacatatccactgtggcgaacatctncgccagcaacggcaagcacaacgcgttcgtcgtccacaccaccgtccccactgtcgttgccatgcccaggctgaccatgctccaccgtcttgccccgacgcatatgcacg

SEQ ID NO: 61 - DNA, 423 bp, Oryza sativa
  Clone ID: uC-osflcyp001h10b1
tcgcttttcctccccctctttaccttttcctcctcggttcggttccgtggctcgtctagggtttagtgggttgagatggcggcgccggatgtcgagtaccgctgcttcgtcggcggcctcgcctgggccaccgacgaccgttccctcgaggccgacttctccacctacggcgagatcctcgactccaagatcatcaacgacagggagacggggaggtcacgtgggtttggcttcgtcaccttctcctccgagcagtcgatgctcgacgccatcgagggcatgaacggcaaggagctcgacggccgcaacatcaccgtctatgaggcccagtcccgccgctccggcggcggaggcgggggctacagcggcggcggcggcggctacggcggcggtcgtggaggcggctgctacggaggatgtggc

SEQ ID NO: 62 - DNA, 571 bp, Oryza sativa
  unsure (1)..(571): unsure at all n locations
  Clone ID: uC-osflcyp001h11b1
tcggggtaccccagcactgacctcaagaggatttgttgaggaggactttgctaaggttgctgatttcttcgatgcagcagtgaacttggctttgaaggttaaggctgcagcaggtggaacaaaactgaaggactttgttgccactttgcaatctgatagcaacattcaatccgagattgcaaaacttcgccatgatgtggaggaatatgcaaaacagttccccacaattgggtttgagaaagaaaccatgaagtacaagaactaagaaactttgaatggaacagcaagggtaaaagaaaaggcatcaagctgaattcctgaggtgactgttggaattcttgcaagaacaagtcggtgtaaacatatatccatggagtgccatcttatgtaaaagggacccctggcattttacagcgtgtggaaactttgtcaatagttcttatcgtagacacctactgtaagatgttatgctaatgctatattaaccttcactatcttcttggacatgcagttacacatactttggtgtattctgtgaataattcgcatgatngcggaacttttcgtgttt

SEQ ID NO: 63 - DNA, 518 bp, Oryza sativa
  Clone ID: uC-osflcyp001h12b1
ggttgatctcacagttggattcactgcagaaaacaagacgaataggagcagaggaaccactgaactgaaggggctcatgtcgatcatctttatagtgcttagcattgttgccctagagaagtttcagagcttgagctgtgaaaatatgtgggagaaccggagaagcattgcaaatgagtacaatgggttttcatccatatctaggtcatggtcttgctgctttataagcatctggagtctggacagggccacaggggccactgggaaatgtaaaagtcagtgattgtcaatactgcaagaaaattgtcaaggtttactgcaagactacttacagcgatgagggttggtatcaggtatgtcacttcaatcagttccactattaattttacatgtgaaccaaaactttgctctctctttccacctggcttccattctttcaatcaccatcgttgactgactgggcaatatatggctctatattggaagcatcttctcacctttattcaacattaaagtag

SEQ ID NO: 64 - DNA, 405 bp, Oryza sativa
  Clone ID: uC-osflcyp002a01b1
gtcattttgaagaagttgaaatgcttctttcctatttcatatcctcttactctatcaaaacctttgccatcggtctcaacgaacctgtaatagcaaagcttgtacatgaggcaattcagcgcagtttgagtctacttgatccaacctatgcaagcaagtacatccctattattgttagtgtcagcgaacatcaaccccctacctggccctcctatttcatggatatcaacgtgttggccttcttgattactgctgggatcatttcatgctatatgcctttatctgatgcaagctccttcgtggtcttgaacttggtcaccgcaatattatttttttggagtaatggcgccgtttatgcttgaacttgcttctgatgcgtgcattttatctggaatctcttttttt

SEQ ID NO: 65 - DNA, 554 bp, Oryza sativa
  Clone ID: uC-osflcyp002a02b1
tttgattggaggtgcaggagaggatgaggaagcagtgtaggagagccatcctctctgcacacctccaatagctcatccaaacaacagctatctcactctccctccatgtctctacactctagcaattcaacaattattttcctttgttttgtcttcatctacaaatgcttggtcatcaccctcatctcttatattactctcacttccaccacaccctccatttcttgcttccatttgtcttgcttggctcttcactctccccctgttcctgcaggggtcaggcactgcctgctacaagagtggtgtaggtgattcggctagctcagcgcgaagatgggggagatcaccaatgtcacggagtaccaggccatcgcgaagcagaagcttccgaagatgatctacgactactatgcatcttgggccgaggactagtggactttccaggagaacagggaggccttcgccaggatcctgtttcgcccacgcatcctgatcgacgtatccaagatgacatggccacacagtcctggggtcaagattcaatgcccattatg

SEQ ID NO: 66 - DNA, 485 bp, Oryza sativa
  Clone ID: uC-osflcyp002a03b1
ctggggtgttggtgccggaggcgctggggctgggcaactgggtgcaggcgcaggagtgggcggcggagcccggcggccaggccacgtacctcggcaacccggtgccatggggcacgctgccgacgatcctggtcatcgagttcgtcgccatcgccttcgccgagcaccagcgcaccatggagaaggaccccgagaagaagaagtaccccggcggcgccttcgaccccctcggcttctccaaggaccccgtcaagttcgaggagtacaagctcaaggagatcaagaacgggcgattggccatgctggcttttgtgggtttctgcgtccaacagtcggcgtacccgggcaccggcccactggagaacctggccagccacctctcggacccgtggcacaacaacatcggcgacatcatcatcccgagaaccatctacccttgagcttggcacgaaccggtgcgtgcgttcgggcgtacgtgaaggcta

SEQ ID NO: 67 - DNA, 385 bp, Oryza sativa
  Clone ID: uC-osflcyp002a04b1
ttgttgtttagtacagtaacagagatgacacacatgagcaatacagtgcatgcgtggaaaaaaggggcacatgtgtcaagagaagccatgcgtctggaagacgaatcaagaagaccatgcatgaaaacacaacgcacatgaactgccaagcgaaggtactgagaatggaaagaaccacagatgcatgcggacatgctttacttgattagtgcatcagaagggtgaaacgcaagcaaaaaggcatcttgtacagaaccgggagcagtatggagcacttacactgatcaccggttcttgagaggctaaccaaaaacaactacgaagctatgtactagactgaccatgtacacaaggactggatgcattaccttatggactaccatga

SEQ ID NO: 68 - DNA, 493 bp, Oryza sativa
  Clone ID: uC-osflcyp002a05b1
atccttatgagtacagcaacaaagataagacagatgaagaaaaaagtgcaatggaggagaaaaagggccagtatgccaagttctggaatgagtttggaaaatcagtcaagttgggcatcattgaagacgcaactaacaggaaccgtcttgcaaagcttctgagatttgaaagtaccaagtcggaaggcaaacttgcctctcttgatgagtacatttcaaggatgaagccagggcagaaggacatcttttacattaccggaagcagcaaggaacaattagagaaatcaccgttccttgagaggctaaccaaaaagaactacgaggttatctacttcactgaccctgttgacgagtacttgatgcaatacctcatggactacgaggacaagaagttccagaacgtctccaaggagggtctcaaactcggcaaggactctaagctcaaggacctcaaggagtccttcaaggagctgaccgactggtggaagaaggc

SEQ ID NO: 69 - DNA, 474 bp, Oryza sativa
  Clone ID: uC-osflcyp002a08b1
tcttttgtcttcgtactcgcctctctccgcgccctcctccgccgccgctcgccgccgttcgtctccgccgccaccgccgccgccatgagggagtgcatctcgatccacatcgggcaggccggtatccaggtcgggaacgcgtgctgggagctctattgcctcgagcatggcatccagcctgatggacagatgcccggtgacaagaccgttgggggaggtgatgatgcttttaacaccttcttcagtgagactggtgctgggaagcatgtcccccgtgctgtcttcgtcgatcttgagcctaccgtgattgatgaggtgaggactggtgactaccgccagctcttccaccctgagcagctcatcagtggcaaggaggatgcagccaacaactttgcccgtggtcactacaccattggcaaggagattgttgatctgtgccttgaccgcatcaagaagcttgccgacaactgcact

SEQ ID NO: 70 - DNA, 506 bp, Oryza sativa
  Clone ID: uC-osflcyp002a09b1
tcggtccaccgaattccattcctcgcgattcctctcccctcgcctcctcgtcctccccctcccaggggatcgccggagaggaatcgcgcggaggaaaaaaaaagaaaagggcttccccgtcgtctaagttaaaaggaagccatggagcacaaggagactggatgccagcagccagaaggcccgatcctttgcatcaataactgcggcttctttggcagtgcggctaccatgaacatgtgctcaaagtgccacaaggagatgataatgaagcaggagcaggccaagctggcagcctcctctatcgacagcattgtcaatggtggtgattccgggaaggaaccaattattgctggtcacgctgaagtagctgttgctcaagtcgaggtgaagacgcttgttgcgcagcctgctgagattgctggtcctagtgagggggtcacggtgaaccccaaggggagggaaggaccacatcggtgctccacttgtcggaagagggttggtcttac

SEQ ID NO: 71 - DNA, 428 bp, Oryza sativa
  Clone ID: uC-osflcyp002a10b1
tcgttccaagctgcctgagccctagccgccgccgccgccgccgcgcgccaccaccgcaaccatggccgccgcgctcacccgcccgcctccaggcacggtccagtgcttcgggcgcaagaagacggcggtggccgtctcctactgcaagccggggcgcgggctgatcaaggtgaacggcgtcccgatcgagctgatcaggccggagatgctccgcctcaaggcgttcgagcccatcctgctcgcggggcgctcgcgcttcaaggacatcgacatgaggatccgcgtccgcggcggtgggaagacgtcgcagatctacgcgatccgccaggccatcgccaaggccctcgtcgcctactaccagaagtacgtcgacgaggcgttcaagaaggaggtcaaggacatttttgcccgctacgacccgacccttc

SEQ ID NO: 72 - DNA, 528 bp, Oryza sativa
  Clone ID: uC-osflcyp002a11b1
tcggataagaaacacatatctcctcatgtttttcgtccacgaattgtcaacagaaaaaatgtcttcttttttaagaaagagaagcatttatttatttgtagtagtagactagtagtagtagaagttgtgcgtttgtgttgttcttcgccggcgccgccgcccatggcctcttccatggccgccaccgccaccctctcgccgccggttttatccgccgagaggccgactgtccgcggcggcctcttcttgcccccttcgccggcgacctcccgctctctccgcctccaatccgcccgccgctgcggcatctcgccggcgaccaggaagccacgctccttgcctcgagcagccaaggttgttgtggctgtgaaggctgatcctttgaaggtcatgatagcaggggcttcagcatctggaaagggaacgcagtgtgagctcattaagagcaaatatggtctggtgcacatatctgctggagaattgctaagggcagaaattgctgcaggcagtgagaatgggaagtgagct

SEQ ID NO: 73 - DNA, 541 bp, Oryza sativa
  Clone ID: uC-osflcyp002b02b1
atagtaagttgcttatgcagacaggattatattgaacaagactgatttggttgataatgcagaactggaggtgttaattaacaaaattaagctcataaatgggatggcacagatgagaaaaacaaagtttggtgatgttgacatggattttgtgctaggaattgggggctatgatcttgataggattgagtctgaagtccagttgcatgaaagaaaagagacaggtcattgccatgctggagaagaacatgggcatcagcaccatcatggacatgtccatgattcagctgtctcaagtgttagcattgtttcggagggagtacttgatcttgatgaggtgaatgactggcttgagagactcgttgaagagaaaggggaggatctttatagattgaagggtgtaatctccgtaaatgagtcaactggacgtttcgtattccagggtgtgcactctatgttggagggatgcccagctaaaccatgggagccggatgagaaaagatcaacaaattagtatttattggaagaaatttgatgaagc

SEQ ID NO: 74 - DNA, 530 bp, Oryza sativa
  Clone ID: uC-osflcyp002b04b1
ttgaatcggaggcagccgcagccatggcgttggccgctcgcctcgtctcccgctcccggcagctatactctgctcaagctgccttggcaaatggaggtgccactcaagtccgcttgtatgccaaggaggcagatcgtactcccgtcaatggtgatgacctattgaagggcatattttttgaggtaaagaagaaatttgagactgcccttggtgtacttaagaaggaaaagatcactattgatccagatgatcctgcagcagtttctcgttatgcccaagtcatgaagactgtaagacaaaaggcagatcttctatccgactctgagaggattaaatataccatcgacacctttacaaagggcatccctgatgcacggacttacttgaatactcttcaggagatcaggataaagagtggccttatagatgatatgggtgctgaggctatgatgatggaagcccttgagacagttgagaaggagataaaaagccactttgaggagtgacaagaagaaaagggtctctcttgc

SEQ ID NO: 75 - DNA, 332 bp, Oryza sativa
  Clone ID: uC-osflcyp002b05b1
tctatttgaaggtcatggggatgctctgaactggcgtattgcgtaagtgctcattctaggggatatactaaagtaaagctgtcaggcactaatgaagtgcctgatacgccttgtggtctaaaaagggggcaccatgcatttagttcgagcgtgagaacctacagaagggcatagttacagagggacctgaaataccttagactggcattcaataacataagaagaccatgcactgtgctgagacagatggtgcataaagagtaaatacagcatatcaacttgctaattgcaccaacatgatgggtcaagctcatgtccacacatgtaaagaa

SEQ ID NO: 76 - DNA, 548 bp, Oryza sativa
  Clone ID: uC-osflcyp002b06b1
ttagtttagtctgccggccaagcaagaaccaaaaagcaattaagatcgaactcgagcaaacatgtcgtcgactaacaacagttcaggcgagccgccgccggcggtgcgcgtgctgggcggttgggcgagccccttcacgaaccgcgtggtggtggcgctgaagctgaagggcgtggagcacgagatgttgcaggagacggtggggaagaagagcgagctgctgctccggtccaacccggtgcacaagaagttccccgtgctgttccaccacagcaagccccttcccgagtctctcgtcatcgtcgagtacattgacgaggtctggtcggccttcaatggcggcgccccggccattcttccttgcgacccctacggccgtgccgtcgagcggttctgggcacggtacgtcgatgacaagattttaccagggctttgggttttgagaggatcggttggctgagacaaggaccaaactcgaagtgaaaatgtcacgactttacagcgcttgaggaagcatttgtaagtgcagccaaggaagaatactttgg

SEQ ID NO: 77 - DNA, 486 bp, Oryza sativa
  unsure (1)..(486): unsure at all n locations
  Clone ID: uC-osflcyp002b07b1
tttagaaccttctcgaccccgccatgcgccccgcggtcgccgccgccctcctcctcgtcgccgccgccgtcgcggcctcgccggtttccgccctctactccgccggctctcccgtcctccagttcaaccccaacaacttcaaatccaaggtgctgaactcgaatggggtggtgctggtggagttcttcgcgccgtggtgcgggcactgccagcagctgacgccgatttgggagaaggccgcgggcgtcctcaagggcgtcgccacggtcgccgcgctcgacgccgacgcgcacaaggagctcgcgcaggaatatggaataagaggatttccaactattaaggtgtttgttcctggaaagcctccagtagattatcaaggagcaagagatgtaaagccaattgttgaatntgctctttcacaggtcaaggctcttcttagagatcggttgatggaaagacatcagcaggttcaggtggcaagaaatc

SEQ ID NO: 78 - DNA, 260 bp, Oryza sativa
  Clone ID: uC-osflcyp002b09b1
tcgttgaatgaaaacctatggcctgatcgtagtcgccccaactcgactaggcattggtgaccataggtatggcgtcgatcaagataggccgaggacagcatgggaaaggactttgactacattgagagctgtattatagataaggggggcaccgagggttaagaacaccaccaatagggatgatgacatcatgaacagcaaggataggtaatgaacctcctgctgtgcgcatagcaataggaatttcgagacttgggggt

SEQ ID NO: 79 - DNA, 551 bp, Oryza sativa
  Clone ID: uC-osflcyp002b10b1
tcgttgtttcatcccagccgccgccgccgcagcctcctcctctcgtcttctccttcgagttgttagctacctccttattcaaccatgggtaaggagaagacgcacatcaacattgtggtcattggccacgtcgactccggcaagtcgaccaccacgggccatctgatctacaagcttggaggtatcgacaagcgtgtgattgagaggttcgagaaggaagccgctgagatgaacaagaggtccttcaagtacgcgtgggtgctcgacaagctcaaggccgagcgtgagagaggtatcaccatcgatattgccctgtggaagttcgagaccaccaagtactactgcacggtcatcgatgcccctggtcaccgtgacttcatcaagaacatgatcacgggtacctcccaggctgactgtgccgtgctcatcattgactccaccactggtggctttgaggctggtatcttcaggatggccagacccgtgagcacgcttttcttgctatcactcttggagtgaagagatgatctgctgctgcaacagaaggatgc

SEQ ID NO: 80 - DNA, 543 bp, Oryza sativa
  unsure (1)..(543): unsure at all n locations
  Clone ID: uC-osflcyp002b11b1
tcgtttgtattgatactgacgttcttatcctatgctagctatcatgccactaggaagactacaagcattgtcaagagtgttcttgatcctaagacagaaaacctaggtatgttgcattggccgagccatctgtatcttcaggatttaagagatgcacagggcaacatgacggctctctatagcggctgggctccgtttaatgccgacgatggtactgcattgctcggggagatcgacttggcatttctcggagtatatgcaatcggcatgttcttcgctggccatttgggtgatcgggtggatctcaggatacttctgaccatcggaatgataggcactggatttttcactgctgcctttggtgccggcaactggctcaacatacacaacttctactactttctgggtgttcagatgatggctggcctgtttcagtcatccggctggccatctgtggttgcagntgttggtaattggtttggaaagagcaaaagagggctgataatgggaatcttgaatgctcatacaattgtgggaaacata

SEQ ID NO: 81 - DNA, 549 bp, Oryza sativa
  Clone ID: uC-osflcyp002c02b1
tgagcagttcacctgtccccactttccccttccccctcccgcgcgcgatggcgtccgccgccgacgagggcaacgcggcggcgcccagggccgccgtctcgcacgtcatcttcgacatggacggcctcctgctcggtctctccctctccctctccctctcctccgacgattcggtttcatatgcgcattcgatggtttctttctttgctttcttggttgctccaatttggatggagttgggtgatgatggatggattggatgaatggcgtggttgttgctggtgggtgcagacacggaggggttctacacggaggtgcaggagaagatcctggcgaggtacggcaaggtgttcgactggtcgctcaaggccaagatgatgggcaagaaggccaccgagtcggcgcgcattttcgtcgaccagtgcggacttgacggccatcttaccccggagcagttcctcgaggagcgcgagagcatgcttcaggagctcttccctttcgcgccgtcttgcttgagtgttacgtttgatcatcatttcatgcaaatga

SEQ ID NO: 82 - DNA, 437 bp, Oryza sativa
  Clone ID: uC-osflcyp002c03b1
ttgggcttcctgagcgattgcaattatcacttgtgagaacactaccgggactggagaattgtgtgatgctaaggccggcttatgctgttgaatatgattacttgccagcttaccagtgctcaagatcacttatgaccaagaagtttgagggcttattcttctctggccagattaacggaacaacaggatatgaagaagctgcagctcagggtataatttccggaataaacgcagctaggcattctgatggaaaaccacttatcattcttgagagagaaagcagttatatagggactctgattgatgatcttgtgacaaaagatcttagggaaccttatcgcatgttaacaagccgttcagaacaccgtctattgcttcgagctgataatgctgatagtcggttgactccttttggacgagatattggtttgatagat

SEQ ID NO: 83 - DNA, 311 bp, Oryza sativa
  Clone ID: uC-osflcyp002c06b1
attacatcagtaccgaaggcatggaggcaagtggatcgagtaatatgaaattctctctgaatggttgtgttatcattggctctttggatggagctaatgtcgagataagagaggaagtgggacatgaaaatattcttctttttggtgccaaggtagatcaagtagctgggctgaggaaggattgagagaatggcttgttcaaaccagacccactttttgtagattccaagcagcttataaggagtgtgagcttttggcactctaagactatgctcccctcttggatactcttgaaggaaaattcggatttg

SEQ ID NO: 84 - DNA, 504 bp, Oryza sativa
  Clone ID: uC-osflcyp002c08b1
tcgtagaaagaaaacctctcgtctcctccttcttgcgccgccaagacgagtcgcggctgaacaggggagtggcggcgatctccatctggcgagcagagcaggggagaggatcatgactacctcaaggcgtctttcagataggaaagtggcacggtttgagaagaacgtcaccaataggggttctgttcctgagacagtcaagaaaggaaatgattatcctgttggacccattgtgcttggatttttcgtctttgtggttgttggttcatctttctttcagatcatcaggacagcccaaaatgctggatacttctgagaactgtagtggccgcttatatatatagtctcggttaccttcaggaacatgggtgatatatgtagctgttcgttactccaaaaggagaaacttatggcatagctagctcgctttgatgttaccttgtccgtgaccgtgccttagtcattccgatacagatcgaattatacccgttatactcggtgctt

SEQ ID NO: 85 - DNA, 180 bp, Oryza sativa
  Clone ID: uC-osflcyp002c09b1
tcgttgaaaggaaacctctcctcttctccttcttgcgccgccaagacgagtcgcgattgaacacgcgagtggcgtccatctccatatgatgagcacgagcacgcgataggatcatgactgccctaaggcgtcattgatctcggagaagtgcattgtgtgataagaacgccacccacaggg

SEQ ID NO: 86 - DNA, 491 bp, Oryza sativa
  Clone ID: uC-osflcyp002c12b1
tcgtttctcgcaagtgtctgccaactgtatctgtcaatggcctatccactggttcagtgtggagtattgcctttggaatccttgttgccaaatgtttgcaatacaaacctgtgaagaaagagttagtggtgataatgccaacttttggggttcagctagaaatacatttttggagtggaagagtacatcgtcgttttgtgccaattggtaagattttgaagccattgctgaatgagtgtgtgacgccggtgacctgttactggagcttggcattgcttctgcgtgatgaataggaacttatgcttgtttttcagaaattctacccttctgtcaaaatgtttggttcctgactggatggctttttgaaactcctaaactttggatgcctaatcagtctctgatgttcttgaatcgaaccgttctgaaacatgatccatttttgtgctcatttttgtatgattgtaatatttgataaaccagctatcatttac

SEQ ID NO: 87 - DNA, 515 bp, Oryza sativa
  Clone ID: uC-osflcyp002d02b1
ttcaggagcccagaaagacaaggaaaattgttgaattgtcaagctttgagaagagagacagagaggatgataatggtttttctggacaacctattcagatcaattcctcacatgatagggggtggggtctggtgggaaaaagaagcaaaggaataatggaaagtagtgaatcctggagagcttttgaggagcaacgagagagacaagaacagagactaattgaagctaggatatatgatgcaaggagagaggatgagctccagaaggcaaagaagaaaaacaagaaaaagaaaaaacatgaatttcgagatgatgacctacttgatcctaggccatacaaaaatgacagaagggtacctgaaagaggtcgagcggcaaagagacgtaccccagctgatatgacagaatacacaccaccagctaagcggcacagaggaagagaggttgagctctccaacatattggaaaaaatagttgaccacttgcggacaatgagctgttcattccttttccgt

SEQ ID NO: 88 - DNA, 491 bp, Oryza sativa
  Clone ID: uC-osflcyp002d04b1
tttgattcatcataaggctgtgtcaactgtagagtggcatttcaagggagactatttcaccacagttgtgccaagtggtgattcaagagctgtactgttgcatcagctctctaagaagcattcgcatcatcctttccgtaaattgccaggccttcctattgcagcagtgtttcatccaagtcaaaagatgttctttgtggccactaagaaatttgttcaggtttatgatctccagaaggcacagttagtcaagaagttggagtcaggtgttcgtgagatttcctccatctcgatacatcctggtggtgataatgttatcgtgggcagcaaagatggtaaattgtgttggttcgatactgatctatccacgcgaccatacaagacattaaagaaccactcgaaggatatcactaatgttacttttcaccggaaatatcctttttttgcctcatcctcaaaggattgtacggcctatgtattccattgaatgg

SEQ ID NO: 89 - DNA, 549 bp, Oryza sativa
  unsure (1)..(549): unsure at all n locations
  Clone ID: uC-osflcyp002d05b1
ttgctcttggagctttagttcatctcatagaggttggtggtcaccaattcagtgacagcgactgggaaacacttctaaagagcattagagatgcatcatacacaacccaacctctcgaactcctcaattcagtaggatttcagaaaccaaacaatcagcaatcactttcaagagaagcagagaccaacggtcttggtagtagttaccatgatagcagggaaggaggagcttcaataagtcatattgatgaacaggatggtcatcaggaaacaaatgcacagactagcctagacaattcagaaggtttgccatctccatcagggagagcacaacctgcagtttccccacggggtcagacctttggacaaagaattatggggaatatgatggacaatcttttggtcaggagtcttacttccaaatcaaaaggtcgtacagacgatattgtgccaccctcacctgtgaaggcacctgatgctgacggngctgacaaaactgactatgaagagaatcctatgatggagacttgtaggagtaaatgtatcactc

SEQ ID NO: 90 - DNA, 261 bp, Oryza sativa
  Clone ID: uC-osflcyp002d06b1
ttatttatatcgctcttcctcaccccccccggcgccgacacactgatacacgattgaccatgtccctgatatccacttccataactacagtattggcagcgattgggtcaaggctgatttatggggccatataatcccgctatagttgtttgctccaactaatatcgctatccctagtaacacagttgctatcactaggaatgtgccgaaaggacccccacgttggccacctggtgctttcatagtagcaaaattattcac

SEQ ID NO: 91 - DNA, 285 bp, Oryza sativa
  Clone ID: uC-osflcyp002d07b1
tcgttgcgaggagctcattccccttctccctgctgcgccgtcacgcctgtacaagatggatcactcccatgatatctatcctccttgtctccagtaatggaactgatagggtcaacgctgctttctggagacattaatcccgcagggttgtttgtcgcaagattaacggcagcactaggcacactgttggtttgatcggaaagagccgaaaggacgcttctgttggacactaggcgctttccatgtggggtattttgaccgttaggtaacccctcgtgcagggta

SEQ ID NO: 92 - DNA, 232 bp, Oryza sativa
  Clone ID: uC-osflcyp002d08b1
ttgttttgaggagctcactccctttccccttgtggcgccgtcgcgccgagtcgagacggatcacgccaatgatatccacccccttgtatccagtactggaactgttatgaccaaggctggtttagggggacattaatcccccagggctgtatttcttaagaaggacggcacccctagggacattgttggcatgaccggaatgggacgaaaggactcttatgatggacacaag

SEQ ID NO: 93 - DNA, 530 bp, Oryza sativa
  Clone ID: uC-osflcyp002d11b1
tcgttgaagcccgcatcaagcggcggccggacggcgacgtctcgctggcggctgctgctgctggagtctctcgtggtattctcaactgtttgacttctcagtctcatctcctcgaaccgtccgcctcggagctcggaagcccccaaacccaaccaaaccaccgtgcacgcgcgcgatggctgtggtggaggaagaagagggctcgccgccggcacccgccgccgccgccgatcccgcctcctctggttcaagtgataatgagataactgtagaggaagcttcttttgtgcatactgaacctccgcaagatggctctgtcccacctgtggtttcctctaatatggaggtccttcatgacaaagttaaaaaacaagtcatcaaagaaggccatggcaagaaaccatcaaagttcgcgacgtgctttttgcactatagagcttgggttcaaggctctctgcataattccaggatacttggcaagaacagcatcccattgaactagttaatggaaaaagagaaaaaacaaatgt

SEQ ID NO: 94 - DNA, 359 bp, Oryza sativa
  Clone ID: uC-osflcyp002d12b1
tcgtttacgcgacggggctggcgcaacaatgctgactgatctcacattctggggacttgttgagccatgcttttaccgtgataagtgcggactgtccttggtcactgctggcatgcattgtattaatgctgatcttgcactgatagacacattagttaacaatatacctttccagtggtaccgcctggctttctttggattttggagctgcgcctatgtaaccatttaatggtgacttcatgcctgcggagctctatcctggtggccatacccatttcttgacctttcaacgtcaggtgctcctctatggtacctagtcatggccattggtcataacccttgcttctgtctgaattggt

SEQ ID NO: 95 - DNA, 518 bp, Oryza sativa
  Clone ID: uC-osflcyp002e02b1
gaaacattaccatcggagggtgccaaagtggcacatttctgctcaatgtgtggcccaaagttttgttcgatgaaaatcacagaggatattagaaaatatgctgatgaacatggttacgggacagtggaggaagcggtgatacaaggaatgaatgctatgagtgctgagttttcagctgcaaggaaaacaatcagtggggagcaacatggtgaagctggaggggagatatatgttccagaaagctatacagctcgcaaataagatcgtcttggtgtccatctactccgggtggagcgtttatcagcagcactcctcaccatcctatgttaggaggtggggtgcctgtattctcaacgatctgaaggcctcttggcctggattgttgggaattgggctgagaaagttcctttgaacctgaacaggataatgcctgcgaagggagtgtgcatttctacttttatgttttcagggaactctaacacaaccccttttttggtggagatcgagctatccaatat

SEQ ID NO: 96 - DNA, 401 bp, Oryza sativa
  Clone ID: uC-osflcyp002e03b1
gtgtgatccccaaccacaactactctccctcccgccgccgccaccgtagtctaccctactcccgcaccgcagccatggtgtccgacgccagcaagaagaaggcggctcagaagaaggccgccgccgccgccaagaggggcgccaaggcctcctcctcctcctcctcttcctcctccgccgccgataaagcggccaacggtatcgccgcgcttaagctttccgatcgcacctgcaccggagtcctcgcctcccatccgctctcccgcgatatccacatagagtccctctcattaacatttcatggccatgaccttattgttgattctgagttggagctcaactatgggaggcgttacggtttgctcggcctaaatggctgtggcaaatctactctgctcaca

SEQ ID NO: 97 - DNA, 584 bp, Oryza sativa
  Clone ID: uC-osflcyp002e05b1
tttcttctcctcggctgcggccacggcgacgacgacgacgacgaattcgagcgaggcgatcggcgatggaggcggtggcgatctgatccgctctttccgtctcggcctcgcgctcctctccctccctcgcggtgtctcgggtaggaaatggcgatcatggtggatcctccaaatgggatgggtaaccaagggaagtattactactcgatgtggcaaactttgtttgagatagacactaagtatgtgccaatcaagcccatcgggcgaggagcttatgggattgtttgttcatccataaatcgtgagaccaacgagaaagtagcaataaagaagatacactatgtttttgacaaccgtgttgatgcactaaggactttgcgggagctgaaacttctccggcatctccgtcatgagaatgttattgctttgaaggatataatgatgccagtacacaggaggaagtttaaagatgtgtacttagtttatgaactcatggatactgacctgcatcagataatcaggtcacctcagggtttttccattgatcactgctcaatatttctttttcagtgcttcgaggactg

SEQ ID NO: 98 - DNA, 426 bp, Oryza sativa
  Clone ID: uC-osflcyp002e07b1
tttttatgctgttggagatggaccaaactgaggtgctgcacctgctcgagtctccagaggctctcaaggtcaaggttgctgaagccatggaggaccttctcacggcccagcagatccagacgaacgcgacgcctgaacagcagcttgcttctctgacgctgaatgacggcgacgctttcttctaagcataacgactacagcaatttttgatccatatctcagctatcttatctatctagaattgaaaacgactcgggtacttggataattggagttttagatttattggtagttgaactaggcatttaagcaatgcgcgtggattgggtattttgtttgctccgatttcttattttgctttataagctatcatatggattgctcacaacattacaatggtaaaatgtcatcttctctattttaatt

SEQ ID NO: 99 - DNA, 467 bp, Oryza sativa
  Clone ID: uC-osflcyp002e08b1
tcgttaaaattcagagttgtaaaagaagaagaaaaattcagagttcaaaagttcagtgagaattatcttgcaggtgctgcattatgggggacgagaagcatcctagctcgaaactttcagagattctccggccaggaaagctgctgcaccggcggcggcggctcgtctccgagttcgccgacgtagggcgggaggacgcgttgcacgagagcgacacggtcaagtacagggtgttcgccggcacgtggaacgtcgccggcgtggcgccgccggacgacctggacctcggcgactggctggacgccaaggccgactcctacgacatctacgttcttgggttgcaggagatcgtgccgctgaacgcgaggaacgtgcttggcccgacgaggagcttggtcgccatgaaatggaactcgctcatcggcgacgccgctgaacaggttcactacctgaagaagaagactaga

SEQ ID NO: 100 - DNA, 290 bp, Oryza sativa
  Clone ID: uC-osflcyp002e09b1
tcgttaaaatgtagactgctgaggcatgacgagaggagaatgtgtccatggcacagcttgacgagcatggtgagcgctgcaaggaaatggacgagttcattgctaacgtggcacttaccactgatgttcgtgagctcacgctggtggaccggaacctgctttttgtgtcttacaagaacgacattggggctcaggacgcattgcacaagagcatctcttctattgaccagaaggaggacagcacgtggaacgaggcctatgtggcatcaattaacgacctccagctcagg

SEQ ID NO: 101 - DNA, 148 bp, Oryza sativa
  Clone ID: uC-osflcyp002e10b1
tcgatctagatgaggggtttacatgtgttgagatgtttgctttgtcgtttgtgcgcaccattgttattatcatgagcagtcttgggacgatgtaaggataatctattgaatgtcttgagtaagatgggggcttactgccttttcctgc

SEQ ID NO: 102 - DNA, 508 bp, Oryza sativa
  Clone ID: uC-osflcyp002f01b1
ttctttcctcgctccccgccgccgccgccgttttcttggagaggagaaatccgtaggctcagaggatttttggtagtcttgtttcgtgatattcgtgaagagggggggagctaaggggggattcgtaagatcagaattggatcacgcgggggcgcgctcgggatcgggggttccaaacacagcttcttcgttgaatttaagtggatgtactaatggagtcaaagggtggcaaaaagaagtctagcagtagtcgttccttgatgtatgaagctccccttggctacagcattgaggacgttcgacctgccggaggcgtgaagaagttccagtctgctgcttacttcaactgcgcgaagaagccatcctgatagccctttcggcttctccatcctagtagtttaggatttcttgcaattccattttggcacttttcttctgacctatttctctggctgctgctttctgataatcaccagttctctagtttgctccttgacttctccttctt

SEQ ID NO: 103 - DNA, 494 bp, Oryza sativa
  Clone ID: uC-osflcyp002f04b1
ttacccttcaagaaacaagaaagacaacaccaacaaacaatctatcttgctaatggcctcgttgtcctccttccggctcatgcgccactgagcttgccttcaaggtcggtgagggctctagcgacactagtctagagctcgtcaccaatgtcaccatctctgaggtggaggtcaaggagaagggtggcaagtactgggtggggctcaaggagtcgtcgactaacacctggacgctgaaaagtgaggcgctgctcaagggctccttctccgtccgcttccttgtcaagaacggcagctaccatgtcatcgacaacgtcatccctgaaagctttacagctggcactgaatacaagaatggcatcaacctctaattaatagacatacgtgctcttgtgttgggtcgcatgggaattattaacctctaaataattatgttttagaagatatcatgccgtgtgtgagtgagcaagcaattaatttcccatgattatttt

SEQ ID NO: 104 - DNA, 497 bp, Oryza sativa
  Clone ID: uC-osflcyp002f05b1
tttagcttagctttgctgctgctccttctcattcataagccagcagctagctagcaagcagcacacacatatatcacaggccatctctctatccctaattaagctatatactccatatagctagctaaacacaggaggagtggaggaaggagaggctagctgatctagctatctgcagtgattagttaaaatgatggcttctgataggttggatgcagaaaggatcatagagtacttcaagggcaagagcatcctcatcactggagcaactggctttcttggcaagattcttgtggagaagatactgagggtgcagcctgatgtcaagaagatctacctgctcgttcgcgccatcgaccaagcatctgcaaaccaacgcgtccaatctgaggtgacggagacggagctgttcagcgtggtgaaggagaagcacggcaagggattctcgcgattcatcgaggagaaggtggtcgccctcgccggcgacatcatctacg

SEQ ID NO: 105 - DNA, 523 bp, Oryza sativa
  unsure (1)..(523): unsure at all n locations
  Clone ID: uC-osflcyp002f08b1
tcggtcggatctaattaatttacctcctccacctcctcctcctccccccgatcggatcggcccggctcctcctcctccgccgccgccaccgccgccgcagataggagaagatggccgcacttgataccttcctctttacctcggagtctgtgaacgagggccaccctgacaagctctgcgaccaagtctcagatgctgtgcttgatgcctgcctcgccgaggaccctgacagcaaggtcgcttgtgagacctgcaccaagacaaacatggtcatggtctttggtgagatcaccaccaaggctaacgttgactatgagaagattgtcagggagacatgccgtaacatcggttttgtgtcagctgatgtcggtctcgatgctgaccactgcaaggtgcttgtgaacatcgagcagcagtcccctgacattgcacagggtgtgcacggccactttaccaagcgccctgaggagaatgtgcttgtgaccagngacacatgtttggatatgcaactgatgagacccct

SEQ ID NO: 106 - DNA, 302 bp, Oryza sativa
  Clone ID: uC-osflcyp002f09b1
tcgggcccgggttcttgctgctcttcgccttcttcgctgcgcagatggtggcgacggcgatcgccgtgtacgcgcgctgggatttctgccggatccagggcatcgggtggcggtggggcggcgccgtgtggcagttcagcgtcgtcacctacctcccgctcgacgtcctcaagttcatcatccgctacgccctcaccggcggcaaggccggggacagcgcccagaaaaagtgagggaatcctgggtgtttgtctcgcgcacacggcgttcacgacacaaggaggaggagctcacccagcccc

SEQ ID NO: 107 - DNA, 350 bp, Oryza sativa
  Clone ID: uC-osflcyp002f10b1
tcggctcaagctcggcctgagcatcgacgaggacgagacggcggaggccgacaccgacatgccgccgctcgaggacgacgccggcgagagcaagatggaggaggtcgactaagcgggtttcctttttttttcccctcgacaaatccttcgcagcgaaagtacaccatggagcattggagctagcttatctgttttaccttttgaacatcgcgttgttgggtcggttcggttattttgtgcgatttgctttacctttacctagcctgcaatgcatggggctagattgtgctatgggttctcgaactgcgtacgttaattatattgctaaatatgagtattatattagtgtc

SEQ ID NO: 108 - DNA, 68 bp, Oryza sativa
  Clone ID: uC-osflcyp002f12b1
tgtttgttgtttgatccaaacaaaacaaaacacttagctagggccagtcttgcgaccacacctgacgg

SEQ ID NO: 109 - DNA, 452 bp, Oryza sativa
  Clone ID: uC-osflcyp002g05b1
attgtacatactctactactactagccagtaagctagctaactaactacgtggctatggcccccaccgtgatggcctcctcggccaccttcgtggctccattccaagggctcaagtccaccgccggcctccccgtcagccgccgctccaccaactcgggcttcggcaacgtcagcaatggcggaaggatcaagtgcatgcaggtgtggccaattgagggcatcaagaagttcgagaccctatcgtacctgccaccactcaccgtggaggatcttttgaagcagatcgagtacctgcttcgatccaagtgggtgccttgtctcgagttcagcaaggttgggttcgtctaccgtgagaaccacaggtctcccggatactacgatggcaggtattggaccatgtggaagctgcccatgttcggctgcaccgatgccacccaggtgctcaaggagc

SEQ ID NO: 110 - DNA, 376 bp, Oryza sativa
  Clone ID: uC-osflcyp002g07b1
ttgttaccagttaccctcaatagaaacggtgctaatggcccagaacaagaccatggctctgctccttgccacccttgtggcggtggttgcggtagtacgagccaccgaagagaaggatatagaagaagctgtgtgctcagagcattgcaacgacgaggaaaaagaaggcaccatcgaccacaagcactgtgtagacatctgcatcctcacgaacagggaactttttggggccttggagagaggaatgaagccctcgatggagcaattcagcgctttgtgcaatgaggggtgtagcaaaaaaattaaggaggatcctgccaccaacaagaagtgcgtagacagttgcatcgtcgatgctaaggaactcaatggacac

SEQ ID NO: 111 - DNA, 442 bp, Oryza sativa
  Clone ID: uC-osflcyp002g08b1
tttttaaaaaatcgcggtctcctcctcatcgagccgcgcggctggatcgaggattcgagcaggttgatttcagagttgagtgccactgattcagctccaaagttagcatgagtactgtcagcggcactcggcgtgccccaaggaggcaatcacaagatggtcctggtgataaagtcgttgtgaacctggacgcgatctcctccccagtggttggaagccgtcgcgcggtgccgaccttcactggtgcgcgcgcctcccccattgatgtggaagctctggatgatgaagtgcagacattgtccgcttcgcaagtgccttcttcgagaaggaaccggagaactaggaagcagcctgtggcagtagttgatctggaagtagatgctagccgggaagggaacaaacgttcaaagggttgcacctggttacacatgccttttttcaa

SEQ ID NO: 112 - DNA, 339 bp, Oryza sativa
  Clone ID: uC-osflcyp002g09b1
tcggaacgaacaacgcactctgcagctagctatacaatctctgtttaattagctaggtagctagcgagtcataaatcaagaagccatggacttttacgggcggcgcgagcagtacggcgggtatggcgggtacggtggcggcggcgccctggcgacgccggggtacgcgccggcggcgccgtacgggatgtcgcaggtgaacatcgaggggaacgggtgtggcaggacgctgccgccgcagccgacggtgaaggtgtactgtcgggcgaacccgaactacgcgaagacggcgcggaacggcgcggtggtgctggcgccggcgaaccccaaggacgagta

SEQ ID NO: 113 - DNA, 443 bp, Oryza sativa
  Clone ID: uC-osflcyp002g10b1
tcggtcttgcctaggcggcaacgcctcccgtcctttataaccctgcggctcctcccgcgtgaggcaccgaggcccgggtggtagaccgcgggacccgagccgagccgtgccctgccctgcccttcctccgcccagggtcgcagccaggtcgtcgtcgtcgtcggagggggaagagagccgcggcggtgtcaggaggaggaggaggggcgagatggaggcggagaagaagccgccggcggcgtccgacgtcggggcgtgggcgatgaacgtcgttagctccgtcggcatcatcatggcaaacaagcagctcatgtacttctccggctacgccttctacttcgccacgacgctgaccggatgccactttacggtcacggcgctcgtcggatggaactgcaacgccacccgctactccggatgcaagcacgtaccgctctgggagc

SEQ ID NO: 114 - DNA, 220 bp, Oryza sativa
  Clone ID: uC-osflcyp002h01b1
gttcttttactcttcggcgactagatgacgaagcgcaccaagaaggcaggaatcgttggcaaatatggtaccaggtatggtgccagtttgcgtaagcagatcaagaagatggaggtttcccaacactccaagtacttctgcgagttcttgggcaaggttgcttggaagaggaaagcagttggaatctggggaagcaaggactgtggcaaggtcaaggctt

SEQ ID NO: 115 - DNA, 472 bp, Oryza sativa
  Clone ID: uC-osflcyp002h03b1
gaccttaggacaccaactttgcacttgaattgacatacaattatggtgttgataagtacgacattggagcaggatttgggcatttcgctattgcaactgaggacgtgtacaaattggctgagaaaattaaatccagttgttgctgcaagatcactcgtgaacctggtcctgtcaagggaggatccactgtgattgcctttgcacaggatcctgacggttacatgtttgagcttatccagaggggtccaacacctgagcctctttgccaagttatgcttcgtgtgggtgaccttgatcgctccatcaagttctacgagaaggcccttggtatgaagctgctgaggaagaaggatgtacctgactataagtataccattgccatgttgggctatgctgatgaggataagacaactgttattgagttgacatacaactatggtgtcacagaatataccaagggcaacgcatatgc

SEQ ID NO: 116 - DNA, 539 bp, Oryza sativa
  unsure (1)..(539): unsure at all n locations
  Clone ID: uC-osflcyp002h04b1
gaatcacataaacggccagtatattaccttattaggctgtgagctagttgtttcgaaatttctgatgaattcatagcatgcgaagtaggttatgcttgtttgtggcatatgatatgttggagtagtatttgatgaaaacacaaaacaaggtttgtaggtttagcttccccaggctaccatcaactatcggttctaattatgttatccatgatatcatgatcttcagcatatttatcatcaactatcgattctgcttagtggcaattttagccaaggcgctaagcgctagttaggcagcagaccagcacctggcacctaattggtgatcatgtggacctaagcaggattggccagccacctagtcaggataactcaataggcaggctaggcgttcgtatatgcaaggaaattgtgcattttgatgtaagagcaaaanttttaattgttaggttaacctgaatcttatttcgttttgtacttgtttccgagatgctgggtgttcttgcttgagtgctgtactccatgaaatccgtgagatg

SEQ ID NO: 117 - DNA, 409 bp, Oryza sativa
  Clone ID: uC-osflcyp002h06b1
ttcttttatgtcgatccatcttcccgctctctgctgttgtgtttctcttcgttcgcaatgtgtggaggctgaggcggagctagggcgcggagactccggggaggagatgccgatgctcggtgtggacggtgctcctctgattccccacaccggggacggcgacggtgagcagggtttgagggaccgacctgcgaccttctcattcctggcttgtctgcctccatctggtgttggaaatatcataagtttttggacaagcaggagaggacatggtgctattatcacaacctgagccggtaattggtgttggtgttggccgatcacaagtgtacactgaattcctggctggaataacagtgcctacagctgctgttgtcattactgccggtttacagacagtactgttttt

SEQ ID NO: 118 - DNA, 405 bp, Oryza sativa
  Clone ID: uC-osflcyp004a01b1
cttaatttcatggccatgtaccgaaagatttacaggggggaattccggtgcccgagatggttctccaaggatctttccagtctactgaatcgcatccttgacacgaacccagagacaaggatcactgtcaaagaggtcatggagagcaggtggttccagaagggattccggccggtcagattctatgttgaggatgatcaggttcacagcttggcagatggtgataatgatatgccggagttggaacctagtgagcctccttctccttctacgtttccgccgccgtcgtcgcagcaagatgatgacggtgaggagtcgggatgggagtcggactcattcgtggcatcatgttctgccacattggcatctgaggagctgtggcaaagacctctttggtctttcaca

SEQ ID NO: 119 - DNA, 307 bp, Oryza sativa
  Clone ID: uC-osflcyp004a10b1
tcgttttaccataggtaaaactatgtcaatgtgaggacttacactggacacgagagtgggagccaatgagtgagtgagcaaccagagacatttggttgaggctcaacgaatatcacgacatgcaccacgtgatatggttgtttcatgagctatgtctgcactatgaatattgcgcaaatcagaggcagatattgtgggatcatcaaatactgagtgaggacggtgggatctttggctcaaacgggctgcatcaaaattaggaattgtaggagaacaagcattatgcggtggagggtcattttccagg

SEQ ID NO: 120 - DNA, 403 bp, Oryza sativa
  Clone ID: uC-osflcyp004a11b1
tcggcgttctacccgttctccagggaccatgccaacttcgcgtcgccgaggcaggagctgtatgtgtgggagtccgtggccaagtcggctcggaacgcgctcggcatgcggtacaggctgctcccttacctgtacacgctcaactaccaggcgcatctcaccggcgctccggtggcgcggccggtgttcttctcgttcccggacttcacgccgtgctacgggctgagcacgcagtacctgctcggcgcgagcgtcatggtgtcgccggtgctcgagcagggcgccacctcggtgagcgccatgttcccgccggggagctggtacaacctgttcgacacgaccaaggtggtggtgtccaagggcgagggcgccgtgaagctggacgcgccgctcaacgagatca

SEQ ID NO: 121 - DNA, 423 bp, Oryza sativa
  Clone ID: uC-osflcyp004a12b1
tcgattcgacataggcataactatgctcatgtgacaactcacactgcacaagattgggccgaaacttttgtatgtgagttaaatgagacagttgctgaagctcagctgagaacaagacaagttccacctgatctccctagtcaagcagcaattcaacaatatctgcattccaaaaatcggttgctcatattggggttcaattcaacattgactgagccagttgaatcctctgggagaaggggtggtgaccaaatcaaggaaatggagctcaagttgcatcctgggttgaagggccctttgagagccctctgtgaggatgagcatactacagttattgttcttagtggaagtgacaggagcgttcttgatgaaaatttccgagaattaatatgtggttagcagcaaagcatgccatgtttttac

SEQ ID NO: 122 - DNA, 260 bp, Oryza sativa
  Clone ID: uC-osflcyp004b02b1
gctccaaacattcaggaaaacaaggagggccttgtgctttcgaagactgcaatagaaaaggctggatacactggcaaggtagtcattgggatggatgttgctgcttcagagatctacactgaggagcaaacctatgatcataactttaaggaagagaacattgactgttctcagaagatatttggagatcgcctgtataatgtgtacaagtaatttgttattgaatactcaaatgtctctatcgaagacccatttgatca

SEQ ID NO: 123 - DNA, 102 bp, Oryza sativa
  Clone ID: uC-osflcyp004b10b1
ttctttgcgccctacgcgatgagcggcagcaagtgatcactgtgttttcctctacgattaatttttcttggtttcatgatctgtagcttattagcggccatg

SEQ ID NO: 124 - DNA, 138 bp, Oryza sativa
  Clone ID: uC-osflcyp004b12b1
tcgtttttccataggcacatgtatgctaatgttactacatacattgctcacgattgcccttcaacttttgtgtgagtgcacactgaaactgttggtgatcctcatctaccaacatgacatgaaccacctgatgttgtt

SEQ ID NO: 125 - DNA, 397 bp, Oryza sativa
  Clone ID: uC-osflcyp004c11b1
tcgctccccctcgcgccgtccccgtcgccgagcgccgccgcctccgtcaagcccaagcccagtagtccactcccaggcagctctcccctctcgccgccatggcggatgtggaggcctgcctcctcgcccacctcaactccggcggcgaggtgccggactcccgctcctacgcctcctccctccgcgtcacccacgacgagctcgaggccgttatcaagagcctctcggctttccgcattgtcgacaccacggacattaccaaggagacgtgggtgctaaccgatgaagctaaggggtacgtcgcgggtggctcccccgaagcgcagctcgtcgctgcaatcccaccggagggtgccttcaaggacgtgctcagggagaaaatgggatctgctttgac

SEQ ID NO: 126 - DNA, 282 bp, Oryza sativa
  Clone ID: uC-osflcyp004d02b1
gacgattgagccgcttgtaaacatgactgtaaacctgtgagctcatgcacacgatttcatacagcatggtacaaaggtgcggccaatgatgttggttcaaaacatgaagatcaagctgatcgtgctgggcatcatcatcgctctcatactgatcattattcagtccgtgtgccatggctttaagcgcaagtgagggtgttggctttccagtcctccacattcaccttgttctccataataccgtctattcctggcgaaataaaaagaccatatgcttttttt

SEQ ID NO: 127 - DNA, 84 bp, Oryza sativa
  Clone ID: uC-osflcyp004d03b1
gtggttaataggcgaaagactcgggaaggcatgagagaatcagataacttgagaactaacttttctgcgagtgcacaaacagtt

SEQ ID NO: 128 - DNA, 181 bp, Oryza sativa
  Clone ID: uC-osflcyp004d09b1
gccgcagcttcgcagcagcagctgcagcatcatgggccacgccgtcgcagtcgtcgtggcggcgcacgtgccgctgggcgcgatcaccgtctacgacctcctcgacgcgggggtggcgggtggagcggaggcggagctgcacgaggcggaccggctgcgcggtgggctcgcgcggtgggga

SEQ ID NO: 129 - DNA, 322 bp, Oryza sativa
  Clone ID: uC-osflcyp004d11b1
tcgttttagcataggtcaaaccatatcagttgcagttgttactcacacgatgcatgtgggagacaatgagccagagtgcaaccagtggatatcatgaggactcaacgaatatttcgcctgtgtagcacggactatggatgttagctcagagagtcttgcctatgaatcatgtgatcgtgagaggaagaactgcatggatcatctcgacctgagggaggatggtgggactatcggattgatcgagctgagtcacctttagttcttgcacgaggcaacgctaatagcggtggtggatgatctccccgggatcatttacttttac

SEQ ID NO: 130 - DNA, 490 bp, Oryza sativa
  Clone ID: uC-osflcyp004d12b1
tcgtttcaccattgttcaaatcatatcagctccagtttttactcacaagtcgcaagtgagagccactgagccagcatccaaccagtgtacatcatgaggactcaacgaatcctcctcgccgtagtagtgtccatggttgtttcctcagcgatgctggccgttgtctcctgcgcgcgggagaggaagaactacgtggttcatctcgacccgagggaggacggcggcgtcgccgactcggtcgagctgtggcaccgctcgttcttgccggaggccacgccggaggcggcgggggatgatggcccgaggatcatttactcgtacagccacgtgctgtccgggttcgccgcgcagctcaccgacgacgaggctgaggcgatgaggaagaaggaggggtgcatcagactgtaccccgaggagttcttgcccgtggcgaccacccattcgccggggttccttgggcttcacctacgcaatgatgggttcttggagc

SEQ ID NO: 131 - DNA, 529 bp, Oryza sativa
  Clone ID: uC-osflcyp004e01b1
ttttatattggatgtgagcttggcgcacagtctaaatttgatgagaagactggtacttccttggttaatggggcacatgatactgctaaactggctggtctcctcgagaacttcatcaagaagtatgtccaatgctatggatgtggcaaccctgagactgaggtcctcatcttcaaggcccagatgattacattgaagtgtgctgcctgtggtttcgtgtcagacgttgacatgagggacaagctcacaacttttatcctgaagaatccacctgaacagaagaagggtggtgggaaagacaagaaggcaatgaggagagctgagaaggagcgtctaaaggaaggtgaggctgctgatgaggagatgaagaagcttaagaaggaagcaaagaagaaaggtgcattcaaggaaagcaccttctctaaaagtggtgcttggaagaagaaggctgcttatggctctgatgaggatcattcaaattaccaactcgcagccatgatggtgacaatgtggctgcagatgaggatga

SEQ ID NO: 132 - DNA, 107 bp, Oryza sativa
  Clone ID: uC-osflcyp004e07b1
tttgttgggcacgggagcaagacaaacggagggggggaggacaaagacaaggtaggatgcaatatttaaagagcaggagcaaacagtaccgatgggagaaccacagc

SEQ ID NO: 133 - DNA, 458 bp, Oryza sativa
  Clone ID: uC-osflcyp004f01b1
acaccttcgcaatccattccgattcgagcaatgggcggcgccgtctccgtggagccgaaccgaaccccagcaccagcaccagcaccaccgtaagcctccctcaacgacgacatcctcctcgccctcccgtccctccatgccctctcgtccgcgcggtcctcgcctgcagctcgtgggctcccgcgccgcccggcttttcgccggggttccgccgcctgctccacccacccggaccctgccccctcgggctcttcaccgaccacggcggcctcaccatccttcccggcaccccggacttcggccgccgccgccgtcgccctccgtggagccacgagctggaggactacgcctcccacggttggaatgccgtggcgtggcgacctccttctgctgaacccacaggaggctcgccatcctaaacccctttgatcttggacgtgtactttatcccccgctgt

SEQ ID NO: 134 - DNA, 401 bp, Oryza sativa
  Clone ID: uC-osflcyp004f02b1
gagctcaatcagcaacaacatctatctccttcttgcttagttaagtccttcgccctcccaagaagaagaagatgtcttgctgcggcggcaactgcggctgcggcagcggctgccagtgcggcggcggctgcggcggatgcaagatgttccctgatgtggaggccacagccaccaccaagaccttcgtcctcgctgctccatccaacaaggcgagctctggaggaatggagatggcggtggagagcggcgagaacggcggctgcggctgcaacacctgcaagtgtggcaccagctgcagcggctgctcctgctgcttctgcaactgaatatatcgtcgtcgtcgcccggctgcatgaggatatatcgtatggatgctgctactgtcgatcaaagctttgatc

SEQ ID NO: 135 - DNA, 173 bp, Oryza sativa
  Clone ID: uC-osflcyp004f08b1
ttcttttccctgcggatactatcactctcttctacaattcgcgcgggctcgggcgccggatcggcgcgaactacggatagtgagggggactgatgcccaaatgacgggggaattgcgggtgctggatgcgccgatcatcaacgtggagcaggaggggttccaggatcggtgcg

SEQ ID NO: 136 - DNA, 401 bp, Oryza sativa
  Clone ID: uC-osflcyp004f09b1
ttgcttaatgaggatatcaatgaggaatggatttctgacaaaacacggatttgatatgaaggtttgaagaggcaaagactaaacgaccccatgatccgtggtactgatggcaggattaaggcagtgacatggcgggatgctctcgcagttgttgctgaggttttgcaacaagttaaactataagaaatcactggggttgcttgtgtaaactttttgatgcagagtccatgatggcactgaaagattatgttaacaaaatgggtacggataaggtgctatgagaaggaaatggtacaagtcctcctgcggatttacctttctaaccacctaatgaatactagcattgctgtgcttgagaaagctgatgaatttcttatggttgtacacagccaagatttgaa

SEQ ID NO: 137 - DNA, 438 bp, Oryza sativa
  Clone ID: uC-osflcyp004g01b1
gtttattagtggctcaagacacacggacccaacgactcgactcttacccaggggctcaagggtgacccgacgtacctcgttgtggaggccgacaagactgtggccacgtacgggatcaacgccgtgtgcacgcaccttgggtgcgtcgtgccgtggaacgccgccgagaacaagttcatctgcccctgccacggctcgcagtacaacaaccagggcagggtcgtccgtggacctgcttccctgtcgctggcattggtgcacgccgacgtcgacgacggcaaggttcttttcgtgccgtgggtggagactcgacttcaggaccggcgacaacccgtggtgggcgttagctataacaacatgatccatatcatcatcagcagcaaagttcacttgtgtgatcagtttgtagaaataataacgctgtatctgagaaacgct

SEQ ID NO: 138 - DNA, 303 bp, Oryza sativa
  Clone ID: uC-osflcyp004g02b1
cttcctttatggatacaacgccgtcaggaaatactcatcgacggcttacgtcatcatgtcgaaccgtctgggaccgcatgatccaactgagtttcttcaatttgccaacggctttccccgtgccgacatcgatgtgcactactacacggtgttcaatgacctgttcaataacctgactgtgcagcagaacattgattttatcaaatcaaacttcttaagtgagctaaaaaatgtcacaacacaaaaaggccctctcacctttgtgggagaatgggtggctgagtggagaggtccccatgcaac

SEQ ID NO: 139 - DNA, 318 bp, Oryza sativa
  Clone ID: uC-osflcyp004g04b1
tttatttttaaattgcattgactcatacgctaaggttaaactgatatgccttagatggcctattttgaagtgtaaactttggcgataggattgaaagagatgcaaatctaaagcataatatttgacatcgaatcattgtctgattactgtatacacgcaggtaaggcaataacttttatccggatgttggtagaatctgtatggagcttgttattgaagagaaagaacctcataaatattctctgctcatgggatcatctatgcatatgccataagaggtacttgattaatatgagttcatttatactaagaatggtt

SEQ ID NO: 140 - DNA, 348 bp, Oryza sativa
  Clone ID: uC-osflcyp004g05b1
tcgttttttctaccatcgaccgatcggcggcgcccggagcaaactaccgccggcgacgatgatctaccgcaactggacgctgctctcctccaccgtagtcatctggggcggcgtagccaccgccggcctcgccgggatcttactcttcggcggcaaggagaaattacagaactatctttgccgtgaaggtgagaggcttaggcaacaggacagagcagcaatgggcaagaactagctgaagacctaagataatgcacttgaacaaatttcctcctagagagaaccccagcggcgttggctcactcaaacctatctcacaataaattgcgaagcctggaaggaactctc

SEQ ID NO: 141 - DNA, 440 bp, Oryza sativa
  Clone ID: uC-osflcyp004g06b1
ccgcaaggggatccgccagcgtacgtggggcaaatgggcagatcaaatccttggtcctcagcaagggtgtccgtgtttggctcgcaacatataacactgttgaggaggcagatactgcatatgacgctaaagcccgcaagaaccgtgtcatgaatgccaaggtcaactttcctgatgatccaaatgttgctcagaagctccacctgaagcagaacgctgtcatgcatgacaaactagcttcacctctgaagacctgtggcgatgatgctttctttcagctcaacagttcatacaatgatctgtctagcaatgcttgcaaaggcgcctgcaaagtcggcagagactgctgaactatgcccttagtcaaacctgttgctttcactgtgaaatttctgattaacatgctctttgattcatcagcaactcattcggttcttcag

SEQ ID NO: 142 - DNA, 272 bp, Oryza sativa
  Clone ID: uC-osflcyp004g10b1
gctaccgcactatgttttttggcttatgtcgtgaactacaaatttgagagtttagccttatctccatcggcttttcttcttgatatagttgcctttactgcactagcaatacttgtgttccgtgtggcgctgggttacaaacaaactagggatagataccagcttctggtcaataaaacgctctatgagaagacaatatcaagtggatttggttcagtttattttctccttgacgcttctgagcaacaacaggtgagattcagttaacagag

SEQ ID NO: 143 - DNA, 355 bp, Oryza sativa
  Clone ID: uC-osflcyp004g11b1
attgtcacttccatctcattctcctaattgtcatcactagcttctagctagcttaattaattaattagccatggctgaggagaagcaccaccaccacctgttccaccacaagaaggacgacgagcctgccaccggagtatactcttacggcgagggcgtatacacgttggagacggtgaccaccgaggtggtcgtcggcggccaggactagtactagaggtacaagaaggaggagaagctgcacaagcacaagcagcacctcggcgaggccggtgccctcgccgacggcgccttttgtctgtatgagaagcacgaggcgaagaatgtcccggagaacgcgcacaggcacaagaat

SEQ ID NO: 144 - DNA, 497 bp, Oryza sativa
  Clone ID: uC-osflcyp004g12b1
gtatggagcaaccttaagtcagtgacactggagctaggaggcaagtctcctttcatcatcatggatgatgctgatgttgaccatgctgttgagcttgcgcattttgcactgttctttaaccagggacaatgttgctgtgctgggtctcgtacatttgtgcatgagcgtatctatgatgagttcgtggagaaggccaaggctcgtgctctcaagcgtgtggttggtgatccattcaagaatggtgttgaacagggccctcagattgatgacgagcaattcaacaagatcttgcgctacatcaagtatggtgttgacagtggagccaaccttgtgactggtggcgacagattaggtgacaaaggttactacatccagccaacaattttctcggatgtacaggataacatgaggattgctcaagaagagatatttggccctgtgcagtcaattctgaaagtcaatgatctgaacgaggtcatcaagagggcaaatgcaag

SEQ ID NO: 145 - DNA, 353 bp, Oryza sativa
  Clone ID: uC-osflcyp004h02b1
gctcgtttatcgccatctctctcagctctcacagctcactgcatcaatggccgcggccaccatggcgctctcctccccggtgatggcccgcgcggcgccgtcgacctcctccgcgctcttcggcgaggcgcggatcaccatgcgcaagaccgccgcgaagcccaagccggcggcgtcgtcggggagcccgtggtacggcgccgaccgcgtcctctacctcggcccgctctccggcgagccgccgagctacctcaccggcgagttcccgggcgactacgggtgggacaccgcggggctcttcgccgacccggagacgttcgccaagaaaccggagctggaggtgatccactccc

SEQ ID NO: 146 - DNA, 428 bp, Oryza sativa
  Clone ID: uC-osflcyp004h04b1
gtttctatgaaatcgtgaaggaagtctcatcctacctgaagaaggtcggctacaaccctgacaagattcccttcgttcccatctctgggtttgagggtgacaacatgattgagaggtccaccaaccttgactggtacaagggccccaccttgcttgaggctcttgaccagatcaacgagcccaagaggccatcagacaagcccctgcgtcttccccttcaggacgtgtacaagatcggtggtattggcaccgtgcctgtgggtcgtgtagagactggagtcctcaagcctggtatggtggtgacctttggtcccagcggcctgaccactgaggtcaagtcggttgagatgcaccacgaggctcttcaggaggctcttcctggtgacaacgttgggttcaacgtgaagaacgttgcggtgaaggatctg

SEQ ID NO: 147 - DNA, 536 bp, Oryza sativa
  Clone ID: uC-osflcyp004h05b1
aatatgtgtagtgatcttatatatgattgtggacggagtttaaatcctgctgatgacttggggcaggttgaaggggcttttgtccagggaattggttatttcatgaacgaggagtacgtgacgaactcagatgggctgcttgtctcagacgggacttggacatacaagattcctacggtggacaccatcccaaaacagttcaacgttaagctactcaacagtggattccacaagaaacgtgtgctctcttcaaaagcttctggggagccacctttgctacttgctgcctcggtgcattgtgcaacaagggaagcaattagagcagcaagggaggagtatcactgttccaggtctggatcttcacctcccttctttgatcttgaagttcctgccatcatgcccacggtgaaggagctatgcggctaatacaacgtggagaagtatttggagagtatttgctcgaaataaacagtcaagttggaaatcttaccagacggcatatgtctttttttttagtcctttagcaaggttttttt

SEQ ID NO: 148 - DNA, 565 bp, Oryza sativa
  unsure (1)..(565): unsure at all n locations
  Clone ID: uC-osflcyp004h06b1
cttttatttacaactacaacggaatagtatacaaagtcaacacaaatcattaaatggaatttatggctacacaaaccgttgaagatagttctagacctggaccaagacaaactcgcgtaggtaatttattgaaacccttgaattcggaatatgggaaagtagctccgggttgggggactactccttttatgggggtcgcaatggctttattcgcggtattcctatctattattttagaaatttataattcttccgttttactggacggaattttaatgaattaggtttctactaacgaaaactacgaagtcatagtttttccatccaaaagagcctttctactttaagctctacatttctagacattctggtagttcgaccgtggaattttttggtttcggtatctctggaatatgagtgtgtgactngttagaatttgctcctattgataatacatagaaagcacctgttatctctatcaagatgattttaattcgtccgatattatttattctagtattctgaacacgaaatagatagagtgtttcaagaaaaaaaataaact

SEQ ID NO: 149 - DNA, 261 bp, Oryza sativa
  Clone ID: uC-osflcyp004h07b1
ttgcatcgccttcgcacctcgccggcgcgctggacgcggcgcgccccttcctgcgcggcaaggaggagcaggcggacccggcgctccccaagctggccgccgtgctgcgcgccgccggcgccggcgagtgctggcacaagcacggcaccttcctcgcccaccttcttgacgtccaccgtatcctccgtctttggggcgcccccgaccccgacgcgcgctggggcctttaccactccgcctactccaactcttacgtaaacc

SEQ ID NO: 150 - DNA, 385 bp, Oryza sativa
  Clone ID: uC-osflcyp004h08b1
tttgtgttgaggagcagcctctccggcgggagatggcgcggctgaacaacgacgtgatcgaggaggcgcggagcaagctcctggagaagcggcagtgcagcagggtgaaggcgctcgtcggcgccttcgagaccgtcatggacgccaagcccgccggcgacggcgccgtcgccaagccgcagcactaccaccctcgccgttgattaaggaggaggaggccttaattgaaggagattaataaccactaatgcttgcttgcttcgtaaattcgccttttggatttatttatttacttgctcgactttttgttacacactatactactgcatcacggagtaaatatatgattattctgggatgaattaattaaggagggagatgatag

SEQ ID NO: 151 - DNA, 329 bp, Oryza sativa
  Clone ID: uC-osflcyp004h10b1
atgttttgggagaagatttcaggctcagaagcagtcgccttcgtcttagccgacgtgccttccccccgtcgaccgtgatcttccagtccgcaccccgccgcgatggccgacgccggtaagcccgaccccgtgttgtcgtcggaggcgccgtcggtgaagaagggggtcttcatgcgccgcatcttccctgttcctcctcgccgccaacattttcatcggagtttacgtttttgcaaagacctacaagagagacccggaaaagaagaacgctcatattgttgctgctgcagctgcagatgtagcattgtcaatctccagttgccccagtt

SEQ ID NO: 152 - DNA, 453 bp, Oryza sativa
  Clone ID: uC-osflcyp004h11b1
ttgttttcgcaccctcaaaccctagccgcgccttcacctcccgattcgccgccttttcgttccatgtgtgtgtagattagtagaagagaagcggcggttgcgactaggcggaatcgaccatggcgacccgtattcagtttgagaacaattgtgaagttggtgttttctccaagttgacaaatgcctattgttttgttgcaattggcggatcagagaacttttacagtgcctttgagtctgagctcgcagatgttattcctgtagtcaagacctccataggtggtactagaataattggtagtctttgtgtctgaaaacaagaatggacttctcttgcctaacacttaccaccgatcaagagcttcagcatctgacgaactgattgcctgatcaagtggatgtacagcgttttgatgaaagggcttctgcccttggcaattgttgagcttgtaa

SEQ ID NO: 153 - DNA, 499 bp, Oryza sativa
  Clone ID: uC-osflcyp004h12b1
aagttcagcagacagtaaattggttctctccaaagcagttgcaattttccatgaattatttgatcccattatccaaattgctactgggcgagaccttattccagccatggtttacgggaggagtgtaagggatcaagattacacaggaatgcattgtgctgtattaactgttggcaacactgtagtatctgcgggtcttttccgtgttatgggtagtgaaattgcggagctacccttggttgctacaagtagagatagtcaaggcttggggtatttccaagcgctgtttggctgcatagaacgaatgttggcaatttttgaaaggtaaacaatttgggctgccagctgcagatgaagcggagtctatttggacacagcggtttggattcgtgagaatacccaagacgagctgggtgagtaccttagggtgggccaacaaccgtgttcaaggaacattaaccctgcacaagctggtccaaaaatggatggctagctttgg

SEQ ID NO: 154 - DNA, 527 bp, Oryza sativa
  Clone ID: uC-osflcyp005a01b1
tgacttagctagctagctcgatctcgccggaaatggcagctcgcgtcatcctgctcctcatcctcctcatcgcctgcgtcgccgtcccggcggcggcggcgttcgagacggtgtacgcgttcggcgactcgttcacggacacggggaacacgcactcgacgacggggccctactccttcggctacgtgtccagcccgccgtacggcgccaccttcttccaccgctccaccaaccgctactccgacggccgcctcgtcgtcgacttcctcgccgaccgcctcgcgctgccggggttcctcccgccgtacctctcccccgccgtcgtcaacgccacccacggcgtcaacttcgccgtcgccggcgccacggccatcgagcacgagttcttcgcgaggaacaacctcagcgtcgacatcacgccgcagtccatcatgacggagctcgcctggttcgaggcgcacctccggcggtcggccgccgccgcagggccgtctgcgacgcgctcttttggtcggcgagatcggtgc

SEQ ID NO: 155 - DNA, 259 bp, Oryza sativa
  Clone ID: uC-osflcyp005a02b1
ttagtgagacactcactgatataatcaagctagctagcttaatcacctagctatccgtcagtttagctagatatggctgcagttaactgcaaggtggtggccgccgcgattgtggtggcgatggtggttgcggcgccgggggcgtcggcggcgataacttgcgggcaggtgggatcggcgatcgcgccgtgcatctcgtacgtgacggggaggagcggcctcacgcagggatgctgcaacggagtgaaggggctgtaca

SEQ ID NO: 156 - DNA, 494 bp, Oryza sativa
  Clone ID: uC-osflcyp005a07b1
tttatgaatggctttggtaagtaatgtagcattccttcactatttataataccatcattgaagagatgatcttctttacgttttttttctttcatgtgccctttactactaaaaaagaattgaaagtacaacctgaataattggaggggatcttacttgaccagttggcatgtctctacttcacattagtggggatctcacttggctaattggccagttgtcatgtatctgcttcacattggaggggatctcacttggccaattggcatgtctctgcttcacttcatttcagctcctcagaaacgagcaaccaagttcttattgcccagggatggccaagctctccaaaaacaactgatataatgaaatattctttcgttcctcccacaaagcttcagagctggactatcgcaaaaaaaaaaaaaaaacttcagagcttgagggtgaggttgctgccatgcacagctgaaaattcatttttgaatattcctact

SEQ ID NO: 157 - DNA, 433 bp, Oryza sativa
  Clone ID: uC-osflcyp005a08b1
ttaatctcaagtctctgtctcgtcgtcctcgcatctccactcgccatgggcaagattaagatcggaatcaacggtttcggaaggatcgggaggctcgtggccagggtggccctccagagcgaggatgtcgagctcgtcgccgtcaacgaccccttcatcaccaccgactacatgacctacatgttcaagtacgataccgtgcacggccaatggaagcacagcgacatcaagatcaaggactccaagactctgctcttgggcgagaagccggtcaccgttttcggcatcaggaaccctgacgagattccgtgggctgaggctggtgctgagtatgtcgtggagtccaccggtgtcttcactgacaaggagaaggctgctgctcactcgaagggtggtgccaagaaggttgtcatctctgccccgagcaaagatg

SEQ ID NO: 158 - DNA, 524 bp, Oryza sativa
  Clone ID: uC-osflcyp005a09b1
tcgttccatctctctcagctctcacagctcactgcatcaatggccgcggccaccatggcgctctcctccccggtgatggcccgcgcggcgccgtcgacctcctccgcgctcttcggcgaggcgcggatcaccatgcgcaagaccgccgcgaagcccaagccggcggcgtcgtcggggagcccgtggtacggcgccgaccgcgtcctctacctcggcccgctctccggcgagccgccgagctacctcaccggcgagttcccgggcgactacgggtgggacaccgcggggctctccgccgacccggagacgttcgccaagaaccgggagctggaggtgatccactcccggtgggcgatgctgggcgcgctcggctgcgtcttcccggagctcctcgcccggaacggcgtcaagttcggcgaggccgtgtggttcaaggcgggctcgcaaatcttcagcgagggcgggctcgactaccccggcaacccgagcctgatccacgcgcagagcatcctcgccatctgggc

SEQ ID NO: 159 - DNA, 404 bp, Oryza sativa
  Clone ID: uC-osflcyp005a10b1
tcgttcttctcctccccctctttaccttttcctcctcggttcggttccgtggttcgtctagggtttagtgggttgagatggcggcgccggatgtcgagtaccgctgcttcgtcggcggcctcgcctgggccaccgacgaccgctccctcgaggccgccttctccacctacggcgagatcctcgactccaagatcatcaacgacagggagacggggaggtcacgtgggtttggcttcgtcaccttctcctccgagcagtcgatgcgcgacgccatcgagggcatgaacggcaaggagctcgacggccgcaacatcaccgtcaatgaggcccagtcccgccgctccggcggcggaggcggtggctacggcggcggcggtggcggctaccgcggcggtcgtggaggc

SEQ ID NO: 160 - DNA, 142 bp, Oryza sativa
  Clone ID: uC-osflcyp005a11b1
tcgtgaagaaggagagaaacatctagagtgaataagaaagatggggttcgtccgtgccctgttcctgctggcgatggtgtgcgtggcggcgcacgcgaaggactaccccaaggaggagggcgcgaaggcggaggggccggcc

SEQ ID NO: 161 - DNA, 397 bp, Oryza sativa
  Clone ID: uC-osflcyp005a12b1
ggagtgacaaggatgatttgtaatttgtgaggcataagttcttggatccacatgcaaagcgtctttccgcagatgaagcccataggaattctaaggagtttagtgaggcacttgagttactgtactccaaaaaggatgttttccctaaaatccttcaggagaacagtggtgcatttccaggattctcagggcacatccttggtcacagtggattgcagtactccaaattgtttgagcaagacaactgctctagcagcggtgttgaacatgacgggttgtttaatgtaccaaaggagccagagatgcagcaaaagtaaccacccacatgatttcatcagaaacaaactacattcatgataatgtacagaaggcaggtattatggtttgaaggcaggga

SEQ ID NO: 162 - DNA, 431 bp, Oryza sativa
  Clone ID: uC-osflcyp005b03b1
tttgtctctttcccttccttctcccttctctctctctctctgactaccagcacgaagatgacgatggtggctagctgtgcggggtggcgcgttgggcgtggaggacgctcgtcggagccagtgcccgccgttgtccccgtcgccgtcgccccaccgccgcggggtcgaggcgacgacgaggagctcggcgataggtgcggtgaataagagggagagtgggagcgggacgtggaggccgctgctggcgccggggacggcgttgccgggcgggagcttctcctgtcggctcaagacctcggccgccgaggaggacgacgacggcgcggccccggcaagggtcgccctcaagctcgcctcccttaccgcgctgctctggctccccgccctcgttggtcttctcatcggctgccccaccttgacgaccatcggat

SEQ ID NO: 163 - DNA, 434 bp, Oryza sativa
  Clone ID: uC-osflcyp005b04b1
tgctgatcctgtcctacaaccagctcaccggcccgatcccgcgcgacgacgcgcaggacgagatcaacaccggcgacctctcgcacaaccgcctcaccggcgacgcctccttcctcttggccgacggccggcccatcggcaaggtggacctgtcgtggaacgacctcgacttagacctcagcgagctcgtcttcccgccggagctgacctacctggacctcaggcacaaccgcatgaggggcaccgtgccacgctccctcgccgtgctctccacgcgtgagacgctggacctcagatacaaccgcctctgcggcccgctcccgaggctgcacggcgtcatccgccacggctggaagccgtacgagcacaaccagtgcgccggcggcgccccgctcggcgggtgccaccaatcgtgagcatccatccatccatca

SEQ ID NO: 164 - DNA, 475 bp, Oryza sativa
  Clone ID: uC-osflcyp005b05b1
ttaacatcacagtttgatttggtcaagtccggagcaaaggctgaaggggatgttgtatcagtgaattttgcatacttgaaggctggcacaccgacaccaacgggttttgtcatgaatctacaaccatctgaagcagagataggtctagacatccgactccctcctagtgttcatactgaggctctagagaagcgtcttgctgaagaatgggcaccttcttcacgcaacttgacatttgagttcaaacaaaagacctctgtacttgacaactttggcaagccagccgtcacccctgctgatagctcaaatgtatggtgggctctatttgaagaggctgtgaagagagccggtggcaaacttggtaagccggaaatattcccggcctctactgatgctcgttactttcgggtgcttgggataccagcatttggtttttcttcaatgacaaacacaccgatattgctccatgatcaca

SEQ ID NO: 165 - DNA, 431 bp, Oryza sativa
  Clone ID: uC-osflcyp005b06b1
ttatcctacaagattcaaggtggattatatcgaaggatgcgattgtatctggccttggacttctcggcatcaagcaaggtggaacagaagctgcattgtccaagccccacaggaagagagttgtccgaaagaaagttgcctcaacctgcatacagtaggatgttgcctaatgctggaacaattttgctttcatgacactacgccgtattgagttctacccagccaggcgaacgagggaaaccgtagctggcagccagccttgcagtctgtcgcggaaggcatcgaaccgctggcggtggtcataactgggagggttcagaactggaggccctgtaccattttgtatcttttttcttctcgctttttgataagaaaagacatcccgatctcttgtactggcgtgagccaagtagacattttatagttgtagt

SEQ ID NO: 166 - DNA, 449 bp, Oryza sativa
  Clone ID: uC-osflcyp005b08b1
tcttcaagaagagggagagcaccaaggacacgcgactagcagaagccgagcgaccgcctcctcgatccatatcttccggtcgagttcttggtcgatctcttccctcctccacctcctcctcacaggttcttggtgtagcttgccactttcaccagcaaagtttcatgtctgatctcgacattcagatcccaactgccttcgatccctttgctgaggccaatgctggagactctggtgcggctgcaggatcaaaggactacgttcatgtacgcatccagcagcgtaatggccgtaagagcctgaccactgtccagggattgaagaaggaattcagctacaacaagatcctcaaagatctcaagaaagagttttgctgcaatggtactgctgtccaggacccagagcttggccagtcattcacttcagggtgatcagaggaagaacgtatc

SEQ ID NO: 167 - DNA, 552 bp, Oryza sativa
  Clone ID: uC-osflcyp005b11b1
tcgtaaggatgaaatgttctttgactcgcgggcatggttagattctgattgcgaggacgacttctacagtgtgaatggagattttactccgtctcgtggcagcactccaaactaccaacccagaacacaaacagttatgagcaatgtctttgtacctgataatgtacagaattccaaatcacctgaaccttctccaactggaaggagaaaactagccgagctcttgcaggaggcgatgcagaatggttccgaagatagcaccgatgcatctgttccagacatcagcaagaatgagaagcagcaattccagcctatttctgcagctgtgaagccagtatctgagtccagctccacgtgtagcacagaaccgacgccgatcagagaagcgaagaatcgcaaggagaaggcgtggtacaccggtcgctgttgcttgccggcttttgttcataccctagacttagatgagaggaggcagaagatgacccctgggccttgtgcttgttgacatggcttgttcccttctatgaagctgatctacaatatactacctga

SEQ ID NO: 168 - DNA, 473 bp, Oryza sativa
  Clone ID: uC-osflcyp005b12b1
gttcttgcggacggagcaggatcttcaaggtctcaaccatctgataggtaagattgtagaatcaggggcgaaggattttgccagggcaatcctcaggacttcattgctcgcatcttgtgtcgttgcctgccaaagcaaggcgcttactttaggtgatagcaaggaaatcatagctcagagattacatgatcgtctacaagattgtcctggtggtgaacgtttacaaattgaggcaggtgccaaagtgcagaagtttatagaatgggcattgcagtgcattcatctgcatcgttgttctgaagatacagagtgttacaaagcaaactgcagcactcaccaagaggtacagttccatctatcagcgtttaaagccttcttggacatagctggtgacaatctcagtggcaagattttcactgaggcattcgatgcggcctgcttcccacttacactattctcaactttatttgaac

SEQ ID NO: 169 - DNA, 425 bp, Oryza sativa
  Clone ID: uC-osflcyp005c02b1
tttcttctcctccccctctttaccttttcctcctcggttcggttccgtggttcgtctagggcttagtgggttgagatggcggcgccggatgtcgagtaccgctgcttcgtcggcggcctcgcctgggccaccgacgaccgctccctcgaggccgccttctccacctacggcgagatcctcgactccaagatcatcaacgacagggagacggggaggtcacgtgggtttggcttcgtcaccttctcctccgagcagtcgatgcgcgacgccatcgagggcatgaacggcaaggagctcgacggccgcaacatcaccgtcaatgaggcccagtcccgccgctccggcggcggaggcgggggctacggcggcggcggtggcggctaccgccgcggtcgtggaggcggcggctccgaggaagtggcggc

SEQ ID NO: 170 - DNA, 457 bp, Oryza sativa
  Clone ID: uC-osflcyp005c03b1
ttcctagattggccaagatattgcaacaggttgctataaagaaagaactaattgttgcgttggcaaactccaatgtgagagagatgcttgagatgtggtttactaacatcaaacgagttgggatttcaaattatttaattgttgcattggatgacagcactgaaaccttttgcaagtctaaaggtgttccattttataggcgggatcctgacgaaggagttgacaatattggaaaggtaggtggaaaccatgctgtgtctggactaaagtttcgcatattgagggaattcttgcagcttggatatagtgtgctcctatcagatatcgatattattttcttccagaatccgtttgatcatctttacagagatgctgatgtagagtcaatgagtgatggtcatgacaataggacagcttatggtttcaatgatgtatttgatgagcccttaatgggctt

SEQ ID NO: 171 - DNA, 538 bp, Oryza sativa
  Clone ID: uC-osflcyp005c06b1
ttacctgtcctaagaaccccctcaaacatgatgaaacaagtgtcagaaatatacacaacaactgtgttcaacattcttgaggaagaattcattggatctttaggctattatatctctagtcttgacaatgatgggttgattgctgcgtatagcgtcacaaaggaggatactgaagccacatgcagagtcaggtatgatacttctggcaatatagctaagtgcagctgctgcaagtttgagagttgtggtatcttgtgccggcatatactaagagtattcttggcccttgatgtacgcaccataccagatgtttacatattgaaacggtggacaaaagaagcaaagaatggctttgcgttggacgaatgcttgcggtacagtgagcttcaccgtgatgcccttagatatgcaagggaaggatcaacgtctggggatgtttttacctttgcacaacaaacttttaggttgcttctgctgaggtggttcacatgaaacaggaaactttttagccatgtacaatccgatgaactttgatgct

SEQ ID NO: 172 - DNA, 317 bp, Oryza sativa
  Clone ID: uC-osflcyp005c07b1
tcgttggaaagctcattacagggaagtgttcgatcatggaattcgagaagctttatgctgcctagggcgtgcaaagtatctaaccgtattggaagaggatgaggtttactctgtggcaagacttctgggtgatttggttgcatatcctgcttctggtacaggacatttggaacttttagcagggcttgcactattacagaaaaatgaaaatctgccttattcgcaaactgaccttacggaagagccactgaaccttatgcaagaaggtgctatccttcatccctttgctgaagcacgttacacgggacctttccttg

SEQ ID NO: 173 - DNA, 253 bp, Oryza sativa
  Clone ID: uC-osflcyp005c08b1
acccactccgatcgcaaatactctctctcgccgatagcagcagcagcagcaatggccgccctcgccgccgcatccaccgccttcgccgccaagccgcgcctggcgcgcgcgccgtcgtccccggccgcgcggttctccgtgtcgtgctccgcgtcgggcaacaacggcggcgccggcgagatggcgcagtcgctggcggcgtcggccaagacgttctccgcggcgctggcgctgtcctcggtgctgctctctc

SEQ ID NO: 174 - DNA, 497 bp, Oryza sativa
  Clone ID: uC-osflcyp005c10b1
ttacgctttcttgcataagaactcccccccctcctcgctccccgccgccgccgccgttttcttggagaggagaaatccgtaggctcagaggatttttggtagtcttgtttcgtgatattcgtgaagagggggggagctaaggggggattcgtaagatcagaattggatcacgcgggggcgcgctcgggatcgggggttccaaacacagcttcttcgttgaatttaagtggatgtactaatggagtcaaagggtggcaaaaagaagtctagcagtagtcgttccttgatgtatgaagctccccttggctacagcattgaggacgttcgacctgccggaggcgtgaagaagttccagtctgctgcttactccaactgcgcgaagaagccatcctgatagccctttcggcttctccatcctagtagtttaggattttttgcaattccattttggcacttttcttctgacctatttctctggctgctgctttctgataatc

SEQ ID NO: 175 - DNA, 441 bp, Oryza sativa
  unsure (1)..(441): unsure at all n locations
  Clone ID: uC-osflcyp005c11b1
tcaccattggttcctgaaattgagtcatggctgccaagctagctcgcctccacagtctccgcgaacgcctcggtgccaccttctcgtctcatcccaatgagttgattgcactcttctctaggtatgttaaccagggaaagggaatgctccagcgtcaccagctgcttgcggagttcgatgccttgatcgaagctgacaaagagaaatatgctccctttgaagacattctccgggctgctcaggaagccattgtgctgccgccctgggttgcactggccatcaggccaaggcctggcgtctgggactacattcgggtgaatgtaagtgagtcggcagtggaagagctgagtgtttctgagcacttggcattcaaggcacagcttgttgatggacacaccaacagcaactntgctcttgagctcgattttgagccctttaatg

SEQ ID NO: 176 - DNA, 520 bp, Oryza sativa
  unsure (1)..(520): unsure at all n locations
  Clone ID: uC-osflcyp005c12b1
gttttgcacttgatccgttttgtgcatcaaggccacagcatcaggtggcaatttcaagtgacgaggagcaaaccgagtgcttgatgtttgaacattcagcacggcatcgtgagaatcctcattttgcaaatgacaagggcccaaagaactttaacttgaatgaagcattatcggatggacaggaagattatcttgtagaacaagatgggggaagcgttagtagcttaccacagagtaaagccagtgggttcccgtggctcataaaaacaacagatacatgtactcgcccatcagatttgcaaaatccaaggaaggtttttgcccattcaaataggattgtaatcgatctgaacagcaatactgataggaaagaagcagctttgactattcatagcctgtcagattctgcttcaacatccctagactgtggggttaagaaggaatcccaggattgcgggattaaaaaggatgaggcgttcggggacattaccactaagactgangtggcatgtaatacgac

SEQ ID NO: 177 - DNA, 438 bp, Oryza sativa
  Clone ID: uC-osflcyp005d01b1
tgaagcttctagaagcttcttccgagatgaaggtgatcgagaagatccaggaggcggcggcggatgggcggacggtgttctcgttcgagtacttcccgcccaagacggaggaggggctcgacaacctgttcgagcggatggatcgcatggtggcgcacggccccaacttctgcgacatcacctggggcgccgggggatccaccgccgacctcacccttgagatcgccaaccggatgcagaacatggtgtgtgtggaaacaatgatgcacctgacatgcaccaatatgccagctgagaagattgatgatgccttaacaacaataaagtctaatgggattcaaaatgttctggctctaagggcgatcctccacatggtcaggacaaatcttgtcaagctgctggtggatccgcttgtgctcttgatttggtacaacacat

SEQ ID NO: 178 - DNA, 445 bp, Oryza sativa
  Clone ID: uC-osflcyp005d05b1
ttagcaaaagcttcctagctagcttgcctaccattgccatcctctcccctccaacctctccctccattcgcattaccgcgcaaaggaggaagaagaagaagaactcactcgcaggagcaccaatggcgaattctgcgtcagggctggcggtgaacgacgagtgcaagttcaagctccaggagctgaagacgaggagggggttcaggttcatcgtgttcaagatcgacgacaaggccatggagatcaaggcggagaggctcgggcagactgccgagggctacgaggacttcgccgccaccctccccgccgacgagtgccgctacgccgtctacgacctcgacttcgtcaccgacgagaactgccagaagagcaagatcttcttcttctcctggtcgcctgacacggcgaggacaaggagcatgatgctgtacgcgagctccaagga

SEQ ID NO: 179 - DNA, 225 bp, Oryza sativa
  Clone ID: uC-osflcyp005d06b1
tgaatctggacaaggagatcctggacacctgctgcgagggcatctcggagtgcatcgtgaagctgctgatggagtacgccagcaacgtgcagacgccgatcgggtggaagacggtgcttcacctgctgtccgtcacggtgcggcacccggagacgttcgaccagtctgtggccgccatgatcaagctgatgaacgacggcgcgcatgtggtgactcctgttcaac

SEQ ID NO: 180 - DNA, 341 bp, Oryza sativa
  Clone ID: uC-osflcyp005d07b1
tcttcagcctgtgttggaattggttacagattttcattgggttcatttggatagttatggatactggtatgttattggataactttcagcattgtgagttaaggctgacagatcaatcaccatcatatccacatccaacagttattgatgcccagctcactttttcagccccttcgacttgtattagttgcagaacttgaaagtgcatccatgggcagtttttgttcttcggctctggttcaagccatgcgctgacttctatggagatcgacactgctgatatcccagctcggcctgcttgtggtcttcagggcaaaagtattatcttgattacatactca

SEQ ID NO: 181 - DNA, 402 bp, Oryza sativa
  Clone ID: uC-osflcyp005d10b1
tcttaaccttttagcttctcagccttttgcctctctttctactctctttcttggccgtctctcttatatccctcaatttaaccatcgagggcggccaaaaaaaagagagaaaggaagagcaaaataacacattacaccatggcgcgattcgtcatcatctccgtcgtcgtcgtcgccgccttcgccgctgccgctgtcgttgaggcccgggttggacctatcgacgtcgctccgaccaacctgatcaccaacccactcggtgccatcatcgacaatggccgcaagatcaccggcgccgtcgtcgacgagtgcgcctggacctgcgatcatgtcgcggcgggtaacaagaagatgtgcaacacgctgaggaagctgccgggggtgagctcgccgaaggagctc

SEQ ID NO: 182 - DNA, 544 bp, Oryza sativa
  Clone ID: uC-osflcyp005d11b1
tgttcttaagcagcagcagcagctagattggttggttgccaatgatcccggccatcttcccgatgatggacggcgccgcgcctctgcttcccgagacgagccccgagagccgccagcaacgtgatccggagagggggaagaggcggacgccggtcctcccggccgtcgtcgcgtccgccgtggtccttctcggcctcgcggcgctcttcctggtgtatggatttcacgacggtggagacgggagggcggccgtactcgcgcccggcaccgtggaggtcgcggcctcgtcgtcccgcggcgtcgtggagggcgtctcggagaagtccaccaccccggcgctgcgcctcggcggcggcgcggtccgggactacgcctggaccaactcgatgctgtcctggcagcgcacggcgttccacttccagccccccaacaattggatgaacgatccgaacgggtcactgtactacaagggatgggacccatttggtctaccaatggaacccggactcggccggggggggaacatcaccctggggcatgccgt

SEQ ID NO: 183 - DNA, 462 bp, Oryza sativa
  Clone ID: uC-osflcyp005d12b1
ttctcaccaccgccatggctgccacactctcctctgctcctgccccctccaagcactgctccattgtcagagcccagcactcccctcccccttccatcctctcatcatcaactaagacggccttccatgggctgtcactggtggacaggcggtgggcggcctctgtcggcggcggcagcgggcggcggcggagggtgcttcaggtgaacgcgaggacggccggcgcggcgaagaacatcgaggtggaggtcgacaagccgctcggcctcaccctcggccagaagaccggcggcggcgtcgtcatcaccgctgtggattctggagggaacgcggcaagagcaggcctgcaatcaggtgaccaggtgctctacacacgtagcttctttggagatgaactatggcctgcagataagctggggctcaccaagacagccatccaggctaagccagactctgtctact

SEQ ID NO: 184 - DNA, 461 bp, Oryza sativa
  Clone ID: uC-osflcyp005e01b1
tgctcatagctatatacccagttttagtttcatactcgtcacccgacaagcaagcattccctcggcatacgttgagccgggctgctctaatcatgagtgagagccccatatttcttctggatgcatttacgaaccttattgtttactattcaccgtctgctgatccttcacttccttttcctccacctcatgactgtcttttgagaaccatggctaatgagttgaagcagggcaggtgtataacaccaaagctgacatttatccatggaggacgagaagatccagcattgtttgagaggtatcttattgaagagcaagatgttgacggtacagggtttacaagtggcaaagggttctgatcgcttcgtgagagcatcaagcatgctgcaacagacatcatcgagacagaaagtagtatctagttcaagacgtagcacatttagcttcaaaatcatggagta

SEQ ID NO: 185 - DNA, 486 bp, Oryza sativa
  Clone ID: uC-osflcyp005e03b1
tatatgtccgagaaatatattcggatgttagattaatttttgccaatgcaatgaagtacaatgatgaacgacatgatgttcatataatggcgaaatcattgcttgagaaatttgaagagaaatggctccagcttcttcctaaagttgaaaatgaggaaaggaaacaaaaggatgaggaatccaacggtgttccaaaagtgaacatttctccagaagaagctattgcaaaactagcaaaagatactgacaatgagctgattgaaatcaacaagcagttggaggagcttcggcaaatggtggtccagaaatgccggaaaatgactacatatgagaaaagaaaactgggtgcaggtctctgccacctgtctccagaagagcttactaaggcattggagatggttgcacaagaccaccctagctctgaagctaaaggagacgaactggaacttgatatggatgctcaaagtgagacaccctctggggctg

SEQ ID NO: 186 - DNA, 190 bp, Oryza sativa
  Clone ID: uC-osflcyp005e06b1
tcatattcgtgttactgctgtaaactagaacatgctttcgttttgagacttggatacttttctcatgagtccttccaccatgctggtatgctaaatcagtaaaggccgtggcgtcatatggtgccagttgtgaagcctgttgtacggtgtaccgtagtaaatcactgagttttcacccctttgatttttc

SEQ ID NO: 187 - DNA, 440 bp, Oryza sativa
  Clone ID: uC-osflcyp005e07b1
ttctgattggtggccactatggtctacttgacacccaaacttttttgccaaatcctgattactatagtgctctactatggcatcggcttatgggcagggaagttctttcagttgatatcaatgcgccgcgtaaactgcgtgcttatgctcattgcaggaaacagcagcaaggaatcaccctcctgttgatcaacctgagcaataccaccggatacaacgtcaccctccagaatgacatcaatgtcagccttgacaaaacagccagccttcataagcacaattctttctcacacagcctcagaagagcggtttcatggctggggcgcaagccgtcaagcgacgtcgcgaggagggaggagtaccacctgacggccaaggacggcgacctccagagcaggacgatgctgctcaacggcgcaccgctggaactctccgacgac

SEQ ID NO: 188 - DNA, 141 bp, Oryza sativa
  Clone ID: uC-osflcyp005e08b1
tgaagaaggagagaaacatctagagtgaataagaaagatggggttcgtccgtgccctgttcctgctggcgatggtgtgcgtggcggcgcacgcgaaggactaccccaaggaggagggcgcgaaggcggaggggccgataca

SEQ ID NO: 189 - DNA, 494 bp, Oryza sativa
  Clone ID: uC-osflcyp005e12b1
tttggaggagtgcacgcgaatccctcctcgccggcgagaatgcaggagcaggcgacgagctcgcggccgtccagctccgagaggtcgtccagctccggcggccaccacatggagatcaaggaaggaatggagagcgacgaggagatagggagagtgccggagctggggctggagccgggcggcgcttcgacgtcggggagggcggccggcggcggcggcggcggggcggagcgcgcgcagtcgtcgacggcgcaggccagcgcgcgccgccgcgggcgcagccccgcggataaggagcacaagcgcctcaaaaggttgctgaggaaccgggtatcagcgcaacaggcaagggagagaaagaaggcatactcgaatgatcttgaggtgaaggtgaaggactttgagaagaagaactcagagttggaagaaagattcttcaccctacagaatgagaaccagatgctcagcagatactgaagatacaactgtgagca

SEQ ID NO: 190 - DNA, 398 bp, Oryza sativa
  Clone ID: uC-osflcyp005f02b1
caagtccaaggaacagctgcttcttgaagctaatcaggttgctgagcagcaagaagcaacaattaaggagctccggagtgaaattaaaagaaaagaaattgatttttccagatcgaatgaattgagaaaggccaatgaacagaaactaaaaatcgccgagcaagaacttgagaggcagaatatgggatggttagcagcacagaaagagttaaaggaagtggcgcaactagcatgcaaggatatggatggtatcaaggatacagtcagtgacttcaaacgtgtgaggtctctgctggatgctgtacggtctgaactaatcgcttcaaaagaggctttctcctcctctcgaaaacagatagaagatcaagcagtgcagatgcagaaacaagttcaagaac

SEQ ID NO: 191 - DNA, 455 bp, Oryza sativa
  Clone ID: uC-osflcyp005f03b1
ttcgcttctggcccagataaaggtgttgaattggatggcatccttcgcacaaagccccttgaaactggaattgtcaatggcatggatgtttatgaatggaatccagcaacagatcagtacatcagcgtgaaatacgatgcaacaacggtaactgaagcaagggcactcaataaggaaatgctacaagctgaagttgggttgcctgtggactcgagcattcctttaatagtttttgttggtcgtcttgaagagcagaaagggtcagacatactaattgcagccattccagagttcgtggagggggaatgtccagataattgttcttggtacagggaagaagaaaatggaggaggaactgatactgctcgaagttaaatatccaaacaacgctagagggatagcacaatttaatgttcttttgcgcatatgatgtttgctggggctgatttataatt

SEQ ID NO: 192 - DNA, 478 bp, Oryza sativa
  Clone ID: uC-osflcyp005f06b1
tttgtagcaatggcatcctcctcccttctactcgcctgtgttgtggtggcggctatggtgtccgccgtctcctgcgggccacccaaggtgccaccgggccccaacatcacgacaagctacggcgacaagtggctggaagccaaggccacctggtatggtgcgcccaagggtgctggccccaaggacaacggcggcgcctgcgggtacaaggatgtcgacaaggctcccttcctcggcatgaactcctgcggcaacgaccccatcttcaaggacggcaagggctgcggctcatgcttcgagatcaagtgctccaagccggaggcctgctccgacaagcccgtccttattcacgtcaccgacatgaacgacgagcccatcgctgcctaccactttgacctctccggccttgccttcggcgccatggctaaagatggcatggacgaaaagcttcctaaggccggcattatcgacacgcagt

SEQ ID NO: 193 - DNA, 297 bp, Oryza sativa
  Clone ID: uC-osflcyp005f09b1
tttcttcccaaaagcagctccatccaaacccaatcaagccccactccccaccaacccccttccctcaattataagcctacaactactgctgattgcttcagactgatccaagaaagggaagtttggttgcggttcagagaggtgcacaagggggagggagggctctgaattttcaagaaagggaccatctttctgctgctgctgctgtccgggctggtgcttgttgaatttgaggctaaagaagtcggaattggaggctttgtgagagggaaacattggctggcatggaaatctacc

SEQ ID NO: 194 - DNA, 472 bp, Oryza sativa
  Clone ID: uC-osflcyp005f10b1
tccaagtccaatcgacctcatttcattcgattcatcgatcgctcggcgcggcttagggtttttggcggcagcgatggcgtcggagaagcacttcaagtacgtcatcctcggcggcggcgtcgcagcgggatatgcggcacgggagttcgccaagcagggtgttaagccaggggagctcgccatcatctccaaggaggccgtggctccttatgagcgccctgctctcagcaagggatacctctttcctcagaatgctgcaagactcccaggatttcatgtgtgtgtcggcagtggaggagagaggcttttgcccgaatggtactcagagaaaggcattgagttgatcctgagcactgaaattgtcaaagctgatcttgcctccaagactttgactagtgcagttggagcaacctttacatatgagattttgatcattgcaactggctcctcagtcatcaagctatcagatttt

SEQ ID NO: 195 - DNA, 519 bp, Oryza sativa
  Clone ID: uC-osflcyp005f11b1
tcaaaatcccccaagctgctgcaaggatcgtccaatcaatccgtcgtcctcctcctcctccgcctccgtctcaagaatgacagaatcaccgtttttgccgcgcgagaggctctttaagcagcagcagtattttcagaacttgaccaagcacacgtatctgaaagggcgttatgatgtggtcacctccgttgccattcccctcgctcttgccgcctccagcttgtttatgataggccgtggggcgtacaacatgtctcatggagtcgggaaaaaggagtgaacgacatggtttcctctcatttcagtacttcagcataggggtgatagcttcaaggcttcctatggtgtcttttaagttgcacaaataaatactgttgaagttaactcttggtatatcactgctggcaactgtggatttctgattaagcaagctgctgtcaagatgatggtagtattggaatatcagtttgtttacagtatctatttatttctaccattctacctccctttttcttcctt

SEQ ID NO: 196 - DNA, 435 bp, Oryza sativa
  Clone ID: uC-osflcyp005f12b1
gttactgaggttgaatttagaaggtattttgagcaatttggtgtgattacggatgtggttgtcatgtacgaccacaacacgcagaggcctaggggctttggattcatcacctatgactcagaagatgcggtggacaaggcactgcacaagaacttccatgagctgaatggtaagatggttgaggtcaagagagctgttccaaaggagcaatcacctggacctgctgcacgttcacctgcgggagggcagaactatgctatgagcagggtccatagcttcttgaatggtttcaaccagggttataacccaaaccctattggaggttatggcatgagggttgatggaaggtatggtctgcttacaggcgcacggaatggattctcttcatttggccctggttatggaatgggcatgaattctgaatctgggatgaat

SEQ ID NO: 197 - DNA, 466 bp, Oryza sativa
  unsure (1)..(466): unsure at all n locations
  Clone ID: uC-osflcyp005g05b1
gagctttgcagtcatcttgcatgctctgatatacgctagtctttctccaaagcaaaactctgcccgaaatttcggtgcaaaacctcgtttttcagggtgaaactccgcccaaatttccggtggcaaaatcctgctgttcagggcgacactctgctgaaattttcggccggtgaacagcgctttttcagggcgacgccctgctgaaattttcaccaaggattgtcgtcttggtgaacagaaactctgcccgatattcgattggatttccttggtttttctgggggagattctgccgaaattttctgcacgtacgtgtacgtgtatgctcgtgctgttccaaccttggtgtttatgataacatccactgttcttgttcagtccttctccgtcgtcttcctctactggttctacgtcttctcataatcaacccaaatcactctacangaatntccaactggttaattac

SEQ ID NO: 198 - DNA, 346 bp, Oryza sativa
  Clone ID: uC-osflcyp005g07b1
tcgtccacacactcccacccaggtaaggagagggaggaggaagggaacctcgaaggcggcggcggcggcggcggagatggtttccctcaagctgcagaagcggctcgccgccagcgcgctcaagtgcggcaagggcaaggtctggctcgaccccaatgaggtcaacgagatctccatggccaactcccgtcagaacatccgtaagttggtcaaggatggattcattatcaagaagccccagaagattcactccaggtcccgtgcacggagagcccatgaggctaagcagaagggacgtcactctggctatggtaagcgtaggggtacacgggagggttggcctccc

SEQ ID NO: 199 - DNA, 436 bp, Oryza sativa
  Clone ID: uC-osflcyp005g10b1
cgcctccctcgtctcctcgacgcgatgccgccttcgccctctctcaaaccctagcctccgcctccgcctttccctcccctccccgtcgcgggcgcctccgccgccgcgtcccccgtccccgtccccatccccatcctccgtccgctagcgccgccgctccgtccttcccatccagatcgcgccaccccgtccgcccgcgcgtcgtacgcctccaccagctgccggtcctccgcctcccggtcaagatccggcaccgcgccgctttcctccgtcgccgccatcctccgtcgcctccgcctcccgttcgagatctgcagccccttctctgcacgtcggtttctgcgctgccgccaagaaggtttcaattttggtaggaacaccatctcaagtgcttatttagcagatatttgcttgtggcgagacagaaattggccct

SEQ ID NO: 200 - DNA, 415 bp, Oryza sativa
  Clone ID: uC-osflcyp005g11b1
tcttcttatctttccatttttggatctggacattaagtactatgacttgggagttctccaccgtgatgcaactgatgacaaggtcaccgtggaggctgcagaggctactctcaagtacaatgtggctattaagtgtgcgacgattactccagatgaggctcgggttaaggagttcaacctaaagcaaatgtggaagagccccaatggcacaattaggaatattatcaatggcactgtattcagagagccaattatatgcaaaaatgtcccaaggcttgttccaggatggactaagcccatttgcattggaaggcatgcttttggtgatcagtaccgagcaactgatgcagttctgaaggggcctggcaagctcaagctgtttttgagggaaaggtgagccgattgatctggaggt

SEQ ID NO: 201 - DNA, 436 bp, Oryza sativa
  Clone ID: uC-osflcyp005h02b1
tgcatatctctctcgttccccttttgctctccgaaaaccctaacccctcgccgccgatccggccctcctccgccgttggccgccatgccggacgtgcagccgctcgtcagcgagttcgtcctcaagctcaagcgccgcaaggtggaggggtcccatgccgtggcgcggcagacggcggagctgctgcggtcggtggtgtcgcagcaccggatgggcagcaccaaccaggcggcggcgcttgcggacgccgtccgcggcgtcggggagcagctcatcgccgccaaccccatcgaacttgctgttggaaacattgtgagacgtgttttgcatataataaaagaagaggatatatcttctacagcagttggtattgaaggcctttctgtcaccgctgagagcgatgatgaatatgacagtggaaatgatgatcacccta

SEQ ID NO: 202 - DNA, 439 bp, Oryza sativa
  unsure (1)..(439): unsure at all n locations
  Clone ID: uC-osflcyp005h03b1
gctctttccttctcctctgtctcctcctctctagagagagaaacagaaaaacggaggagactagggctctgctcctccccctgcgccggttggacggagctctgcctcctcctgattctgctgtcccctcccctccccgatccacctcctcctacatctccttctcctcccgccgatccgatgcgtcatcactagcctcccctcccgcgcttccaccaaccactgcccctacaccctcacctngtggtttggtaatttggttggccgcttgtccccttccatccaccgatccaccttcccgttgctgcggggatggccgacgtcgagacctccgccgaccacgccgcgcctccgccgtccgagggggacgcccgggagagggagatgcgggatctggaggaccctgtctccaagcttcaccccatggccgaggagttcg

SEQ ID NO: 203 - DNA, 386 bp, Oryza sativa
  Clone ID: uC-osflcyp005h06b1
gacccacgcgtacatatgatagcagatggagatacaagcagagatggaggcatccaagctagcaatctgcagcttgttcgcgctcgccggggtagccgctacaatgtttcactgctccgatgcccagaactcgccgcaggactacctgtcgccgcagaacgcggcccggtccgccgtcggcgtgggtccgatgagctggagcacgaagctgcaggggttcgcggaggactacgcgaggcagcggaagggcgactgccggctgcagcactcgggcgggccgtacggtgagaacatcttctggggctccgccggcgccgactggacggccgcggacgcggtgcggtcgtgggtggacgagaagaagtactacaactacgccagcaaca

SEQ ID NO: 204 - DNA, 403 bp, Oryza sativa
  unsure (1)..(403): unsure at all n locations
  Clone ID: uC-osflcyp005h07b1
acgagttcttggaaaacaatagtcttggtcgtgcactttttggacgtggagatcatcaattgaaactagactggccaaaacgatataatatctgccttggaacagcaaaaggcttgtgctatctccatgaagaatcaacattgaaaatcatccatagagatattaaaccatcaaatattcttcttgatgaaagactgcaaccgaaaatatctgattttggtttggctaaactgaatgatgaccgtgggcgtatgagcactcggatagctggaacagttggatacatggcacctgagtatgccacgagaggttgcttgacatgtaaagcagatgtatacagctttggagtggtgacattagagattggtagtggaatgagcaatacangtagcatgtcagatga

SEQ ID NO: 205 - DNA, 352 bp, Oryza sativa
  Clone ID: uC-osflcyp005h08b1
gtgaggtgctccgcgaccaggactccgtcttcgccaaccgggtcatgctggatgccggcgacgccgtctccttcggcggcgcacagaatatcgtgggcaacccgctcgggcctatgtggcgcctgctccgccgcgtctgcgtccaggagatgatgagccccgcggggctcgccagcgtgcacggcctccgtcggcgcgagttcaggtccaccctccggtacctccactccaagcccggcgagccggtggacgtcggcgcgcagatgttcctgaacaccatgaatgtgatcacgggcaccatgtgggggggaacgatcggaagcgagagcgagaggtcggcggtggggagcga

SEQ ID NO: 206 - DNA, 314 bp, Oryza sativa
  unsure (1)..(314): unsure at all n locations
  Clone ID: uC-osflcyp006a04b1
ttgtcgcgtgggctggagcaaaagcaaattgcaggtcattgttggaacagtggcgtttggaatgggaatcaacatgccagatgtcaggtttgtgattcaccacagccttagtaaatctatggaaacatactaccaggaaagtggaagggcagggagagatggactaccttcagaatgtattctgtattatcgacctggtgatgttccacgccaaaggtcaatggtcttttatgaaaactgnggcctgcaaaatctttatgacatagtacgatattgtcaggctaagaggagctgttgtcgtggtgctttttttt

SEQ ID NO: 207 - DNA, 290 bp, Oryza sativa
  Clone ID: uC-osflcyp006a08b1
ttaaaaaaagctatgcaaatcgaaacccctctcttagatctcgtccacggggaattaggatgagagagagctatggtcgatgatgagggagtcacgatcgcctgctacagcaaggaccagttcaactactagatgaccaacgccaaggaggtcggccaaggggtcataattgtctacagtgctttgtggggtggcctttgccggttgatcatcccagtgttctctgaatacgccaaacaggtaactggtgctgactttctgcaggatgatgttgatgagctgaaggaaga

SEQ ID NO: 208 - DNA, 409 bp, Oryza sativa
  Clone ID: uC-osflcyp006a09b1
ccctcatgttgagaggtacttctggaccatggttaatcagccaaactttaagaaagtcttgggtgatgtgaagcaggcagagtctgtcccaccagttcaaaagaaggctccaccaccaaaggagcagaagccaaaggaagccaagaaagaggctccaaaacctaaggcagttgagaaaccagaggaggaagaggaggcaccaaagccaaagccaaagaaccctcttgatttgctccctccaagcaagatgatccttgatgagtggaagaggttatactcaaacacaaaaacaaatttccgtgaggttgctatcaagggtttctgggatatgtatgacccaaaaggttactccctgtggttttgtgactaccaattcaatgacgagaacactgtgtccttcgtgaccatg

SEQ ID NO: 209 - DNA, 467 bp, Oryza sativa
  Clone ID: uC-osflcyp006a10b1
tcgtacaaagagaccaatggtgactccattaaccttgtcaaagataacaaggaaaagagccacaggtcaccctcctcaaaagaaaaacagcctcagcatctgcctcagaagcaacagtttacagttgagacaagatcagtgtctacattgcaagaagacaagacattccaagaaagatcatcctgacttcctgacagtgatcatggcaaagaaagggattccgttcaatgaggactacgcaaagaagtgaaagatccattagagttgccaatagagttgaagcaaaagttgaggctgttggagatcttcgcctagaactcgcgaatggcttcacacttttacttccagacgtttttatgtcccttctttgcaaagaactcgataataagggtatcccaattgggattttgatagatatgattgccattttggaaatggcaaatgtgaactatggtattaatatgaat

SEQ ID NO: 210 - DNA, 339 bp, Oryza sativa
  Clone ID: uC-osflcyp006a12b1
gctccgcaccacaaatttcctcttccaccctcaacagcgacgacgacaaccctgcgacggagacgaccccgcgacgacggcgaccatggccgacagcggcggatctcgctccgccgcgtcctcctcgctccgcgcgccgtcgatgccgccaccgctgttgtgtttgccgtcgtcgcccttgccgtgcgttgtggaggtcgcgatgacctcgagcactccagatctggcctcgagctcgactgggcggcgtcctcgatgcggccaccggcggcgctgccaccttctcctcctcgatgcggcatgggaggagggacgccaccgtgcgccactcgggggcgc

SEQ ID NO: 211 - DNA, 440 bp, Oryza sativa
  Clone ID: uC-osflcyp006b01b1
accgtgcgagcagctagctagctgcggcgatggcctccagagcggcggcggtcgccgtcctcctcctcgccgtggcggcggcgccgctcttcgccgcggcgagcgcgcatggccgaggctaccttgctgccaagtcctggcctcctgacggcagcctgagctcatcaagctccggcgaggctgcagcggcggacgtcgacgacggccacacggactggaagtgctactcctcctgcatgagcaagtgctgtcaccgccacgacgacgacgacgacgacaaggccaatgccaaggccaacgccaccgccggcgccgccgccgtagggctcgacgatgactacaagtgcaagaagcagtgcctcggcaactgcttaagggacgtgccgggtcgtttgctaccacatgtgcgtcgacgactggtgcgcgaagctggcaccata

SEQ ID NO: 212 - DNA, 434 bp, Oryza sativa
  Clone ID: uC-osflcyp006b02b1
gtctgtttttatcaggcgcaggacagaggaagacatcaacttggcgaacagcgttgacattggatctcttcgtgacccacagcaggatgcggaacgagtcaagaaccctgagtggctggttgtgattggggtgtgtactcatctgggctgcattccacttcccaacgctggtgactttggtggctggttctgtccatgccatggatcacattatgatatatcaggtagaatccgtaagggccctgcaccatacaaccttgaagtcccgacctactcatttctggaagagaacaaattgctcatcggctgagattacattgaccacagggtttaaaaatctatggcacttctattttctgttggtttgacggttcacctttttggtgctttactttggtggacaccttctagtaaagaataatgagctgctactt

SEQ ID NO: 213 - DNA, 369 bp, Oryza sativa
  Clone ID: uC-osflcyp006b03b1
ttatgatcggtgctactggggtagtcagccaagaatgcaagacagttgtttctcaatatggacaacagatcctagatctgttgcttgctgagacacagccatcaaaaatctgctctcaggttggtctgtgtacttttgatgggaagcatggtgttagtgctggaattaagagtgtagtagatgatgaagctggggaatcgaatggtctccaaagcggtcccatgtgcaatgcctgtgagatggctgttgtatggatgcagaaccaacttgcacagaacaagactcaagatctcatcttgaactacattaatcagctctgtgacaggctcccaagtccaatgggagaatcatctgtggactgggggcagc

SEQ ID NO: 214 - DNA, 337 bp, Oryza sativa
  Clone ID: uC-osflcyp006b05b1
tcgtggctctcgtcgtcgaatcgaatcctctcgcgtcctcaagatgcagatctttgtgaagacattgaccggcaagactatcaccctcgaggtggagtcctctgacaccatcgataatgtcaaggctaagatccaagataaggagggcatccccccggaccagcagcgtctcatcttcgctggcaagcagctggaggatggcaggacccttgctgactacaacatccagaaggagtcgacccttcaccttgtcctccgcctccgtggtggcatgcagatctttgtcaagactctgaccggcaagactatcacccttgaggtggagtcttctgacacc

SEQ ID NO: 215 - DNA, 297 bp, Oryza sativa
  Clone ID: uC-osflcyp006b06b1
ttctatatggagggaggagctgcggcagcagcagtcgcaggtcgacgcactgcgggagaggctcgtggaggtcaaggtcgggatgaagtgctcccaggaggactcgaggaaggagctggatcacctctgccgcagggtgaagaccatcgccacgctgctggcctacctcaaatccaaggccaggatcatggcgataccgcacctcgcgcacacgttctgcgggattaggcaccaggatggcgtggggtacgtcgacaggaaccgggtgccactggctgattggtccaagggcggcga

SEQ ID NO: 216 - DNA, 490 bp, Oryza sativa
  Clone ID: uC-osflcyp006b08b1
tcgttcaaggaggaaatcagcaaggttgttaagatccaggaagagcttgacatcgatgtccttgttcacggcgagcctgagagaaacgatatggttgagtacttcggtgagcagctttctggttttgcattcactgccaacggatgggtgcaatcttatggatcacggtgtgtcaagccaccaattatctatggtgatgtgagccgccccaaccccatgactgtgttctggtccaagttggcgcagagcatgacctctcgccccatgaagggaatgttgactggtcccgtcacaatccttaactggtcttttgtcaggaatgaccagccgaggtttgagacatgctaccagattgctcttgccatcaagaaggaggtcgaggaccttgaggctggtggtattcaggttatccaaatcgatgaggctgctttgagagaaggtctgccactacgcaaggcggagcatgctttctacttggactgggctgttc

SEQ ID NO: 217 - DNA, 484 bp, Oryza sativa
  Clone ID: uC-osflcyp006b09b1
tcgttgttggtttctagctttaatttggtgccctagagtgattgctcacagtttacgtgattgatttggccaccgaagttcgtgttcatgttcttggttgtgaaccagtatatactgttaagttaaaattctaagctaattgttcggtttggacaagaaagatattgagggttactgggttaggattttgtgcttcagtttgatcactccattgatgatatccaaaaagttgcataccacatcatgtgacgcgaacactaatccgttaagaattacaggaaaacaaaagtgtacaatctcatttgtagtaatatgatttacagacactgcaaattataaagtacggcaataaacacaccagtctgaaatacttagttatcttctttaatatgatcatcgagatatgcagatccgagctaaattagaagtataacatatactgtcttttgatttttcaaatgttgaatatgaaaattatgatatt

SEQ ID NO: 218 - DNA, 366 bp, Oryza sativa
  Clone ID: uC-osflcyp006b12b1
tcgtgatccatcagtagctagctagctagctagctgcattgtccggcgagagagatagctgctgcagggggcggccatggggaggggcaagatcgagatcaagcggatcgagaacgcgaccaacaggcaggtgacctactcgaagcgccgcacggggatcatgaagaaggccagggagctcaccgtgctctgcgacgcccaggtcgccatcatcatgttctccttcaccggcaagtaccacgagttctgcagccctttcaccgacatcaaagggatctttgaccgctaccagcaagccatcggcaccagcctttggattgagcagtatgagaatatgcagcgcacgctgagccatctaaggacatt

SEQ ID NO: 219 - DNA, 365 bp, Oryza sativa
  Clone ID: uC-osflcyp006c01b1
ttcttacggcgaacaccgtccatcgcgagaactcttacctcgtcggcgtcggcgtcggcgtcggcgaggaggagcaaacatttacggctggcttgcaatcttaatcttttgcagtgttcgtcattcaggaggctcccggccgatccggtggatcggatcggagcgggagcacaaactgcaaattgccacggtccttgcacttgatttccggagccaggaggatgatttgctgcggcggcgaggaggaggagacgtacgctccccgtgcagccagtcgcagtcgcagcaggcgcccgacacctgcgacgcagtacaatgcaggccctcgtaagccaagaggaccaaatgcacccaggagcggcggc

SEQ ID NO: 220 - DNA, 422 bp, Oryza sativa
  Clone ID: uC-osflcyp006c05b1
tgctgacatgagtgtctacttcccgtacaccgaggctgacaagaggctcactgccttccaccctgaaattgaggagcttctctacagtgaagtcgagaacgatgaacacaagtttgtattgaaggacaagaacaagccaatcatcttctccatggctcgtcttgaccgagtgaagaacatgacaggtctggttgagatgtatggtaagaatgcacatctcagggatttggcaaaccttgtgattgtttgtggtgaccacggcaatcagtccaaggacagggaggagcaggctgagttcaagaagatgtacggtctcattgaccagtacaagttgaaggggcatatccgctggatctcagctcagatgataccgtgttcgtaacgggggagttgtaccgatacattttgtgacaccaagggga

SEQ ID NO: 221 - DNA, 422 bp, Oryza sativa
  Clone ID: uC-osflcyp006c08b1
ttcacatatgatgtgaagtgctagaatgggtcggaaggctggtgcgctgtacataaacccaaagaagtttggtggtggtgctaaaccctgcatgattgagatggtgtccttcctcaactgcttagctttgaacaagcagaatgatgacaagtgtgtcaggcagaaggatctcttggttgcttgtactcaggctcagaaagggaggccaaagaatgcaacgaagaccatcaattaccatcttcagcggcttgcgcgagacaagggcttgtagcttcccaaccatacggaatcatttcttcatcatgtctattgccttgtccagtctgcaagactcaaggcgttattttcttccaagtagccttgacgaaatgagttgtaggggaaatggctagcatagaaataatttttacatgccagactgg

SEQ ID NO: 222 - DNA, 494 bp, Oryza sativa
  Clone ID: uC-osflcyp006c09b1
ttccactgaatcctcccacctcggctcgaaggaatggcaagcggtagtgaagctgagaagtcacctgaggttgtgctggagtggcctaagaaggacaagaagaggcttctacatgctgtttaccgtgttggagatttggatcgcaccattaaatgttacacagaatgctttggaatgaaattactgaggaaaagagatgtgcctgaagagaaatatacgaatgcatttcttgggtttggacctgaggacaccaactttgcacttgaattgacatacaattatgggtgttgataagtacgacattggagcaggatttgggcatttcgctattgcaactgagggacgtgtacaaattggctgagaaaaataaatccagttgttgctgcaagatcactcgtgaacctggtcctgtaagggaagaaccactgtgaatgccttgcacaggatcttgacggttacatgtttgagcttatccagagggggccaacacctgt

SEQ ID NO: 223 - DNA, 484 bp, Oryza sativa
  unsure (1)..(484): unsure at all n locations
  Clone ID: uC-osflcyp006c10b1
tccaaatctcctcgcgacctcgaaaccctagcctcctccggccaccgtcgccggccacggtgagcggccccacccccccgcagccatggcctccccggagggctccacgtgggtcttcgactgtcctctgatggacgacctcgccgccgccgccggcttcgacgccgcccccgccggaggcttctactggacgacgcccgctcctccgcaggcggcgctacagccgccgccgccgccgcagcagcccgtcgcccctgccaccgcggctccgaacgcctgtgctgaaatcaatggctctgtggactgtgaacatggcaaagaacagccaacaaataaacgtccgagatcagaaagtggcactcgaccaagctccaaagcatgcagggaaaaagtaagatgggacatgttgaacgagaggttcttgggactggtgctgtcctggaaccnggaagacacccaaatgacaaatcgttatatgacgatg

SEQ ID NO: 224 - DNA, 313 bp, Oryza sativa
  Clone ID: uC-osflcyp006d01b1
ttggtgttcgcgcaccacgagctgaacggcgtgaaggaggacgccctgttcaagtgcgtggacagctgctccgacgacatcgaggaggcggtggcgcacctcagcgcgctcacccgctagctcaccgacgccaagttcctcgaggtcaaggcctggctctccgccacgctcggcggctcctccacctgcgaggacacctgcaaggacgcccccatcagcgagatcaagaacgccgtcgtcaccaagagcctcgagttcgagaagcttctccggggtacgctcgacctcatcaccgaggccctcggcttcatgt

SEQ ID NO: 225 - DNA, 432 bp, Oryza sativa
  unsure (1)..(432): unsure at all n locations
  Clone ID: uC-osflcyp006d03b1
ttatggttgaaattgacaaggatttgaagtctatgcaaccactttccaataagaaagaaaatgatgaagttttcatcaaactgggatctgacaaggatgctttgaagaagaaagaaaatgctgaacgtgatgagcgtgctaagaagtctgtgagcatcaacgagttcctaaaaccagctgaaggagagaggtactatggcggccgtggtcgtggcaggggccgcggggatcgtggctggtttcaggggtggatatgtgagggccatcgctctgcagctccaccagctccagaaatcaaagaccaatcccaattccccactcttggtcggaagtgaaatgcatgtactgcctgcagtatcaagttatgtttgcggtcaactttgaattttgtctattcgtaaatcactgtgcnagtgctgatctgatcaaaca

SEQ ID NO: 226 - DNA, 419 bp, Oryza sativa
  Clone ID: uC-osflcyp006d05b1
agatacaagaactaactgaatcagctaataatatgccaatctcgtctcacaacttgcttattgaacaacaggatataccgtattacgtgctgcagtattacctttcgtgttcgtaaatcgaactgaaatgaacacatactaattctgcaacctagaaatagctgattttcccgtaggagactatcagagaataagatggctgaacagatttcaaccagagggcacaacagcaattctttgtaaaactcacctttgcattctatgaccgacattggtccaaccaactgtaatcatccgtactatttgcattacagtgttgatgagttccagcttgcatcgacagcacccacaattctgtgatgaagcaatggtccggaacaggctattatgcctctatccaagcccttctagaaaacacc

SEQ ID NO: 227 - DNA, 433 bp, Oryza sativa
  Clone ID: uC-osflcyp006d06b1
tttattagcgacatcacaaacaggaattaactccagcccctgtatttcctcttattgtcggagtttccgtgattgcattggtcatcagcatgccaaggctaaaagacttgtaccaaagtgctgtgggaatgactaccctaggttctgcggctgcgccgataaaaaaggagccaagaaagacaatcatgagaaagagggcgtgaggcataaattagcttcagattaggtgttgaaaaaacgggtacttacagttgatcacgtcaggagtagaaaatagccgtttctttgcatttaaggggtaattttgcagataaaaattggcagtcgatatttattaacgactacaaattttgatgccaatgttgggcatgtagtcattcgaaatgttgtacgatagtactgtgttcagttttcaggtgccagatgaagtttt

SEQ ID NO: 228 - DNA, 435 bp, Oryza sativa
  Clone ID: uC-osflcyp006d07b1
ttcagatgtgggatgccaagaacatgatgtgcgctgctgatcctcgccatggccgttacctcaccgcctctgccatgttccgtggaaagatgagcaccaaggaggttgatgagcagatgatcaatgtccagaacaagaactcatcctacttcgtcgagtggatccccaacaatgtgaagtccagtgtctgtgacattccaccgagaggcctctccatggcatcgaccttcattggcaactcaacatccatccaggagatgttccggagggtgagcgagcagttcactgctatgttcaggaggaaggctttcttgcactggtacactggcgaaagcatggacgagatgggagttcaccgaggcagagagcaacatgaacgaccttgtctctgagtaccagcagtaccaggatgccaccgccgatgaggagggcgag

SEQ ID NO: 229 - DNA, 365 bp, Oryza sativa
  Clone ID: uC-osflcyp006d08b1
tcgttccccttcttctcctcctcctcctcgattcggagctccacccgcagccatggctaagaactaccccgtcgtgagcgccgagtaccaggaggccgtcgagaaggccaggcagaagctgcgcgccctcatcgccgagaagagctgcgcccctctcatgctccgcctcgcgtggcactcggcggggacgttcgacgtgtcgtcgaagaccgggggcccgttcgggacgatgaagaccccggcgtagctgtcgcacgccgccaacgcggggctggaatccgcggtgcggatgctcgagcccatcaaggaggagatacccaccatcttctacgccgatttttaccagcttgccggaagttgtggcc

SEQ ID NO: 230 - DNA, 343 bp, Oryza sativa
  unsure (1)..(343): unsure at all n locations
  Clone ID: uC-osflcyp006d09b1
tgatgccgccgtcgatggcggtggcggcggcggcggcggcgccacgcagtctcctcttccccgtctcgccttcaccctcgcagccgcggcgtgtgccagccttggcaagggctggacggagccagaggcggcatgcggcgctggcgaggcccgctcgccgccacctcgacgacgcgatgtccgccgggttcgtccgcagcctcaacgccccgcctgacgaggacggcgcgggatccggcgggaggtacgaccccaggccgggggacttcgccgcgngtgtggtgggtctccggcaccgaggcccgttttgacgtcgtccggggcgccgaccgccttgccacgc

SEQ ID NO: 231 - DNA, 429 bp, Oryza sativa
  Clone ID: uC-osflcyp006d10b1
tcgtacacactcacgctcacgctccactacaacgcactgtacacagttgattattagctagttgggtttctggcccggccgccggcgagatgggcaaggacaagcaccaccgcgactggatcctccggcggtgctgcggctccatcgccgcctgcatcctcacgctcgccgtcctcgtcggcttcatcgtgctcgtcatctacctcgcgattcacccctccaagccttctttctacctccaggacgtccagctccgcaacatcgacctctccgaccctgccatctccctcaacctccaggtgacgatcgcgtcgaggaacccgaacgacaggggggtgggtgtactacaagacgctgcacgtgttcacgacgtacagggaggagccgatcacggtgccggtggagctgccggcgatctaccaggggcac

SEQ ID NO: 232 - DNA, 215 bp, Oryza sativa
  Clone ID: uC-osflcyp006d12b1
gcgacatcctccctctcccggcgatggcaacggctcagtgacgaggaggtcgcgacaatgatgacaacgccttctggatccgctgccggctcgccccgggcacacggatccaccgccgaccggtcgcgggcgcacggatccgccaccggctagactcggggaggggagggatggtggcggcgacaaggaggtgaggggaggggctgggaggggag

SEQ ID NO: 233 - DNA, 428 bp, Oryza sativa
  unsure (1)..(428): unsure at all n locations
  Clone ID: uC-osflcyp006e03b1
tggttgtgaacgccgcggcggccaccatcatgacgaagcgtaccattcactttgcggactgttgccccacggcgtacaagtgatgtgttaactaccaggcgcacagagtcgtcccggagggagacctggccatggttcagagggccgggcgcatgaactgcaactacaccaggagaacaggggagtgctaccgcatagacaccaggtacgaccttatgcactgcaagcgcgccgtccctcactggtgctatatggaggacatggatgggtngaaagctttctgcgggggctcaggcctgtgcatactatgcccaagatggctattggagatatggagttgcatgcaagtgtgaccacccaagtggcacgcttgggtaccagccgggtgctttggccctttctgatatgccaattgccccatattctat

SEQ ID NO: 234 - DNA, 355 bp, Oryza sativa
  Clone ID: uC-osflcyp006e05b1
ttgttaagcaggcctgacctagtgaagcagctgagacagattgttggtgacaagcttttggtttctacagtagtgagacttcagcagaagttgccacccatggcagcaactgaacaagcgccaagagcacctggaaggggtggaggtgctagttcgtaattaaaaatgacagtttgccgacataacaagctgtggaggagtcggcttgagtatagagagctcaaggaaatgcgtgtaaaacgtttgtgccgtaatgcacagactttagcttttgacaaacaaaactagtctaacatctcttgttgacaacatgttgtttgggtggctaacccatgcatggtattcttgactaccc

SEQ ID NO: 235 - DNA, 373 bp, Oryza sativa
  Clone ID: uC-osflcyp006e06b1
ttatatggaaaaaaaaacaaaacacaccaagccaaataacagcgacaatgggatcgctcaccaccaacatcgtcctcgccgtcgccgtggtggcagcgctggtcggcggcgggtcgtgcggtccgcccaaggtgccacccggcccgaacatcacgaccaactacaacgccccgtggctccccgccagggccacctggtacggtcagccctacggctccggttccaccgacaatggtggtgcgtgcgggatcaagaacgttaacctgcctccctacaacggcttgatctcctgcggcaacgttctcttcttcaaggacggccggggctgcgcttcatgctcccaggtgatgtgtgagccgccggcggcctgctc

SEQ ID NO: 236 - DNA, 178 bp, Oryza sativa
  Clone ID: uC-osflcyp006e08b1
tcgtccgcgtccgtgtcccctcgccgccgcagccagcgtcgagggctcggcgaccggaggaggagaggccggaacccgccgccgacgccgtcgcctccgcctgtagcgagatcgctcgatccgatacgcctcccgcgcgccagtccgccagcccagttcgatccgatgagggggaggc

SEQ ID NO: 237 - DNA, 329 bp, Oryza sativa
  Clone ID: uC-osflcyp006e09b1
tcgtcaaactgcaattaattgtttgtttcgcaaaacaagcatcctcgcctcggcgtcccagatctctgctgctgggctgggctgcctgcctgacaagagaggcagcagccatggcgttcgaccccttcaccgacaagaacgccgccttccgccgcctcaaggccaagcccgagaacaagatgtgcttcgactgcagcgccaagaacctcacctgggcctccgtcacctacggcatttttctctgccttgactgctccgccgttcaccgcaagcttcggcgtccacaataccttcgtcagggcaaccaaacctagattcatgggcctcca

SEQ ID NO: 238 - DNA, 221 bp, Oryza sativa
  Clone ID: uC-osflcyp006e10b1
tcgtatggacgcggacgcggtggcgaaggcgttcgtggagcactactaccggacgttcgacacgaaccggccggcgctggtgtcgctgtaccaggacgggtccatgctcaccttcgagggccagcagcttctttgccccgccgccatcgacggcaagctcggctccctccccttcgcgcagtgccaccacgacatcaacaccgtcgcctgccagccgttgg

SEQ ID NO: 239 - DNA, 442 bp, Oryza sativa
  Clone ID: uC-osflcyp006e11b1
tcgtagatggactgcgaggggtgcgagaggagggtgaagaacgcggtgaagtcgatgcgaggggtgacgagcgtggcggtgaacccgaagcagagccggtgcacggtgaccgggtacgtggaggcgagcaaggtgctggagcgcgtgaagagcaccgggaaggcggcggagatgtggccctacgtcccgtacaccatgaccacctacccgtacgtcggtggcgcctacgacaggaaggccctcgtcggctttgtccgcggcaaccccgccgccatggccgaccccttcgtccccgaggtccgctacatgaccatgttcagcgacgagaacgtcgactcctgctccatcatgtaaaaccaataatccatatatttactacaactccggcgactttttcggtcggccggcaacatgcttgctttattagctagcttgtttggtt

SEQ ID NO: 240 - DNA, 402 bp, Oryza sativa
  Clone ID: uC-osflcyp006f02b1
tatccaatctccagctctcttcccccccgcgtccagttccatctaatcagcttctcgtcgagatgggccgcaagttcttcgttggtggcaactggaaatgcaacgggaccactgatcaggtggacaaaattgtgaaaattctgaatgagggacagattgcttctacagatgttgttgaggtggttgtcagcccaccttatgtgttcctttccgtggttaagagtcagctgcgcccggagatccaagttgctgctcagaattgttgggtgaagaagggcggggctttcaccggtgaggtcagcgctgagatgctttgccaccttagtattccctgggctatttcttggacactttgaaaggaggaggtttgctgggtggaatcaaatgagtttggttggagac

SEQ ID NO: 241 - DNA, 324 bp, Oryza sativa
  Clone ID: uC-osflcyp006f03b1
gccttggactatgaccaggaaatggagactgccaagaccagctcctccgtggagaagagctacgagcttcctgatggacaggttatcaccattggtgctgagcgtttccgctgccctgaggtcctcttccagccttccttcataggaatggaagctgcgggtatccatgagactacatacaactccatcatgaagtgcgacgtggatattaggaaggatctatatggcaacatcgttctcagtggtggtaccactatgttccctggcattgctgacaggatgagcacggagatcactgccttggctcctagcagcatgaagatc

SEQ ID NO: 242 - DNA, 177 bp, Oryza sativa
  Clone ID: uC-osflcyp006f07b1
tcgtagatgaccgggatagggacaaaagtagtattgtgaaggatgaaagtgatcctaatagtgcttacaaacggcgaatgaccaagagagatcactctggttttgaagctggggattactcaacctctgcttctcactttcccatttatgacactagtattttacaagtgcttgtat

SEQ ID NO: 243 - DNA, 394 bp, Oryza sativa
  Clone ID: uC-osflcyp006f10b1
ttgaaagcataagcaacacaagggattaactcatcactcacttagctaattaaatcttcgaccatgtcggacaagtgcggcaactgcgactgtgctgacaagagccagtgcgtgaagaaaggtaccagctatggcgtcgtcatagttgaagccgagaagagccacttcgaggaggtcgccgccggcgaggagaacggcggctgcaagtgcggcaccagctgctcctgcaccgactgcaagtgcggcaagtgaagtcacgaagcaaccgaacactcgccgccggcgagtcacctaccttaattagtccacaataaaaaccacccatatgagtgtggtttgtggggtgtgctgattattgctggattaaacccgtgtggtatcgattaattaagca

SEQ ID NO: 244 - DNA, 411 bp, Oryza sativa
  Clone ID: uC-osflcyp006f11b1
tcgttcaccttctcccttctcctcgctcttccccctccgccgtcgccgcagcggagcagcaacagcaggcgagcgacatgggagggtttgtcaagacccagaagacccatgcctacttcaagcgtttccaagtcaagttcaagagacggaggcagggcaagactgactacagggccaggattaggctcaccaaccaagataagaacaagtacaacacaccgaagtaccgctttgttgtgagatttacaaacaaagatatcacagctcaaattgtctatgctaccattgcgggtgatatcgtgatggctgctgcctactcccatgagctgcctcgttatggctctgaagttggtctcaccaactatgcggcagcttactgcactggcttgcttctggctcgccgtgtgctca

SEQ ID NO: 245 - DNA, 333 bp, Oryza sativa
  Clone ID: uC-osflcyp006g03b1
ttctttgaagaacttggaggagataatccgtgcttcagatggtgccatggtagcccgaggggatatgggtgcacaaattcccttggagcaagtcccctcagtacaacaaaagatagttaaactgtgcaggcagctcaacaagccagtcattgttgcgtcgcagcttcttgaatcgatgattgagtatcctacgcccaccagggccgaggttgctgatgtttctgaagcagttcgtcagcgtgcagatgcgcttatgctttcaggtgagtcagcaatggggagatatccagagaaagctcttagtgtcctccggagtgttagcctaaagattga

SEQ ID NO: 246 - DNA, 383 bp, Oryza sativa
  Clone ID: uC-osflcyp006g05b1
gagatcttcagtgttactgttggtggtcgtgatctcattcaagattgcactgtaacacttgcttttgggaagctcatctggttcaacggcagaaagatctagagtatgaggctgagtttgagcagagcgcgtccaaaagcaaggatggtcttgacaaagatgctatcagcaagaggcttgaggagatatacaaacgccttgagtttattgatgctgatgctgcagaggctcgtgcagcatcaattctggcgggtcttagtttcactcctgaaatgcaacgtaaacgcacaaaacagttttctggtggatggcgcatgagaattgctctagcacgtgctctcttcattgagcctgaattggtgctacttgatgagccaacaaat

SEQ ID NO: 247 - DNA, 490 bp, Oryza sativa
  Clone ID: uC-osflcyp006g06b1
ttctatatgcttcgtttaaggtcacactattagagtcacgggaccgacttggtggccgtgtgcatactgactattcttttggctgcccaattgacatgggagcatcttggttgcatggtgtatgcaatgagaattcattggcaccactgattaggttgcttggccttagattatatcgcaccagtggtgataactctgtgctatatgaccatgatctggagagctatgctctctttgataaggatggtcgtcaagttccccaggagatagtgacaaaagtcggggaaacatttgagaaaattcttaaggagacggtgaaagtaagagctgaacatgaagatgacatgcctcttatttaagccatctcaattgtgcttgacaggaattcacacctaaagcttgatggtttgcaatatgaagactgcaatggtgcatatgtaagctggaggcatggtttggcacaaaagtggatatatatctctgaaaattg

SEQ ID NO: 248 - DNA, 227 bp, Oryza sativa
  Clone ID: uC-osflcyp006g08b1
tcgtccttcttctccgacggcgaacaccgtccatcgcgagaactcttacctcgtcggcgtcggcgtcggcgtcggcgaggaggagcaaacatttacggctggcttgcaatcttaatcttttgcagtgttcgtcattcaggaggctcccggtcgatccggtggatcggatcggagcgggagtacaaactgcaaattgccacggcccttgcacttgattctcggtgcca

SEQ ID NO: 249 - DNA, 118 bp, Oryza sativa
  Clone ID: uC-osflcyp006g11b1
ttttgtttggatccgtcaaggctagcgagccacccatctcccatacacagacgactccctccacccccgccggcgaactgacactggcccacgggccaccggccgagaaaggagcagg

SEQ ID NO: 250 - DNA, 241 bp, Oryza sativa
  Clone ID: uC-osflcyp006g12b1
tcttatcaatgctggtggtattgccgagatggctggtatgagccacagaatccgtgagagaactgatgcccttgatgctgctggcaacacaactgctgctattgggaagggttttgccattggatcacctgctctggtgtcccttgcactttttggtgccttcgtcagcagagctggagtgaaggttgttgatgtcctgtctccaaaggtcttcattggtttgatttgttggagccatgct

SEQ ID NO: 251 - DNA, 370 bp, Oryza sativa
  Clone ID: uC-osflcyp006h01b1
gtatttgcagcagcaagcagctaatcgcgcacgtacgcacaccgtgacccggggcgagatggcgcagtcgatgctggtgtcgggagccaatggcacggtggccgccgcgagcaccagcaggctgcagcccgtgcggccgacgccgttctcgcggctcgtgctgtcgcagccgtcgtcgtcgctggggcgcgcggtgtccgtcaagacggtggcgctgttcggcaggtccaagaccaaggccgcgcccgcaagaaaggctgagccgaagccaaagttcaagaccgaggacggcattttcggcacgttcggtgggatcggtttcaccaaggagaacgagctgttcgtcgggcgtggtcgcatgcttgggttt

SEQ ID NO: 252 - DNA, 347 bp, Oryza sativa
  Clone ID: uC-osflcyp006h02b1
cctcgctcctccacgcgccgccgccgccgcatcggttcagccacagcaggcgagcgacatgggagggtttgtcaagacccagaagaccaatgcctactacaagcgtttccaagtcaagttcaagagacggaggcagggcaagactgactacagggccaggattaggctcaccaaccaagataagaacaagtacaacacaccgaagtaccgcttcgttgtgagatttacaaacaaagatatcacagctcaaattgtctatgctaccattgctggtgatatcgtgatggctgctgcctactcccatgagctgccttgctatggtcttgaagttggtcttaccaactatg

SEQ ID NO: 253 - DNA, 447 bp, Oryza sativa
  Clone ID: uC-osflcyp006h03b1
ttttgttcgaacaccagctaaagctccatacagagaaccaacaccttctagttcgtccagaggtggccatttttcaggcacttcaccaaatcatccactgccaccacctccaaggcacagaagtgatgattcttcatttctgggtttgcatgatgatgatcgtaggcctcaaagtggagacaggaggttccatcagaagaggaatgatatgagttctggacgtgggcatggacatgcctggaacaatccaccgagctggccttctccagttgcaaatggttttgctcccatgcaacatggtgcgcctggatttcacccccctgttcatcagttttctgccccaccaatgtttaatctcagaccccaaatgaagttgaacccacctggagtttcatattctatgcatgagtcaagtgacaggttcttgacccacatgcgcccatttgg

SEQ ID NO: 254 - DNA, 157 bp, Oryza sativa
  Clone ID: uC-osflcyp006h06b1
ttaataaaaaaaaaaaaaaaaaaaaaaaaaaaaaaggggcggtcggtaataagaggatcaagtctaacatacacgagcatgcaacgtcatagattttgggtagagtcaccaaaggtcaattcactgccccccgttttacaacatcttgactgggaaa

SEQ ID NO: 255 - DNA, 90 bp, Oryza sativa
  Clone ID: uC-osflcyp006h08b1
tcgtattcttggcttgtgctctgttttaatttctttgcaatgatggggtggcagagctcgtcggcggtgaggagggtggtggtggtggtg

SEQ ID NO: 256 - DNA, 248 bp, Oryza sativa
  Clone ID: uC-osflcyp006h09b1
ttcgtctctcccccccccttccgctccaatggcgaaggaaccgatgcgcgtgctcgtcaccggcgccgcaggacaaattggatatgctcttgtccccatgattgctaggggtgtgatgttgggtgctgaccagcctgttattctacacatgcttgacattccaccagctactgaattttttaatggccttaagatggagctggttgatgctgcattccctcttttgaagggaattgtcgcaacatctg

SEQ ID NO: 257 - DNA, 437 bp, Oryza sativa
  unsure (1)..(437): unsure at all n locations
  Clone ID: uC-osflcyp007a01b1
tcggtatagtggtgtggttttcttatcgatttgtgcattggacaccatccggtcggccggcgccattggaggaggaacatggcggcgatggcgtcgccgccgccgccgacgagagtgtgcgtcaccggcgccggcgggttcatcggctcgtggctcgtcaagctcctcctctcccgtggctacgccgtgcacgccaccctccgcgacccgtgtgatcccaagaacgctcatctgaagcagctggacggggcgtcggagatgctgagcctgttcaaggccgacgtgctcgacgccggcgagctgtccgtcgccattgccggctgcgagggnggttttccatgtcgcctttcccgtgcccggagacaagattcgttgaatctgagttagaagctatggcttcctgctgtaaagggaacaactgaatgttcttgaagttt

SEQ ID NO: 258 - DNA, 330 bp, Oryza sativa
  Clone ID: uC-osflcyp007a03b1
tcgctacaacttcgtcttcggccagtccggcgccggcaacaactgggccaaggggcactacaccgagggcgccgagctcatcgactccgtcctcgacgtcgtccgcaaggaggccgagaactgcgactgcctccaaggatttcaagtctgccactctctaggaggaggaactggttctggtatgggtaccctgctcatctcaaagatcagggaggagtacccggacaggatgatgttgacattctcagttttcccctcaccaaaggctactgaaaccggggtggaaccttacaatgccacactatctgtccatcagcttgttgagaatgc

SEQ ID NO: 259 - DNA, 253 bp, Oryza sativa
  unsure (1)..(253): unsure at all n locations
  Clone ID: uC-osflcyp007a04b1
tcggtaaaaaaaagagaggccacgaagagagctcagctgctgcctctagcttacttggtgataaggaggaggaggaggaggaggncaccgacatggcccgagccacggcgtacaccgtggcgctcctcggcgccaccggctcgcccattcccgccgctccacgctcccccccgcttctgccgcgccgcggaggcgtgctacaaccgctgtgcctccacgaccccgccccgactgtccttgctccccgtcaggg

SEQ ID NO: 260 - DNA, 395 bp, Oryza sativa
  Clone ID: uC-osflcyp007a05b1
tcggttatggcctcacggatccagcaatccagtacaaagcttacaccgattatgcattggacatgaaccttattaaaaaatcagattacgacaggatcaacaagttcatcccaccatgtgaatttgcaataaagctttgtggtaccaatgggaaagcatcttgcatggcagcatacatggtctgcaattctattttcagctccatcatgaagcttgttgggacaaagaattactatgacgttaggaaggaatgcgaagggaaactttgctatgatttctcaaacttggagaagttttttggagataaagcagtcaaagaagcaattggagttggcgacctttgatttgtcttatgcaggactactggttaataagcaatgctgacagactggatg

SEQ ID NO: 261 - DNA, 176 bp, Oryza sativa
  Clone ID: uC-osflcyp007a07b1
ctccattggctcttcttcagtatcgaatcctctcttgtcctcgtgcccaccaccaccaccgtagcaatggcgggcaacgggccgatcaacaaggaggacccgctcaactggggcgcggcggcggccgagatggccggcagccaccttgacgaggtgaagcgcatggtggcgcagtt

SEQ ID NO: 262 - DNA, 356 bp, Oryza sativa
  Clone ID: uC-osflcyp007a08b1
gttccttaaggacttctccaagggcctggtgaacaacatggacatcgagaacctcaagctggaggtcgagaagttcgccacctccttcgacatgcccggcttcaccctcgacagcatgaagtacaaggagtaggaaaacaaaaacacacacaaaccatggtcctaccgccgctaatcgtcgaccagctgtgctctcgtggaccgccgtcgtcgtcatcttcttcctcggcacaagctggccctgtgttacggattttgtctgcccatcgagatgataggtttcataaaacgctctttcccccaccctgctgctgcctctggtttggttgccaacctcattccccatcggttttttt

SEQ ID NO: 263 - DNA, 414 bp, Oryza sativa
  Clone ID: uC-osflcyp007a09b1
gttaatttcctatgagctgcaagccaaccagtcaccaggaaacgtctcagtactcggggattatgtatcctcggaccctgtagatccttttgaaataaaggaaagtaacagacccgccaaattgaagcttgcgcagttggaaccagatgagagaagcacaacaaacataaaagaaagtgttcgagacttcgtggttggcagtggggaatatgtgatcaaggattttaaattcactgttaaccaagctgtacggccagtcgagaagcggtttgacaaattgatgaaaaagaacaagaaaagccaggatgacaactgggtgagtgcagtgtcaccagatagaccggttcgtggaattgatgatcctctgtaggtggtagcacaagtgatagtgggttcaccaaggggaaaaaacat

SEQ ID NO: 264 - DNA, 364 bp, Oryza sativa
  Clone ID: uC-osflcyp007a10b1
gttgcttttgctggagtgggggagcagctgggacaagaggatgccatgggaggcttgggtgtcatggcgcagggcgatgctgatcaaggccaaggacaaggattggccgcacacctccttcggcatcctcagcatagggcttgtcaagtgagtgaacccattcacctccactctctgatggtaaattaagctgcacctgtactgtacatgtcataacatcacctgataattgctgtatcctctccatcggtatatatatgcttagctcgatggaagaaattaaacatgatggatatgaaataaatcgtttcacaaatatcaaaataattttgacgaattcattaaaaaaaaaaaaaaagggcgg

SEQ ID NO: 265 - DNA, 109 bp, Oryza sativa
  Clone ID: uC-osflcyp007b02b1
tcgttacaccccgccaaggggcgagagcgacgccgcaatggtagacacaaacaagcaccgagcccacacaaaaaacaaaataagaaaggcagtccaaacacccaccaaa

SEQ ID NO: 266 - DNA, 479 bp, Oryza sativa
  Clone ID: uC-osflcyp007b06b1
tcggttacctgtctcaatcgtggttgagatggaccgaattttgaggcctggaggttgggccatcatcagagagaagcttgagatccttgatccattagagaaaattctgaaatcattgcattgggaaatagtgatggcattcaggaaggacaaggcgggcatcatgtctgtaaagaagacgacttggcggccatgatctaatctgttgatacgagtctcccgacataccaattttgaagtggtacaggcgtacagctattgatttcttaatctgggttaaagatacaccaatgaatcattgtttgcacccacaatattgctagcctttactccccgtggaggaatcctttggagcatcccagttcaggccgcgggaagagaccctgaattcaggctggatactgaaaaacagggttggacaagctgtaacatttagcaattgtttgtatttcttggaaattggaccaatatgaaagaat

SEQ ID NO: 267 - DNA, 78 bp, Oryza sativa
  Clone ID: uC-osflcyp007b07b1
ttatctcccatggagtccccacccaaccccctcctcctacttttcacgctcctcgtcgccgacgacaaaaaataaaat

SEQ ID NO: 268 - DNA, 394 bp, Oryza sativa
  unsure (1)..(394): unsure at all n locations
  Clone ID: uC-osflcyp007b08b1
atatcattccacttcaaattggtcggagaagaagagggcgttcgcgcatggggaaggcggcgagcatgagggtggcgctggtgtccgtggtgctcgtgggcctgatcctggtttccacggcccacgccgcgcggcccgagaagctgcccgccgtcgtctccccctccatcgcccccgccgtcggcgaggtcgtcgatgccgccatcaacgccgtcgatctcctgggggtctcgaagatgcaggaggccaacccgtacactcgcggntgcagcaggatcaaccggtgccgcggttgacggacggcacgcgcgcgtcgcaattatacatgtgtatttgggtattgatcatcgacgaccaccatgagctagctggtggacgaatgatttcgcgtggt

SEQ ID NO: 269 - DNA, 240 bp, Oryza sativa
  Clone ID: uC-osflcyp007b10b1
tttaatattgatcgagaggattctcgatttgagctatgccatggctgaggaagggtcctgcacacaacaagacgtgagatccaccgtctgcctgcctgcaggaccttctcgcactggaccaccggcagcctcgcctcatgtaatcggaaattgacaggcagtgggcaaccattccccagggtgacatgaaggaatctgtacccaagaagctgccatttgtgcactagggagctgatgaga

SEQ ID NO: 270 - DNA, 142 bp, Oryza sativa
  Clone ID: uC-osflcyp007b11b1
tttattttccaccccgaatcccggttgacacggccgggacccttacaacctgaggttgggccatcatcagagagaagccctgcatccttgctcaatccgagaaaattctgaaatcattgaactgcgaaatagcgatggcatt

SEQ ID NO: 271 - DNA, 95 bp, Oryza sativa
  Clone ID: uC-osflcyp007c02b1
tcggtgaaatgtcgccaaggacagcgagtgccgctgcaatgccagactcaagcacgcaccatgcgcacatatgaaacagaatttgaaaggcatcc

SEQ ID NO: 272 - DNA, 130 bp, Oryza sativa
  Clone ID: uC-osflcyp007c03b1
ttggtgttaccccggaaaaggcagcgagagggggggttatgttaacatcctgcatgcttcacgaccacctaacaaaccgactcacgaaactcatgcacaacgtcaaaaaaccatctgccacaacaccaaa

SEQ ID NO: 273 - DNA, 79 bp, Oryza sativa
  Clone ID: uC-osflcyp007c04b1
ttggtgatatcccgacaaaggccgcgtgaaccggggcaatgttaacaataataaagcggttatccaaaatacaaaaccg

SEQ ID NO: 274 - DNA, 378 bp, Oryza sativa
  Clone ID: uC-osflcyp007c05b1
gtttaggctgcctcctggagaggatctcaatgaatggttagctgttaacactgctgatttcttcaaccaggtgaacatcctttacggcactctgatggagttctgcacgcctactacatgtccaacaatgtcagctgtacctaagtttgagtacagatgggctgatggaattcagatcaagaaacccatcgaggtttcggcaccgaaatatgtcgagtatctgatggactggattgaggtccagcttgacgatgaatccattttttctcagaaacttggaacccccttcccacaaaattttcgggaagttgcgaagacgatattcaagcgccttttccgtgtttatgctcatatttaccacacacattctcagaagat

SEQ ID NO: 275 - DNA, 358 bp, Oryza sativa
  Clone ID: uC-osflcyp007c08b1
ttgagtgtgctcgccgaacaacatgtcgccctggaaccagaccatggcgtaggcgtggtcgcaccacagcgacgcgtccatggccgggctcggcggcgcgccacgcatggcgcccgggaccagcctcatcggctcgctggtcagggaggaagggcacatctactcgatcgccgccaagaccgacaccctgtacaccggctccgacaggaagaacatccgcgtgtggcgcaagcagaaggattgcggcgggttccagtcgtctagcggccttgacaaggccatcgtcatctgctgcaagcgcagcttaaccggggaccgtgaccgcaagatcagggtgtggcaggcgtctgccaagaac

SEQ ID NO: 276 - DNA, 58 bp, Oryza sativa
  Clone ID: uC-osflcyp007d01b1
tcgtttagacgccgggaagagcaccttgtggcgcggcgtcgataacatcccctttaga

SEQ ID NO: 277 - DNA, 177 bp, Oryza sativa
  Clone ID: uC-osflcyp007d02b1
tcgtacactcttgggggggcaggcagccagagccatgtcaaccatcctcgccgtggtcgtcatggccaccttacaggctccgacgaccctcccggggcccctggctcctacgctaccggttcgccggaacgacatttcgatcgtctgtctccttcaggggcgtgcgttgtgaaggtt

SEQ ID NO: 278 - DNA, 177 bp, Oryza sativa
  Clone ID: uC-osflcyp007d05b1
tcgtaacatatggtcagcaaacatcttcatatggactcctttgtacgagtacaccatatagcattatggacaagtatgctcctggattcttggctccaagtgcacaaagaagctcatctatggacatttaccccctttctccaagttcatttgcaagctcgcttatccacaattttc

SEQ ID NO: 279 - DNA, 459 bp, Oryza sativa
  Clone ID: uC-osflcyp007d06b1
tcgtttggacgaaaacatcaataactgcgggtctttctttgccattggcgaaaccttttcggacaccaccaactcgacgctatacgcgctcgagcgcctcactgccgccggagaaggtaaacgcagtaaggaggacctggaaactgtgcacaagtggaccaagaatttggagacccaatacgatgagaccgcgagcaagtgcaagttaggtgatctgttcaagtacggtgacaagaaggttcccaccgtttgggtcatagacctgctcacgaccacagccatccgcctcctcaatgccataaagccatgattgatcgatcgatcatcccttcaatcttagctatatataccttccactaaattttttttatttatattttggataattcccatgatatatatgtaataagggcgtgatgcgcatggatattgcatgcatgctgcatttggaacattgct

SEQ ID NO: 280 - DNA, 351 bp, Oryza sativa
  Clone ID: uC-osflcyp007d09b1
ttcactcccccccagatcccccaaccccattattaacccaccgccccccgcgcgcgccactggatctcgcctcgatcgcggcggtggcggtggggaggggagcgcaccgcctgcccagccatgagatggtatgcttcgctagcctgaggagggctctgcctctgctgctgcgcgccaccaccaccaccaccccccgcttccttctccccagggccctctccggcggcgttggcggcggggcggcggtggatgcgcgcgcgcttctccgtgggcacagcgggtggcgcggcctccgggtggccgccaggatgatgctagacttcttcgacttccgcgccgcttgggggcata

SEQ ID NO: 281 - DNA, 88 bp, Oryza sativa
  Clone ID: uC-osflcyp007d12b1
atcccaaccgccgcccaaacgccctggcgggaacgattgaagcgtaggtgcgggaccagaccaccagattcctcctgaaccgccttta

SEQ ID NO: 282 - DNA, 158 bp, Oryza sativa
  Clone ID: uC-osflcyp007e03b1
ttcgtccaaccgattccgcagcgccagcccactgagtcctcaccgaattctctcattttttttctctctttccattctccccggcgatcgagtagtcggcttttgttcgccgcctgcacgccggagggaggctaggttcccttttatttgaaattctc

SEQ ID NO: 283 - DNA, 361 bp, Oryza sativa
  Clone ID: uC-osflcyp007e05b1
tcgttaccatctcctcctcgtcgacgcggcgcgcgagctagggtttctcgactcgccctcgccgatccggtcagccatgtcgaagcaaggagggaaggccaagcccctcaaggcgcccaaggcccataagaatgagtacgactagagtgatctcgcgtatctgcagaagaagaaagatgaggaaaaggcactgaaggagcttaaggccaaggcaggacagaagggtgcactgggaggctctggtctgaagaagagcgggaagaaatgaggctgataccaatctgtaatgcctgaaaaatgataaaccagctacctgtctgtgttacttcactatgtgcggatgtaacaaaaccacctttaa

SEQ ID NO: 284 - DNA, 132 bp, Oryza sativa
  Clone ID: uC-osflcyp007e08b1
gtcaatccctagccccgcccgcgagcgccgccctcgccggctcgtcctcagggggttgcgagagagcggaggctgtggcaggggcgcgccgccgtaggtagggtatgacgttttcttactctgggtggtccg

SEQ ID NO: 285 - DNA, 174 bp, Oryza sativa
  Clone ID: uC-osflcyp007e10b1
ttttgctttagtcgcagccgcagccgcgcgacgtctgctccgcctgagagctcctcttcctgccggcgagagatcaggagcacgcaaggctcgcggccatggacgctgagacccacacgctcgcactcaccccgataccaatcatctgttattcttcattatcaacccctctta

SEQ ID NO: 286 - DNA, 65 bp, Oryza sativa
  Clone ID: uC-osflcyp007e11b1
ttgaataccacccccgacccacaaatcccgcggaagggaaattttggagaaggggacgttacaaa

SEQ ID NO: 287 - DNA, 62 bp, Oryza sativa
  Clone ID: uC-osflcyp007f02b1
ttcgtttcacattgaatacattatttcttaattaatcttacgtctctttttattgcgcttta

SEQ ID NO: 288 - DNA, 121 bp, Oryza sativa
  Clone ID: uC-osflcyp007f03b1
ttggtggtatgccctagtgaaccaagaaggctgggcgcattgaagaggtgatgagcctacaaggtgttctactgggggactgcttcaatgttcatattaagtacactgcggtcgtatcttc

SEQ ID NO: 289 - DNA, 52 bp, Oryza sativa
  Clone ID: uC-osflcyp007f05b1
tcgttcgccgaacaccaactcctcgccgccgccgcggaggattaggaggacc

SEQ ID NO: 290 - DNA, 379 bp, Oryza sativa
  Clone ID: uC-osflcyp007f06b1
tcgttcatcccacgccttccccccccccattcgtggcctcctgtcccgggggccgcgagcaaaacccccacccccaaatcgcagcctcgctcagctcgatctctctctcgtctcgccatggcccccagcgacgacctcgtctacatggccaagctcgccgagcaggccgagcgatacgacgagatggtggaggcaatgaatagtgtggcaaagttagacgaggggctgacaaaggaggagaggaacctcctctcagttggctacaagaatttgattggtgcaaagcgtgcggcaatgcgtatcattggatccattgagctaaaggaggagacaaagggcaaggagagtcatgcaaggcagacctgctgagtatcctccc

SEQ ID NO: 291 - DNA, 373 bp, Oryza sativa
  Clone ID: uC-osflcyp007f07b1
ctaccttctcctccggctcttcttcagtatcgaatcctctcttctcctcgtgcccaccaccaccaccgtagcaatggcgggcaacgggccgatcaacaaggaggacccgctcaactggggcgcggcggcggccgagatggccggcagccacctcgacgaggtgaagcgcatggtggcgcagttccgcgagccgctggtcaagatccagggcgccaccctccgcgtcggccaggtggccgccgtcgcccaggccaaggacgccgccggcgtcgccgtcgagctcgacgaggaggcccgcccccgcgtcaaggccagcagcgagtggatcctcaactgcatcgcccacggcggcgacatctacggcgttaccacc

SEQ ID NO: 292 - DNA, 429 bp, Oryza sativa
  Clone ID: uC-osflcyp007f08b1
gtcattatttaagcagaagcttatttctcagtttgatgggacaaatataaaagttgttaaccccaagaattgccaatcagtggagatgtatttcagttctgagaaaatggccaagacaattggcaggttggctgaaaaggtaccggaagctggagaatcagttaatggcttgcttgtaaagaagggattcacatatcaaattatggctcctgaggatctccgtgtgtacacgcagctatctacagctaacattacccaaaggattgccgtcccatattctggttcttttgaagtcataaagtacagactgaagcaaatatatgagagcgtggagtcatcaacagaggagtctgatgttccaacattgattgtgcatgagagagtgaccattcgcctggaatcagaaagctatgttacattgcagtggtc

SEQ ID NO: 293 - DNA, 240 bp, Oryza sativa
  Clone ID: uC-osflcyp007f09b1
gtgggtaggcttctcctccccctcccggttcggttcggttcggttcgggtccggttcgatttcggtttttccttcggttcgggggttggtgggaaagcatggcggcgccggatgttgagtaccgctgcttcgtcagcactctcacctgggccaccgaccaccgctccctcgaagccgtcttctccacctacggtgagatcctcgagtccaagatcatcaacgatcgggagacggggaggt

SEQ ID NO: 294 - DNA, 68 bp, Oryza sativa
  Clone ID: uC-osflcyp007f11b1
tttatttaaacaaacacaaaaaaaaaaaaagaggggggaaaaatgggcggccgcgcgggtgcaaccaa

SEQ ID NO: 295 - DNA, 91 bp, Oryza sativa
  Clone ID: uC-osflcyp007g03b1
ttgatcaaacccagtcccaggctaaatactgggtggtgacgattgcaacatccgtagcaattttcgccctatccgacgtattcaccgcctt

SEQ ID NO: 296 - DNA, 99 bp, Oryza sativa
  Clone ID: uC-osflcyp007g04b1
ttggtgttgacttcatttctgaaaatggagacgactccatagttccaaccaaatcgaagatgatacatcaactagatgcaaatattgttgaggacgaag

SEQ ID NO: 297 - DNA, 435 bp, Oryza sativa
  Clone ID: uC-osflcyp007g05b1
tcgttcgaaacaggggaatccggagcaaagtgcgacgcgagcgcgcgaggaagcagcagccatggcgctctccctctccacctccttcctcccgacccaagccgccgcggcggccacgaggaccaccctccgctccctcgtcccctcccagaggatgcggtgctcgatgcggaagaaggggctgcacccggagatctacgaggacgcgaaggtgtactgcaacggggagctggtgctggtgacggggggaaccaagccggagtacacggtggacgtgtggtcggggaaccacccctactacgtcggcgacacgtcggcgatggtcgctatggacagtcagatcgagaagtttccgcaagaagggggggcccatcaagggggactgggccgaggaccagtggaggggagagcacccccgcacgcgaccccgagttc

SEQ ID NO: 298 - DNA, 343 bp, Oryza sativa
  Clone ID: uC-osflcyp007g07b1
gtagcctccgccgcagcctcctctcggctgctcccatcctctccttcgagttagcttcctccttattcaaccatgggtaaggagaagacgcacatcaacattgtggtcattggccacgtcgactccggcaagtcgaccaccacgggccatctgatctacaagcttggaggtatcgacaagcgtgtgattgagaggttcgagaaggaagccgctgagatgaacaagaggtccttcaagtacgcgtgggtgcttgataagcttaaggcccagcgtgagagaggtattaccatcgatttcctcctgtggaagttcgagacccccaagtcttactgtcgggcattga

SEQ ID NO: 299 - DNA, 380 bp, Oryza sativa
  Clone ID: uC-osflcyp007g08b1
ttccattcgtttttgagttcctcgtttgctccgcctctctttcactcatgggcaagattaagatcggaatcaatgggttcggccgcatcggcaggctggtggccagggtggcgctgcagagcgaggatgtcgagctcgttgccgtcaacgatcccttcatcaccaccgagtacatgacatacatgttcaagtatgacaccgtccacggccagtggaagcatcatgaggtcaaggtcaaggactccaagaccctcatctttggcacgaaagaggttgcggtgttcggctgcaggaaccctgaggagatcccatgggctgcggctggtgctgaatacgttgttgagtctactggtgttttcacccgcaaggacaaggcagca

SEQ ID NO: 300 - DNA, 432 bp, Oryza sativa
  Clone ID: uC-osflcyp007g09b1
tttgtttttacagcctggagacattggtgatttccaatttgagaatattgagggcaacaaacttccacaatcttgtcagccttaaaagtctgcatgtatatttcgagtttttggatggatcattggatcaattttgcaagcttgatatgttggacacactatgtctgaagagatgcagtaacttgacatacttacccttacatgtaggaagcctcatcaacttacagcgtcttaaactcattggaataccaaacatccggaatttggatcatgcatctttcaagtacagaagaaataacagcataacaaggtaccaagaagcaacatttccattcttggaggagttagaactcgataaattgtgcaaactagaagattggtatggaataccacaatcagattgcccgaaattgcagagacttacaatcagag

SEQ ID NO: 301 - DNA, 272 bp, Oryza sativa
  unsure (1)..(272): unsure at all n locations
  Clone ID: uC-osflcyp007h01b1
ttctctttcaaagtcgcaacgcgctcctcctcggtgaaacgggagtgaggtgcgtgcggccatggcgtccagcgcctcccggttcatcaagtgcgtcacggtgggcgacggcnccgtgggcaagacctgcatgctcatctgctacaccagcaacaagttccccactgactacataccaacggtgttcgacaattttagcgcaaaccgtgttgtggacagcaccacggtgaatctgggcctttgggatactgctgggaaagaggattacaacc

SEQ ID NO: 302 - DNA, 457 bp, Oryza sativa
  Clone ID: uC-osflcyp007h03b1
tttagttgtgtaccgtctggggcagctgtttgacttctttaggatgcttactttctttttcaccacagttggttattatgtctgcacaatgatgaccgttctaactgtgtatatctttttgtatggaagggtttatctggcactctctgggctcgactatgaaatatctcgtcaatttaggtttctgggaaacactgcactcgacgctgctttgaacgctcaatttttggtccagattggtatttttactgcagtaccgatgataatgggtttcattttggaactggggctactgaaggctattttcagttttattacaatgcaactgcagttctgctcagtgtttttcacattctctcttggaactagaacacattattttgggagaacaatacttcatggtggtgcaaagtattatgctactggtagaggttttgttgttcgtcacataaaattt

SEQ ID NO: 303 - DNA, 119 bp, Oryza sativa
  Clone ID: uC-osflcyp007h04b1
atcgattcctccgggaaaaaccctaccacccgaatccacgccgccgccgccgtcgccgccgcgctctcctccggcgagagctcagggggattcgatcgcgaccggcggaggaggtgagg

SEQ ID NO: 304 - DNA, 360 bp, Oryza sativa
  Clone ID: uC-osflcyp007h05b1
tcgttctcatcgacatcactgacggctccaccgccatcaccatctccaactcccacttcaccaagcacgatcacgtgatgctgttcggtgcacgcgacgactcgccgaaggacaagatcatgcaggtaacgctggcattcaaccactttggcaaggggctcgtgcagaggatgccgaggtgcaggtttggattcttccacatggtgaacaacgactacacgcactggctcatgtacgccatcggcggcaacatgaacccgacgatcattagccaggggaacaggttcagggcaagcgacgacatgaagcttaaggaggtgaccaagagggagtccacgagctacgactagtacaaggagt

SEQ ID NO: 305 - DNA, 328 bp, Oryza sativa
  Clone ID: uC-osflcyp007h07b1
ttttgatataaaatcaaacaaaaagaaaaaataggcccgatctgttaaattcgcaaaaccctaccgcggcggaaatgtcgaacacgagggtgttcttcgacatgaccgagggcggagctcccacggggcggatcctgatggacctttacttgaaggacgtgccgcggacggtggacaactttcgcgcgctctgcaccggcgagaagggcgtgggcaagagcggtaagccgctgctactacaaggggagcacctttcaccgcgggatcccctgagtcatgtgccagggcggtgacttcaccccttggcaacggcacgggagggggagtt

SEQ ID NO: 306 - DNA, 144 bp, Oryza sativa
  Clone ID: uC-osflcyp007h09b1
gtttagtaaggtgtttgggttattgatggtgtggtggtcctcaatacccccccccccaccactcccctcacccccccctctcctcctaccccctccccaccctgcaaagctccaacaccaactttcccccccccctgccccccc

SEQ ID NO: 307 - DNA, 198 bp, Oryza sativa
  Clone ID: uC-osflcyp007h12b1
gttattttgaagtgggacagctcccttgtctcccttgtatcatgtgcatatggctcataacgtaataatcatacaattataaacccgggttccagggggtaaaactaggaaccaccatcttccccctcccactcctcacatgacaccaagaactcaaccaaaactcattcccaaaacacgctgcctctttacctaggc

SEQ ID NO: 308 - DNA, 286 bp, Oryza sativa
  Clone ID: uC-osflcyp008a03b1
ttcactcaagccagctccagccacacgagcctagttcaggtagatacaatggcgtccaccgcctctttcatgctcgccgtcttgctggcggtggccgtcgcggcggcgccggcgagggcggtgcgatgcccgccgagcgacaagcaggcgctgatgagagtgaagcagtcgctgggaaacccggcgacgctgtcgacgtggtccctggcgtcggcggactgctgcgagtgggaccacgtccggtgcgactaggccgggcgcgtgaacaacgtcttcatcgacggcg

SEQ ID NO: 309 - DNA, 333 bp, Oryza sativa
  unsure (1)..(333): unsure at all n locations
  Clone ID: uC-osflcyp008a06b1
tgtgctgacgagcgaagagagggacgacggtcggcgccagcgcatggaggagcagcggcggcggctgctgccacgcggagagaggaaggggcagcaccggcgcgcagatgggcggcggcgccggtgcgcggaggagtagcgcgccagctgttgccgcaaggagggagggaggggcagctccagcgcgtggtggtaggaggagcggtnntttccctcccctgctgctgccacacggagggagggatgggcggctccacccacgagggctggtggcacttgctgctgccgagcggaggaagggtggaaagtccctcttttgcgctaggaaggtgg

SEQ ID NO: 310 - DNA, 460 bp, Oryza sativa
  Clone ID: uC-osflcyp008a07b1
atagaaacgaactaatatatagataatcgaaattgaaaagaactgtcttttctgtatactttccccgttctattgctaccgcgggtcttatgcaatcgatcggatcatatagatatcccttcaacacaacataggtcatcgaaaggatctcggacgactcaccaaagcacgaaagccagttagaaaatggattcctatttgaagagtgcctaaccgcatggataagctcacattaacccgtcaattttggatccaattcgggatttttcttgggaagtttcgggaagaaattggaatggaataatatagattcatacagaggaaaaggttctctattgatgcaaacgctgtacctagaggatagggatagaggaagagggaaaaatcgaaatgaaataaataaagaataaagcaaaaaaaaaataagtcgaagatagaagagcccagattccaaatgaag

SEQ ID NO: 311 - DNA, 378 bp, Oryza sativa
  Clone ID: uC-osflcyp008a08b1
tcgattttaatggagagacatatgtacacaggtgtattggtcgataccactcatgacaagtcggttgtgatggctaagactggtaggacatatacggattaatataacatagacttctgcctgttcgaaggatatgttttgctcattttgcaaggcaaagccatcacccattgctgtattatgaacaacgagcatggacccttaaactaggtattaaaaagtaaaatgaccgacatggacaacatttggatagtctgaattaacatcatcatggataggaaggcgtgcgggaagtcataccctgagaataagcatgtgaaatcccttgccgatggtttgggaacatacaccaaggcacttggccttgagcttgacctt

SEQ ID NO: 312 - DNA, 308 bp, Oryza sativa
  Clone ID: uC-osflcyp008a11b1
gtgatgccggggagaggcatgccgaggccgggcatcccggggaacagcgggaacgacgggatcgtcgacggcggcagccaccacttcatgctgtcgctgccggcggcgctccccgcctcggccgccggcccaggagccggcgccgccgcgtccgcatcccccgcggcgtacggcgtcgacccggcgtcgaccggctcgaactccaggtggctgatctcgttctcgtagtcgtccagcaacgggtccagcggctccgtctcgtcggcggcgggggccttggagccaaaggcgaagccctggccgaagtc

SEQ ID NO: 313 - DNA, 462 bp, Oryza sativa
  Clone ID: uC-osflcyp008b02b1
gttgtgcttccgtttagcatctaggctctagcaaacctgtaaagatggaatcctacacaactggagccaagtttgattgtttgttgtttgacatggatgatactctgtacccactgagcttaggaatcaacttagcttgccgcaagaacatacaagactatatgctgaacaagcttcagattgaagagagccttgttcccaagatgtgtcttgatctgtacagggaatatggaactacaatggctggactgaaggtcttgggttatgatttcgactatgacgatttccacgcttgtgttcatggcacattgccatacgagaagctgaagcctgaccctgtcttgaggcacctactgctttcactgccacaaaggaagattatattcacaaactctgacaaggcgcacgccgcgacggttctgaagaagctcgggctggaggattgcttcaagggatcatctg

SEQ ID NO: 314 - DNA, 241 bp, Oryza sativa
  Clone ID: uC-osflcyp008b04b1
tcgctctttcacaccatatcctataatggcgaactcaccgacgccgacaatgctggcgttcctggctcttgggctagcgctcctcctgtccgccaccggccaggcgagcgcgcagaactgcggctgccagtcgaacatgtgctgcagcaaatgggggtactgcggcacgggcaaggactactgcggagatgggtgccgctctggcccgtgctacggcggcggcggcggtggaggaggagga

SEQ ID NO: 315 - DNA, 208 bp, Oryza sativa
  Clone ID: uC-osflcyp008b05b1
gaaagaggaacctgagcctccaaagcctgaggagaagaaggagccgccggtgatcgcggttgtgctgaaggtgcacatgcattgtgaggcctgtgctcaggggatcaggaagaggatcctcaagatgaaaggggtacaatcagctgagcctgacctgaaggcgtcggaggtaaccgtgaagggtgtgtttgaggaggccaagctggtc

SEQ ID NO: 316 - DNA, 93 bp, Oryza sativa
  Clone ID: uC-osflcyp008b07b1
ttttcgatgggggggagtcaccacagggggggggggtactgagggtaacgggggagccactcctcggatcccctctatcattcgagatggtct

SEQ ID NO: 317 - DNA, 430 bp, Oryza sativa
  Clone ID: uC-osflcyp008b09b1
caaacccctcctcgccgcctcaacccctccctcgctccgccgccgccgccgccgacgacgacgacgcccggaagggcttcctccccatcaccggactaggcgacttccccgcgagcaagatccgggctccgctccggccaacagtgcagcgtaaatggagagggtgctgaaggatgatgctgttgaggagaagggcgaacgtgccaggatggcagccttcattggtgctatggctattgcagatttggtcaagactacattgggacctaaaggaatggacaagatcttgcaatcaacaggcagaggagggagggttactgctacaaatgatggggctacaattctgaagtcccttcatatagacaaccctgctgcaaaggtccttgctgacatctcaaaagttcaagatgaagaagctggtgacgggaca

SEQ ID NO: 318 - DNA, 309 bp, Oryza sativa
  Clone ID: uC-osflcyp008b11b1
tttataatccataaacaaacaatcccctcctcctctccaatctccattccctctcgagaagaagaagaaatcgcaacaatttgacggccatggcggtgtcgatcgagctgaccaaggaatacgggtacgtggtgctggcgctggtcgcctacgcgttcctcaacttctggatgagcttccaggtcggcaaggcccgcagaaagtacaaggtgttctaccccaccatgtacgcggtcgagtcggagaacaaggacgcccagctcttcactgcgtgcagcgggggcaccagaactcgctggagatgatgcc

SEQ ID NO: 319 - DNA, 457 bp, Oryza sativa
  Clone ID: uC-osflcyp008b12b1
ttggtctaagcttctttcagaagagagggagcatttactcaaggaaagagattctgctcttcaagaagctcaaatgtggcgttctgaactaggaaaagctagaggaaatgctgtaattttagaagcagccgctgtgagggcggaagagaaagcaagagtttcagcagcagatgctgatatgcgaataaatgatgctgcgagtagactcgattctgcgacaaaagaaaaggaagaactcgtagctcttgtggacgcgctacagttgcaaatacgaagccaagacactagcacaaaacaagtctgcgaggagaggtcggagctgtgctccacgtcttcaaagcatgtagacatggaagatgataatgtggataaagcttgcttaagtgatacagatccattacccattactgagaacatagttgatttggaagatgaaggagtcgatatccctacaact

SEQ ID NO: 320 - DNA, 418 bp, Oryza sativa
  Clone ID: uC-osflcyp008c01b1
gcgttcatgcgtgtccctaataagaccaccttgattaaggcaatggaggaagctgatgtgaagaacaagtgggagaacagctcatggggtaagaaactgattgtccataagaggagagcatccctcaacgactttgacaggttcaaggttatgttggcgaagatcaagcgtggcggcgctatcagacaggagcttgctaagcttaagaaggaggctgctgcgtagatcattttggtggtgatcagttgagattttgatcaatgatgtttgatgtccctaaatatgaaacattgtgccagccactgttattgggatctcatgaaaaatttaagttttgaaatttggcaattttaacaacattcttttccaggtatcataagaaggacccctctaacattcatcaacaaatatggggggg

SEQ ID NO: 321 - DNA, 263 bp, Oryza sativa
  Clone ID: uC-osflcyp008c04b1
ttctccccacctaccgacgagatgggcaccctccgcctcacctccgtcaccctccgccccggcgcctgcgcctggtccgccgccgcgccgcggtccgccaactgagcccgcagccgcggcgcgcgggttgccctcgtgtccgtctagcgccggcgggccgtgggggagagctagcgaggagcggggccatcggcgacgccgtggcccaagctaacgctacagcgccggacgaggaggaggaggaggagggggcgctatgggaa

SEQ ID NO: 322 - DNA, 457 bp, Oryza sativa
  unsure (1)..(457): unsure at all n locations
  Clone ID: uC-osflcyp008c05b1
cttggaatctgctggcattttgaggcagttggcgaactatctcgatgccaatattccgaatgccgaccttattgcaagcgctatcggtgtagcatcagcaattatagacaatgttccacttgttgctgcaacaatggggatgtatgacctgacttcatttcctcaagatgcggacttttggcagcttattgcgttctgtgctggtacgggtggttctatgcttatcattggctctgcagcaggtgtggctttcatgggaatggaaaaggtggatttcttttggtatttccgcaaggtgagtggttttgcccttgcaggttatgcagctggtatcatcacttatctagctgcacaaaatctccctctatcccttcccacttcactagccgagatcccatntatcttggggtcatgaaagggggaccagattcaggtatggaaatggacatattttatt

SEQ ID NO: 323 - DNA, 367 bp, Oryza sativa
  Clone ID: uC-osflcyp008c06b1
cgcctgcacctaccggtacttacttgccggaccgacccacgcgtttcttttccagctgctggggatgagtacttagttagctcggagctagctactaatggatgatatacttatgctagttagttaaatacagttattagttagttgtaggttgcatctatcatatctccatcggttaattaattgattgatagctagattatcaacaattaatgagcatggtggtgcagcaggagcaggaggtggtgttcgacgcggcggtgctgagcggtcagacggagatcccgtcgcagttcatatggccggcggaggagagccccgtctcggtggcggtggatgagcttgtaggtggcgctgatcgacttgt

SEQ ID NO: 324 - DNA, 246 bp, Oryza sativa
  Clone ID: uC-osflcyp008d02b1
tcgacccgcatcgcatctgatcggcatcggcatcgtcctcgtcctcggcattagcagcagcaagggaagggaaggattcgccgcccgcgaggtcgtcgcctccccttccggcttccgtccaggattttccatggacggcgcggccgactccggcacggcgggcgccgcggcggcggcggccaagtggctgaccgatgcctggcggtctttccactattacctatcccggtccagcgggcacgtctc

SEQ ID NO: 325 - DNA, 336 bp, Oryza sativa
  Clone ID: uC-osflcyp008d03b1
ttttgaatctacctgtcctccggggagctagattcgacgcttctttcttccgacgtgtgacagaatgggggtcattgaggatcacacttacgtggttctttagaaggagccattactggccattttagaagctgctgatctcgagtacgggagctgtcatattcatttcatcccacatcgtgaggtgccttaagagcgagggtgactacatttattgcttcttactggaagaaaaatgaggacaagactgaggatatgtttttgccatgagttccatcttgttgtcttgagggtgatggacaatctgccttaatgttaccacctgattctgaccat

SEQ ID NO: 326 - DNA, 382 bp, Oryza sativa
  Clone ID: uC-osflcyp008d04b1
ccaatcctcccaaggccgtgaaccacaaaccgacgagcacagcgggcgcgagggcggccggcgccgggcggagcacacgcctctttcacaccatcatcgccagcgccggatccatccacgatgggcggcggcaacgggcagaagtccaggatggcccgcgagcgcaacatggagaaggccaagggcgccaaggggagccagcttgagaccaacaagaaggccatgaacatccaggttttagttttggatgggcatattaaaaactgatgaactgtgttggcgggtggcatgaggcccttcgaccaaatttgccgaaacccgtggcgaaggctatgaaccaaggatgatgctaggcgaagggtcgcgtgagttcctgccgaag

SEQ ID NO: 327 - DNA, 125 bp, Oryza sativa
  Clone ID: uC-osflcyp008d06b1
gcgggggggaggcacgcttcctttctcctcgagatctcgcaaggtcagggagccagtaaattcacccgcgatttcgcgcgccgccgccgtcgccgccgtcgacgtcgccgcctgggtgggggagg

SEQ ID NO: 328 - DNA, 388 bp, Oryza sativa
  Clone ID: uC-osflcyp008d10b1
ttccctcctcatccaccactgcgccgccttcctcttgcaccactagcctctttcccctttacttctccgccgacggcagctagcacatctcctctccgatcgacgagatcaagctctcttccctctccaccgagctcgagccctatccccgcttcactgacgagagggactacggcagtgatgaagtgaggtcaccaccgcatacaaccacatgctcgccagagggtgatgagatcggtggtagcgaggtctaagtgctgaaggccgacgaggcccatgcgataaaaggacatgaagtcagcctttccccttaatatcgccgtcgttatctcaaatttggtcaagggtgggcaccctgatctggatctggccccccatttctttaacc

SEQ ID NO: 329 - DNA, 385 bp, Oryza sativa
  Clone ID: uC-osflcyp008d12b1
ttctcccagctaccactcttcacaaagcgatagccggaggaagaagaagaagcaacagcagcagtcaagccaacccgtccggcgagcaagaagcaaccgaggcagcaaaaggaggaggagggaggactccactgttcgcttgtatcgtcttatgggggaagaggatatcagcaacgacagcaagagcagctgcggctgcgaggacggcacggtggaggctccggcggctgcggcgccgaaggagaacggccgagccgcggacccgcgcctccaggccatctccgacgccatccgcgttgtcccgcactttcccaagccagggatcatgttcaacgacatcacggcgctgctgctccggcccggcgtgttaaggacgccgtggaca

SEQ ID NO: 330 - DNA, 239 bp, Oryza sativa
  Clone ID: uC-osflcyp008e02b1
ttgtctcgtgggtgctgatggctacgctgcgtccggcgccggcgtcgatggtcgttctctgcgcggtggtcgtcgtcggcgcggtattcgtcgtggtggcggagggcggcggcagcgaggaggcggcggcgtcgacagggaaagcagcaatggtgccaacgctgctcgtgttccgccactctctgatggagagggggagcaacaacaacctgtcgtcccttccccaaatacaactacta

SEQ ID NO: 331 - DNA, 420 bp, Oryza sativa
  Clone ID: uC-osflcyp008e03b1
tccgactaccaatgaatatgatggaaattcttcaaagtcagatgactaccgagatagtgatggtgaagaagaaagtgagacacttgatcggagcaaccgccggaggaggagatctcagagatatacacgggactttgtcgaggctgtctcagatattgacccgaactttgacagtgacgatgaaatcatgggggaggcagtctatgatgaggaatatctgagaactcgaaaacagcagaagacatcaagtgcttctgaagaggatgaagagttccgattagaagaagatgatgatgaagaggaagaggaatattctttgagtaccagtgaggatttagaggagccacaacagggcaagaaactgcaaactcgtggtcggcgaaggggccagcttagatctgttgatgaaatccaacaggt

SEQ ID NO: 332 - DNA, 66 bp, Oryza sativa
  Clone ID: uC-osflcyp008e05b1
tctattttctgaggatgacccgaggcgcttgggcagggcggcactagacggaggctcatcaataca

SEQ ID NO: 333 - DNA, 69 bp, Oryza sativa
  Clone ID: uC-osflcyp008e08b1
tcgttcaaatctaatctacacaacctccatctcaaattataatcactagggagcttcccatggtgaaga

SEQ ID NO: 334 - DNA, 388 bp, Oryza sativa
  Clone ID: uC-osflcyp008e11b1
gaaagctttactatattgcggactggctccaacagtattgggtgggaaaattgaccctgctctttttgaagtcctctatgcttctcagcatgctatcttcttctttgctaggcttccacagatatggaagaattttatgaacaagggcactggcgagctgagctttctgacctgtttcatgaactttgctggttccatagtaagagtgttcaccagcatccaggagaagactcccttaagtgtgatactgggatctgcaattggcattgtgatgaatggtacgctcttgggtcagatagtgttgtaccagaagcctgctccaaagaaagagaagaagagagattgagcacaactgcacaacacaagaaaaggcagaatgttcatctct

SEQ ID NO: 335 - DNA, 471 bp, Oryza sativa
  Clone ID: uC-osflcyp008f01b1
tttttatcaaaaggcagttgctgatggcgcagatgtcattgactgtcctgttcaagttaccaaagatggcataccgatatgcatgagctccattgacctaggggatgttactactgttgcaacttcacaatttgcttctcaaacaactgttgtaaatgatattaaggctactcccggattctactctttcaacctcacttgggaggatatttcaaagaacctgaagccaaagatatcaaacccaatgtctaagtaccaagtgtacagaaatcccagaaacaggaatgcaggaaatttcatgagattgtcggactttttggatttcacaaaaggaaaggatttgtctggagtcatgatcagtatagagcgagctgcattcatggcacagaaacttggctttggcgtttgttgatgcagtaatcaaagctcttgatgatttccgttacagcaaacaaactacccagaaagtaa

SEQ ID NO: 336 - DNA, 333 bp, Oryza sativa
  Clone ID: uC-osflcyp008f02b1
tggactcgtgggcacaacccccggattttggggaggggaaagtgcacaaaactatcctcctcctctgtctctcctccactcccccacgccaccgctcgccgccgccgccggctcagcttctcctcctcctccgccgccgccgccgtcgtcctcgggtgaagcagcgcacttcggaggagggaggcggacgggggtttgttcaccaacctaacctcctccctccagctccccaactcttctctcccggtctttgcgagatgaactcttagggatcccagctgctccaggcaagactggcggaaccttcaacaattctagaacgggtggctgctg

SEQ ID NO: 337 - DNA, 453 bp, Oryza sativa
  Clone ID: uC-osflcyp008f03b1
tctcatgcagagcccgagccagccgtgccgtgcacagtgccgccgcctcttccttccaaatctcgcctccccgttgctcctttttccaatttagttgaggggaaatattcctcttatcctcctctatctttacccccaaaaatcggagcaaatcgttgagtatcttatccgaatcaaactcgttttcgagtttatctccaaaaccgagtttttgatttcccggatcgatttcttgcgggaggagtccgatctcttcaatccaaggctataaataggaccccctagtcctcctctttcgtttgccccctctcccgtcctcttccgtgctccgtagctccgtcgccaccgccgtcaagcaaaccgccgccgccggcctctctcggtgccgccgcgccgccgtctccatcgtcgccgccggtcgccgtcaccgccgtaaggtgcgccgaggtgtgg

SEQ ID NO: 338 - DNA, 344 bp, Oryza sativa
  Clone ID: uC-osflcyp008f05b1
ttgtgtgctcaacagggagcataagcgctcgaggagtggccacgaccaccacacgagtggcaacatggcatgcataatgatggacaacccgaacaggagcgggacgtttgggggcggtcagaccacggcgctgtgccagcgcatcaccttctgcagcgactttgaggcctagccaggggctccggtgcagaaccgggcgactaacctccaccgccaggaggtggatatcaccttcaagttctcggtgggtagtgacgccatgatggtcatggaccagttctgctccaggggcaggatcctttccgtcatggacggctgcttctcctacgatcggactgccacca

SEQ ID NO: 339 - DNA, 463 bp, Oryza sativa
  Clone ID: uC-osflcyp008f10b1
caccgccgtgctaccaatgttagcgctagactggacgcacagcagaagaagctcaaccttccagtccttcctacaaccacaattggttcattcccacagactgtggagctcaggagagtccgccgtgagtacaaggcaaaaaagatctctgaggaggagtacatcagtgccatcaaggaggaaatcagcaaggttgttaagatccaggaagagcttgacatcgatgtccttgttcacggcgagcctgagagaaacgatatggttgagtacttcggtgagcagctttctggttttgcattcactgccaacggatgggtgcaatcttatggatcacggtgtgtcaagccaccaattatctatggtgatgtgagccgccccaaccccatgactgtgttctggtccaagttggcgcagagcatgacctctcgccccatgaagggaatgttgactggtcccgtcacaa

SEQ ID NO: 340 - DNA, 471 bp, Oryza sativa
  Clone ID: uC-osflcyp008g03b1
ttgaagtgaaacagcaaaaaaaatcaaacaaaaagaaaaaatattccccatctgtgaaattcgcaaaaccctagcgcggcggcgatgtcgaacacgagggtgttcttcgacatgaccgtcggcggagctccggcggggcggatcgtgatggagctgtacgcgaaggacgtgccgcggacggcggagaacttccgcgcgctctgcaccggcgagaagggcgtgggcaagagcggcaagccgctgcactacaaggggagcaccttccaccgcgtgatcccggagttcatgtgccagggcggcgacttcacccgcggcaacggcacggaggggaggtcgatctacggcgagaagttcgccgacgaggtgttcaagttcaagcacgacagccccggcatcctgtccatggcgaacgccgggcccaacactaacgggttccagttcttcatctgcaccgtgccctgcagctggctg

SEQ ID NO: 341 - DNA, 457 bp, Oryza sativa
  Clone ID: uC-osflcyp008g04b1
tcagaagcaagttcatgtgctgaacttgatgctgataaaatatatctgtgtgactctggggctcagtatcttgatggtactacagacattacaagaactgtacattttggcaaaccctctgagcatgagaagtcctgctacacagctgttttgaaaggccacattgcactggacactgctgtatttcccaatggaaccacagggcatgctattgatattctcgcacgaacaccactttggagaagtggtcttgattaccggcacggtacaggccatggtattggatcttatttgaatgttcatgaaggtcctcatctaattagcttcagaccttctgctagaaatgtaccactacaagcatcgatgactgtaacagatgaacctggttactatgaagacggaagctttggataaggttgggaaagttctgatagttaaagaagccaatactaaattt

SEQ ID NO: 342 - DNA, 57 bp, Oryza sativa
  Clone ID: uC-osflcyp008g06b1
ctacttaaccatggcgacgcaagcgacggcgagagaaattgcggtggtgggagtgat

SEQ ID NO: 343 - DNA, 454 bp, Oryza sativa
  Clone ID: uC-osflcyp008g08b1
tttcgtctctgaccaccattggttcctgaaattgagtcatggatgccaagctagctagcctgcacagtctccgagaacgcctaggagccaccttatcgtgtcattcgactgagtggactggactcttctgtaggactgttaaccagggaaagggaatgctacagcgccaccaggtgattggggagactgatgcctcgatcgaagctaacaaagagaaatatgctccctttgaagacattctccggtctgctcaggaagccattgtgctgccgccctgggttgcactggccatcaggccaaggcctggtgtctgggactacattcgggtgaatgtaagtgatgtggcagtggaagagctgagtgtttctgagtacttggcattcaaggaacagcttgttgatggacacaccaacaggaacttttgttcttgagcttgattttgagcccttcaatg

SEQ ID NO: 344 - DNA, 413 bp, Oryza sativa
  Clone ID: uC-osflcyp008g09b1
atcagtgccatcttcagcatggttgatgtcatttgatattattttccagttgcttgatgaattactggagattgcacaaaattactcaccgaaggatttcagaaacatggaggtgtccctcttgcatgctgtaaaacttctatgcaaagtgttcttgcagtcacttaatgacatttcatcacagagcagcttcagtaagctgtggttggaagtacttgacatgatagagaagcttatgaaagtcaaagtgagagggaggaggactgagaagctacaagaggttatcccagagctactgaagaacatactgctggtgctaaaagcaaatcgggttttatcaaagacaagcaccagtgaagagaacagtttgtgggaagcaacatggcttcaagttaacaagattgcaccttcac

SEQ ID NO: 345 - DNA, 172 bp, Oryza sativa
  Clone ID: uC-osflcyp008g12b1
ttcttttccccgacgccggccggccgcccacggccctcgcgcgcatgggcggcttcgctccccaccccgtcgtcgtccccaccgccgccatggacgggaccagcagcgttagcgcgcggacggcctggtctctgtcgtcgtcctcgtcgtctgctcgacgacgggagccgtg

SEQ ID NO: 346 - DNA, 469 bp, Oryza sativa
  Clone ID: uC-osflcyp008h02b1
ttgaatcatttgtcggttgagtgctcgatctaaactctgcttgagtcttgccgaagattgtttctcaacaatcacgtcttctgttctctctgaggttggaccaatctcccttttggtctgatcaacctcctgatctcccttaagtgaaccgtcctgctgtgttcacgcaatacaatcttctgaagtcctctcttgttccttctgtgctcaaacatcaaaagcagctctctcctaagttctcttgattgtttgtgctcctaaattctgttgtttgagcactcaaacatttcccttactggtcaatcttagatcacttgttgattattggtattggcattatttggtgaagcatttctgcttgtaccttaaacaaaggtctctgttgtcttattggtgctgaaggcaagatatacactgcagtgatggctcaaacttgcttgccacctggctttcgttttcatccaacaga

SEQ ID NO: 347 - DNA, 397 bp, Oryza sativa
  Clone ID: uC-osflcyp008h04b1
ctgttacgaactgtccagactccaccacgcgggcgaggaagcacagttgtactcaagcacgacgaaggcggcgtcgctgcccgctgaccggtgggggagccgatgacgtggtcatcgaagcaaccactggcggagaggactacgagctcggcgccgggagcggcaacaccgacagaaagtgcggtcgacgccggttaggccttgagctcgccggtggacacactgcctcaacaaggaacatccgttatgagagaggacccgagctcggtggcggcgggggcgctaacgccacacggagataccggtagcgccggttagggcccagagctcggcggtgagggcacttggagggagcgtgtcgaagcttgtggcccgcttgatggatatggctgagagc

SEQ ID NO: 348 - DNA, 408 bp, Oryza sativa
  Clone ID: uC-osflcyp008h09b1
ttcagccatagccggttcacccattttcttcttccagaactagactttagacaccctgaatccctttcatggttggacttcacgtgcgattgcggagcgaatccgacagctacaatgccgtgacggtgaggacttgcctcactttatatggacatcacgcgtctgcacattctgctgcgcaggtttcagatcttggcaggacttgcttatccttcgccggccatggatctatcaggggaaggtggtgctgctgctcaccctcacggttggggagtgactaccggagccgatgctgacctattagaggtccggatgaagcatgctccgtacgagctgacatctatgacacgatggtgctagggaggaagctgcccgttctctggatcctctgcatgccgggctgcggcg

SEQ ID NO: 349 - DNA, 272 bp, Oryza sativa
  Clone ID: uC-osflcyp008h10b1
gtcgcgtggcggttagctagtggagttaccaacccaacccgtgtccccttgtcggatccgggcgcgcgacctcgtcgccggccggccggatcgccgccgccgccgccgtagagatggacccggaagcggtgcggaggagcctcgagcccaccgccttgtccaaggaggtcgtcggccccgcctccgcgagcctgcgctacgacgccttcgccctcaccggcgtccgattcgacgcggacgatgacggtcgttctctctgttcctttgacgtc

SEQ ID NO: 350 - DNA, 253 bp, Oryza sativa
  Clone ID: uC-osflcyp008h12b1
ttcgtttagatggaggaccgctttcacagaaaaggagtattgaattcacatctgatcctctcgcttcaagcacatgggaggaggtgtcagaaaagaatacgctgatcacaccatttcagtgtaaatccatctggaggcaattcaattgcatatacagagtattctttttcactattatttgttattctataagcacacagacatatcatatatcttctttttccttcattaatctgttttttttcttttatat

SEQ ID NO: 351 - DNA, 398 bp, Oryza sativa
  Clone ID: uC-osflcyp009a01b1
gcttttatccgggactgaaggagcgcaccggggagctgctgttcacacagagtaattatgccctagctaatccacgcccttgggtgatcgcctgctgaccaatgtactcgcgcacgcgcacgccttcctgcctgttggttgaatccaaaagctagccccaccaaagtttgcaccctacgatccccgccatgttagaactactgcctgagctcgcggcgaacatgatgcatccgcgccgcaccgtgccagatgcaagcggagcgcccacgcgtattggatgctcacatgtacgactatctaggcgatgcccgcattgtgatcctgtataggttcctggcgctgtaagactgactgagcatgcagggagtgcgaactgcaccaaacactctcacagaagg

SEQ ID NO: 352 - DNA, 445 bp, Oryza sativa
  Clone ID: uC-osflcyp009a04b1
tgatttccggcacatccaggcacctgggtggcagctggggtggacatgggcaaagaaggaggtcatttggtcgatggttggagcacagaccactgagcagggcgattgcttaaagttcaagggtggcacgccccactgctgcaagaaggatcccacagttgttgatctgcttccgggcaccccatacaacatgcaaatcgctaattgctgcaaagctggagttataaatacatttaaccaggacccatcaaatgctgcttcttccttccagatcagtgtaggtcttgctgggactaccaacaagacagttaagttgcctaagaacttcactcttaaggccccaggtcctgggtacacgtgcgggcgtgctatgattgtcaggcctactaagtttttcaccggagatgggcgcagaggcacccaagctttatgacatggtatgtga

SEQ ID NO: 353 - DNA, 345 bp, Oryza sativa
  Clone ID: uC-osflcyp009a05b1
ttatgtaaggcaagaaccccagttgagagtggagatggccattttgatcaggcactaggcagtgggtaggacggtgaggagtgtgtcctgcactcctgcttgccctgacgatcgatccccatgcgtgccgaagcatctgatacttttgctgtgctgttctttaatttaccctgatacttttggatatctgaagcagtagagctcgttcactcaaacaggctagcctgttttgctttctggtaagaacttaattaactagttgagatcgacatgcatggatgcgtgaatctattgttgcatattttctaatggatagctagataagttccagctttttttttgtca

SEQ ID NO: 354 - DNA, 418 bp, Oryza sativa
  Clone ID: uC-osflcyp009a07b1
tgctagacgacctcgtcttcctcctccacctcctcgcgacctcgcattgttagatcagcctcgattcatctccaatctttcggcgccgctcccggagagagggacagcggcgcaggcggtgagcacgaggaggagcagagctaatcaaaagccctctcgccgctcgagctctcgtgcaccgtgccgccgccgccgacgccgacgctgacgccgacggcttaattcagtcttgtcggctacatctcttggcgtgctgaaattggtgggagcacgagagcggcgccaatggggacgaggccgtgcgccggcgtggcgtcagcggtggcggcggcggtggccgttctgctgctcgccgtgtcttgcttcgccgcggcggcgacgacgacgcagaagcatggcagtatgtcagggaagggcg

SEQ ID NO: 355 - DNA, 555 bp, Oryza sativa
  Clone ID: uC-osflcyp009a09b1
tcaagaaggcaagaaccccagttgagagtggagatggccattttgttcaggcactaggcagtgggtaggacggtgaggagtgtgtcctgcactcctgcttcccctgacgatcgatccccatgcgtgccgaagcatctgatacttttgctgtgctgttctttaatttaccctgatacttttggatatctgaagcagtagagctcgttcactcaaacaggctagcctgttttgctttctggtaagaacttaattaactagttgagatcgacatgcatggatgcgtgaatctattgttgcattttttctaatggatagttagatttgttccagctttttttttgtcaattctgttacatttgcagtgtcttcaacttctgcatcattcttctctattcttccttcactttctttcttgaactagaaaagcaaaccagagttctttgtccccctcttctacataaacgaaaacagcttgttgactggctccctagagctttttgtagttgatcatcgaagtagctagttctcttcactgatcaggcatcacttgtctat

SEQ ID NO: 356 - DNA, 478 bp, Oryza sativa
  Clone ID: uC-osflcyp009a11b1
tggaggtcctgcatccagctactgggacctactcagagcacacctgtccgatccgttgacaggtatactcatggatgatgcaatgattctatcgtgtgggcactcttatggaagtaatggaatgcagcatatctacagaatgaaagcttgtggcaaatgtggtcagccaattaccgaggactctattcgaccaaacttggctctccgccttgcagttcaggcatttaaacgcgaagaagagtcagctaaatctctaaaaagaagaagagagcgccttgagcaggacaaatgtggcaatgatgaaccaaatccaactgagatttctagaggtaaaggtgtccagtttccttttgctgtctttgaccgagtcataatcaagggcaacaaaaggaccccagaacgatttgtgggacgcgtagcagttgtgacagcacagtgtctaaatggatggtatgtggtgaagaccttagacaatgca

SEQ ID NO: 357 - DNA, 535 bp, Oryza sativa
  Clone ID: uC-osflcyp009b01b1
tgcctccgccgtcgccgccgcttgccccgtactgctcctcttcagcggcgatgaagggacggcaaggccagcgcgtgaggctgtacgtccgctgcaccatcctcggctacaagaggtcgaagtcgaaccagtacgagaacacgtcgctgctgcagatcgagggggtgaacaccaaggaggaggttgggtggtacgccgggaagcgcatcgcctacgtctacaaggccaagacgaagagcaacgactccaccatccgctgcatctggggcaaggtcacccgcccgcacggcaactccggcgtcgtccgcgccatgttccggtccaacctcccgcccaccttcatgggcaagaaggtccgcgtcttcatgtaccccagcagcatctaaaagcaaccaaggagtcccaatccaggtcgggatcatggccccatcctaacttaacagaattggggtggcaggaggaacttactgggatccctgggatggtttcaggcttccagttgtttgtggaaaggactggagtttttgcccaatga

SEQ ID NO: 358 - DNA, 367 bp, Oryza sativa
  Clone ID: uC-osflcyp009b02b1
ttctagatcgcgagccggcgcccgccctttacttcttctctttagcggttatgaagggccaacaactaccacacgctatagctttacgatcatccaccatgcacaactacatgacggcgtggtcaccccagcacgggaacacgactttaatacaaatctggggtgctaacaccctggatgatttgaccaagcactccgggacagggctacactactattgcgcagccactacaaaaaccctcttctttaccattcagtgaatttcaggcttgtgcaccctaaaaaacgccaactgcggcgcacagcgggccaagattcagctcaacctcaacacaatcttcatatgattgaaggaacctgtcttcat

SEQ ID NO: 359 - DNA, 455 bp, Oryza sativa
  Clone ID: uC-osflcyp009b03b1
gcgaactcagtctcccccaaatctcctttgcgtcctctcgattcctcagcaaccatgtcggcctactgcggcaagtacaaggacgagctcatcaagaacgctgcctacattggcactcctggcaagggtatccttgctgcagatgagtccactggcaccattggcaagcgctttgccagcatcaatgtcgagaacgttgaggagaaccgccgctctctccgcgagctgctcttcaccacccctggtgccctgcagcacctaagtggtgtgatcctgttcgaggagaccctgtaccagaagaccaaggacggcaagcccttcgtcgatgtcctcaaggagggtggtgtcctccctggcatcaaggttgacaagggtaccgttgaggttgccggcaccaacaaagagaccaccacccatggccactatgatcttggcaagcgttgcgccaagtacta

SEQ ID NO: 360 - DNA, 419 bp, Oryza sativa
  Clone ID: uC-osflcyp009b06b1
tcgccgccgccgccgccatgccgtcgcacaagacgttccagatcaagaagaagctggcgaagaagatgcgccagaaccgccccatcccgtactggatccgcatgcgcaccgacaacaccatcaggtacaacgcgaagcgcaggcactggcgccgcaccaagctcgggttctgagcttggggaggagaggaggacgaggcgccggacgccgctgccctgggaagaagaagaagaaggagaagctagggcttatgggttgcgtcgtgttcgtttcgaggttttgcctgtcctgaagagactatcagtagctgtgtgtatcttggagcatcataattttgctgattaaagaaccactttcttatcctgcctaaagttgtctgaattttatctcagctgcagtggattgatcagttgaactcc

SEQ ID NO: 361 - DNA, 495 bp, Oryza sativa
  Clone ID: uC-osflcyp009b07b1
tgaaaaaggctcatgaccatgctgttgacaactggactttaggaatcttgtgctatgagttcttatatgggtcaccaccttttgaagcagcagaacaggatgatacattgaggaggatagttaaagtggatttgtcgttcccctcaactccttatgtttctgcagatgctaaggatctcatttgcaagcttttggtgaaggattcaaacaagagactttctcttgatgacataatgaaacatccatggattgtgaagaatgcagacccatcagggagttgtagtgaccaaaaggctcgcacataatacctttaagaaacaaggtacattgggaagcataacgtgctaatgaaatacacaccttaccttcccagtcatcaccctagtatgctgagctaaacattaaactttatacacatttgtcaggctacattaaaacgattctgttctgttctcattatggactataataattttcttcattggtttgtgaagc

SEQ ID NO: 362 - DNA, 495 bp, Oryza sativa
  Clone ID: uC-osflcyp009b12b1
ttgacgatgaaaacgtgaaaggaggtgataattcttcgaattatactgaagatcagaagcctgcctggaggtgtttcagctaccaggagatttcagttgctaccaatgacttccatccagataacatggctgggagaggaggctatgcagaagtatacaagggtatcctatctgatggacaatgtgtaccttgtgccaatctctttgcacttggagcagctgttcaggcaggagtgttgtctggtgatgtgagcgacattgttcttcttgatgtaacaccactttctctgggtttggagacactgggtggtgtgatgaccaagattatcccaaggaacacaactttgcccacctccaagtcagaggtcttctcaaccgctgctgatggccagactagcgtggagatcaatgtccttcaaggagagagagagtttgtcagggacaacaaatctcttggtagctttcggcttgatggaattcctcctgccccacggg

SEQ ID NO: 363 - DNA, 467 bp, Oryza sativa
  Clone ID: uC-osflcyp009c01b1
tgctgtaaaccctagctctcgctcgcgcggggtgcgccgatgcggaggtggctggcggagggggtcatggagctggcggcgggggcgccggagtcgaactcctccttctgctcctccccctcgggcgcgacgccgtcgtcggggggcccgatgtggtgggtgtcggggtgccacgggacggtgtacagcctggcggtgatgctcccgtcgttggcgttcgtcgggttcctggcgtggcaggcgcgccggagcttccgccgcctcagctactgccgctcccacgtcgtcgtcgtcgcctactacgcgctcctctgggccgtcgccgtcctcaacctcctctggtgcttcctgcaagcgtggcaatgtatgcctgatagggcgttctcatggaatgtgctgtctctgtttaccaaatcagggatgttattctgggaagttagtcttatagcatttctgcttcaggaaac

SEQ ID NO: 364 - DNA, 368 bp, Oryza sativa
  Clone ID: uC-osflcyp009c02b1
tttttaagcgggtgccgcaggactggaggaagcgcctcgccggcatccgtgcccgccttgacgtcgacttcggcttccttccttgggagcttgacccctgcctccttgcctttgagccggacgaaactgggcatcttgaagcaaagaaaatatacggcatgctgttggaatcacaacccggagagtatggaacatatttggccccctgactggctcagcgggtgaacgtcaggccattgttaaagcttatgagaaggaccatgttattctcggggaggcagctcatatcatggttcagaatgctgactatgacagggcctgatcagaggaagcagatgcaaaagacttaacaacaggctccagagctg

SEQ ID NO: 365 - DNA, 542 bp, Oryza sativa
  unsure (1)..(542): unsure at all n locations
  Clone ID: uC-osflcyp009c03b1
agccgctttccccatctcctcctcccagaactagaatttcgccaccccgaatcccttccatggtaggacttccgtttgattccgggtcgaatccgtcgcctccgatgccggaacggtgaggttttccctccctttatatggacaacacgcgtttgttttttctgttgcgcaggtttcagatcttggatggacttgctcatccttcggcggccatggatctatcggcggaagctgctgctgctgctcgtcctcgcgttcggcgagtcagatctggagccgatctgacctcttagaggtccggttggggcatgctccgtacgagctggcgtggatgaagcggcggtgcgagggaggaggctggtcgtcgcctggatcctctccatcggggcctcgcgcgatgatgtctctttgtattgataattattcgatgaactttcgaaattattagatctaagagatgttgttcgagggagccgtgtgctgagatgaaggcngcaaggtaagagaacatgntacaggcgaggtgcttgtgtctgagggtc

SEQ ID NO: 366 - DNA, 549 bp, Oryza sativa
  Clone ID: uC-osflcyp009c05b1
actataggtgaaggctggttcgcccgcactgtacgtgcccgtactgcccgggtggacccacgcatgcggattgcataagcaacacaagggattaactcatcactcacttagctaattaaatcttcgaccatgtcggacaagtgcgggaactgcgactgtgctgacaagagccagtgcgtgaagaaaggtaccagctatggcgtcgtcatagttgaagccgagaagagccacttcgaggaggtcgccgccggcgaggagaacggcggctgcaagtgcggcaccagctgctcctgcaccgactgcaagtgcggcaagtgaagtcacgaagcaaccgaacactcgccgccggcgagtcacctaccttaattagtccacaataaaaaccacccatatgagtgtggtttgtgtgtgtgctgattattgctgaattaaacccgtgtgttatcgattaattaagcagctggtcgcttcggcgactatgcgtgtatcaacgtatgaatttgtgtgatgtgatgtacccgtgctattctcagtgaaattaatcaatcg

SEQ ID NO: 367 - DNA, 550 bp, Oryza sativa
  unsure (1)..(550): unsure at all n locations
  Clone ID: uC-osflcyp009c06b1
tgacatatgccctgcccatatctatgcaacatccatgtcacctccagctgttcagcaggtcatttctgcaataaaagttatccttggtgaagatggatctaacagaggggccaagaagcttgctcagattcgagagaacagcaatttcttccgttcagagcttcagaaaatgggttttgaagttcttggagacaatgactcgccggtcatgcctatcatgctttacaatcctgctaaaatacctgcattctcaagagagtgcctgaggcaacacgttgctgttgttactgttgcatttcctgctacaccactactgcttgccagagctaggatatgtatctcagcttcccactcaagggaagatcttattaaaggattggaggttatcagcaaagttggtgacctcgtgggaatcaaatacttcccagtggaacatgaaaagactgcatctgttgagaaactgaagaagcttcaatgaacacctacaaccagaagaaatatactgggtgatctangcagtgtgccatgcctcggttcggctcatgtgcct

SEQ ID NO: 368 - DNA, 567 bp, Oryza sativa
  Clone ID: uC-osflcyp009c08b1
ttctccctcgaggccgccttctccacctacggcgagatcctcgactccaagatcatcaacgacagggagacggggaggtcacgtgggtttggcttcgtcaccttctcctccgagcagtcgatgcgcgacgccatcgagggcatgaacggcaaggagctcgacggccgcaacatcaccgtcaatgaggcccagtcccgccgctccggcggcggaggcgggggctacggcggcggcggtggcggctacggcggcggtcgtggaggcggcggctacggaggaggtggcggcggcggctacgggcgccgtgagggcggctacggtggcggcggcggctacggcggcggccgtggcggcggcggcggcggctacggtggcagccgtggcggcggctacggcggcgactccggcgggaactggaggaactgattggtggggcccatcgtggccagttatccttagctatccgtgtcagaatcatcttatcatcgagtcgagtcgttatcgtgtccagtggctctctcgagtcgagaagccctctatccatccatccagtggtaggtggtcttc

SEQ ID NO: 369 - DNA, 551 bp, Oryza sativa
  Clone ID: uC-osflcyp009c09b1
tgtttcatctggaaaacaagtaggaattgatacacacgagcttaatatcatccttaaagttgattttcagggttcagttgaggccattaggcaagcaatccaagtgctgcctcaagaaaatgtctccttgaggttcctacttcaagctccgggagatgtgagtgtcagtgatgttgatctggctgttgcttcagaagggattatatttggttttaatgtcaaagctccaggatcagttaaaagctattctaagaagaaaagtgtggaaattcgtctgtacaaggtgatctatgatttgattgatgatttgcggaatgccatggaaggacttcttgaacttgctgaggaggaagtaccaattggttcagccaaagttcgtgctgtttttagtagtggcagtggcaaggtggcgggttgcatgattactactgagaaagttgttcatgactgcaatgttcgggttcttcgaaagggaaagaagttatatggtacacttgattcgttagacgggtgaagaaactgaaaggaggtggtgctggctagatgggcat

SEQ ID NO: 370 - DNA, 538 bp, Oryza sativa
  Clone ID: uC-osflcyp009c10b1
tacacaactttgcccacctccaagtcagaggtcttctcaaccgctgctgatggccagactagcgtggagatcaatgtcctccaaggagagagagagtttgtcagggacaacaaatctcttggtagctttcggcttgatggaattcctcctgccccacggggtgttccacaaatcgaagttaagtttgacatcgatgccaatggcatcctttctgtcagcgccgtagacaagggtactggaaagaagcaggacattacgataactggtgccagcacattgccgaaggatgaggtggagaagatggttgaagaagcagagaagtttgccaaggaggacaaagagaagagggacgcaatcgacaccaagaaccaggcagagtctgtcatctaccagactgagaaacaattgaaggagctcggtgacaaggtcccaggcgatgtgaagggtaaggttgaggcgaagctgactgagctcaagacgctgtgcaggtggctcgcacagacatgaagatgctctcgctgtctgaaccagaatgatg

SEQ ID NO: 371 - DNA, 557 bp, Oryza sativa
  Clone ID: uC-osflcyp009d03b1
tggtatccacaaggttttgaagcctgaaggcatatttgtatcaattacctttggacagccacatttccgtcgtcgattttttgaagcacctgggtttacatggtctgttgagtggagcacctttggtgatggcttccattatttcttctatattcttaaaaagggcaagaggttgttggattccaacggtaaccaacatacacagcctgctgctccaagcattaatatgttccatgaagagcttgagagtgaggactacatattccgaacaaatgttgatgagttgtaactggcaatttaacaagtgcatcatcggcttggtgggagttttgatgaagctacttcacatcaagagagacgtcccgtccagcatcaacttggtagatgaatgatcttggacagatgcatggaaagatcttgcttggtgcttgaccattgccctggctagggatttctgtgccagctgaattgactagaaaacaggtacccttattattgttccagattttaagtaacctttcaagaagttccttttgttgtcaacatgcattttttgt

SEQ ID NO: 372 - DNA, 188 bp, Oryza sativa
  Clone ID: uC-osflcyp009d04b1
tcgaaattcatgcgagctcgcgacgcgaaccccctacgccgcagccgcaggcggcctattgagctgctgctactacagacctccacgcgagcgtgccccggggtggaagcggaggcagcggcggctcgagcgcactctggaggcgggggagcgcgtcacgatggccgtaggcagctgcctaggcgtgg

SEQ ID NO: 373 - DNA, 84 bp, Oryza sativa
  Clone ID: uC-osflcyp009d08b1
tttgccgaatcaaccgtcaacaaggagacctttgcggtggccggatcaaccgccgataagaacacctatccagcggccgtatca

SEQ ID NO: 374 - DNA, 509 bp, Oryza sativa
  Clone ID: uC-osflcyp009d09b1
tagctagttctgctttcaagtgctgcttctcttggaggaaacaacagcaaaatataatgcaaatgacatctcaacttttagagttgaagatggctccattttctgatgcgtaacagcgtaaggaatagacatcactgacttgctatttgtcacctccatttatgtaaccgttgtctattttgatggtcttaccgacgaaggctgaacgaactatatgcaatggagagggtaaatgggtattgtatttagtccaccaccatcttcttttcttaatctagtaaattccctggtaagggggtatcactgtatttcccacaaacgccaatcagccagactgctttttgcctccaactgtgttgatctgtgctggatttcactcctcgtaatgaaggatctacatatgcaaggttagccgggctgttttaggctatatgcctgtctgtcgtgcagcatagaatatatgctaaaacaaacagacaattgtaatgaccaccgggcacattcttaag

SEQ ID NO: 375 - DNA, 325 bp, Oryza sativa
  Clone ID: uC-osflcyp009d10b1
tgcgctagacagacctcagccaatgtgaatgtgaggtagacacgtacagtacgtactagattagtacattacatactcatgtcgtgtgcagtagtgtaagcagaagcagacgcaccaaaagagacgaacactactactagtatagtattccccattggattccatccgccggccggcctgctgcctgcctgccattgatagattccatcgtcgtcgtaggatagagagtactagtttgcaattcaattcaatcccccatacccataggccataggataggagtatgggaggcggcgatggcaatgaggtgctgctgctgccggag

SEQ ID NO: 376 - DNA, 265 bp, Oryza sativa
  Clone ID: uC-osflcyp009d12b1
ttctagggagagaaaggaagagacgagaggagagagatggccactgcttatgctcccatggcgagccagctgatgaagagcagcttggtgtgctccaagccgagggggctgtctggtgcttcgctgacaaggaggccccgcttcacagtcaaggccatccagcctgagaagccaacgtaccaggtggcgcagcccatcactggctaccccttcatcggtagcctggagacgccggtgacctccagcccgatggtcgcctggttcc

SEQ ID NO: 377 - DNA, 544 bp, Oryza sativa
  Clone ID: uC-osflcyp009e01b1
tgaacaaactgtttcgggaaaacattgatttcctactggagcgctttgaaagtggggatctatgtggtgtagtggaactgcaacaactgttggatattttggagcttacgcatcagtcaatatcaaaatttcttgagttggattcttactctcttatgcttagcgagatgcaagagaacctttcgctggtttcttattctagtcgcatctcttctcagatatggaatgagatgcagacagatttcttgcccaattttatcctatgtaataccacacagcgatttgttcgatcattaaaaggaacccatcactcttctcagagatcaagcgcctctaccgggaaggcctatttctattgtggatcacatgatttgaccatggcataccagggcatttctggtttgtaccgtgacttttttgggatccctcatatgtttgcagttgttaagctttcttgttccagatcattaccctgtattatccgtgctttattggatcatatatcaagtaagataacagctatggtgccaaaaataactgcatt

SEQ ID NO: 378 - DNA, 507 bp, Oryza sativa
  Clone ID: uC-osflcyp009e02b1
gcgctcccacaccccccgccctctctctctctcgatcgccgcaatcgccgcgcctcctccgcagaaatcgccgcgcctccccgtcacggcgccgcgcctcccctgcgcgccgtctgcgccctccgcctcctccgcatcgctgcgtctcccctccgcgccttctccgccctccgcctgctccgcatcgccgcgcctcccctccgcgccgatccggtctccgccctccgcctcctccgcatcgccgtcatctgccggtcggagccgcgcgcgatcgacgcgcctcctctgcatcgccgcgagtgcgcgtcaggcgcctccccgccgcatcgccgtgcctgctccgcatccctgccctacgcgcatgctgcaccctggtccctcgcctccgcctgcgaggaggaacgcttcgccgggcgcctctgctcgccttttgcagagtattttaaagacaaatggtgtagctcgccagggactgcatttgcgtcactcgtgccgcgccgcataact

SEQ ID NO: 379 - DNA, 540 bp, Oryza sativa
  unsure (1)..(540): unsure at all n locations
  Clone ID: uC-osflcyp009e05b1
ctgacacgcctgccatgcctcccgccctcacctgcaaccccccctccttccgccccctctgcacccctgtaacccgccgccgtgccgccacaaccttcctctgccgtgtcggccctggcaagccttccaaggacaccggcgcggatgacgagccgaagaagaggtcgttcttcgccgatttcggtaagctctcggatggaaggtcgctgataccggccttcccgccggccgcggctgggtctctgttcgccggcgggagggggaggaaggacccgcagacagtgttcgtcgcgggcgccacggggcaggcgggagttcgcatcgcgcagacgctgctgcggcaggggttcgccgtgcgcgccggggtgccggacctcgcgtccgcccaggagctggcgcggctcgcctccgcgtaccggctcatttcccccaccgaggcgcgccgactcaacgcggtggagtccgatttcgaggaccccgaggcgatcgccaaggcatcggncctggcactaaggtggtgttacagtcggcgcagctgag

SEQ ID NO: 380 - DNA, 504 bp, Oryza sativa
  Clone ID: uC-osflcyp009e06b1
cttaattctaggatcttcttcaattctgctcttctggttctttgagagagtgtgcatgtgtgagagagaaattgctgattaattagcttcagcaattcttgtggtacatagtatacatagatagaaagagagagagagagagagagaaagcaagcaagctgaattgatgcttgtgtgtgcttgtgttgacatctgtatacacatgtgcacggttctttgttaaatcacttgatgaagatgggtaattaaattaagaagagagaagcatatatatacatttccagtagaattgtagctagagtgatctatagctgccggccggcgaggcgatctcgatggcggcgtactaccacggcggcgccggcacggacatccagtccggcaccgacggcctgcagacgctgtacctcatgaacccgagctacgccggctacggcgacgcctgcgtcgacgacgtcgtgcccggtgcggcggccaacatgatgctcctgaactcggcggtga

SEQ ID NO: 381 - DNA, 431 bp, Oryza sativa
  Clone ID: uC-osflcyp009e10b1
tgacaccgcggtctcctcccctgctttcgtgtggctgcctgtgccgcgaggagccgtagccgtggtatgatgcaacgccgactgaaagggaaggaggtgctaagctgtgtgagatctagacattctaggagctaaagggaggagctttcacatcgtgccccaggccatggaccagtctatagctaggaatacgatggtcaccgagtgcacggtcagcatgaacacacagctcaatgtggacctaaagggataacacgcgtgccactctgttttagtgtacacagacctacacaactctgttcttatgggattttccaaatggttacaataaatcatctatgtagtgagtgatcacccaatgtagctaatgcatgtccagtacatgctgatagtctagtggcagttagctatgatggtcacaccatggtcag

SEQ ID NO: 382 - DNA, 559 bp, Oryza sativa
  Clone ID: uC-osflcyp009e11b1
ccgcccttttttttttctaaagataggatgtcctaaccatccaacagctattccatccccattgtccattgagcctgctctgaataatcccccctttgccggattattaccaatataatcataaaaggctaatttttcgggaattttagaccaagcttctgataaactgagattttcggctaacccatcactaactcttcgatatatttcttgctgaaagtatccctgatcccactgataacgagtaggcccaaacaattcaattggggtagttgctgacccataccacatagttccggcaactacgaaagctgcaaaaaaaaacagcagcgatactactggaaagtacagtttcaatattgcccatacgtaatcctttgatagacgttgaggtggacggacactaagatggaataggcccgctaatatgcccaatgtacccgcagcaatatgatgagaagctattccccccggaacagaaggatcaaaaccttctgcaccccacgcctgatttacagcttgtacttgtccagttagtccataaggatcagacacccat

SEQ ID NO: 383 - DNA, 560 bp, Oryza sativa
  Clone ID: uC-osflcyp009f02b1
tgttgaccaaactcgctgtacttctccttaatcaattatgttacaaagaaatatggtgtggacacatcaagttgccagtcctgaaaaccaagttcaacctgaaaatttctatcatggaggtgctgggagcaacttatctaacctgagtgtgcaagttgctgttggagttccaggaaatactgatttccggagtcactatgagagcattaatcttcagcaccagcatgttcagaatccatacccacatgtgggtgttgcttcaagttctgtgttcccatctactatgtacaacccctgcatatcaacaacagcagtggacagatatgttcctcctattcaaagttttggattgggcaatccactactactgcctttatatcatcaacttgctcaaggatccatggatgagaacggcagcagtggcaatttttgtgacagcgtcagggaatttatcaagaggaaaaatgcattacttgtgggtggccatcattttgttaataagtttgcaagctcaagctcatctgcttatgtgcctccaaatcctttacataggtcatgga

SEQ ID NO: 384 - DNA, 537 bp, Oryza sativa
  Clone ID: uC-osflcyp009f05b1
ttccaaatgctgtacctgtgaatgctcacccgtacagatactctccagctcaaaaggatgagactaagcgtcaggtatctgatatgttagcagcaggactaatctgcccaagttgtagcccctttgcttctcctgtgctgttagttaagaaaaaggacaattcttggcgtttttgtgtggattaccgacggttgaattctgttactgtcaaaaacaagtttcctctacccattgtggatgagttgcttgatgagttacctggcacaaaatatttttccaaattggaccttcgcagtggttatcatcagattagaatgttggaagctaatgagtttaaagctgctctcaagacacatgatggacatttccaattgcgggtcatgccttttggtctgtccaatgccccagctacttttcaatatctcatgaattccatctttgctcttttttgcgcaggtttgttttagtcttcatggatgacattcttgtttacagtaaatcttgggcagagcatcttcaccatctaagatgtgtttt

SEQ ID NO: 385 - DNA, 511 bp, Oryza sativa
  Clone ID: uC-osflcyp009f06b1
tctgatcacggcacgcgcttgtggctgcacgtatgcatatcccagcggcagagcttgcgtcctctgccttcaaggccgacacgttgccctcagcctcccgcaagctgatggccgttagtgacgtgccgctagcgccggtgtgcccggtgcggttcgacaagatgaaggggcccgccatcgagctgggaaagaagtgcaagacgacaggggtgaaggtgtgctgtgaggcgttcaagacattcgcatgcccgcacaacaagctgatcaatgacgtcaacaacggatgcgcggacgaaatgttctacaccatccacacctacggccaattgctgccgggaaccatcttcaagaaatgcctcgagggaccgcatgggatgaagtgttgaattcgatcgtgctgattcgacttgctcgatcgatatcgctccgttgttgctagcctccggcctgatctatactacctataacgatgaatgtccctttcgtcatcttgcaatgtaactaaacttac

SEQ ID NO: 386 - DNA, 511 bp, Oryza sativa
  Clone ID: uC-osflcyp009f07b1
tgccaggaaaaaacccctacattcctccctcttctttgccgcggcgccgacatcgatccatccctaacaaataacacgatgtcgcgcgccacggtcgccatcctgttctacatgctcacagccgccgccgccatcagcgcggcggcgcaggccccagcggagtcgccatcgaagagcacggcagctgccacccctgcaaaggcacccaccgtcgcatcggcaccgaggaaggccggaccagctgccgcgccgacgaccaccgtggctacctccgcgcctgctggtggcgacgaggtgtccatcccccctacgccgttcgccaccgtggtgtctcccgtcgccgatggacctgccgatgcggctgacgccgatttctccggtgccggtgctctcaagaggtgcgctgccgttgccggtgtcgcggctgccattgccaccgtcaccttctactaagatggccgatgcagagatgtggagtgtcatggtgagctgtagggtggacagcaggagg

SEQ ID NO: 387 - DNA, 577 bp, Oryza sativa
  unsure (1)..(577): unsure at all n locations
  Clone ID: uC-osflcyp009f09b1
taatttggaatgttttggaagctgagcgtccagatttaaggcagttgcatgggaagtctcttgttgaagtaaatagaagtttccttgaaaagcacagtgcttctttgacgcacagagcagcagcagctgaaatgatgtacctcttggaaccagataagaagcttgaggcaatcaaattaattgaagattcagtaaacagcacagcatcaggaaacagtgtgcttggtcctgtgaatgaatggaaaattcaagactgtattgatgttcacaaattgctggagacaatctttggtgaccaggatgtggcaaacagttggaaggcacgatgcgctgaatatttcccatactcaacctactttgaaggcattaagagtgctagtgctgcctattgttctgttgccaatagtcttgaggattcatcagaaaatggaattgtagcaaatgcgcaaatgaagtcagcagacggagaaacatgcactgtgaatggaactgtgcatattgtggatgaactgagcaatctaagcattaggtaatgcgccataagcanggtacgttgttacagctggaacagaacaca

SEQ ID NO: 388 - DNA, 535 bp, Oryza sativa
  Clone ID: uC-osflcyp009f12b1
tgttctcactactctccttcctctccccaccgtgtgacaccacaccacacaacaccaccaccgccgccatggccgccaccgaccgccgcctgctgttcctcctggccgcctccctcgccgtcgcggcggtgagctcccacaacattacggacatgctcgacggctacccggagtactcgctgtacaacagctacctgtgccagaccaaggtgtgcgacgagatcaacagccggagcacggtcacctgcctcgtgctcaccaacggcgccatgtcctccctcgtctgcaacctctccctcgccgacatcaagaacgcgctccgcctcctcaccctcctcgactactacgacaccaagaagctgcactccctcagcgacggctccgagctcaccaccacgctgtaccagaccaccggcgacgccttcggtaacatgggccacgtcaacatcaccaacctgcgcggcggcaaggttgggttcggctccgtcgcgcccggctccaagttccaggccacctacaccaagtccgtcaagca

SEQ ID NO: 389 - DNA, 494 bp, Oryza sativa
  Clone ID: uC-osflcyp009g01b1
aggatagggagcatgatctccatgcccgtgaggacagagaccgtgattaccgtcgttcaagctattcaagtaggaatgttgacagacaaggccgtgaaaggagggacagggattctgatcgacatggacgttcgagtgcccgcaggagcaggagcaggagtccaaaccgtggcagaaccgaaggtgaaaatcaccgctctagcccatttggtagaccaccagagccatccaacttggcaaaattgaaggatttatatggtgacgcgacaaacacaaaggatgatacaggtgatgataaagctcgcagggattctggaactgaagaggtaatcagattgggaggtgcaaggtggaggtgaatgccaaagggcacatgaaagacatccacccctatttgttcttgttaacagcaatataacagccagagatatttgctatccccagtgctgcattcccagggacactcagaagaggaatgagctttcatttggtaa

SEQ ID NO: 390 - DNA, 508 bp, Oryza sativa
  Clone ID: uC-osflcyp009g02b1
gcttttcgcgcgcggcggcgaaggccgtcgtggagagcctcccgaccgtggtcgtcgacgcggcccgcggcgacacgcagtgcgcggtgttgcaggacggcatggaggccggcgagcgggccaggaggctgccctgcgcgcacctgtaccacgacggctgcatcctgccgtggctcgccatccgcaacacgtgcccgctgtgccgccatgagctgcccaccgatgaccccgagtacgagaactggaaggcgaggcgagcagccgccggcggcaatggcgatggcgacaggtacggcatcattaggcaactttcaatgattgattgaatattaataattaaaagaggaagagagattaatttgatattcaggagttaggcggcccaaaaaaggatctttttgatcgagaggggaagggaggggatcgaatcaatgtgaaattgtggcattttttttttggtacagagtgatgataatacagtgcattttcaagtcgattatggtagagt

SEQ ID NO: 391 - DNA, 435 bp, Oryza sativa
  Clone ID: uC-osflcyp009g03b1
taaggcgagctctggaggaatggagatggcggtggagagcggcgagaacggcggctgcggctgcaacacctgcaagtgtggcaccagctgcagcggctgctcctgctgctcctgcaactgaatctatcgtcgtcgtcgcccggctgcatgaggatttatcgtatggatgctgctactgtcgatcagagctttgatcgaggccttaatttgcttgcattagtacccagcttatatgtaggcaggccttgccttttgctctgacgcctaaataaaaccgtcgtcgtcgttgtcagtgtgtgcgtgtgtcgatcaatgttggatggatccctagctagcttggatggatcatctatcattatggtgatctcatcatgtactcctgctccatctgctcatgcgtgccaggcttcttaatataatctacctttgctttca

SEQ ID NO: 392 - DNA, 480 bp, Oryza sativa
  Clone ID: uC-osflcyp009g04b1
tggttgaggagcttgagcttggagagagacaacaatggcggctcaggctcttctctctgggaggcagctgctggggaggccattgcaatcttcagtctccaggtcttcttcctccaggaaggcacccttcatggtcagggcagaggccactccccctgccaagcaaggtgctgacaggcagctgtggttcgcatccaagcagtccctgagctacctggatggcacgcttccgggagacttcgggttcgacccgctggggctatcggacccggaggggaccggtgggttcatcgagccacggtggctggcctacggcgaggtgttcaacggccggacggcgatgatgggcgtcgtcggcatggtcgccccggagctcctcggcaagctgggcctcgttcccgccgagacggcgatcccgtggttccagaccggcgtgatcccccccgcgggcacctacacctactgggccgacccttacac

SEQ ID NO: 393 - DNA, 542 bp, Oryza sativa
  Clone ID: uC-osflcyp009g06b1
ttccatatctccaccattagaccggcttaaacgcccccgcggtggtcttcctccccgacgcaagcagacgagcccacggccgccgacgcctgccgccgccggacttcgccggaatttcgccattctgatataaattagtgcattgcatcagaaaaatggttgtggggttaataaatgctaaccctgtagtttatgagaaaaaagagaggcgttctcggcaggcaccagaaaccacagatgaaaatgcggcagaggctattgaccagctagaaatatttgatcatattagagacataaaggatccagagcacccatactcactcgaagagcttaatgttgtaactgaggattcagttgaaatcaatgatgaacttagtcatgtcagggttacttttaccccaacagtggagcgttgcagtatggcgaccgtcattggactttgcctgcgtgtgaaacttatgcggagtcttccccctcgtacaaggtggacataagggtggcgcctggatcacatgcaactgaaactgcagtgaacaagcaac

SEQ ID NO: 394 - DNA, 274 bp, Oryza sativa
  Clone ID: uC-osflcyp009g07b1
ttgcgcatcaggcggcgtggagggcggactggtaggcggtgccgggccgggggtggttcggcggagcggatggcggcgccggggccgggcggcaggtgtcggcggcgcaggcagtgggtgtcggcagcgcgggcgctgtctcctggcggcgcggacggtgactccaggctaccccttcctcgtaccccatatctcggaaaagaggattataaggtaaaagcacacacaaatctaacaccactacagtgataaacctcataaaccctaccaccac

SEQ ID NO: 395 - DNA, 436 bp, Oryza sativa
  Clone ID: uC-osflcyp009g08b1
ttggggcaaggaggccttccttacctgaaggaggggacggagttgaggaagaggtcgatccactggatctcgacgggggtggcctttcgcgggttgtcggaggcgaagcggtaggggatggtgcaggccctgtacgtgctctccaccggcgcctgcagcagcgggaacggcaccgacggcgacgagctctccatgtgctccggcttactagtcagatcgctcctcctgctcgtcggcggcggcggctgggattcgtgaggtgattaggtaaccgcctaaacttggggcgccgtgagatccggcggtgaagtggttattctgcacgcgaggaagacggaggagaaggcgaaggggaagcaacctgccgctcgccacagatgcatattctgctcacgtaacatgggctatagaggccggaatggcctaatgcctggcc

SEQ ID NO: 396 - DNA, 484 bp, Oryza sativa
  Clone ID: uC-osflcyp009g09b1
tgttcttgggtgtgactgcaactgtcaccaattgggatgctgagggtacaagctgcagctttgtattggaggacaatcctcttgtagactttgttgaacttcctgatacttgccaaggtcttcagtactgcaatgtgctaagtggagttattaggggtgcactggaaatggtgtccatgaagaccgaggttacatgggtccgtgatatgcttcgtggggatgatgcctacgagatgcgagtgaagcttaccaagcaagtcccagaggaatacccctacaaggatgatgactgacttgacaatttcgtgggtagtttctcagttctcacatgctgcctgtttgttcgtctggatttcccttcttttctttcctatgtgactctggttctggatcgacttggctggacgctacatgagatagctgtgcattatattctacacttgaccttgtcacggcagcatcaagtaggtatggaattaattca

SEQ ID NO: 397 - DNA, 467 bp, Oryza sativa
  Clone ID: uC-osflcyp009g11b1
gtggtggccacacattctcgaagaaggagaagaaggagaggagcagccatggcgtcgtcggtggcagcggcggcgagcacgttcctggggacgaggctggcggacccggcgccgcagagcgggaggatcgtggcgaggttcgggttcggcggcgggaagaaggcggcggcgaagaaggcggcgaggccgtcggcgccgacgacggacaggccgctgtggttccccggcgcggtggcgccggactacctggacgggtcgctcgtcggcgactacggcttcgacccgttcggcctcgggaagccggcggagtacctgcagttcgagctggactcgctggaccagaacctggccaagaacaacgccggcgagatcatcggcacccggttcgagaccggcgaggtgaagtccaccccgttccagccctacaccgaggtgttcggtcttcagcgcttccgcgagtgcgagct

SEQ ID NO: 398 - DNA, 401 bp, Oryza sativa
  Clone ID: uC-osflcyp009h02b1
gctctctccccagcagcagcagcagcagcagctgagcttgaagcagcagagcgaggtagacatggccgccgccaccatggccctctcgtgcccggcgctggccggcaaggccgccgcgaaggtgttcggcgaggggcgcatcaccatgcgcaagtcggcggcgaagcccaagcccgacgcgtcggggagcccgtggtacggcgcctaccgcgtgctctacctcggcccgctctccggcgagccgccgagctacctgaccggcgagttccccggcgactacggatgggacaccgaggggctctccgacgacccggagacgtttggcaagaaccgggagctggaggtgatccactccaggtgggcgatgctcagcccgctgggctgcgagttcccagagctcc

SEQ ID NO: 399 - DNA, 464 bp, Oryza sativa
  Clone ID: uC-osflcyp009h03b1
gctgttttaccaccaccgccgcgccagatgtggaagacggacggggtagagttggggtctcgcggtgagccgattcctctctagtggtcgcgcctggtgtgttcgccgacgacgccggcgtcgcgtcagccatgggtgggctcgaggagatcaagaatgaggccgttgatctggagaacataccgatcgaggaggtgtccgagcagctgaaatgtacgcgcgaggggctctcctccgaggaggggaaccggcgtatcgagatgttcggccccaacaagctcgaggagaagaaggagagcaagatactcaagttcttggggttcatgtggaacccgctgtcgtgggtcatggagatggccgccatcatggccatcgcgctggccaacggcggcggcaagccaccggactgagaggactacgtcggtatcattgtcctgctggttatcaactccaccatctgcttc

SEQ ID NO: 400 - DNA, 525 bp, Oryza sativa
  Clone ID: uC-osflcyp009h05b1
ttcttgagcagcagcatagcaaagattaagaggagatgcttaatcttcacaccattaggatgtccattccttcgctacacagatcctccccataccgatgtgcgctgctaaagaggaagagatcttgtatccgtgcctgcagctctgaagatgatggatccgatgcttcgtcgtcgcttggcggagacaaacgccagcaggaggtccttgcgaagatcgcaatgcttcaggcgcagaaggtgcgcatcacaagcttcttggacgagcgctctgcttacctgaccaagtttgcgaaggatgcggacaccgagttcgatctgattggccagaacgccatgaaagagcttgatgaagttggggaccagataatggagaggctggacagcaagatgcaggcctttgaggagactgctgaagttaaaggcaggagatagaaatgaacgagagggtgcttgaagacttcgaagattggattgagaaggagaaaaatgaaggtatgttcttcaaaagccttgggaaggtgga

SEQ ID NO: 401 - DNA, 563 bp, Oryza sativa
  Clone ID: uC-osflcyp009h06b1
ttggttctgctcatactggtccggctttaacccctgctgaagttcttatagccattcatgatattaatcctgaaaaggatagagttgccctgaagaaggtcactgatgcttgcacagcttgctttgaacagcgcacggtatttactcagcaagttttggagaagtcactgaataaattggttgacaatgtaccaattccacttcttttcatgagaacagttattcaagcacttgatgctttcccagctttggttgattttgtcatggaaatactctccaggcttgttaataagcagatatggaaaatgccaaagctgtgggttgggttcttaaaattggcatatcagactcagccacgctcgtttgatgttattttgcagttacctccaccccagcttgaaatagctctgaataagtaccccaatctacgaactcctctttgttcctttgttaatcagcggaacatgcacagcatcttgcccagacagattttgaaagttctgggcttcaatcatgaacccgaccaggcaccaattccatttgtgcctgctgcaatgcaaacg

SEQ ID NO: 402 - DNA, 494 bp, Oryza sativa
  Clone ID: uC-osflcyp009h07b1
tctgcttccgccgcatccatccctgtttcccatgttagacccgcccatggaccggttctagcgttggtatggagagcttccgtgatgatcagcgcgctggtcctcaatccgagcaacactctgatcatgtgtctgattctgctgaggatgcaatatctgatgaggatgttcttgcaccaacaagactgtcattagcttgtgctgcttcaaaagaaagagagaaggaaaacaaaatggtggtgccagatgaatcaaccatctgggatgaagttctggaagaagccgatgagctagcctatgtgcacaaagttcctcctagtatatcattcctatctgctggaacaggcaaaaggagaaaaggtgaacacaggctcaaattctcaatacgtggatccagttctgtttcactgaatgtgaagactgaaaacccatacattggggagcaagaagtttcatcagtaatgcccacatacagagctgctgaaaccatgatg

SEQ ID NO: 403 - DNA, 511 bp, Oryza sativa
  Clone ID: uC-osflcyp009h08b1
tctcttgtttagggtttccctcagccgccgccgccgcatccacgctcagcagccatggcggtggtcgagcagccgcagcagcaggtggtgaagctcttcaactgctggtccttcgaagacgttcaggtgaacgacatatccctcgccgactacctcgcggtgtcctcgacgaagcacgccacctacctgccgcacacggttggccgctactcggcgaagcgcttccgcaaggcgcagtgccccctcgtggagcgcctcaccaactccctcatgatgcacggccgcaacaacggcaagaagatcatggctgtccgcatcgtcaagcacgccatggagatcatgcacctgctcaccgacgccaaccccatccaggtcatcgtagatgccatcatcaacagcggcccgcgtgaggacgcaacccgtatcggctctgctggcgctgtgaggaggcaggctgtggatatctctcccttgaggagggtcaaccaggcaatctacctgctcaccactg

SEQ ID NO: 404 - DNA, 498 bp, Oryza sativa
  Clone ID: uC-osflcyp009h11b1
tggcctcctgtgccgctgcacatatatatagctcccaccaccacgagtaatctaatagaataaatcatgggaccagcccacggccacctggtcctcctcgtcgccgcggtggcgttgctgtcagctggcttcctcccgcacgctgtggcgaagaagggcggcgccgtgccaccggcggttgctgacatatgctctcgcactccattcccagacacgtgcaggagcaccgtcgggcggcacgcgtccaagtacccggtgatcgacgtcgtggctgtgctcaacatgcaggtggacgcgttctccaagcgcacggcgcatgcgagggagcgcgtgaccaaggtgtcccgcggcgcacagcctgagcagacgcaggcgctgagcttctgcgacaccatgtacatgaacacccaggacaccatcggcgccgaggagcgtgcgatcaccttcagagacaaggctacggcgaagatcatgctgcagctcgctgggcaggacttt

SEQ ID NO: 405 - DNA, 506 bp, Oryza sativa
  Clone ID: uC-osflcyp009h12b1
ttgcttaaatataatgctggattgagcttcagtaatgatgatcttatcgcgtcattgaacctgaacaacaagggagatagtctcactgcatcttattaccacattgtgaaccattcggccacagctgttggagctgagctgacccacagcttctcgagcaacgagaactccctcaccttcggtacccagcacactctcgacccgcttaccgtcgtgaaggcccgcttcaacaattccggcaaggccagcgcgctgctccagcacgagtggaggccaaagtctgtgtggaccatctcagcataagttgacaccaaggccattgacaagagctcaaaggtcggcattgcggtggccctcaagccttgatttttctcagggtgtacttacatttcaaagatgaaattgagatgagttgaaaaacattttggcgcatgcgcatcttttgggtgttgcaagctattaaaattccagaactgccatggttaatttgaggattttttttttct

SEQ ID NO: 406 - DNA, 340 bp, Oryza sativa
  Clone ID: uC-osflcyp010a01b1
gtttatttctggactctaaagcccggactatgtgttggttggagaccttgggccgaagaacccgaagttaattggggcatcacgcgacatacgcggtccccgtatgataggaacgcgagatagaacattgggcctggactaccctgggatctcggttatcaatgctcctacgacatggcagagcatgctggaacaggagctgatggcatagaacgtgtattccacttggtagaacgcggacccggatgcatactcgtggggtgagctccttgctggtggcagggatccgatgcacttgagggggatcacacctgccaacgtgtttgccacagaggctact

SEQ ID NO: 407 - DNA, 398 bp, Oryza sativa
  Clone ID: uC-osflcyp010a02b1
ttcttgttcttgttcagtcagaccccattgcatgcagtataacaagcaggctttacaaaacaaccgcggcgatcatgttaaacacagtgctgtcaacctgcagactaagggattaacagacgattgaccaggaagatgaattgcattgtgggtaggggagcaaagatcagctccctaccctaccattgagtgatatatgcatatggcatacatcaactatctttacagtacatgagtggcagatggggtgcagcttgtggtgggcttgctcgctgctcacatgaagaccatggtgctatacaaggtctggccgttcatgaatgggcctccgttcaagagttatggggaatatttgggcggtgatgaccaccatggtggcctcttatgtagggcatgtg

SEQ ID NO: 408 - DNA, 502 bp, Oryza sativa
  Clone ID: uC-osflcyp010a03b1
ttgtgagagagagagagagagagagagacgcagctctgttcttcttctcctctctggaaatttctggatctcgcgagagatcggcaggacgatggtgggtgggcgcgcgctcctgccgctgcttctgctctccgcgctgctcgtccagatccgcgcctccgatccgctgttctatgagccgttcgacgagagcttcgaggggaggtgggttctctccgggaaggacgactacaaaggtgtatggaagcacgaaaagagtgatggacatgaagactatggcctgcttgttagtgagaaggccaagaaatatgccataatcaaggagcttgatgagcctgttactttgaaggatgggactgttgtcctgcagtttgaagtgaggcttcagaatggcctcgagtgtggaggtgcatatcttaagtacattcgtcctcaggatgctgcatgggatgccaaggagtttgataatgagactccctacactattatgtttggtcctgac

SEQ ID NO: 409 - DNA, 309 bp, Oryza sativa
  Clone ID: uC-osflcyp010a04b1
acggccgccgctgtccgcgccctcgccggctgcaacctccgccatcgtccgcactgtcgccggccacgcaagcaccggcctcgaccttcgtcggccgcgccgtcacccgccgcaaccgccgctgccgtccgcgccctctgctgtcgtccgcgccatcgccggccgagaccgccaccgtcggctgcgccatcgcctccctttcctcgcagcggctccttctcgtcctaatctgcacgcccacgccgtcgtcctcgatctaccgacacagcgccgccgtcgtcagcatcctagtgcagcgagggaggggga

SEQ ID NO: 410 - DNA, 448 bp, Oryza sativa
  Clone ID: uC-osflcyp010a06b1
ttgaggatgatttcaaatttgatattatgggcacagaagattctaattctcaacttccagacatgtcgaactttgtccaaaaggatgataacaacaataagtttacattagatgggatctctaataccgctttgtatggtgcttcttcatctggatcccatggcaatatgtatccagacactgcactaccagatatgccgatggatgacactgttgacaaaagtttcggaaagcgccttgccagcatgctgggttcaattccagctccacccgcaatggcttcagagttcccgccgagcacaggaaaatctgttgtcccacttagtgctgtcaacccgagtagctctattcgtgtcactgcaggcattatccaactcggtggtatcacttatactggtagcaccgagcacctgcagaagaatgagatttcatttgctctctctttact

SEQ ID NO: 411 - DNA, 501 bp, Oryza sativa
  Clone ID: uC-osflcyp010a07b1
ggatcagagtcctgtaactattgcagatagagaagcggaagaagcaatggtgtcagtcattctgaagagcttcccttcccatgccgtttttggtgaggaaaatggttggagatgcgtggaaaagtctgctgattatgtttgggttttggaccccatagatggaacaaaaagcttcataactggcaagcctctgtttggtacgcttatttcactcttgtacaaggggaagccggttattggcatcattgatcagccaatcttgagagaaagatgggttggggttgatgggatgaaaacaaccttaaatggacaagaaatatctgttcgcccttgcaatgtcctggcacaagcttacttatatacaacaagtccacatttgtttgcaggagaagctgaagatgcatttattcgtgtacgggataaggtcaaagtcccactgtatggttgcgattgctatgcctatgctcttcttgctctggttttgagatcttgttgtgaatc

SEQ ID NO: 412 - DNA, 502 bp, Oryza sativa
  Clone ID: uC-osflcyp010a08b1
ttgcaagccatattctacgcacagacaagagatctgcattttcactgtgctttgcacagaaaaaggatggctgagacgtacaccgtgcaggtgggtgaagcaactccggccgacggcggcaagccgtcggtcgatccattctaccggaggatctactacaaggatggcctcatgaatctccctgaagatatcctgtccgcttgggacttcttcagtggagcaatcaagcaggaccccaagaacatgatgctgggccagcgcatagcttaagatggcatggctggtgactatgtgtggcttaacatatgaagaactgtaccagatggtcatataagattggatcagccatcataagctcacgtgtcacgccgggtggtcactgtggaatatatggatcatactgtccagaatgggttatggctatgcaggcttgcaacagccaaggaatatgctatgttccactgtctgacacccttagtgcaaatgcagttgaatgcataat

SEQ ID NO: 413 - DNA, 502 bp, Oryza sativa
  Clone ID: uC-osflcyp010a09b1
tccatggattactatgggaagcgcatcgctacagcctcttctgataacacaataaagatcattggtgtaagtggcaactctcaccagcagcttgctactctgagtggacatcagggccctgtctggcaagttgcatgggctcatcctaagtatggttccttgctggcatcctgcagctatgatgggagggttatcatatggaaggaagggagcaagcctgatgaatgggcgcaggcgcacactttcattgagcacaagtcctctgtcaattccattgcttgggcacctcatgagcttgggctgtgcttggcttgtggctcatctgatggcaacatttcagtcttcactgctcgttctgatggtgggtgggacacaacacgcatcgatcaggctcacccagtgggtgtcacctctgtttcttgggctcctgcaatggcgccgggtgctctaatcaatacagggccttccggtcagtttgaatatgttcagaaacttgcctctg

SEQ ID NO: 414 - DNA, 525 bp, Oryza sativa
  Clone ID: uC-osflcyp010a10b1
tatgccagagggaagtcaaggtcgccatcaccttctgcccgtagatcgaaatctcggtcaagatcacctatcaagtaccgccggagcaggcggtctagatcatactctccgccggttagacacacacgagggcgtagatcacgatcaccatcaagatcttaccactcaaagtatggtagtgatcgatcttatcgggatgatagagacaagtatggcaggtctgggagaagagagagcgaccgatctcgtgaccactattcatctagctcaagaagaaacagaagtagaagtataagtccaaggcataagaagtcctccagatctgattctcggtcacccaagcgacacagagaagaaagtttaagcccttcgaaatcacggaggtcagctcgagctggttcaaggtcaccaggacagcacataggaagcaaattgtcgccaactcgtgaccatcattcttctcgccgtagtaggcgttctagatccagatctcaagagaagaaatcgcacagtgattaaaaggac

SEQ ID NO: 415 - DNA, 492 bp, Oryza sativa
  Clone ID: uC-osflcyp010a11b1
atcgcttcccccctccacccgtctcctccgtctccggcgccggcgccggcgagctcgccccccgcgattcgtgccctccgatcagaggcgaggcgggagaagagatggggctcacgttcaccaagctgttcagccggctcttcgccaagaaggagatgcggatcctgatggtgggtcttgacgcggccggaaagaccacaatcctctacaagctcaagctcggcgagatcgtcaccaccatccccaccatcggattcaatgttgaaaccgtggagtacaagaacatcagcttcaccgtctgggatgtggggggtcaggacaagatcaggcctctgtggaggcattatttccagaacacccagggtctcatctttgttgtggacagcaatgatagggaccgtgttgtcgaagccagggatgagctccacaggatgctgaacgaggatgagctacgtgatgctgtgctgcttgtctctgctaacaagcaagatc

SEQ ID NO: 416 - DNA, 507 bp, Oryza sativa
  Clone ID: uC-osflcyp010a12b1
attcaatgatagaagtagtaaaggtgacatcgaactgtatctctgcttaaacaatttattcatgtatacatcattacaaagtatgtttatttcatcgactattgggagtaaaaaacatgctcgattctattcaatccacaagcagaagcagatgatacatcatttttcccacaacaccagccatctcaagatgtcttgcgggtcagcctagacatcatatgatcagatctctgctcactgtaaggaagatatttcccatcaaatgtgaccaccacgcgatcttttccatcagcaccttgtaccttgtcaaccgaacagtagaagtctatagctgacatgattccatcaccaaactcctcattgataatttccttgatgctctctccaaaatgcataacagcttcattcaatctgtagatggcgggctcgtggacgatgtccgtgtggtaggagcggaacggcggctccatcatgagcgcgacgaggtcgtctgtgagccccggcacg

SEQ ID NO: 417 - DNA, 460 bp, Oryza sativa
  Clone ID: uC-osflcyp010b02b1
ggttcagccatggcgtcgtcggtggcagcggcggcgagcacgttcctggggacgaggctggcggacccggcgccgcagagcgggaggatcgtggcgaggttcgggttcggcggcgggaagaaggcggcggcgaagaaggcggtgaggccgtcggcgccgactacggacaggccgctgtggttccccggcgcggtggcgccggactacctggacgggtcgctcgtcggcgactacggcttcgacccgttcggcctcgggaagccggcggagtacctgcagttcgagctggactcgctggaccagaacctggccaagaacaacgccggcgagatcatcggcacccggttcgagaccggcgaggtgaagtccaccccgttccagccctacaccgaggtgttcggccttcagcgcttccgcgagtgcgagctcatccacggccgctgggccatgctcgccaccc

SEQ ID NO: 418 - DNA, 499 bp, Oryza sativa
  unsure (1)..(499): unsure at all n locations
  Clone ID: uC-osflcyp010b03b1
ttcctcctcctcctcctccgccgccgcctccctcctcccccacctccactctccactccaatggcgactcacacgcagatcagcaagaagcgcaagttcgtggcggatggggtgttcttcgcggagctgaacgagatgctgacgcgcgagctcgcggaggacggctactccggcgtcgaggtccgcgtcacccccatgcgcaccgagatcatcatccgcgccacccgcacccagaacgtcctcggcgagaaggggaggaggatccgcgagctgacgtccgtggtgcagaagcggttcaacttcccggagaatggcgtcgagctctacgccgagaaggtgaacaaccgcggcctctgcgccatcgcccaggccgagtcgctccgctacaagctcctcggtggcctcgccgtcagaagggcgtgctatggtgtgctcaggtttgttatggagagtggtgctaagggctgtgaggttattgtgagtgggaagcttanggctc

SEQ ID NO: 419 - DNA, 445 bp, Oryza sativa
  Clone ID: uC-osflcyp010b04b1
tttttgagtgggctgccgcagggatgctgcatcggagtgaaggggctgtacaacgccggctgcaccaccggcgaccgccaggcaggactgccgctgcctcaagagcctgggcggcagcattaagtggctgaagctcgggaccgtcggcggcgtccccggaaagtgcagcatcatcgttggctttctcattagactctcgaccgactgcaacaaggtgaggtaaatcaatcctgcttggatcgatcgatcgagcttaacatgctagctcaataggagatgatcagctagtaaataagcacgtgcttgctacagcatatatgaacaaagtaattaaaatgacggggtgggcagacatgcaatgctgcaggtcttctgtgtatcagctgtatactgtatgttgcacgctgcctgtgtgcatgatctatcgtaattttcgtcagcatgt

SEQ ID NO: 420 - DNA, 467 bp, Oryza sativa
  Clone ID: uC-osflcyp010b05b1
ttgctcgcgctggtggctgcacgtatgcatatcccagcggcagagcttgcgtcctctgccttcaaggccgacacgttgccctcagcctcccgcaagctgatggccgttagtgacgtgccgatagcgccggtgtgcccggtgcggttcgacaagatgaaggggcccgccatcgagctgggaaagaagtgcaagacgacaggggtgaaggtgtgctgtgaggcgttcaagacattcgcatgcccgcacaacaagctgatcaatgacgtcaacaacggatgcgcggacgaaatgttgtacaccatccacacctacggtcaattgctgccgggaaccatcttcaagaaatgcctcgagggaccgcatgggatgaagtgatgaattcgatcgtgctgattcgacttgctcgatcgatatcgctccgttgttgataggcctacgcctgatctatactacctataacgatgaat

SEQ ID NO: 421 - DNA, 433 bp, Oryza sativa
  unsure (1)..(433): unsure at all n locations
  Clone ID: uC-osflcyp010b06b1
tcagaaatggggttactggctttcaagccactggaactgaaggaagccatcctgatcaaacaagtgatcaaatgggaggagccagcggaactatgaatcaatgcatccatccaacacttcctgtggatccaaaattcgacggcaatgccgcagcacagccctttcctcacaactatgcagcctttgcaccaatgatgcaatgccactgcaaccaagatgcctacagatcttttgccaatatgtcatccaccttctccagcatgcttgtctccacattgttgtcaaaccctgcaatccatgcagctgccaggcttgcagcatcgtactggcctacagtagacggcaatactcctgatccaaatcaagaaaatctttctgagagtgctcaaggaagccacgctggctctcnctccaacatggcatctattgtcac

SEQ ID NO: 422 - DNA, 504 bp, Oryza sativa
  Clone ID: uC-osflcyp010b07b1
ggctttgctgatccaggacgagccaatcgagctcgccggcgggcggagccaccaccaccaccacccatccccggcgccgccatgctggcttccgcgagggggttctgggggcggcaccggcggaagatactggtctcgctcggggtcgccggcgccggctacgccgcgtacaggtacttggactcgcaccggaggcagctcgtccgggtggagcagcgcgcgctggaggagcgcgccgccgaggagatcatcaagaaccaattgcagacccactttgaaaatgtgcagaagatctcagacacgaccacactgccttttgctatgcattatctccgttcaaggatcatggaggaattggatatttcacacctgactgagaagctaatgcacgggaagggagaatccagtgcccctgccctgacaccaaaggagaagtatgacacttgggagaagatcaaaattttgagtttcacaaggactgtttcttcaatatgggcgatgacg

SEQ ID NO: 423 - DNA, 504 bp, Oryza sativa
  Clone ID: uC-osflcyp010b08b1
tctttcccaagttttggtgagcgacgcaaggctgtccttcaggatattgccattgtgacaggcgctgaatttctagcaaaagacctgggtttgctggttgagaatgcaactgaagagcaacttgggacagcgagaaaagtcacaatacatcagactacaacaaccctcatagcggatgcagctagcaaagatgagattcaggcaagggttgcacagctaaagaaggaactctccgaaactgattcgatatatgatacagagaaattggctgagaggattgcaaagctttctggtggtgtggctgtcatcaaggttggggctgcaactgagactgagcttgaggaccgccaactacgtatcgaggatgcgaagaatgcaactttcgcagctattgaggagggcattgttcctggaggtggtacagcgtatgtgcatctttcaactaccgtccctgcgatcaaagaaacaatcgaagaccatgatgagcgccttggtgcagacatt

SEQ ID NO: 424 - DNA, 510 bp, Oryza sativa
  Clone ID: uC-osflcyp010b09b1
ttcatccacagctgcacagggttaatcctttcggtttagccgatttgatcagatctcatcgaaatttttgaacaaatattatcaaaattcacaaaaaaaaaaaactaatactccatatattccacagctgcatcgatctatatctccatatatatatgattggtaaattgaactgaatcatcatattgatctgttcatcttctcatcatccaggctgtacagcgacgagaccaggagcagccatcgctgaactgaataatcccattgatcggaggctggtcgatctctctgtcacgccatgtttgctggtccttgtggttatctaatacgtaattaattatctagtatgttgctatcttatcttgttactctgttcctagtagcttgctgtctctgttagtactaccagagaccggtacgtgtcagctagcctgctggctcctatcaagggctagcgacaacccaaagaagtgtgtttgtgtgtaaacatcttccatgtgtaaatactgc

SEQ ID NO: 425 - DNA, 496 bp, Oryza sativa
  Clone ID: uC-osflcyp010b10b1
ttctcttggacgcgtgggcgccgatcgccctgccccgccgtccgcccgtctcccccgcccgtcgcccccgccccgtcgcggcgtcgcggtctcgcgtcgtgtcgctgccgcagcccgccgtcccaggtccccggtcaggccctccacgctcgcgccgccccggctgccgccagcggccagccgaccacgccacggcgccagcaggcagcagcactgcagcagtaggcaggctaccaggcttccaccggccacgcgccagccgccagcaacgccgcccggtcgttcgagtccgacgaaggtggttggtgaagagggaggcgaggccgtgtgcccctgccgctcgccggggatggataagctggtgcagttcgggaggaaggcgtggttcgtggtgcgggtgctgtccggctacgaggagaggaggatccgtgctcacaggctgcagatgcaacaacagatcgcgaggggccaagcttagaaggaagagctttggaag

SEQ ID NO: 426 - DNA, 415 bp, Oryza sativa
  Clone ID: uC-osflcyp010b11b1
ttagcacctgacggggagaaagataccacctgatcgtgcccgtatctttgcagccgcaggagaggaggacgagtcgttcggtgtgcatcaggaggcggcggcgaagatgtcgtggcagacgtacgtccacgatcacctgatgtgcgagatctagggccaccaccttacctgcgccggcatcgtcggccacgacggcaccgtctgggctcagagcgccgcctttccgtagttcaaaccggaggagatgaccaacatcatgaaggacttcgacgaggcggggttactcggcccgatcggactgtttgttggaccagccaaggacatggttatccaaggtgaacctggcgctggcattcgtggcacgaagggatcaggaggcatcacggtgaagatgaccgggctggcgctattggtc

SEQ ID NO: 427 - DNA, 452 bp, Oryza sativa
  Clone ID: uC-osflcyp010b12b1
ggggcagttggtactggcttgcacgaactgataatgagactgctagggctgatggcgaaatctccatggtgtgatggacagaattgtacatatggtctggaatctgcatacagaaacaagtggttgatatactgtgatggggatgcacctgccctcaggcggttgcatctgttacaggaagagccaggctgcaatagcagttggcacaatcttgatgactataagggtgcagagctgggagatctgatagcacagatagtggatgcctcattcgatggggacttgcggttctaggaaacagcgcatgctgaactagtaggggaagatcacaaagccccaataatggtgaatggtgtgagataacctgtctcttctgggacaagtgaggcagatgggcacataagccggtgaccagggggagtcaagcatactccatggatgtgggaaacact

SEQ ID NO: 428 - DNA, 531 bp, Oryza sativa
  unsure (1)..(531): unsure at all n locations
  Clone ID: uC-osflcyp010c01b1
ccacgcgtcctttttgttctctccccatctgctgcgccgttgctggccgttttttgtctacggtggggggatcctcattgaggttcttgccagatgttgcctcacgctgtcctcgtcggccacgggaatttcggacgctgaatgcgatgctttaaggactgactcnacatttacaacaacactcctctactactcgggaatactgcctgcgacaagatcgtgccgactcggagcaagacccactcctgtacttgtcagaccttgtctttgccgtctcgtacgactagatgcagtgcccactcatggtgtgcattgtgctactgtgacctgctccttccggacggcaagggcgccgtggaggcctgcttcgggcagtgctacgacggctgctagaccacggcggcggccagactgtcgaggcctcttcgcgccggccactacgtgctctctagtccccctgatgacgtataccatgatccggaccaccgctacgtggtctctagcccccatgatgacgtaaaccatgattcc

SEQ ID NO: 429 - DNA, 513 bp, Oryza sativa
  Clone ID: uC-osflcyp010c02b1
tttccaagggaattattaacaacataaatttcatgccatggtctgatgtatgctttgtgactggtggaagtgaccatgctgtcatactttggcaagaaaaagatgattcatggaaccacaagaaagtgcacaaggatttgcattcttctgctgtcatgggtgttgctggattacagcagaaaagtacaatattatcagttggcagtgacaagaggattatatcatttgatctggcagctggaaggacagagtccaagaacctaattgattacaaatgcatgagtgtattaccaaatccatgtgatttcaacttgtacatggtgcaaacagcggcaccaggcaggcagcttcggttgtttgacgttaggcttaggcagactgaagttcatacactcggttggaaacaagagagcagcgagtctcagtcagctcttataaaccagtcatggtctcctgatggttggtacttatcatctggctctgcggaccctatgatccacatctttgacatca

SEQ ID NO: 430 - DNA, 507 bp, Oryza sativa
  Clone ID: uC-osflcyp010c05b1
tcgtgtggagtcttatcttagcacggcctccacttcgacaagattgcttagatattgctcttaagtgtgccattcactctcaagatgaagtcaggggaaaggcagttagattggttacaaaaaaactctatgaactaacatacgcatcagaaagagttgagcagtttgccatcgacagtcttttggcaattgctaataaacatggtgtggagacggacattaatttcacatccttgaaagaatcttcacctgagtttgaggcaggcagccaggaaacttcggttagtggctcccatatttcagatgctgaaccttctgaaagtacatgcaataagaccgatttggtttcacctaagcaatctgcagtatctgtatctgaggccaaacgccatacttcattgttctttgcactttgcacgaagaggcccattcttcttcaacatctgtcaatgtttatggaaggtctccaaagttgtcaagcagtgtatccattggcatatacccaat

SEQ ID NO: 431 - DNA, 515 bp, Oryza sativa
  unsure (1)..(515): unsure at all n locations
  Clone ID: uC-osflcyp010c06b1
ttctaaggtatccaaagaatctagttcgctatttggggatagccccatgaatttgaaccggattattcagtgggctgaatatgaaatagaaacctttgcgcgtttggttaaggaaaattctcctttgcctgagagcgtatctgccctttgttctgcctgcatatgcatccaaactagtctcactcactgctcttatctagaatcatatggcctgaaattctcaaatttactaatggtactattgcacccctatgttgaagaagtgcttgagctgaattttagaaggctgagaagaaagattgtagattcagcaaaaaatgatgatattctgcttcccagccctcaagaaggatcacggctctctagttcagttgcaccaaatataatgcttacaagcagtggaaagaagttcatgtccattgtcaatgatgttttggatcaaattaccccaatgactatagttcactttggaggaacgattntgaataaatttgtccagctatttgataatatgt

SEQ ID NO: 432 - DNA, 504 bp, Oryza sativa
  Clone ID: uC-osflcyp010c08b1
ctaaaatgactgataacatagaattaagtagtagctatcaaactaaaataaataagatacataagagagaaaggtggtgagcatgacaagtgggtcccaatattttctacatttctttgttgtttattgttgatttgtgtggtgaacaactcttttcacaagtaggtaggggtggcattttccccattggaaacagggcctcggtgggtccccacccctacagggccggggacagggccaaatcttcacccgtgggtgttactgagtagggccctgactttgagcggtgttagggccaaggtgacatcttcactcgtggagccctgaagtttaagaaataggcacctcatgtatgtatttctagccatcaaaagcccataaggccaaaaatagaatataaaaagacaaaaaaacaataatccacctgcacaattcgatgctcccatcggctgcatgatttgtgcgatcgcttcaatgctctgcgcatgcaacgagtcacgcacg

SEQ ID NO: 433 - DNA, 499 bp, Oryza sativa
  unsure (1)..(499): unsure at all n locations
  Clone ID: uC-osflcyp010c10b1
ggcgtccagaacgtgctggactaccttcaggatgacttccctgacatggatgtcatcagcatatcaggtaacttctgttctgacaaaaagtcagctgctgtaaattggattgagggacgtggaaagtctgtggtttgtgaggcagtaatcaaagaggaagttgtgaaaaaggttctcaagaccaacgttcagtcactagtagaattgaacgtcatcaagaaccttgctggttcagctgttgctggagctttgggtggcttcaatgcccatgctagcaacattgtaacagccatctttattgccaccggtcaggatcctgcacagaatgtggaaagctcccagtgcatcacaatgttggaagctgtaaatgatggcaaagatcttcatatctccgttactatgccatcaattgaggtgggcaccgttggtggaggcacacagctggcctcacagtctgcttgcttggacctactnggcgtgaagggcgcaaacagggaat

SEQ ID NO: 434 - DNA, 501 bp, Oryza sativa
  unsure (1)..(501): unsure at all n locations
  Clone ID: uC-osflcyp010c11b1
tagcagcagcagcagctgagcttgaagcagcagagcgaggtagacatggccgccgccaccatggccctctcgtccccggcgctggccggcaaggccgccgcgaaggtgttcggcgaggggcgcatcaccatgcgcaagtcggcggcgaagcccaagcccgccgcgtcggggagcccgtggtacggtgccgaccgcgtgctctacctcggcccgctctccggcgagccgccgagctacctgaccggcgagttccccggcgactacgggtgggacaccgtggggctctccgccgacccggagacgttcgccaagaaccgggagctggaggtgatccactccaggtgggcgatgctcggcgcgctgggctgcgtgttcccggagctcctcgcccgcaacggcgtcaagttcggcgaggcggtgtggttcaaggcggngtcgcagatcttcagcgagggcgggctcgactacctcgcaacccgagcctgatccacgcgcagagca

SEQ ID NO: 435 - DNA, 486 bp, Oryza sativa
  Clone ID: uC-osflcyp010c12b1
tgtttggttgattggctctgttctcagctgaggaatcctacccacccaaactgttctgttcctactgctatgcattgtcttgccactttgctaagagagcagtatgttagagctttatttgttcaggcggatggtgtaaaactgctcattcctttaatttctccagcttccacacaacagtcgatccagcttctctacgaaacttgcctctgcatctggcttttatccttttatgatgcagccgttgattatttgtccactacaagggttatgccaagacttgtagaggttgtgaaaggttcaacaaaagagaaggttgtcagggtcgttatcatgtctatccgtaacttgcttgcaaagggtgcgtttgctgcccaaatgattgatcttggactgccacacatagtacaaaatttgaaagctcaagcatggactgatgaggatttattagatgcgctgaatcagctagaaataggactcaaagac

SEQ ID NO: 436 - DNA, 223 bp, Oryza sativa
  Clone ID: uC-osflcyp010d01b1
tttctaaagaacccgataactgtggctccgggagactttcttcgagatttggcgcggtggccgccatcaggggtcggagcaacaagcggaggcgatctggagcaggaggggataggaaggagatcatgcggcctgaacaaacatacaccaactactacataaaccaccatgggatttagcgagccacccgcaccctcgaggtggagaggaccagaacgcggcg

SEQ ID NO: 437 - DNA, 501 bp, Oryza sativa
  unsure (1)..(501): unsure at all n locations
  Clone ID: uC-osflcyp010d02b1
tggagctggactctactacactgctaagtgttatgccggcttgtgtacagtcgcactattcatttataggaggagtggttcatgggtattctgtgagaactggattgattagtgagacatctcttggtaatgctcttcttgatatgtattcaaattgctcagattggcgtagcactaataagatattcaggaatatggaacagaaaaatgtggtgtcatggacagcaatgatcacaagttataccagggctgggcattttgacaaagtggctgggttatttcaggaaatgggattagaaggtatcagaccagatgtcttcgcaatcaccagtgctcttgatgcatttgctggcaacgaatcactgaaacatgggaaatctgtccatggatatgccatcagaaatggaattgagggaagttcttccagttgctaatgcactgatggaaatgtatgtgacatgtgggtaatggaagaggcangatttatttcgatcatgtgac

SEQ ID NO: 438 - DNA, 492 bp, Oryza sativa
  Clone ID: uC-osflcyp010d03b1
ttgttaaggcctgtgtcaaggagagggtagtagcaccttgctctcctttgccttcagagaaaccggaagcaatggcgtctgctactctcctcaagtcatctttccttcccaagaagtctgaatggggtgccacccgccaggctgccgcccccaagccggtgactgtctccatggttgtccgcgctggtgcctacgacgatgagcttgtcaagaccgcgaaaaccattgcatcaccaggaaggggtatccttgccatggatgagtcgaacgcgacctgcggtaagaggcttgcgtcaattggccttgagaacaccgaggccaaccgccaggcttaccggaccctccttgtcaccgcaccgggcttgggacagtacatctccggtgctatcctcttcgaggagactctgtaccagtcaactgtagatggcaagaagattgtcgacatcctcactgagcagaaaatcgttccaggtatcaaggtcgacaagggtc

SEQ ID NO: 439 - DNA, 501 bp, Oryza sativa
  Clone ID: uC-osflcyp010d04b1
gcgtgaggccggccacgcacgcacgcacgtcgaagcgcgccgcccgccgccgatggggcccctcctccggtcgtcgccgccaccgcgccacctgcgcctcctcctccgccgcctcctctccaccgccgccggtcggccctcccgcctcctcccgctccccgcctcctcctccgcccgcctcctcgtcaggcccagggttgcggttgcggctgctgcggcgggtgctcctctgcggcggaatggggtcgcggtgagggctttcatggcatccacggcggcttccgaggcgatgcaggagaagcgggtggccggggagtacaccgctgcgaacgtccaggtcttagaagcattggatggagttcgcacaaggcctggtatgtacattggaagcacaggatcacgagggttgcatcatctggtttatgaaatattggataatgccgtggatgaagctcaagcaggctacgccactaaggttgatgttatccttcatggcgacaa

SEQ ID NO: 440 - DNA, 425 bp, Oryza sativa
  Clone ID: uC-osflcyp010d06b1
ttgtggagtgggctgacgcagggatgctgcaacggcgtcaaggggctgaacaacgccgcccgcaccaccgccgaccgccaggcggcctgccgctgcctcaagagcctcgccggcagcatcaagtcgctcaacctcggcaccgtcgccggcgtccccggcaagtgcggcgtcaacgttggcttccccatcagcctatgcaccgactgcaacaaggtcagttaaatcaatcctgcttggatcgatcgatcgagcttaacatgctagctcaatcggagttgatcagctagtaattaagcacgtgcttgctacagcatatatgaacaaagtgattaaaataacagctgcggcagacatgcagcgctccactctgtctctgtatgagctgtatactttatgctgcacgctccctgcgtgcatgttctatc

SEQ ID NO: 441 - DNA, 502 bp, Oryza sativa
  Clone ID: uC-osflcyp010d07b1
tgtagaacctgaagactgtcatcagcactgttataaagaatatgggttcatcattaggtgcctgtggagatctcaacagaaatgtacttgcacctgcagcaccttatgtcaggaaggatattctttttgctcaagaaacagcagagaatatcgcagctcttcttacaccacaatctggggcttattatgacctgtgggtggatggagaaaagataatgtcagccgaagaacctcctgaggtcacgaaagctcgcaatgacaacacatatggaacaaatttccccgattcccctgaaccaatatatggcacacagtatctgccaagaaagttcaagattgctgtcactgtcgctggagataactctgttgatattctgaccaatgacatcggtgttgttgttgtttcagatagtgcaggagagcctgttggcttaacatttatgttggtggtggcatgggtaggacacaccgagtggagaccacattccctcgattggctgat

SEQ ID NO: 442 - DNA, 494 bp, Oryza sativa
  Clone ID: uC-osflcyp010d08b1
gcatggcaaagtaatacactagttcgtgagtatttccttcaggacacttatgttctttctttgtttggagtactgaggcacctcaccaatggagataaagatgaaggggatattcaaaggtttgaagataatctctcaaatattcgcactgcagaagcaacaagagatggaaatcgggtgccctacagacgtcaggcatgtgtctcacataggcgtgggcactagtgattcatgcccaagctggatgagtgaattcagaggattggaagagttgtcagcaggctccatgggctcctttgcacagtcaaggaagacatcctgggcatctcaagattttgacaaaccaccaagagccacgctcccaacagaaatctgcacagacaaatccggccaggaggccgcctcctgctgccatgacatcccgagaggccccaagaacccgaggaggaagaaggcagcaagagcatcatccgcgagctccttcttgtcgaggt

SEQ ID NO: 443 - DNA, 324 bp, Oryza sativa
  Clone ID: uC-osflcyp010d09b1
ttcgagagaagggttcatgtcaaccaggaggatttcttgatggcggtggcgaaggtgatgaagaaggataccgaaaagaacatgtccctgcgcaagctctggaagtgaaggaagctctcatctcgacatccctgtcatatgcctaaacagctgaagctaaacagcgccagcgatgcattgatcgctgtaaattccttaaaacatgtcgagaagggaaacgttcaacatcttacagtagcttcttttaaagttatagaattccttcattggattatcaagatgtgaaatgaaaaggtttagatcaatctctcgctggtgtgatgt

SEQ ID NO: 444 - DNA, 504 bp, Oryza sativa
  Clone ID: uC-osflcyp010d11b1
tgggatatctgggaggaaacaagcttccagcttgaggggctacaacgcctgaaatcttgtgtcagacttgagaaagaaggactaaagcacagaacatcaccatcgtggtctttgtctttcactcccaaatttacagatgaaaaactgctgactgcttcctcaaagccaaaagttgccatcattcgtgaagaagggagcaatggtgatagggagatggctgctgcattctatgctgctggatttgaaccatgggatatcacaatgtcagacctcttagctgggaagtcttctctagaggagtaccgtgggattgcatttgttggtggttttagctatgcagatgttcttgattcagctaaagggtgggctgcatcaatcaggtttaatcagcccctcatacagcagttccagaatttctataataggccagatactttcagccttggagtgtgcaatggttgtcagctaatggctcttcttggctgggtacccagatcagatgtc

SEQ ID NO: 445 - DNA, 498 bp, Oryza sativa
  Clone ID: uC-osflcyp010d12b1
tctctggtgagataccacctgctctgggcaatctcaccaagctgcggtatcttgaccttgcgagcaacaagctatcaggatctattccttcatctctgggtcagttgtctagcttatctttgttcaacttaggccataacaacttaagtggattgatccccaattctatttggaacatctcctctctgacagtgctctctgtccaagtaaatatgctgagtggaacaataccgccaaatgcgttcgatagtctgcctcgtctccagagcatttcaatggataccaacaagtttgaaggctatatccctgcatcacttgctaatgcttccaatctgtcctttgttcaactcagtggtaactctttacgcggtattgttcctcccaagattggaaggttaagcaatatcaattggctgcagctttcgaacaatttgcttcaagctaaggagacgaaagattggaacttcatatcggcattgacaaattgctcccagttag

SEQ ID NO: 446 - DNA, 218 bp, Oryza sativa
  Clone ID: uC-osflcyp010e02b1
tgttaattgacagagatgagagtctggctaaatagtcagccatgtgaaatgccttaatgaactctctatttcgatagatgagatatgtgaaatgccttaatgaactctgtatttcgatagatgagatagctcatttaggcagtacatacatgacgtgggttcttcgatccattcaactctgtagtgctgatccatttatagatatttctcccttgctt

SEQ ID NO: 447 - DNA, 488 bp, Oryza sativa
  Clone ID: uC-osflcyp010e03b1
tttttgtacgtagcaaatggcggccgtcggcctgttagtactactcctggtggtgggcgggtgggtggcggcgcaagaagcaggtgatgccccggcgagcatcgtggggccatgctcgcgtacaggagacaagaaggcgtgcgtggagttgttgtcgggcatcccggaggcccggaaggcgacgacggtgggccctctcgcggagctgtacctgcgggcaatcgccaaccagacgacggaggccaaggcgatggctaccaagctgctagccaccatgaaggggaagggcgtgccacccgtgtgcctccagcagtgcaccgccagcgtcgacaccctctccaacgccctcgccgccttcttctccgcctccgccgacgtcaacaaaaagtacagggacttggacggtttcctcgtgggctttcttaaacaaccgcccatctgcatgagcgcgtgccccatccgatcgtgcgatatggaagaggtcacta

SEQ ID NO: 448 - DNA, 499 bp, Oryza sativa
  Clone ID: uC-osflcyp010e04b1
tgtataattctctcccttcctcctccaccacctccactccgacgatcctcctcctgatcctgtgccggccggcgatggcgtaccggttgctggagctcacgctggtctccgcgagcgacctcaagaaggtcactctcttctcgcgcatgcatgtctacgccgtcgcctccatctccgggagcaacgtccccatgcccatgcacggcacccacgccgaccgcaacggcggcagcaaccccgcgtggaacaccgtgctccacttccccgtccccgcccgcttcgacacccgcggcctcgccctccacgtccagctccgcgcccggcgctccttcggcggccaccgcgacgtcggggacgtgttcgtgcccctcgacgacctcctcgccggcgcgcacgacggcggcgagccgaggccggctagctatccaggtgcgccgcccatgtccgcccgcgcgcacgggacgctctacttctgctacaggttcaccgacgtcaagca

SEQ ID NO: 449 - DNA, 502 bp, Oryza sativa
  Clone ID: uC-osflcyp010e05b1
tgagcggcaagccgctgcactacaaggggagcaccttccaccgcgtgatcccggagttcatgtgccagggcggcgacttcacccgcggcaacggcacgggaggggagtcgatctacggcgagaagttcgccgacgaggtgttcaagttcaagcacgacagccccggcatcctgtccatggcgaacgccgggcccaacactaacgggtcccagttcttcatctgcaccgtgccctgcagctggctggacgggaagcacgtcgtgttcggccgcgtcgtcgagggcatggacgtcgtcaaggccatcgagaaggtgggatcccgcggcgggagcaccgtcaagccggtcgtcatcgccgactgcggccagctctcctagatctgtgctgttccccttcgcctttcgccagtatcagtcgtcttgagtcgtcgagtccctaaataaggaagaggtggtggtggtgttagtctttttatgagttcgtgtcgtgttggtgagatgag

SEQ ID NO: 450 - DNA, 508 bp, Oryza sativa
  unsure (1)..(508): unsure at all n locations
  Clone ID: uC-osflcyp010e06b1
tttagagcaccaaggacacgcgactagcagaagccgagcgaccgcctcctcgatccatatcttccggtcgagttcttggtcgatctcttccctcctccacctcctcctcacaggttcttggtgtagcttgccactttcaccagcaaagtttcatgtctgatctcgacattcagatcccaactgccttcgatccctttgctgaggccaatgctggagactctggtgcggctgcaggatcaaaggactacgttcatgtacgcatccagcagcgtaatggccgtaagagcctgaccactgtccagggattgaagaaggaattcagctacaacaagatcctcaaagatctcaagaaagagttttgctgcaatggtactgttgtccaggacccagagcttggccaggtcattcaacttcagggtgatcagaggaagaacgtatcaaattttcttgttcaggccggcattgtgaagaaggaacacatcangattcatggtttctgagcaactgc

SEQ ID NO: 451 - DNA, 412 bp, Oryza sativa
  Clone ID: uC-osflcyp010e07b1
tggacttccaccttctcctcctggttgctgctttcctagacataaaagcagatgttcctgccctcaccgcttgcgtaaagaaccagagcgtggtgcctgaaggctaccaactgctgatcgagtcattggctggtgcctgaagtctaccagctgctgatcgaatcatttagccagttaggcataatgttgatctctggaagcaaagcacctggtccctttaaattcactgccatatatcatgtgtaacttatggttgtctctggtgtgtaaaaaagtcttgatcaattcataggcgcttaactttacacaagcgcaacatcgttgtttcaaaagaagaggtggaagaacaagatgaaggaagccggctaagccatgcaacaagcctaacattgtcaccggcgccaatgtccag

SEQ ID NO: 452 - DNA, 506 bp, Oryza sativa
  Clone ID: uC-osflcyp010e09b1
tatttgttgcaagcattcaatgcgtcaccaactggaaatggcatgagtcctattgggatgcctccttccttgatatcgaatgctgtgaagattgctccaatcgggaaggatagcaactggtctaaatatgacaaagtattctcaaacaacaaccagccccacggtgctgcatttcagcattcccattcataccaagatcacaaaagtgaacatatgagttcaagtcctgggactttaacagggcctgagtttctatggggtagtccaaagccttattctgaacatgctcaatcccctatttggcgtccaccagcaattggtcatgcaataccatctaatacccgttctcaggggcagggattattgtatggtggccgtcaggcttcactttttgggtctcaagatcagcttcatcatcatcatgttggctctgccccttcaggtgctccatttgagagccactttggatttttacctgaatcaccagagacgtcttatatgaatca

SEQ ID NO: 453 - DNA, 501 bp, Oryza sativa
  unsure (1)..(501): unsure at all n locations
  Clone ID: uC-osflcyp010e10b1
agaacataaaattcggttcatcaaatcagaaggaatttgtttgttgaagctgtagaattgtagtgaagagatcgatagatcgatcggcgatggatttggcggcgtggtttgggccggtgaattcggggctggtgctgctgatactgacaatgctgctgcgaaacctgcagaatttccagctgatgcagacgttcgtggcgcggcagctgaaccggcgggcgcggcggctggcggcgctcatcgacccctacctgtcgatcaccatccacgagtacgacgccggccggatgacgcgcagcgacgtgttcgccgagaccaaggcgtacctcgacggcgccgtcggcacgcgcgacgacgtgcgccacctcaacgccgaggacgcgcgcggcggcggcggcggcggcggcgcaagcgaagggggctggtggtggcgctggcagcagtagcagcaaggggctggtgctcagcatggcngacggcgaggaggtggaggaccacttt

SEQ ID NO: 454 - DNA, 505 bp, Oryza sativa
  Clone ID: uC-osflcyp010e12b1
aatttatcttgctgccattttcataccgagcatttgggatgcattccagtttactggtgcaactgctgctgtcctgattggtttcatcttccctgccatggttatacttagggatccttatggaatcgcatccaagcgtgacaagatcttggctgtaaccatgatcgtgcttgctgtcctctccaattctgttgctttatacagcgatgcaatgaatatcttccgtaaggaagaggaggcatgaatgtcagactccaaaggaatgtcatcaaatatcagtgatgaaggaagcgtggcttcatgttatgagacacagatgctgtgaagggaaattatttcctggaatccagcgaacgaagatttcttggtcagcggtcgaggttccagtcactcgaatgaattggatggttgaatctgcgtggcttctgtgcgaaccggctcatattcgaattgagctgctcgcgatatctgtattgttagtgttcttgtatccacaagcaatgtt

SEQ ID NO: 455 - DNA, 469 bp, Oryza sativa
  Clone ID: uC-osflcyp010f01b1
tctttgttgaagagctctgctccgtcacaggctcacagcctcatctcatgtctcatgacgtcagaggctccgtgcgtccacgcgccgtaactacccgtgcgctagcttcggcgtgctcgtgccagacgacgcggacgccggcgacgacgggaaggagaacgggcccggcgccgcgccgtgtggcctgactcgagatgcctgagaccggctccagtgcgagaacgagaacgacgccgacgccgacgccgacgcctcgcggagctttgacgacgccgacgacgtcctgcccgccgcaccggcggagacagcgcggggaagtgacgacggccaccgcgacgagacacggggagcgctaggcacctccttcttcgccttcgccttcgccttctgcgcgcttgtgggcgcggcgctcatggtggccggctgcacagctgcccgcttcttcttaacagtcgagggaggtacaggc

SEQ ID NO: 456 - DNA, 411 bp, Oryza sativa
  Clone ID: uC-osflcyp010f02b1
tttttttttttttaaaaacattacaacagggtattttgcgcatttcaccatcgtacggtaaaaatattagaaaaagacaatcacaaataaaaagacaatgggaaaaaatctactgatatgagcccagccccttgcacaggctaattacatcattgctgttagttcctttaactaactagagggcatcgccactggaaaagcatctgaatcagaccgcccacctacagttcagttcatgcatttcaggccagattaaggacggcgaacaagacatcattcctgtggcgccatcaccactggcatccatcaggactcgatcacttaactgtatacaatatatcctcctgttccttttcccagcttcctgatcatgcaaccatggttttgatcactgcgaaaaccatgggcgtg

SEQ ID NO: 457 - DNA, 461 bp, Oryza sativa
  Clone ID: uC-osflcyp010f03b1
cggttatctatccatctatctactcagctttgcgtcctcccgcgaattcaccgcagcaatggcgtccctcgtcgccgtccagccggtcgccgtgaagggcctcgccggcagctccatctccggcaggaagctcgccgtcaggccgtcgccccgggcgctctgccgcaccacccgcaggccgcgcgccgccgtggtggccaagtacggcgagaagagcgtctacttcgacctcgaggacatcggcaacaccaccgggcagtgggacctgtacggctccgacgcgccgtcgccgtacaaccctctccagagcaagttcttcgagacgttcgcggggcccttcaccaagagggggctcctgctcaagttcctgctgctcggcggcggatcgctggtggcctacgtagcgcgtcggcgtcgccggacctgctttcgatcaagagggcccgcagctgccgtcgacg

SEQ ID NO: 458 - DNA, 495 bp, Oryza sativa
  Clone ID: uC-osflcyp010f04b1
ttgttagaatcacatacgagtgatcaaaagctcagatcagatcaatggaggctctagtggcggcggcggcggcggctgcgagggatcagccatggctgctgctgccgtggtcctggctcgccggcgtcgtggtggtggtcgtctacttctacgcgccgtggtggggcgtccggcgggtgccggggccggccgccctccccgtcgtcggccacctgccgctgctcgccgcccatggccccgacgtgttcgccgtcctcgccaagaaatacgggcccatcttcaggtttcatttggggaggcagccgctggtgattgtggcggaggcggagctgtgcaaggaggtcgggatcaggcagtttaagagcatcgcaaaccggagcttgccggcgcctatcgccggctcccctctccaccagaagggcctcttcttcacaagggcataacaaaaaaaattaaaaattaatctgtaggtgaaacttttatatatttattcgt

SEQ ID NO: 459 - DNA, 473 bp, Oryza sativa
  Clone ID: uC-osflcyp010f05b1
tcctcccaccctctcgccgtcgcagatccgatccaggaagagctcgccgccgccgctgccatggcgctctccgtggagaagacctcgtcggggagggagtacaaggtgaaggacctctcccaggcggacttcggccgcctcgagatcgagctcgccgaggtcgagatgccggggctcatggcgtgccgcgccgagttcggcccctcccagccgttcaagggcgcccggatctccgggtccctccacatgaccatccagaccgccgtcctcatcgagaccctcaccgtccttggcgccgaggtccgctggtgctcctgcaacatcttctccacgcaggaccacgccgccgtcgtcatcgtcagggactccgccgccgtgttcgcctggaagggggagaccctcgaggagtactggtggtgcaccgagcgctgcctcgactggggcgtcagcgcggccccgacctcatcgtcgac

SEQ ID NO: 460 - DNA, 507 bp, Oryza sativa
  Clone ID: uC-osflcyp010f06b1
tgttcagtcacaggcaaaccatctacattctacacacatatctcactcatcctgtcatccacccatcaacgtacgtacgtgtgatctgcttaattgggagttagaagaagaggccgaggtaagttgaatttgctgcagagagagagagagagaatcaatggcgcttatcccgtcgctggccgccgcccgctacgcgctgctcgcgttgccgcctctcatggtggccgcgtatgtttataacggcgggggtcggggaaatggagatagaccgcgtgcaagaagcatcaacaaattcaccgatggcggtccagctaccgccggccctgcagcccggaaagacagcagtgccttgtgatcgatcaactgtaagcccttcacacatgtacttcctccatctcataatgtaaatcattttagcattgcgcatatttatatatctagattttttaacatccatatgaatacggacaatgctagaatgacttatattatgaaacggagggagta

SEQ ID NO: 461 - DNA, 507 bp, Oryza sativa
  Clone ID: uC-osflcyp010f07b1
tttccgccgcctcgggtggccgaggccttggaagccgcaggtaggtagaacccccttgccgtcgccggccatggcagcggcgggggccggggcgggggcgccggatcgggcggcgctgacggtgggcccggggatggacatgccgatcatgcacgacagcgaccggtacgagctcgtgcgcgacatcggctccggcaacttcggcgtcgcccgcctcatgcgcgaccgccgcaccatggagctcgtcgccgtcaagtacatcgagcgcggcgagaagatagatgataatgtccagcgtgagattataaatcaccgatcgttgaaacatcctaacattattaggtttaaggaggttattttaaccccaactcatcttgctattgtcatggaatatgcctctggtggtgagctcttcgagagaatttgtaagaatgtacggttcagtgaagatgaggctcgcttcttcttccagcagcttatctcgggagtcagctactgccattcaat

SEQ ID NO: 462 - DNA, 194 bp, Oryza sativa
  Clone ID: uC-osflcyp010f08b1
ttctgtgttgaatctgatatgatccatccagaattcacaaactgaaaaaagttggggtttgcaccttatgtgtcagctgctgctttaagcttagctaactcttttgatgttttaatttgtacatttgcgtactttgtaatgatccatacgagacctaatgtttgattattgctaaaaaaaaaaacacccaagcc

SEQ ID NO: 463 - DNA, 496 bp, Oryza sativa
  Clone ID: uC-osflcyp010f09b1
tcagtgttcagtgaccatggcaaccagttattgctccatctccaatcctccattatccaaaacttcctttcccaataaacaggtcccaggttgggtacttcgagcaatcagcaaaggcaagggcaactacactggtggtatttatactacaacaaagaggaatttaagaactgggttccatgtttgtgccgtcaatggaggtcagggcactcgcaatgtgtctggggcagagttcccaagcgattacactgaacttctagcgcaggcaaaagaagctgctgagtcagcttttaaggatgggaagcagctattggaaattgagttccctacagcaggactacaatctgtaccaggtgacagtgaaggtggaattgagatgactggaagcatgcttcttataagagaattctgtgatcgctctgtccctgctgagaaagctacaagaaccagaatcttcttccctgaggcaaatgaagtttcatttgcaagacaatct

SEQ ID NO: 464 - DNA, 499 bp, Oryza sativa
  Clone ID: uC-osflcyp010f10b1
gcgaccgcgccaccgcctgccctgtctccaagctggcctaccatcgcgcaagctccgccaggggctccgccgggggcgcggcatgggcgcccgcgcgcagcccacgccgtcgtgggcgcgggagccactgttcgagaaggccgtgacgcccagcgacgtcggcaagctcaaccgcctgctggtgcccaagcagcacgcggagaagcacttcccgctgcggcggacgagctccgacgcctccgccaccgccgccgcggccacctgcaactctgcaagggcgtgctcctcaacttcgaggacggcgaggggaaggtgtgggaggttccggtactcgtgctggaacagcagccagagttacgtgctgaccaagggatggagccgattcgtgagggagaagggcctccgcgccggcgacaccatagtcttctccggctcggcgtatggccccgacaggctgctcttcatcgactgcaagaagacaacacggcggcggccaccg

SEQ ID NO: 465 - DNA, 483 bp, Oryza sativa
  Clone ID: uC-osflcyp010f11b1
taagcaggggagcatgggcagcaagtcgtacccgacggtgagcgatgagtacctggcggccgtgggcaaggcgaagcgcaagctccgcggcctcatcgccgagaagaactgcgccccactcatgctccgcctcgcgtggcactctgctggcaccttcgatgtgtcgtcgaggaccggcgggcccttcggcaccatgaagaaccccggcgagcagtcccacgccgccaacgccggcctcgacatcgccgtcaggcttctcgaccccatcaaggaccaacttcccatcctctcctacgccgacttctaccagcttgctggcgttgtggccgtcgaggtcaccggcggacctgaggtccccttccatccgggcaggcaggacaagcctgagcctcctcctgaaggccgtcttcctgatgccacacaaggttctgaccacctaaggcaggtcttttctgcgcagatgggtttgagtgacaaggacat

SEQ ID NO: 466 - DNA, 85 bp, Oryza sativa
  Clone ID: uC-osflcyp010f12b1
tacgattgacaaaattttcatggttttatctacaatttagccagttttgaatattggctgttccttcaattgttcatacagctat

SEQ ID NO: 467 - DNA, 490 bp, Oryza sativa
  Clone ID: uC-osflcyp010g03b1
gatttacatgcctgaagctatcttcagctttgcttcatgttcaacaaattcggcaaaacatgattctgtgcggtacaatcaattcagatcaacttgtgagaagtttggcaagcccttgttatctttatcgttgcagtgctggccatttttagcccaaggcttaccctgcctggaaaagataaagaaccccatagatttcagttggcttggtccagcaatatttcaggctttccagctttctgaggaagattctttcaacctttctggtaaacatgcgccagcaactctcatcgagcaacagaaagagtgcattctgagcttagctgtttgctgcatcacctacagcaaataccttgctagtatatgctatggtccagaacattatttggcaaatcgtgctaaagatctgcttgaatgtatcaatcatgtacaatgatctctctgtgatatatctctggagctgatgtttgatgtgctctattgtctttat

SEQ ID NO: 468 - DNA, 483 bp, Oryza sativa
  Clone ID: uC-osflcyp010g04b1
tcttctctcacattttccccaaataataatagaggaaggggaaaaacacatttgcagccacatcatccatggcctctctccgcaccattccggtgatcttcggcatcctcttctatgtccttgccagcactgccactgccaccgacgcaccggactacgtcgtccaaggccgtgtctactgtgacacgtgccgcgccgggttcgagaccaatgtcaccgagtatatcaagggtgccaaggtcaggctggagtgcaagcactttggcaccgacaaggtcgagcgtgcgattgacggtgtgactgatgagaccgggacatacaagattgagctcaaggacagccatgaggaggacatctgcgaggttgtcctcgtccacagcccccttgcaaactgctctgaaatcgaggccgaaagggatcgtgcccgtgttttgctcaccaggaatgtcggcatctgtgacaacctgcgcttagccaacccac

SEQ ID NO: 469 - DNA, 499 bp, Oryza sativa
  Clone ID: uC-osflcyp010g05b1
ttcatatgcgatagatatacacagatctgcaagtggaagcttgcgtgttaccgtgtccaacaatgattgtggtgttcgtgaatttgacatggaaacatttcagctcttgaaccacttcagttataactggccagtaaatcacacatctgtgagccctgataggaaacttctggcagtagttggagatgatcgggatgctcttcttgttgattcaagaaatggaaaggtaacctctaccctagttggccatctggactattcgtttgcttcggcatggcaccctgatggccgcaccttcgcaaccggtaaccaagacaagacctgccgcgtctgggacgtacgaaacctgtcaacctccctctcagtacttaggggcaacattggcgctatccgttgcatccgctactcctcagatggccagttcatgctcttctcggagcccgctgacttcgtgcacgtctacagcgccgctgcggactacaagaagaggcaggagata

SEQ ID NO: 470 - DNA, 468 bp, Oryza sativa
  Clone ID: uC-osflcyp010g07b1
tctcccacaaactcatcatcgtgtagttttaggccatctgagggcctttgaatggctctcggcctccttcatttttcatagcatttgtgtagtgtgtgcaaatccatcatcgcatcttcatatctgaagaaatgaaggtgaccactcagctcaagcccatggcctcctcgtcgacgtcgccgtcgccgtcgcggctgccgcggagcgcgagcggcaaggcgcccacctcgccgccgtccagctccaacgcctcgcgccgcctcctcgacggaggaggacaagttcgtcgcggtggtgaaggaggaggacaagttcttcgcggtggtgaaggaggatgacaagttcgtggcggtggtgaaggaggcgatcaagaagcagcgtgacgacgacgccgacggcgacgagctggtgcggaggttcaaggggagcaaggtgaagacggcgatggagaagaggtcggaggaggag

SEQ ID NO: 471 - DNA, 246 bp, Oryza sativa
  unsure (1)..(246): unsure at all n locations
  Clone ID: uC-osflcyp010g09b1
ttctaataagggaaagtagaatccagggtgcaatacggcatccagctgcccagctcagttcagttgttttggaatacactaaccatccactgattttgttcaaattttgccaaactgcactatatcctgtcatgtaattgttactacatcacacgttactgatgtgcacctttaccactctgctttcaacttcagactttattgtatcagtgaattcatatgatagacggttgttagtgcaacana

SEQ ID NO: 472 - DNA, 489 bp, Oryza sativa
  Clone ID: uC-osflcyp010g10b1
tctggtacccgtgtgctgtatctcggtggtgcctcaggaacaaccgtgtctcatgtgtctgatattgttggaccgaccggtttggtctatgctgttgagttctcgcacaggagtggtagggatcttgtcaacatggccaaaaagaggaccaatgtaattcccatcattgaagatgctaggcacccggcgaggtaccggatgttggttggcatggttgatgttatcttctctgatgttgcccagccagatcaggctaggatcttagccctcaatgcatcctacttcctgaagaatggtggacattttgtcatttcaatcaaggcgaattgtatcgactccaccatgccagctgaggctgtgtttgctagtgaagttgagaagctgaaggcagatcagttcaagccctctgagcaggtgacgctggagcctttcgagcgtgaccatgcctgcgtcgttggtggttacaggatgcccaagaagcataagggt

SEQ ID NO: 473 - DNA, 469 bp, Oryza sativa
  Clone ID: uC-osflcyp010g11b1
tgagtacctgcttcgatccaagtgggtgccttgtctcgagttcagcaaggttgggttcgtctaccgtgagaaccacaggtctcccggatactacgatggcaggtattggaccatgtggaagctgcccatgttcggctgcaccgatgccacccaggtgctcaaggagctcgaggaggccaagaaggcctaccccgatgcctttgtccgtatcatcggcttcgacaacgtcaggcaggtgcagttgattagcttcatcgcctacaagcccccaggttgcgaggagtctggtggcaactaagctaagatcaagcatcgcgctggtggattgctgcctataataatagtatgcagctttgttttgggctatgttgatgatatatcaatatataatatgctatatatttttattttacaatttggttatgtaccatctcaatggcctctgctcttaacacatatgtaataatct

SEQ ID NO: 474 - DNA, 481 bp, Oryza sativa
  unsure (1)..(481): unsure at all n locations
  Clone ID: uC-osflcyp010g12b1
cgccgccgtcgagatgtttcggagcccggccgccgccgccgcctccgccctcctccgccgcctaggcccccgcgtatccggcggtggaggcggcgcttccactcaccggcgattcgcgcctccggtatccacctccatcctctcccgctactcctccgcgccgacgtcctccccttcgccgccgccaccgccacccccaccgccctccgacgccgcggcggatggggataaccggtcggaatcgggggaacccggctccagtctcagcatcaccatcgaccgctccggcctgtacaatcccccagagcactcgcacgagccgtcgtcggattccgagctagtgaagcacctcaagagcatcataaagttccgcagcgggcctatcagcgtagccgagtacatggaggaggtgctgacgaacccgcagtcagggttctacatcaaccgcgacgtgttcgggacatccggngatttcatcacc

SEQ ID NO: 475 - DNA, 207 bp, Oryza sativa
  Clone ID: uC-osflcyp010h02b1
tgttttcgtgggttctcttcacatgccgacgccggatagcacgagcacggaggcgcgagcagggttgctgcaggatatagacgtaggccggatgttgagagggctctgaacatgctgggcaacacgaatgattgtgggggcgaagcgaggcatctccctgtgactgctcttgaagcggttcatgctcttcacgaccggtatgaacaa

SEQ ID NO: 476 - DNA, 473 bp, Oryza sativa
  Clone ID: uC-osflcyp010h04b1
ttttctcctctctccccgattccccccacccacccaccaagcgcgtcggaagcgatggcgtcggcggcggagatgcagccgctggccccggcgggctaccgccgggcgccggagatgaaggagaaggtggacgcctccgcggtggacctggaggccggcaccggggagacgctgtacccggggatctcgcgcggggagagcgccctccggtgggggttcgtccgcaaggtgtacggcatcctcgccgcgcagctgctcctcaccaccgccgtctccgcgctcaccgtcctccaccccaccctcaacgccacgctctcctgctccccgaccctggccctcgtgctcgccgtcctccccttcgtcctgatggtcccattgtatcattatcagcacatacacccacacaactttgtttacctgggtctgttcacgttgtgcttgagtttcagtattggtgtggcatgtgctaacac

SEQ ID NO: 477 - DNA, 508 bp, Oryza sativa
  Clone ID: uC-osflcyp010h05b1
ttgataatcaagcaagcaagaagagacgagacgagggagagaaggagaagagggggccggccgcgggcgtcgtcgtgttcctccccccctctctctcctctcctctcctctcgatctccatccttccttccatccattcctccccgcacccttcgcattgctctcgtcgtctcgattcggtcgaggatctccaggaaaagaggaggaagcgatatgggttgcttttcatgctgcggagcggatgatgtcggcaagaagaagaagcgcgacgatccttacgtcccgatccctgatccaggtggtaactatggacgtagcaagcccgggcccccagccccttcgcgttctccccccaccagcagaaatctgccaattgcagtaccggcaattccccttgatgaaataaagggaataaccaagaacttcagcagtgatgctctcatcggagaaggctcgtacgccagagttttctttggtgtgctgagagatggcaggagatctgcggtga

SEQ ID NO: 478 - DNA, 368 bp, Oryza sativa
  Clone ID: uC-osflcyp010h07b1
aggttaggcaccctcactggcagtagacaagtggagccaagggggaagagcatgggtactgcaattgatggtgagcccactgcaattgatctctttaatgagttgcattgcagcaaaactaaaggttttagtgaacctgtgaagaaagctatagtaagtactgaactattacatcttctttccttcttttattaagtaacttatgcaatgaacctttatttatataataatacaaaactgaaaccttgctttgattgctaggaggatatgcatgcccgggaagccctcacttcatcatcagggcctccttcgacatatgatggcatttggacagggtcagatcagtcctccttaagctagttgtatgc

SEQ ID NO: 479 - DNA, 470 bp, Oryza sativa
  Clone ID: uC-osflcyp010h08b1
tgatccttgacagtgcagtgccaagactcgggggggcaattttgctccctcttcccgctcgtgcccaggccggggccttgcttgctagctagctttgaagccagccagcaacgccgccgccgcaggcatgaaggggagcggtgcagcgatgccgtcgtccatgttctacgtccacgaggcggacgtcgcccaaatccaccacttcctcgaggagtgctccctctgcggcaagtccctctccggtgacatcttcatgtacaggggagacacgccgttctgcagcgaggagtgcaggcagcagcagatcgaggtggacagggcgaagcaccggcggaagaagcgtgcggcggcgcacgcggtgtcggtgcggaaggagcaccggaaccaccaccaccaccaccggtaccaccaccagcagccacagccgcggtcggccatcgacgccaacctgtggggcaccgcgcgaggcc

SEQ ID NO: 480 - DNA, 393 bp, Oryza sativa
  Clone ID: uC-osflcyp010h09b1
ttctttctctgaagaaatgaaagagttaggattagagagggcaaaactccatgggtggcaagatacatatgtgttcaccaaggccatgggagagatggtgatcaactccatgcgaggagatataccggttgtcaccatcaggccaagcgtcatcgagagcacctggagggatcccttccccggttggatggaagggaacaggatgatggatcctgttgtgctgtactacggcaaaggccagctgagcgggttcctcgctgacccggagggtgttcttgacgtggttccggcggacatggtggtgaacgcaacgctggcgtccatggcgaagcacgggcgcggcggcgcggcggcggccgcggcggcggcggaggggatgcacgtgtaccacgt

SEQ ID NO: 481 - DNA, 503 bp, Oryza sativa
  Clone ID: uC-osflcyp010h10b1
taagaaccttgtgaagaagtgcgtggagctcttctttgagatcgctgagaacaaggaagactacaacaagttctacgaggccttctccaagaatctcaagcttggcatccatgaggactccaccaacaggaccaagattgctgagctcctgaggtatcactccaccaagagtggtgatgagttgaccagcctcaaggactacgtaacccggatgaaggagggccagagtgagatctattacatcactggtgagagcaagaaggctgttgagaactcccccttccttgagaagctgaagaagaagggatatgaggtcctgtacatggttgatgccattgatgagtacgctgttggtcagcttaaggagtttgagggcaagaagctcgtctctgccaccaaggaaggtctgaagcttgatgagagtgaggacgagaagaagcggcaggaggaactcaaggagaagttcgagggtctgtgcaaggtgatcaggaggtgctcggtga

SEQ ID NO: 482 - DNA, 493 bp, Oryza sativa
  unsure (1)..(493): unsure at all n locations
  Clone ID: uC-osflcyp010h11b1
atgctctcacctatttatgaacattttcgaagactaaaactcctcacagagtcaggtgcatttagtgagatagtcaagtctaacctcagtgaccgaatgaggtcttatcttgaagctggttgcacccatcacaatgaaaccatccagaacatgaacaagttacattcttgtcaagagaaactcaatgaccatataagcaaagccaaattattgcttgaagaactccatattctggaggaagatgtttatagtaccacactaaaagcctgtctgagttccttaagacatatggatgattgccctgatgataatagtcttacaaatattttttctgaggatgaacagcaatctggggatttgctggacaaagcagtgtcctgtgcaagtgtgatggtcctggttcacaatatgttaaaactcgattatacgatgcangagaagattgttaaggcattatgcattaaaacagcatcgtcagagctagagggctact

SEQ ID NO: 483 - DNA, 502 bp, Oryza sativa
  Clone ID: uC-osflcyp010h12b1
ttcgagctgagcacgtctagctagctatatctctcaacatcttccgagctactactagtagctagctagctagaggaagcagcagcaatggcgaaatcttgcaccttggtactactacttgtcgcactggtcgggctctcacttcttgtgagccccattgcttgctcccgcaagctcagcaagccgaaacccaagccgaagccgagcatgaagaagccggtggtccgggctcacaacaactacaccggtagcccgtcggtgacggtcaccaccggctgggccgccgccggcgccacgtactacggcgcccccaacggcgacggcagcgacggcggcgcttgcggctaccagaccgccgtcgggcagcggccgttctcgtcgatgatcgccgccgggagcccgtcgctgtacaagggaggcaaggggtgcggcgcgtgctatgaggttaaatgcacgaccaacgcagcttgctccggccagccagccaccgtcgtcatcacct

SEQ ID NO: 484 - DNA, 514 bp, Oryza sativa
  Clone ID: uC-osflcyp011a01b1
ttatttttgagctcaatcagcaacaacatctatctccttcttgcttagttaagtccttcgccctcccaagaagaagaagatgtcttgctgcggcggcaactgcggctgcggcagcggctgccagtgcggcggcggctgcggcggatgcaagatgttccctgatgtggaggccacagccaccaccaagaccttcgtcctcgctgctccatccaacaaggcgagctctggaggaatggagatggcggtggagagcggcgagaacggcggctgcggctgcaacacctgcaagtgtggcaccagctgcagcggctgctcctgctgctcctgcaactgaatctatcgtcgtcgtcgcccggctgcatgaggatttatcgtatggatgctgctactgtcgatcagagctttgatcgaggccttaatttgcttgcattagtacccagcttatatgtaggcaggccttgccttttgctctgacgcctaaataaaaccgtcgtcgtcgttgtcagtgtgtgcg

SEQ ID NO: 485 - DNA, 514 bp, Oryza sativa
  Clone ID: uC-osflcyp011a02b1
ttgctctcacccaccgcgaccgaggaagaagaagagaggagatcaggaggaggggaagaggaagtagggatgggtttcgtgatggagttcgcggagaacctgatcctgcggatgatggaggacccggggaagcgggacgcggcgcatcgggagcacgtgtaccggatgaaggagcggtgcgagcgcaccaaggcggcgtggagcctcccgctccgcccctacggcttctggaccttcgaccgcttcaactcccagctctcctgggatccccagatcagccacgcccccggccgccgcgacccctacgacgacgttctccaccgtcactccaacccacccccctcctccttctgatcccccgattcgatccggaatagatgccgttcgtgaggaagtgtggtcgcaataagaaacccgtttccatccaaatgacgtctttgaaaattttatccttgaactaccgtgctttggtcatatgctttctgtttggtaaaagctcagatccagaaggtct

SEQ ID NO: 486 - DNA, 513 bp, Oryza sativa
  Clone ID: uC-osflcyp011a03b1
ttcgtttctcttctcctagccgacgcgacgacgacgacgacgtcgtcggtgtcgcctccgcgcgcgcggcgcgctgctcccctgcacgccgccgccgacccacggagaggactccccacccatcccaggtacggcgcctcgccgcgttctcttctccaggttcgctttgcagaactccctaacaagaaccagatccaacccgaccaccgctccaagtcttgagggttcttgcattgggagagggggagatgagcggcccaatgcaacgctcgtcgcagccacagtttatctctagcgtcgagcggaacaatcaatcgaatggtcctggcactcctcttattgacagcatagatgttgatcagattgttattccagagaaaaatagttggaagaacctattttcatacatagggcccggatttcttgtctctattgcgtatattgatcctggaaattttgagacagacctacaggctggagcacagtacaaatatgagcttctttggatcatac

SEQ ID NO: 487 - DNA, 515 bp, Oryza sativa
  Clone ID: uC-osflcyp011a04b1
tttgctctagcgccactagtctagagctcgtcaccaacgtcgccatctctgaggtggaggtcaaggagaaaggcggcaaggactgggtggggctcaaggagtcgggctctaacacctggacactcaaaagtgatgcaccactcaagggccccttctccgttcgcttccttgtcaagaacggtggctaccgtgtcgtcgatgatgtcatccctgaaagctttactgccggctctgaaaataagagtggcatccaactctaagtaacaggcatgcatactcttgtgttgggtcatattggaattatgaacctctaaataattatgtcttaaaagagatcgctccatgttcgagcgaaccattaattaattttctattaattaattttctgggggtatttttttgtaatgggctaatggcaaaataaggcatacatgtgtactccaaaatattgctgtggagctatatgcaaagcatggttttgaatatatgttatttatataagatatatgggaaaa

SEQ ID NO: 488 - DNA, 390 bp, Oryza sativa
  Clone ID: uC-osflcyp011a06b1
ttaaatttgaggtcatagacttccaccagacattggaagttaatggcatacgcttctggtgctatactgctggccatgtacttggcgctgcaatgttcatggtggacattgctggggttcgcgttctttacactggtgactactcccgtgaggaagatcgccacctgaaagctgctgaacttccccagttctcccctgatatttgcattatcgagtcaacttatggcgtgcagcagcaccaaccccgccatgtacgagagaagcgcttcactgatgtaatacacacgaccgtcttgcaaggtggtcgcgttcttatcccagcctttgctcttggaagagctcaagagctgctacttatcctggatgagtattgggccaaccacccagagc

SEQ ID NO: 489 - DNA, 494 bp, Oryza sativa
  Clone ID: uC-osflcyp011a08b1
tcgttcttatcaagtaagtggagatccatgtggacgcttcgctcaaaaatatctcttgatggtggagcagtgtgtggtagtcgcaggcgtggtcaaaataaatattgtcagagattcattaataatgttgaaaaagttctacagaattatcaaggaaagatggtggaagcatttggaattaagtttgaatttgacagcattctagttgataatctgaataagtgggttagttttgctgtgtcagcgaggacaaaacatctatcttttgatttagtgcctattagatttgctcgttgtgacgatcggttcatatttccatttgaacttttagacagtggaagcatttgccgtctacaacatcttcaatttagctttatctctttgcaaccaccttcctggttcggaggttttccaaacctaatgaagcttgagcttaatttggtgcatgttacaagaaaggaaccttgtgaacatgttgtgcaactgttgctgtc

SEQ ID NO: 490 - DNA, 388 bp, Oryza sativa
  Clone ID: uC-osflcyp011a11b1
tttcgtcttgatttgggtggttgccattcatgtccatctttcgatccatttctccccccaaattcttctccaatcagctcgattccgtcctcttcgagcagatcagctcccgctgatcgaatcggtgtcgaattttggttgtggttgctgttcttgggttggatcttggcggtgagaaagatcgtgatttttgttgttgggatttgggaggaattgtttgcgctggagggaggagttgagctcgctggccatggtttgccgaggcgagcagagaagaaatctctgagctttatgaagatcgccactcacctgcgccgctcctgcttcctccactccttctcggttgtcttcctctaccgggtttatgtgatcctcataattctggggg

SEQ ID NO: 491 - DNA, 472 bp, Oryza sativa
  Clone ID: uC-osflcyp011b02b1
gttctctcaccattgcttgcaaagctggtcgtgtcactcctcccgttaagcttcccgcggcggcgagagcaagctaagctaggtcgggcatggggaaggacgaggtgatggagagcggcggcgccgccggcgagttcgcggccaaggactacacggacccgccgccggcgccgctgatcgacgcggcggagctggggtcgtggtcgctgtaccgcgccgtcatcgccgagttcatcgccacgctgctgttcctgtacatcaccgtggccacggtgatcgggtacaagcaccagacggacgcgtcggcctccggcgccgacgcggcgtgcggcggcgtgggcgtgctcggcatcgcgtgggcgttcggcggcatgatcttcatcctggtctactgcaccgccggcatctccggcgggcacatcaacccggcggtgacgttcgggctcttcctggcgcgcaaggtgttcctggt

SEQ ID NO: 492 - DNA, 490 bp, Oryza sativa
  Clone ID: uC-osflcyp011b03b1
cagtgcaactcagttcttggaaagaaaggttggatttttactctgaacaaagcgaaaggtgtggcaatgggcggcagcggaacgctgatctccatttaccctgaggatctcactttcctatttgagctggataagcggtgctattgcaatctcaaggtggtgaacaacagcgagcatcatgctgcattcaaggtccatggccttccatttcatgaccaatattttctaaaacttggcgagaaggcttgatgaaagtttgtttcatgtcaagacgacattaccgaggaagtattttgtccggccgaacacgagcattgtccagccatgggattcttgcacaataacaagtaaatagtaccttcgccgcataataagttaatctaatacgagatgtgacatatcccagtacttgtccaaattcatagtactagtatatatcacatcttgtattagattaatttattctgggacggagggaatacatgttcct

SEQ ID NO: 493 - DNA, 408 bp, Oryza sativa
  Clone ID: uC-osflcyp011b04b1
ctcctttcttccacttcactcgaaaggctccctccacttataaaccccaccaccaactcctccaatggcggaaatccccgaccctgcgccccttgcctccgccccaatccgcggaatccgagctcgccgcgtcctgccctaccgatcgatctgagcctcgccgcgcgccgtgccctagatcgggagatctcgcctccggcatcggggacagcgcaatggtggagacgtccggcggcggcgggaggctccacccccacggccagcggcggagcgtggccgcgttcctcgcggccaacaagacgctgctcgccgccgcgtgggtcatcgggttcacgctggtgttcctgtggcagagcgccaaggtatcggtcggcggcggcggcgggggcggcgggttcctcaggctgc

SEQ ID NO: 494 - DNA, 297 bp, Oryza sativa
  Clone ID: uC-osflcyp011b06b1
tcctttggggtactggctagaaggcacgggaactgattgaagccatcctgatcaaacaagtgttgaaatgggaggtaccagcggaactatgaatgaatgcatcaatacaacaccttctgtggatccaaaatgcgacagctatgccgcaacacacaccttgagctacaactatgcaggctgtgcacgaatgatgcaatggcactgcacccaagaagcctacagatcttgtgccaagatgtcatgcaccttttccagcatgcttgtatccacattgttgtcaaaccctgcaatccatgc

SEQ ID NO: 495 - DNA, 498 bp, Oryza sativa
  Clone ID: uC-osflcyp011b08b1
tcgtataatctcccgtctcgtctcctccggtccttgcgccatcccgggctgaacagggaggggcgacgatctccttctggcgagcagagcaagggaggggaggggaggggatcctggtgatactatgcgtttgatgtcctctgttccttgacttggatgtaaccagttatctgcctcgtcagtaacctttttgatccttcaaacaaaaagtcagtagtacttgcacttgattggcaaaattagtcaagacgggtgctctttgctgcgtggccgcgaggccacatgggacaaagtctaatcttgcaagcagagactgttctatggatcctaatgaaccttgctggcggatgaattcaagcttctctcctccaatgtcaaggagatgggactgcaggaatccatctgatggattgccacacaggattcatgatgctccaccttatgtatcatcactgtcatcccatagtaaaggaagtagaagtgcatttggcagtgacc

SEQ ID NO: 496 - DNA, 399 bp, Oryza sativa
  Clone ID: uC-osflcyp011b09b1
tttcgtcttagcagagctggggaggggaggggatcctcattctgtaaagtgtgggcaaagctcatggcaacatgaaatggcattattcctgatgtcacaaatgtatcgatgttgtacgtaccttgttgggaggccttgtgaacaatctatttggagcctttaactcatggtgatgaaacggggacaataccatctaattgtgaacctatctttcatcaaatcagaacattcatccagatgagaacaaacctaaaggtggtagacaactctgatgccaagcagcgttatgtgcattcagtgcttgacggggaagaaaggagcgaggctcgatgacactataattggatatgtcaaggaagcacatcctattgggaaggtgtagaaaggagatgtggctta

SEQ ID NO: 497 - DNA, 454 bp, Oryza sativa
  Clone ID: uC-osflcyp011b10b1
ttctcctcccccccacggcggcggcggcggcggcggcggcaggatggcggactcgacggcgcggacggtgaaggacgtgaaccctcatgagttcgtcaaggcctactccgcccacctcaagcgctccggcaagatggagctccctgagtggtttgacatcttgaagactgcgaggttcaaggagctccctacttatgatccgtactgttactacacgagggctgcctcaattgcaaggaagatctacctgaggcaggctattggtgcatgtggctttcagacgacctatggtggccgccagaggaatggctcacgtcccccgtacttttgcaagagcagcggttctatctcacgcaacatactttagcagctgcagaagatgggcatcatcgatgtcgaccccaagggctgaagactcatcatctcccagggaaggcgtgatctggaccaagtg

SEQ ID NO: 498 - DNA, 291 bp, Oryza sativa
  Clone ID: uC-osflcyp011b11b1
ttgcaagaagctcatctcctcctcctctcgcatggcagccatggccaccaccgcgtccagcctcctcaagacctccttcgctggcgcgcgcctccccgccgccgaccgcaaccccaccgtctccgtcgcgccgcgcaccggcggcgccatctgcaactccatctcgtcgtcgtcgtccactcccccctacgacctcaacgccatcaggttcagccccatcaaggagtccatcgtgtcccgcgagatgacccggcggtacatgaccgacatgatcacctacgccgacaccga

SEQ ID NO: 499 - DNA, 207 bp, Oryza sativa
  Clone ID: uC-osflcyp011c01b1
tgctttacatcctctctctctctccccattattcctccgccttctagaaccttctctccgccgccgccgacgaccagccaccgaatcgaagtgatggccgccgccggatctaaggccctcgccatcctcgccgtcctggcggtcgccgccatctccgccgtctccgcggccgacgcgccggcgcccagccccacctccgccgccggc

SEQ ID NO: 500 - DNA, 508 bp, Oryza sativa
  Clone ID: uC-osflcyp011c02b1
ttagtccgaacatgacatcctatgaggtttgctgggaaaggaaatttaaataaaaaacatatagtgattcttctcagaattggtttgagttgtatactttgctctcaatggaattatggcagaagcccactggcgataaattgatgcaatcagaagctacttctagtgctacctatttaattagtgcggattggactataacagagagctgcaaattatcatacaaaataacacttgaagatggtgaagtagatgtgtactggttgaatactatgggccaagaattcttgtatgaacaattgttattccacaaagaggagttcgctacagtttgggtttatcaaagtactagttttatcaaaagtaagggcagtggcagggttgtcaccattgcagcaagtacctcatttaccaactctataccattgccactacagtattggaattatgggtctgtgtggaaattacagttctgttgtatggtctttctgatcagtgtcaaacaagc

SEQ ID NO: 501 - DNA, 342 bp, Oryza sativa
  Clone ID: uC-osflcyp011c03b1
aacgttctcgcagctaggcgctcgcttccttgggggacttttttatcctgacgcctgacgttcggatggagagcttcatcatgacacacgacctgcccagagctacagccccaggatgggacccagagaactccttctgagtgccatattcaccgtcttcttcttgcttttgctctgcctcggatgcaagtgcatagccttagagatacacttacacacgaccaagactgcggtccttaaggatgacgccctactgcaacatagctcgacagatccacgacatcgctatttggaatatttctttgaggaaaccaaccatgcaggagctggtggaataatggg

SEQ ID NO: 502 - DNA, 509 bp, Oryza sativa
  Clone ID: uC-osflcyp011c04b1
tcagtctcatgaccaagtgaagctctcgccgtctcgcggtgactccaccatggcgagggcggcgagggggaaggcgccgaggccgaggccgaggccgccgcgcgggctggcggcgagcctccggcggctcctcgccggggccggcggcgggctgggcgtcgcggcggcggcgtacgtcggggtggactacctgcggtacctctccccggcgtggcacgggcggctgatgccggcgctgtgggcggcgctggcgctcgccgccgcggcgcgggcgccgttctaccgccactggtccgccgagctccgcgccgcgctgccctttctcggctccatcgacttcatgcttggggccttcctctgcgaggccgtctccgtccgcttcgtctccgtcgtgatggggctccagtggcacagatctgctgctccactttctgacactgggcaatggctggctttaccattgaacgagaagcttcctcaaagtgtggctggaccactgagagcccatg

SEQ ID NO: 503 - DNA, 433 bp, Oryza sativa
  Clone ID: uC-osflcyp011c05b1
tcccttctcgatcgatcgatcgatcgaattgatcgatttatgtcctcctacaccaaccaataatataatccagttgtctttgttggccgctcgttgcgaccacgccactacagtcggggcaaccatgggtgcttgtgcaaccaagcccaagacgctcgagggaaaggctcccgaggaggccactgccattgaggcagcacccaaggttgccctcgagaccacattgatctccaataaggaggtcgtggctgatcaagcacctgagaaggcagtggaggaggccaccgggatggcagagttaccacccattgattatgccattgacatgcaagacaaggaggaggacgttgaataaaagatcaggaaggaggagatgccttgacccccagctgcctaggtgaacaataccgatgtggtcgaggaggccattcct

SEQ ID NO: 504 - DNA, 441 bp, Oryza sativa
  Clone ID: uC-osflcyp011c08b1
ttgtctcaaccaggggtggcagagagggaggtggcgcatgtgtacgtgctgatcaagacacaccagcctgtgctaggtggacaccagcagccgcagcagctggcgcatggtccactcatccactccatgcgagccctcaacgtggccctctccgtcatgaaccaaccacatgcttcttcttcttctgctgctgctgctgctgctgctgggcatcattacccggcgatgacaatgatcagagcagagtctactccggcgaacagacctgctgcagatgcttcatacaaccacggcgatggacggcaagaagatcatcacccgccaaacgaagaaggattaactgtgaggacaagtgattgtgggtttaccacacagatggcccttcatgaagatggctaccaatggaggacatatggacagaagaagatccagggcactcac

SEQ ID NO: 505 - DNA, 501 bp, Oryza sativa
  Clone ID: uC-osflcyp011c10b1
ttcaatcgttcctgaacgccgtccgctcctactcggtcttcgccaatgaccgcaccaacgacgactccaagcgcgagatcgctgccttcttcgcgcatgtcacacacgagactggacatatgtgctacatcaatgagataaatggggcaaacatggactattgtgacaagagcaacaaacagtggccgtgccagccgggcaagaagtactacggacgcgggccgctgcagatctcatggaacttcaactacgggccggcggtaaagaacatctggctcgacgggctaagggacccatacaaggtggcgcaagacccgacaatctctttcaagacggcgctctggttctggatgaacaacgtgcaccaggtgatgccgcaggggtttggcgcccccatccgggccatcaacggtgcgctcgagtgcaacgggaagaaccccggtgccctaacgcaagggttaactactacaaggactactgtccgcagttcggcgttagccc

SEQ ID NO: 506 - DNA, 505 bp, Oryza sativa
  Clone ID: uC-osflcyp011c11b1
tttggggtatcaccaaacatgcagttgatggacaggatacttgttcaaagtgtggtagtgagcgatgatctgattgatattgctaaagacttgtcctgcaaacaaaaggggaagctagtcttgaaagggcctgataagattatgtcaaagatttatgtgaacatccggaaaacaggagcccttgatgagaacaagcctatatgtggtaccacagaggggattggcaatagccatcatgacaataagctttctggtttaagtatcatgaaaaactcttcccgtgacgactacgtaattgatgggatgcatatatatgtcaagatcccatctattgcaaagaccattaaactcattgtgaagaactccaactctgttgctgatgtcaaggtggagattgaacggaaggaaaggattctttaagataaccaaatgctgatgtatgcaggtcgacagcttgatgatcgccagattttaaagcattttggtctatcagatgatcagatac

SEQ ID NO: 507 - DNA, 459 bp, Oryza sativa
  Clone ID: uC-osflcyp011c12b1
tttcttcgacgccggcgaggaagcggctgatgcgggacttcaagcggctgcagcaggacccgcccgccggaatcagcggcgcgccgcacgacaacaacatcatgctctggaacgccgtcatattcggaccggatgacacgccgtgggatggaggcacgttcaagctgacactacaatttacagaagattatcccaacaaaccaccagttgttcggtttgtctcaaggatgtttcacccaaatatttatgcagatggaagtatctgcttggatatcctacaaaatcaatggagccctatatatgatgttgctgcgatattgacctctatccagtccctgctctgtgatccaaacccaaactcccctgcaaactccgaagcagccagactgttcagcgagaacaagcgcgagtacaaccgcaaaagccgcgagattgtggagcagagctggacggccgact

SEQ ID NO: 508 - DNA, 511 bp, Oryza sativa
  Clone ID: uC-osflcyp011d01b1
ttatgtagctcatctcctcctcctctcgcatggcagccatggccaccaccgcgtccagcctcctcaagacctccttcgctggcgcgcgcctccccgccgccgcccgcaaccccaccgtctccgtcgcgccgcgcaccggcggcgccatctgcaactccatctcgtcgtcgtcgtccactcccccctacgacctcaacgccatcaggttcagccccatcaaggagtccatcgtgtcccgcgagatgacccggcggtacatgaccgacatgatcacctacgccgacaccgacgtcgtcgtcgtcggcgccggctccgcggggctctcctgcgcgtacgagctctccaaggacccctccgtcagcgtcgccgtcatcgagcagtcggtgtcccccggcggcggcgcgtggctcggcgggcagctgttctccgccatggtggtgcgcaagccggcgcacctgttcctcgacgagctcggcgtcgcgtacgacgagcaggaggactacgtcgtcat

SEQ ID NO: 509 - DNA, 438 bp, Oryza sativa
  Clone ID: uC-osflcyp011d02b1
ttcgctctggactgtactacactgctaagcgtgacgccgacttttaaacaggcgcactatccattcataggaggagtggctcatggggaccctgacggaactggactgatcagtgagacactcattggtaatgctcttgttgatatgtattcaaactgctcagatcggcgacgaactaataagatattcacgaatatggaacaaaaaaatgtggagtcatggacagcattgatcacaagttataccagggctgggcattacgacaaagaggctgagctacttcacgaaatgggattagaaggtattagaccacatgtgttagcactcaccagagctctcgatgcatttgctggcaacgaatcactgatacatgggaaatctgtccatggatatgccatcagaaatggaattgaggaagttcttccacctgctaatgca

SEQ ID NO: 510 - DNA, 487 bp, Oryza sativa
  Clone ID: uC-osflcyp011d03b1
tcttctgcactcccactaccatggatccttgcaagttccggccgtcgagctcgttcgacacgaagacgacgacgacgaacgcgggagctccggtgtggaacgacaacgaggcgctgacagtggggcccagggggccgatcctcctcgaggactaccacctgatcgagaaggtggcgcacttcgcccgggagcgcatcccggagcgcgtggtccacgcccgcggcgcctccgccaagggcttcttcgagtgcacccacgacgtcaccgacatcacctgcgccgacttcctccggtccccgggcgcccagacccccgtcatcgtccgcttcttcaccgtcatccacgagcgcggcagcccggagacgatccgcgacccgcgcgggttcgccgtcaagttctacacccgcgagggcaactgggacctcctcggtaacaacttccccgttttttcatccggacggcatcaagtttcccgacgtcatccacg

SEQ ID NO: 511 - DNA, 462 bp, Oryza sativa
  Clone ID: uC-osflcyp011d04b1
ctccctcccctgcaacagaacatggctcctccaacaccaagattggtagttcctatagatgtgagcaagaagccatgggagcaaaaagtccctctccataaccgctggcatccagatatccctcctgttgcagatgtaactgaaggggaattgttccgtgttgagatggtcgattggactggaggaagagtcagtgatgataactccgcagatgacatcaaattcctggatctcacaattactcattatcttagtgggcccttaagaatagttgatgctgaaggggttccagctgcacctggtgatcttcttgctgtagagatctgcaaccttggtccacttcccggtgacgaatggggatatactgccatatttgaaagggagaatggtggtggattcttaaccgaccacttccctagtgcaagaaaggcgatttggtattctgaaggaatttatgcatac

SEQ ID NO: 512 - DNA, 479 bp, Oryza sativa
  unsure (1)..(479): unsure at all n locations
  Clone ID: uC-osflcyp011d06b1
ttgngttcggccaaacatagcagcagcagtttgcgtacttcggccgcacctcacctgccaatccttgtacgacagcgccctgccaaccatctgctctctctaagctctagctctacctttcttcctcctcgatccatccatcatcgatcattcttcttcttcttcacctagctagcttgctcccgccagacggctctaatataatgaaccatggctagctagttcatcccatcgtacagtgcactagtatagtatatggaggagtacgtgaccgcgggaagcactactcctccgccccattttcaccagctgctctccggcaccggcgctgcaccaccaccgtcgtctaacgatgacgcccatccttacccttatgctcagagcagaagaacagtgcccgcgcggcggctgcggcagagacttgagcatgaggtgagtgagctgaacaagcagctgcggaacgaggaggcggtgcatga

SEQ ID NO: 513 - DNA, 505 bp, Oryza sativa
  Clone ID: uC-osflcyp011d07b1
tttcttaatacgaagataggtacaaactacattccagtgggtgcacacttctcaaacaaagcatgcaagaaggtgtgtgaactatctatgtcgttgccacaaataatgaaagtgacagagctccctaagttgaaagcctggcctaagagttgggagaaggcatcagtacctagtgctgagagtattggcttatttttcttttcacagaatacgaggtcaaataaagaatttgatgacctagtgaagcatgtcattgattatgatattgttctagaaactgatgttagttttgccaagctgctagtcttcccttctgttgtacttccagctgaatatcgggtattccaaggaaaacactatttgtggggagtgttcaaacgcagtaaagatatggctgaaagagatgccttagtggaacagaattgtacgacatgtctggcagatgaagatgttccagaacagaatgccttaatattgtgccatgtaaagccctggatcaagaaat

SEQ ID NO: 514 - DNA, 404 bp, Oryza sativa
  Clone ID: uC-osflcyp011d08b1
tctttctattaaattgatgcacctgttccctagcactatgttgggatgagtgacaatcttaacttgcaaggaatgcacctgatcctttgctgtgaatacactactctcaggctgctgcaagaatcaatataccagccgtatacctcatatagtgaatataaatcatgtgacagatatatgtacaaaaagacacactaattaagaagtgccaacagacttaatccatcatgctgcaaacgatatctattactgaatggttagaggctatacaaaatagtaatagggctcgaagaactctccctaacagtgattgaccacgtgatgatgccttcatgaccttgtctataggaccaaagatgcacctagaactaatgtgatcagaaagagttccaggccagaggact

SEQ ID NO: 515 - DNA, 464 bp, Oryza sativa
  Clone ID: uC-osflcyp011d09b1
ttttctgaagtcaggttctcagtgcccaggctgccgtttcatatgagagtgcaagagcaaaagttgcagattctgtcaatgccactaatatgagagagattgtttttacacgtaatgctactgatgctatcaatttagttacatatacgcggggcatgctcaacttaaaacaaggtgattagatcgttgttactattgcaaagcatgataagactgttgacgcttgacattttgcttcccataagactggagctactttaaagcatgatgggctaaccaaaaaaggagttgcagacattgagcaattgatatgtcttgtgtcatacaagacgaagattgttgttgttcatcatgtctcaaatgtactcggttcaatgcttcctattgaggatattggaacatggtcaaacagaatcggtgctaaagtccttgtccatgcttgtcaaagtgtttctcatatgcct

SEQ ID NO: 516 - DNA, 500 bp, Oryza sativa
  Clone ID: uC-osflcyp011d10b1
tccgttcgcttcgccgcaggagtttgcaaagatggtggtgccgttgctgacgaagaagatcgtgaagaagcgggtgaagcagttcaagaggccgcacagcgaccgctacattggcctcaagacaagctggcgcaggccaaagggtattgactctcgtgtcaggagaaagttcaaaggatgcaccttgatgcccaacattggatatggttctgacaagaagacaaggcactaccttcccaacaagttcaagaagtttgtggtgcacaatgtctctgagctggagctgcttatgatgcacaacaggacatactgcgctgagattgctcacaacgtctccacccgcatgcgcaaggagatcgtcgagcgcgctgcgcagctggacatcgtggtcaccaacaagcttgccaggctccgcagccaggaggacgagtgaaattttctgcagtttttcgtgcttatggctgcattgttcgtagggcagtgccttggtaccttaaaat

SEQ ID NO: 517 - DNA, 441 bp, Oryza sativa
  Clone ID: uC-osflcyp011d11b1
ttctgcatcagagttggaggaaccagtgaaggatattcttcaggtttacaatatcgtggaggattttgagaagctaaagatcactgtgaactcttaagaacagccgaaaaagtctgacaaggctgctcatagagccaccaatgtgtcaccaatgggtaatctgaagccaagatcgctgaattctgatgcagctcaaagtaaggaagcagctaaaaaagacaacattcataagaagcctgatgcaaaggttagaggctcctacaaccggaatcctgcaaaagaagccatcaccaagaatactggcaagaaagccaagaagcaggtcaaggggcataaggaagattgcaatggatgcagtgaggctttgccagttggtacagagcaagaacctgctgatgtggtgaaggaggtgacatatgaagataaggagaatattgtgga

SEQ ID NO: 518 - DNA, 480 bp, Oryza sativa
  Clone ID: uC-osflcyp011d12b1
ttcttgatggaggctctggaaggtctcaccgggttcctcagtctgattcccagcaaataccctctggcgatgggaatgccgagagagaggcatcataagccctcctcggcctttcctcatgctacctcccattcttgactcttcagtaattatctccaacaaattcaaagagctgaagctgtacaggtccttgtccatcctttttctgcttctctgaatcaccacacaccggtgcttcatcatgtatcacattcaggcaggaaaatgttcttgcttgcccctccccgccccaattcctgcatgccccgtgaaaataaatggggcaaccattcttatttatccctaccatatatacacacacaagatacactcaccttctgacactcggttcggcgaatgatgtgccttgatcccttctgtgtagttatacaggtggcctgcagtggacaaagcttaccaaactgactgtattggggattc

SEQ ID NO: 519 - DNA, 509 bp, Oryza sativa
  Clone ID: uC-osflcyp011e01b1
ttcattatgtatcttccactgaagtagaaagctatttcaacctatcttgctatgaaaacccaggcatcactgcttgtcaagaaatgctagagaggaacaaaaactcctggagcgacttaaatatctctaaaagtttccatcttcctccactgaatgatgagaacatacggaagtctatatttggtgatagagactcttcagggaccatccctggtgataccctatctacaacatatttccccagactagacggaactgattacaagtttggttttcagtttgatgattcagaatatatccgccaagaggatgacaggagaaccttggaggctctctatacattcccgactcttctgccatgtgtaaatgaaaatgtcccgctgtcagagatcttacctttgcagaaagatagcacacttgcctcaagagctttgaagtttattcagagcatgagtttgagagatcctcttcaccagttggtatcatccaagaattgccttctaatgtat

SEQ ID NO: 520 - DNA, 474 bp, Oryza sativa
  Clone ID: uC-osflcyp011e02b1
ccgttcgttccacgtcgccgacggcttctccggcctgcacttcatcaactcgtgggcggacctctgccgcggcgtcccgatcgccgtcatgccgttcatcgaccgcaccctcgttcgtgcccgcgacccgccggcgccgtcgcacccgcacgtcgagtaccagccggcgcccgccatgctggcccccgagccgtcgcaggcgctgaccgccaagccggcgccgccgcccaccgccgtggacatcttcaagctgtcccgctccgacctcggccgcctccggtcccagctgccccgcggcgagggcgcgccgcggtacagcacgtacgcggtgctcgcggcgcacgtgtggcggtgcgcgtcgctggcgcgggggctccccgcggagcagcccaccaagctgtactgcgccacggacggacgccagcggctgcagccgtcgctgcccgacggctacttcggcaacgtgatctttac

SEQ ID NO: 521 - DNA, 507 bp, Oryza sativa
  Clone ID: uC-osflcyp011e03b1
ttgactttgagaacggccttgttagcctggactcaaggcaaatggaaatcactgacttctttcgtcaacgctaccagtgggatgtgctagcagcaaggtcaatatgggcttttgggcctgaaaagcagggtcctaacattctcttagatgacaccctttcagtcgaggtggataaaaacttgctcaatgcagtcaaagattcaattgttcaagggtttcaatggggtgctagagaaggtccgctgtgtgatgaaccaattagaaatgtgaaattcaagatcttaaatgcaaacatagctcctgaaccgttgcaccgtggtggtggtcagataattccaacagctcgtcgtgtggtttactcagcgttcctaatggctaatccacgccttatggagcctgtatattatattgagatccaaacaccaattgactgtgtctctgccatatattacggtgctatcccgtcgtcgagggcatgtaacagcggatgtaccctaaccaggaact

SEQ ID NO: 522 - DNA, 423 bp, Oryza sativa
  Clone ID: uC-osflcyp011e04b1
tcgtttactgagtcatggctgccaagctagctcgcgttcactgtctccgcgaacgcctcggtgccaccttctcgtctcatcccaatgagttgattgcactcttctctaggtatgttaaccagggaaagggaatgctccatcgtcaccagctgcttgcggagttcgatgccttgatcgaagctgacaaagagaaatatgctccctttgaagacattctccgggctgctcaggaagccattgtgctgccgccctgggctgcactggccatcaggccaaggcctggcgtctgggactacattcaggtgaatgtaagtgagctggcagtggaagagctgagtgtttctgagtacttggcattcaaggaacagcttgatgatggacacaccaacagcaactttgttcttgagcttgatcttgagccct

SEQ ID NO: 523 - DNA, 299 bp, Oryza sativa
  Clone ID: uC-osflcyp011e05b1
cctcatttcaattatacaatgcgatctgcttttccggccttcgggtactcgggcgtaatggcccacgatctttgattcgtgtttcttaaatttcgaattgtgtaattggttgcatttgaatttgtcatggtcgagagaggagagacatccaaatgctttgttttggttcagctactttgcgaagttatcttggagtacgctcaatgtaagaatttataaagataaacaacatcactacatacaaatgaactaaaaaaacatcacaaacaaccaccctcaacacacccctctctctctct

SEQ ID NO: 524 - DNA, 336 bp, Oryza sativa
  Clone ID: uC-osflcyp011e07b1
ctccactcccagcttgaccgcctggagggtgggtttctatacataaaagcagacgcccctgccccaacggatggcgtaaagaaccagagcgtggcgcctgaaggctaccaaccgcagatcgagtcataggctggcacctgaagtctaccagctgctgatcgaatcatacagccaggtaggcataaagatactctctggaagcaaagcacctggtccctttaaatacaccgtcatacaccaggtgtaacctatggtcgactatggtgtgtcaaaaagcctcgatcaaatcataggcgctcaacttgacacaagcgcaacatcgttttttaaaaagat

SEQ ID NO: 525 - DNA, 432 bp, Oryza sativa
  Clone ID: uC-osflcyp011e08b1
tttcgtgccgccctttgatttgttttttcggtttttgttttatttttttttccagtcgtttcctttttgtggaaccgcaaaagaggatcatgcccatgttcatttagacatagcaaaaaacattcgccctttcgaaaggccgtctatccttgaggtttggggcgctctacggtttcctggctggcatttttttgggcattccatttctgttcaacaaagagggagggggggcccattccattccttggggaattcgagcacaggggctatgggcttgccctctttgatggcgacgagccccttgggcagctcctcgcacgggaaaccccgttttttcgccggggaggaacttggaggctacctactctggcacaaaccgggggagcgggctctaggggaccttcttgttccggttggggacaagcggggtgc

SEQ ID NO: 526 - DNA, 330 bp, Oryza sativa
  Clone ID: uC-osflcyp011e11b1
tgtttctttgggtgcactagtatggatcacggggtgtcctgcctacaactagtgatagaaagtgagcgccaccaacaccaggtgactgtggtcgactccatggtcgcccacagcatgacctgtaggcccatgaagggatggttgcctgttagccagaccatgctgaagcggtattaggcgaagaatgaccagacggagcttgagacatgctaccaggatgatcttgccgtcgacaaggaggctctggacctttatgctggtggcgccgacgtcatccacagcgatgaggctgctttgagagaaagtgtcccactgaccaaggtgtaccac

SEQ ID NO: 527 - DNA, 457 bp, Oryza sativa
  Clone ID: uC-osflcyp011f01b1
gtcgtttgtagcgggagggagggagagagtacgtgcgggcgtccggaggtctcagcgcacgcccgcggccgggccgtcgcgccgatcgcgatggggtcgtggcggcgcaaggcctacggcgccctcaaggactccaccaaggtcggcctcgccaaggtcaacagcgacttcaaggagttggatattgcaattgtgaaggccaccaaccatgtagaatgccctcccaaggacaggcacgttagaaaaatattcgtggcgacctccattaaccgccctcgagcggacgttcaatactgcatctatgccttgtcaaggagattgtccaagacaaagaattggacagttgcattgaagacattgatagtggtacataggctcttgagagaaggtgatcctacattcaaaagagagttcctggcctactcatacaagggaagcgttttgcagagagcaaact

SEQ ID NO: 528 - DNA, 388 bp, Oryza sativa
  Clone ID: uC-osflcyp011f02b1
ttcattccctagctagctagctagctaagctagcacgcacccatggagcagccttccacctcaagctcgctcgccgtggcagagatggtggccgacgtgctcctccttctgggtgccaccggcacgtccacccaggcagggcgcctcctcgacgaagaactccccaccgacgtcatcccagggatccccggcgtacccggagtgccggtagtcgggcccggtatcccggtgatccccgatgtgcccggagtgcaagtacatggacccgggatcccgttcgtgccggtgatccccagcgtgcacgcagaacgagccgatcatccccggtgtgccgatgatcgccggcgtgacaaccctgacagtgccgacaattgagccgtcgattgat

SEQ ID NO: 529 - DNA, 505 bp, Oryza sativa
  Clone ID: uC-osflcyp011f04b1
ttctctgctcctctccgcatcctcctcatcgcctgcgcttctgcttttttttttcttttttctctcgttgatcggtttgttcgatcagatcggttctttggagagatggagcagtccttcatcatgatcaagcctgacggcgtccatagaggcctgattggagacatcatcagcaggttcgagaagaaaggattctacctgagggggatgaagttcatgaatgtggagaggtcctttgcacagcagcactatgcctacctttccgacaagcccttcttccctgggttggtggagtacatcatctctggccccgtcgttgcgatggtttgggaagggaaggatgttgttgccactggccgcaggatcattggggccaccaggccctgggaggcatcccccggcaccatccgtgctgactatgccgtggaagttggcaggaatgtcatccatgggagcgactccgtggacaacgggaagaaggagatcgctctctggttccctgaag

SEQ ID NO: 530 - DNA, 377 bp, Oryza sativa
  Clone ID: uC-osflcyp011f05b1
ttcattttgcatcactactgaagaattggtgatgcgagcgcaacagagcccagctgcttcttaagtttcacgatggacagctggactggaatgcactcctcatctttctgtaaattacgctgccatgactgacttgttcatcctgaaaacagtccttcatgttttgttggcaaatgtgccatacgtgctctgcactatagttaggcttccttttattttcggcgagttttaatgtgtaaactatgttatgcttcagtttaaaatgggtacgggtgattcgtacataacacgtgtaataaaaacaactgtacataaaccctcatacctgccttggttctttttactggcaggtttacgagtccactgttgcttgcttc

SEQ ID NO: 531 - DNA, 434 bp, Oryza sativa
  Clone ID: uC-osflcyp011f06b1
ttcttttcctgctcctccatccattcccctactcctccttctcctaccatgcatgggaggccgtcgaggccattagcttcctcctcgtcgtcgtcgtcgtcccgcgtcttctccttcttcttggcgccgcgggttttcttgttcttggtggtggtggtggtcgtcgccttcttgccgggtcggtcgtctcgctggtggctggagggcacggaggagttggaggaggagatggggtttgccggggactgctcgccgggcagcgggggcgggctcaggtgcgttccttcgctcgatcttgggctttcttgacttgaccctcttttgtgttggcgaggcttcgtgttagggggaagatccaagaggaggaggaggaggaggagacggacgacaagtttttcatggcgcggtcaggggctttgcgcatgatttgattg

SEQ ID NO: 532 - DNA, 497 bp, Oryza sativa
  Clone ID: uC-osflcyp011f07b1
ttcttcacgcatatgattacccatgatgagcatgtgtgtttcctttttttattagtgctaagctggaaatcaataaatccaagatattcatggagcatgctacctgtgatgatgtgcatgagcatgctataaatgtatcacatggagaaactgcatcaacatcaaccagtcatgaagattcgcacagtgattcagatgattcacatcaggatgataggccttcaacaagcacacaaaccccatcaccacagtcttcagcatcaacttcgcccactgcatataacaccagatatttatcctttcctagaagagatagtatgtatggtcatggaagacgtatttggaattctggtttgtggatctcgcttgaactggtcatatatgtagaacagattgtagctgctattttcgcccttgtcttgttatgagacgaacatccgtatgcccctttatttgcctggattattgttacacaattggctgcattgcagcattcc

SEQ ID NO: 533 - DNA, 468 bp, Oryza sativa
  Clone ID: uC-osflcyp011f08b1
tcgttagagatccccaaaatcagcagcgaaactccctgcagttcgcgagtgccaaaccgcccgggggctgagctgagctgagctgaacctcagcttagccatggggcggttctccaatggcgtcctgggcgccctgagcttcgccgccctcctcgcctccgtgccgctcatcggcgcgggcgcctacctcctcgaccacccggccagcgagtgccagcgccttgtgcgggtgcccgccgtggcgctcggcagcgcggcgctcctcctctccctcatggcgatcgccggagttacctgctgccgcggcgcggcgctcctctgggcctacgcgtccgccatgttcctgctcatcgtcggcatgttctttgtcaccgccttcgtgttcgtcgtcaccaacaggggcgtcgccaccgccgtgttcggaaccggctacggtgactaccgggtcagggactactcggagtggct

SEQ ID NO: 534 - DNA, 477 bp, Oryza sativa
  Clone ID: uC-osflcyp011f09b1
tcgtccaaggaggataggcgggggcggcaactgggggaaagtgatcagagctcgcgaggacgaaggcgacggtgaagggcaggtacgagggcgacaaggccacgggcgacgacaccctggacttgaccccctacggcggcgacctacgctacaaggccatacgacaccgatgccgtcttcgcccgggggccctccctcgagggcctcatgctcaccctcgagaggccggggtccttcctcctagagctcacgccgcactcctaggatgtgcgcttgcaattgatgaactccgcgctgctgctggaccgccgcgtaaggctcacgtacacgcactcgaccagcctctccccgggccccgccaagctgaccgcccgcaccgccctggacggatgcctgacctttgatccagacaacaaggttagcctctaccacacgctgggatcctccggatgccgagtcaagtactcctacgcacac

SEQ ID NO: 535 - DNA, 507 bp, Oryza sativa
  Clone ID: uC-osflcyp011f10b1
tcgtcagagaaaggcgtcttcgtactcgcctatgtccgcgcctccgcgcttttcctcctcctctcccctctctcccttctccgccgtcgtcgcagcatcaacccaatccgccgccatgagggagtgcatctcgatccacatcggccaggccggtatccaggtcgggaacgcgtgctgggagctctactgcctcgagcatggcatccaggctgatggtcagatgcccagtgacaggactgttggtggaggtgatgatgctttcaacaccttcttcagtgagactggtgctgggaagcatgttccccgtgctgtatttgttgatcttgagcctactgtgattgatgaggtgaggactggttgctaccgccagctcttccaccctgagcagctcatcaatggcaaggaggatgcagctcacaactttgcccgtggtcactacaccattggcaaggagattggtgatctgtgccttgaccgcatcaggacgcttgctgacaactgcactgg

SEQ ID NO: 536 - DNA, 475 bp, Oryza sativa
  Clone ID: uC-osflcyp011f11b1
tctcctttcatcgtcgtcgtcttcttcgatcgatcggctgatccagtaattcctcgatcggtggacgtacgccacgctactatcatcatatcaatccccgatcgacaggttaacatcgatcgatcatccaagccagccatcgatccatcagaataagcagctagcttggagaccgatcgatcgatcgatcatatgtcgattcgattcgatccgatggagagcagaagcagcagcagcagcagcagaagcgtggtgatgatgtgctgcgtgctgatgttgatgattgcggcggcggcgcatgcggccgagcaggaggcggaggagtgcgctagcccgatgagcatcgaggaggcgtgccggggggcattggagacgcaccacgcggtggcctacgaccactgcgtggcgtctctgacggtggacccgcgcatcatcagagcgaggcccgcagcctgcacggcctcgccatgcttgg

SEQ ID NO: 537 - DNA, 506 bp, Oryza sativa
  Clone ID: uC-osflcyp011f12b1
tctgtcatggcctccaggagatgatgcttgtggtacgagctcttctactgcatattatgctaagtctggatttgattttatagagaagagcaaccaaataggcccactgttccacaacatcgcgctgcagcaatacatcctgctttgcgcacaggtgctggatggagggttgagggataagcctgggaagaacagagatcactaccactcgtgctactgcctgagtggtctgtcagttagccagtacagcgccatggttgattctgatgcgtgccccttgccgcagcacgtgcttggtccttactcaaacttgctagagccgatccatccgctctacaatgttgtactagacaaataccatacggcctatgagttcttttcaagctagtgatacaactgtctaggacatgtatgatatgtatgagctctacaatgttgcgccttacaagttacaactgtctaagacatgtatgatatttcattcttttttacactgactgaacggc

SEQ ID NO: 538 - DNA, 453 bp, Oryza sativa
  Clone ID: uC-osflcyp011g01b1
ttgtgttgtaaatattggtgtcaaactaaaggaaagatcatttgcctgcaaaaatcttgaagtggtgaatattagatgctctaaagatgatggaagagtccatatgttagcagaactctttggtgctaatgggttacctcttgagaagatttttgttcgccgaacaggcagcacctaccttcgtaacatgaaaaaaatgagaaaaattgccagggatgagctgcgaaaagctaggtggttccagctgttaaatctataaacactacattctaaggacctgatggccaacaaagttagacttcaagcacactgattactcgtccaaagttgtgatcgagcttacctcggcccaagaaatgttacaaaataactatgcgattatttaggtaaattttagtttctttcctcgatctgcacatttcttccacttgggcatcaacctttgatgggcat

SEQ ID NO: 539 - DNA, 414 bp, Oryza sativa
  Clone ID: uC-osflcyp011g04b1
ctgatttctagggcggacatgagcgtcgcccatgctggtgcgtcgtcaccagagccactccagggaggacggcttgtcggagttctgcggcactgaggagctcgtcgtcgctgccgttgcggcggaatgccacctccgacgacttcatgaacgcggtctccttcaggacccacgcggttggcacgagcggtggtgcgcggcgggcgccgacagaggcgaagctgaaggtggcgagcaacgggttgggacgcatcgggcgcagctccctgcggcgctggcacgggcgcggcgacaggtcggccctagacgtgatcgccatcaacgacaccggaggcgtgaagccagcgttgtacctgctaaagtacgactccacgctcggcatcttcgacgccgacgtctagcccgtgggcgaca

SEQ ID NO: 540 - DNA, 462 bp, Oryza sativa
  Clone ID: uC-osflcyp011g05b1
ctccttttcgcacacagtcctaagtatcacacacacactcacgctcacgctccactacaacgcactgtacacagttgattattagctagttgggtttctggcccggccggcggcgagatgggcatggacaagcaccaccgcgactggatcctccggcggtgctgcggctccatcgacgcctgcatgctcacgctcgccgtcctcgtcggcttcatcgagctcgtcatctacctcgcgattcacccctgcaagccttatttctacctccaggacgtccagctccgtaacatcgacctctccgaccctgccatctacctcaacctccaggtgacgatcgcgtcgaggaacccgaacgacagggtgggggtgtactacaagacgctgcacgtgttcacgacgtacagggaggagccgatcacggtgccggtggagctgccggagatctaccaggggcacaaggac

SEQ ID NO: 541 - DNA, 503 bp, Oryza sativa
  Clone ID: uC-osflcyp011g06b1
tgctcactctctctgaaggcctcttggcctgtattgtggtgaattgggctgagaaagtccctttgaacctgaacaggataatgcctgcgaagggagtgtgcatttctacttttatgtttccagggaactctcaacacaacccctttttggtgggagatcgagctatccaatatgttcctgaacgtgtgagctcagcagctggatatacctgtttcttacaactgaggtaacatggtaataatacttcatttggtaagtggcatgctgacatttctccaacaggagaggatttctgcagataccactttgtaatgtcccataactgatttagtcatacatttattatccgtgtaaatttgcaaagcgtcggccatgtgctatgcaattgattttaaaccatctatctgcacatatctaattaaagtataaaacaatttataaactctacataatggacattttagctgcatgccacttgtcaattgagcacacaatatactgac

SEQ ID NO: 542 - DNA, 440 bp, Oryza sativa
  Clone ID: uC-osflcyp011g08b1
tcgtcctctgcttgactagctactactccaagttgaagagatcaaagctagagtgggcagctgcacgactctcctggtcacagatctcctggtcggcattgactaccagcagagctctgccaccaggaacctgcacggagatcatcacgtcgcgaaaaagaagttcggcagcggcggcggcagctacggtggcggtggcaagtggaaggctactacaggcggtggccgcgggggctgctactgaccggcaaccacgaccggagtcaccgggagctgcaacttctggaagagccacccggagaagataatatgatgcatcaggtctctgagaagcatctcggggtcgataggcgacgtgtgcagcggcttcttggggagcaagctgcatacgctgcaggacgcgctgagcaacacccgctaggactgatacagcgacctgc

SEQ ID NO: 543 - DNA, 462 bp, Oryza sativa
  unsure (1)..(462): unsure at all n locations
  Clone ID: uC-osflcyp011g09b1
ttttnctcctattcgaggcgtgaagagaggagcggtgcttgcgataggagagagatggcctcaaccaagcagaccggtcgtacgtccacaggacgaagggctcccaggaagcaggtctgcaaccaactgctgctcggacgtgctgctcccaccacctggaggagttaagaagccccaccgttaccgacctggatctgaagcccatagtgagattcgtaagtaccagaatagtactgacctttggatcaggaagctgcccttccagaggcttgttagggaaattgcacaggacttcaagaccgatctgtgtttgcagagccattgctgacttgccctccaagaggctgcggaggcataccttgttggtctcttttaggacaccaacctgtgcgctattcatgcctagcgtgtgaccattatgcctaaagacattcagctggctaggaggtttcgtggtgagag

SEQ ID NO: 544 - DNA, 487 bp, Oryza sativa
  Clone ID: uC-osflcyp011g10b1
ttgttcggatctgtagcaaagagcgaagagcgaagctgcagcctgcagctacgcttgttcgcttgagacctagggtacgagcaacaataatagagagtgactgagtgagcgagcactgagtagcaagggcccggcacaaacaggacgcagccggcaacgtgtacgtcgaaccaaacagagaacagctagctaatcgatcggtcgccatgaccaaggacgacgccgtcccggtggccgtggcgccggcgaagcgcccgcccatcaacaagtacgccttcggctgcgctctcctcgcctccatgaactccgtcctcctcggctatgatatctcggtgatgagcggcgcgcagatattcatgaaggaggatttgaagatcaccgacacgcagatcgagatcctcgccggcgtcatcaacatctactcgctgttcggctcgctggcggcgggcatgacgtccgactggctgtgccggcggtacaccatggt

SEQ ID NO: 545 - DNA, 407 bp, Oryza sativa
  Clone ID: uC-osflcyp011g12b1
tcgtccaatctcttgaaagaagagagactagcaggagcttcattgctggtgtttgcaaataagcaagatattcaaggcgctctcaaaccttctgaaattgctaaggtactcaatttggaagcgatgtacggaagccggcactggcagatcgtaggctgcagcgcgcacaccggggagggccttcttcaaggtttcgattggctcgtccaagacattgcatctcggatctacgtgctagaatgatgtgaacctcgtttctctgtagtatttatgtgctggaacgattgaacctcatttcttatcaacctcttcgtcttgttctgtaacggtgaactattggcatcatgatttttgagcatgatggttctgttttgtgcaccatgaccatctgaaaagtttcattcctt

SEQ ID NO: 546 - DNA, 414 bp, Oryza sativa
  Clone ID: uC-osflcyp011h01b1
tcacctcagcagcagcagcagcagcagctgagcttgaagcagcagagcgaggtagacatggccgccgccaccatggccctctcgtccccggcgctggccggcaaggccgccgcgaaggtgttcggcgaggggcgcatcaccatgcgcaagtcggcggcgaagcccaagcccgccgcgtcggggagcccgtggtacggcgccgaccgcgtgctctacctcggcccgctctccggcgagccgccgagctacctgaccggcgagttccccggcgactacgggtgggacaccgcggggctctccgccgacccggagacgttcgccaagaaccgggagctggaggtgatccactccaggtgggcgatgctcggcgcgctgggctgcgtgttcccggagctcctcgcccgcaacggcgtc

SEQ ID NO: 547 - DNA, 473 bp, Oryza sativa
  Clone ID: uC-osflcyp011h03b1
ttcactcttgagtatcttggtcgagttgttttcaacacagatggaattatgtatcctgacagcgcggttggtaccgattcacacactactatgattgatggtttgggtgttgctggttggggagttggtggaattgaagcagaggccacaatgcttggtcagccaatgagcatggttttgcctggtgttgttgggttcaagttgactgggaagttacagaatggtgtcactgctaccgaccttgttcttactgtcacccaaatgttaaggaagcatggcgttgttggcaaattcgttgaattctatggcgaaggcatgggaaagctttctttggccgacagggccacaatcgcaaacatgttgactgaatatggagccacaatgggtttcttccctgtagaccatgtgacactcgaattatttaaattgactggcctgagtgatgaaactgtggcaatgattgaagcatattt

SEQ ID NO: 548 - DNA, 484 bp, Oryza sativa
  Clone ID: uC-osflcyp011h06b1
tgctccttcttccccttctcacgttgagctcgagcggcggtcatggcgggcggcggtgtcgcgcgggggtgtgcagatgatcctgcgggcgccgctagaggcgggaccgccgccggcgttgggccgggcgcaacggcgggagagtcgacgccgcggtggattggatacggggacgacggcgcggcgcggcttcggctggaattcggcctcgatcctgggcgaggttacgcgtggtggattcggggactgttatcccgtgaaatcgtctagcgatgaaaggattccttcagaaattcctccaatccaaacgggaccagccatctccgattgatagggattatccacgatcgaatttgtctgctccgaaattccctgagaagtagtgcagagtacagtccatacatgttcatgttcatgttcatattattaaaggataggagtactctttcaaagtttcaatgatttgtttttgaagatctttggc

SEQ ID NO: 549 - DNA, 471 bp, Oryza sativa
  Clone ID: uC-osflcyp011h07b1
tcgctcctccttatattgctctggatccagccttttactctttatcttcaggacagacctcatcgtcagttccttccagggaatctattgctaacaagggggcttcccctcctcgaaacgatattgtcaatgaagaggttgatcagcgtcagaacaagcctaggagatactcagagatgaacttcagtcagtgaagcaccatgtaaggtgaatagcatctgaataagctgcttatggctatatttttaagcccttagtgatctcttgttttgatctggagcactttgggtggcttcttgtcctaagttatgttaggttataaacgcctgtttgtgctggtgtcacttcacagcagactcaggggtggcctttgttgcttgaattgtggctttgctcggctgtgatgcgttgagaaatgtcaaattcgctggctgcgtctgacgatgtgggcggtttttgaagagagcttgg

SEQ ID NO: 550 - DNA, 504 bp, Oryza sativa
  Clone ID: uC-osflcyp011h11b1
tcgttcccatctcgtcgtcgtcgcctctagggtttctctccccccctccctcctccacctcccaaaacctcgcccccctcgccatggccaagaccaagcagggcaagcgggacgtcgactcctacaccatctccggcaccaacaaggtcgtccgagtgggggactgcgtgctgatgcggccggtggactcggacaaccagccgtacgtggcgcgggtggagaagatggagctggacgggcgcgggagcgtgcgggtgcgggtgcggtggtactaccggcccgaggagtccaagggcgggaggaggcagttccatggcgccaaggagctcttcctctccgaccacttcgacatgcagagcgccaacaccatcgagggcaagtgcgtcgtccactccttcaagaactacaccaagctcgacaacgtcggccccgaggacttcttctgccgcttcgagtacaaggccgccaccggcgccttcacccccgaccgtgtcgccgtatact

SEQ ID NO: 551 - DNA, 483 bp, Oryza sativa
  Clone ID: uC-osflcyp011h12b1
tcgtctctagcttgggaagaggaggaggagcttgagcttggagagagacaacaatggcggctcaggctcttctctctgggaggcagctgctggggaggccattgcaatcttcagtctccaggtcttcttcctccaggaaggcacccttcatggtcagggcagaggccactccccctgccaagcaaggtgctgacaggcagctgtggttcgcatccaagcagtccctgagctacctggatggcacgcttccgggagacttcgggttcgacccgctggggctatcggacccggaggggaccggtgggttcatcgagccacggtggctggcctacggcgaggtgttcaacggccggacggcgatgatgggcgtcgtcggcatggtcgccccggagctcctcggcaagctgggcctcgtccccgccgagacggcgatcccgtggttccagaccggcgtgatcccccccgcgggcacctacacctact

SEQ ID NO: 552 - DNA, 461 bp, Oryza sativa
  Clone ID: uC-osflcyp012a01b1
tgtagctgtatgtggattgtgttcgtgaagattaatgatttagtagtatgtgttttagccccaagaaaatcccatcatcattcaaccaatgccttcagaatcaacctactgggatggtttctctggttgatcgaagtggaaataaatggagtgcagagctgacttcagactctgagggattcttctttgtgcatggatggaaagaatttgtcagagataactcaattcagtgtggtcaatttttagtattcacttatgataaacggtcacaattctcagtgacagtctttgaaccttcaggcatcgacaagatatcaactttctctgctcacccttccaaaaatgtgatcattaaaacagaaagtgatgaagggggcatggtcactgcagctatcacaacagagaaaatggctcccgccctgaaggaaaataatggaatcacaggaaaagagactagagat

SEQ ID NO: 553 - DNA, 516 bp, Oryza sativa
  Clone ID: uC-osflcyp012a02b1
ccgggcatcacaggatcgaggcgataccggaggagcccccgccatcggccatcctccttcgcgtcgcgcctccggatcccgagcttccagaaagccgaccggttcgtcggccggtcgccggagatggaagccaatcacgcctcgcgggggcgccgcaccctggaggagatccggcagaagagagccgccgagaggatgcagcagcagcacaacccggccgccgcggcgtcccttgtcgacccttacgggaacccaggagccggagctgagcttcttggtcgagttagagaacttgaaaatgggaacatagcattggagagggaaaaccaaatgctgttatccaagattgctgagaaggaagtcgagaaggattccctcgttaaccgcttgaacgaccttgagcggaatatagtaccctccttgaaaaaggctgtgaatgacatttctttggagaaagatgccgcagctgttgctaaggaggatgctctcgcaaactaaggagcatgaagaaacgac

SEQ ID NO: 554 - DNA, 497 bp, Oryza sativa
  Clone ID: uC-osflcyp012a03b1
gctttaagctatttttgcaggcggacctattgcgcgcttgcgaaaatcaactattttcgtaggcgttgaggtgcaggcgtatggcttgtccgcctgcgaaaatatgattctgccgactgggaaaagagtttttctagtcgtgagagctcgtaaaaaatatctagtatccaattagtatacccatttgctcagaagattgcgaatttcactgatcaaattccatgctctgcattaattatctaatatttggtgtaggttccaggagggtggatcctcaatgggcagaagcgatggccggccaacggcagttttgcggatgtgttcgtcgttcttgcctgcaataccagtaataatcagattaacggggcttaagatcagcaagatcgagaacaagacgtcgctgagggttgtccagaactgtgacattctgctggaggacgtgttcgtccctgacgatgaccgtcttcccggcgccaactctttccaagacctagtga

SEQ ID NO: 555 - DNA, 515 bp, Oryza sativa
  Clone ID: uC-osflcyp012a05b1
ttctttattaatcttactcagtaaatcatatcaaggtggtccaattgccttgagagcactcccgtacgtatccaatttcgttaaggcatgcatgtacgcatgtatttaaaaactcagatttgttggtttggatgaacaattggctagatcatatgtgtctgtttagttcacagaaaccgtgtaagttggtttatatatagttagtttggagtatttccgtacgacattactggttttgtagctgttaactgttaatttcatcacaagagaaaactttgcttctttatactaataaggaagatgattttatattcccagagaaaaagtacttctcaagatttatatgtgcggcaccttctataactgggcggaattggatggacccatagggaggagtattttacaacggataacttcaagttctttttgttgcacaaattacgcacaggggatattgcataacaatgaagaaatagccgtgaagaaactcaccagaaaaagattgagagaagtgg

SEQ ID NO: 556 - DNA, 277 bp, Oryza sativa
  unsure (1)..(277): unsure at all n locations
  Clone ID: uC-osflcyp012a06b1
tcgtgtgctccggcgatgtcggcgacggcgacggcggcggccatccgctccggagagctactcgcgtgcccgatggctctgcggagggcggccgcccccgccggggccaccacatggttccggatggggcgagccgcgaccgcgactgcggcgcggatggcgactacgctgagggtgagggtgccacccnngttgtcggcggctgcgtttgatgagacgtcaagtttatgaatgtgtggtctcctcagcgggaccatgagaacccttgcccaggccg

SEQ ID NO: 557 - DNA, 267 bp, Oryza sativa
  Clone ID: uC-osflcyp012a07b1
tatgtcacattattttatcacggcacatgaatacaaagggagatgataggtagatcaagcagtgttgagaaattattttagtttgtatgcacaaatattgtgagcctgatataatatcagggagcttgcctgtcttactttgctctcaaatatgttctcagtcattcacatggttgtcagcgactgcaaatcttttacgtattcctgatatgtgtcactgactgagagatgggagtacagttggaataaaaagtggaagttgaatgt

SEQ ID NO: 558 - DNA, 504 bp, Oryza sativa
  Clone ID: uC-osflcyp012a10b1
tgcggccagcgctgatctccatccatctcgcgagcatagcggagccggagcggagcaggggaggggcgccttcgtcctactgcatcctgggagagatcagggcagagaatcagcatgatgatggagactgaactatgctcttcccgggttctgtctctgcctcggtacgatagtggagatgaggagctctcagtgcttcctcggcacacaaaggtcatcgtcactgggaacaaccgaacaaaatctgtcttggtcggtctacaaggtgttgtcaagaaggctgttggtctaggaggttggcactggctggttctaaagaatggtgtagaggtgaagctgcagaggaatgctttgagtgtcttggaacctccaactggtaacgaagacgactatgatattgacggcaacaattcattctgtagcagttccgacatgggagacaaagacatggactattcgatcatagaataccataaaccaaccaagccaagagtttcgcataca

SEQ ID NO: 559 - DNA, 334 bp, Oryza sativa
  Clone ID: uC-osflcyp012a11b1
tttccttcggagcagatcaaggcgtccatggagaatggcgtgctcaccgtcaccgtgcccaaggaagagcccaagaagcccgacgtcaagtccatccagatctccggctagagccccgtttgtttattctgctgcttctcctcaatgctgcaattgatctcctcctttggtactttgcttgtgtcgtgagggacacagtccaaaatgtgtgtgatatgatcatgtgtttatgaatgtgtggtctccttcaagggtcccaaatgtgtttgtctcctatgcgtttatgtacgggaaataaactttaagcttgattaatgtaccaatgtttgagttt

SEQ ID NO: 560 - DNA, 491 bp, Oryza sativa
  Clone ID: uC-osflcyp012a12b1
tattgtcacttccatctcattctcctaattgtcatcactagcttctagctagcttaattaattaattagccatggcggaggagaagcaccaccaccacctgttccaccacaagaaggacgacgagccggccaccggagtagactcctacggcgagggcgtctacacgtcggagacggtgaccaccgaggtggtcgccggcggccaggacgagtacgagaggtacaagaaggaggagaagcagcacaagcacaagcagcacctcggcgaggccggcgccctcgccgccggcgccttcgccctgtatgagaagcacgaggcgaagaaggacccggagaacgcgcacaggcacaagatcacggaggagatcgcggccacggcggcggtcggcgccggcggctacgccttccacgagcaccacgagaagaagaaggaccacaagagcgccgaggagtccaccggcgagaagaagcaccacctcttcggctgatcg

SEQ ID NO: 561 - DNA, 513 bp, Oryza sativa
  Clone ID: uC-osflcyp012b01b1
tgttttgtgcttggaagctaccttgctctgatgaccgttattttcttctgggccatgcacaagacagactttttcacggacaaattcggtgtcagatcaatcaggaacagtgaacatgagatgatgtctgcactgtacctccaagtcagtattgtgagtcaggccctcatcttcgtcacccgttctcgcagctggtccttcatcgaacgccctggtcttctcttggtcactgcattcatgcttgcacaactggttgcgacattcctcgctgtctatgccaactggggctttgccaggatcaagggcattggctggggctgggctggcgttatctggctttacagcattgtgttctacttccctcttgacatcttcaagttcttcatccgctttgtgctgagtggaagggcctgggacaacctccttgagaacaagattgcattcaccaccaagaaggattacggtagggaggagagggaggcacaatgggccaccgcacaagaacacttcacg

SEQ ID NO: 562 - DNA, 383 bp, Oryza sativa
  Clone ID: uC-osflcyp012b02b1
ttaagaagtactcgagcaaagaaggagagagcttggtgagctgcagagatggccccctccgtgatggcgtcgtcggccaccaccgtcgctcccttccaggggctcaagtccaccgccggcatgcccgtcgcccgccgctccggcaactccagcttcggcaacgtcagcaatggcggcaggatcaggtgcatgcaggtgtggccgattgagggcatcaagaagttcgagaccctctcctacctgccaccgctcaccgtggaggacctcctgaagcagatcgagtacctgctccgttccaagtgggtgccctgcctcgagttcagcaaggtcggattcgtctaccgtgagaaccacagatcccccggatactacgatggcaggta

SEQ ID NO: 563 - DNA, 531 bp, Oryza sativa
  unsure (1)..(531): unsure at all n locations
  Clone ID: uC-osflcyp012b06b1
tggaaatcacaatggccgttaccttggtgacatgcaggttctggatttcaaatgtttatcatggtcgaagctagaagctaaaatacaatcagaagaaccttcagacttgactggaacagcttcgcttcctccttgtgctggtcatgcactggttccatggggaaacaagatcctctgtcttgcaggacacacaagggaacctacagaaagtctcagtgttaaggagtttgatccacaaacttgcacctggtcaaccttgcgcacttatggcagatcaccgagctcatgcggtggccaatcagtgactcttgttggaggcacattagtagtgtttggaggtgaaggtgatggnnagatcccttctgaatgacctgcacgttcttgatctcgagaccatgacttgggatgaatttgagaccacaggcacacccccttctccaaggtcagagcatgctgctgcgtgctatgctgatcgttatctcttgatatttggcggnggttctcattctacatgtttcagtgatctacatc

SEQ ID NO: 564 - DNA, 410 bp, Oryza sativa
  Clone ID: uC-osflcyp012b08b1
tcctcctctctcgccaaacacgacgacgtcgcctcggtttagtcgtcgtcggccggcagccggatgacgggcagtagttgtccggccgattcttcccagctgctgtaccctcgccggggtgcccccaccaccaccaccacctcccgtcctcctctccatccgctcatcgctcatgcgccctacgacgtcgtcctccaccgatctgtcgtcctctccatcagctcagctcgtgatcaggctgagctcgcgagcttctggtgctatataaggctgggtggtggtgcaagtgcgaagcgagcggccggtgaggacgatcgatcgagatcgagcttgacggcggcgagaggaggaggaggggagacgatgagcgggcgggggaggggggacccgctggcgcttgggagggtggt

SEQ ID NO: 565 - DNA, 528 bp, Oryza sativa
  Clone ID: uC-osflcyp012b09b1
tggcgacgaactcatcacctccactctctgctgcaacacgagtgaatcggaggcggcacgatgcgcaagtgggcgctctcctccgcgctcctcctcctcctcctcctcaccacactccccgatccagctaagaagctccaagtcaatgctgatgacagcactgatgagttagttgatccgccgaaggtagaggagaagattggtggtgttccccatggcctgtccacggactctgaggttgttcagagggaggctgagtcaatctcgaggaagaccctcaggagctcagcggagaaatttgagttccaggctgaggtgtccagactcatggacatcatcatcaactcactctacagcaacaaggacattttcctgagggagctcatctccaatgcttctgatgctttggacaagattaggttcctggctctcactgataaggaggttttgggcgaaggtgacactgctaagcttgaaatccagattaagctgggataggagaagaagattctcttcattcgggatagg

SEQ ID NO: 566 - DNA, 524 bp, Oryza sativa
  Clone ID: uC-osflcyp012b10b1
tgcggagagaaaggaggagaaaagtagtaaagaggaaaggggggcgagagtctcccgagcaacggctctccactactagcccacagctgccaagaatctctgccatttgttgagctggtcgatccatcggggagggagagaggtcgaggaggcggacgaaggggacaggatggggtctggatctttcctcaagctgctggccaacaacttccacgacctgtccgggccattagtttcacttgcttatccattatatgcctctgagagagcaatagaaaccaaatctcctgttgatgatcagcaatggctcacttactgggtgctgtactcgtttatcactttgtttgagcttactttcgctacaataattgaatggcttgcttcttggtcctatgcaaagttgttcttcaactgctggttggtcttaccttgcttccatggtgctgcttatgtttatgatcactttgtgcggccaatgtttgtgaatcgtcaaatagtaaatgtctggtatgttccaagaaaag

SEQ ID NO: 567 - DNA, 524 bp, Oryza sativa
  unsure (1)..(524): unsure at all n locations
  Clone ID: uC-osflcyp012b11b1
cgcttcgcgaaccctcgtcgggtcgatcccgccgccgccgccgacgtccccaaatccaatccgcccatcgcaaggaggcagcatcagttttgctgcaatctgacaaagtggagggtctaaaagttgaagcttcttttatgtctgaacaagacttgctttacttgggatcagttggattacttggagaatattctcggacgagaaaaaggcacaagctcccgcttggaaggccctgctgcatgcatccgaagccttgtcaatttatgcaaacttctggctgctcttggagtgcactggtttctgctgatccacttcaaggatcaagactattgtcacttctggctcttggtgcttctgatattatctcggtgaaagaaaattaatccaagatggctctgcaaaacattggtgcttcaaaccgcgatgatgctttctacaggtataagatgcccaggatgatcaccannatagaaggccgtggcaatggcatcaagactaacatcgtgaacatggtggatatagca

SEQ ID NO: 568 - DNA, 492 bp, Oryza sativa
  Clone ID: uC-osflcyp012c02b1
cagcacaaatgcacaatatataaacttaatttctttgttattaccatttttttttgaacggcacttcattattactggatgaactatgtcctatagcctagacagaaacatgggactgcctatgttgatatcttccccccatcattcaatcatcatcatctggaaccaccttcttgatcttggcgtggccatcttcatcaggcttaagcctgatatcaccggagtcgtaatagctgactctattgcctgcctccgctacctcaagcacagtcggagtcggaggacgggccagcccctcgcacaccttgggaggatggcccttgtaggccttgcagatgtaagcctcgaagttctcgtaatcctcgtagagcggctgaccgtcgacgaccacccagggaacgtacttgtggggaggctgcaaagcgtcagtctgtcttccatacttgagcgagagctggtggccgcgttcgcccttgtagcagtcggtgacag

SEQ ID NO: 569 - DNA, 523 bp, Oryza sativa
  Clone ID: uC-osflcyp012c05b1
gacttgttacgcctgttggtgttcgagtggtaggagcccttgggcttttccaggttcagatcgacgcctccttcctctggacattgttgctagttggtgatggctgagcaggctaatcaaccgactgtccttcagaagttcggtggccagttccaccttggctccagcttttctgaaggtgtacgggctcgcaacatctgcccatctgtctcatcctatgacaggcgctttaccacaaggagttacatgacccagggccttgtcaatggtggcatcaacgtcccaatgatgtcgtcctctccaatttttgctaatgctccagctgagaaaggcggcaaaaacttcatgattgatttcctcatgggtggagtgtcagccgcagtttcaaagactgctgctgctccgattgagcgtgtgaagctgcttatccagaaccaggatgaaatgatcaaggctggtaggctctcagagccatacaagggtattgaagactgcttacgacgcactatcaaggatgaggggt

SEQ ID NO: 570 - DNA, 520 bp, Oryza sativa
  Clone ID: uC-osflcyp012c08b1
tcgctggcgaccttcctgacgacgccgacgagctcgacctccccgacggtgaggcgatccaggcgttttcaggatgggcagtgaggacacaaaagatatgctgaagaatgtggactggaaaacagttggtggttcggtgagcaccgacccaagccaaccagttgttaaaaagcgtctcccgaagaaaatcagacaagttcctgaatgctattttctgcctcggcgatctttgccttctgcattggcaatctatggcgctgcgtgtgctgctggagttggcgcagggatgctgcttgaggtttggataaacaaaaagatcaaagaggacagtgccattgtctgggaaatgggcaaatgatttgattgctacctctgaagagttctccttgctcgtgttcagctgctaaagctgcatctcagaaataatcttagctatattggttctgattatcttttgattcccagacaaagtaaaactatcctttctaatgtatgacactgccttacatctacatttctg

SEQ ID NO: 571 - DNA, 489 bp, Oryza sativa
  Clone ID: uC-osflcyp012c10b1
tagaaacaaacccctctcactcccactaccatggatccttgcaagttccggccgtcgagctcgttcgacacgaagacgacgacgacgaacgcgggagctccggtgtggaacgacaacgaggcgctgacagtggggcccagggggccgatcctcctcgaggactaccacctgatcgagaaggtggcgcacttcgcccgggagcgcatcccggagcgcgtggtccacgcccgcggcgcctccgccaagggcttcttcgagtgcacccacgacgtcaccgacatcacctgcgccgacttcctccggtccccgggcgcccagacccccgtcatcgtccgcttctccaccgtcatccacgagcgcggcagcccggagacgatccgcgacccgcgcgggttcgccgtcaagttctacacccgcgagggcaactgggacctcctcggcaacaacttccccgtcttcttcatccgcgaccgcatcaagttcccgacg

SEQ ID NO: 572 - DNA, 523 bp, Oryza sativa
  Clone ID: uC-osflcyp012c12b1
tgccgccgccgacatggatcagtccatcgctagccagatcttggagaggcacgggctgtcggtggccaaggcggtggaggacaagctggacgagcagatcgccgcgctcgaccgcttcgacctggacgacatctaggcgctccgcgagcgccggatcctgcagatgcgccgcgctcgctagcgcagggccaagtggcgcgccctcggccacggtgagtacggggaggttcccgagacggagatctttgccgccgccaaggccagtgaccgtctcgtctgccacttctaccgcgacaactggccctgtaaggttatggacaagcacttgtcaattctcgcgaaacagcatatagaaacacgttttgtgaaagttcatgctgaaaaggctccctttttgacagagaaactaaggattgttgttctcccaactgttgcattgttaaagaacaccaaagttgaggattatgtggttgggtttgatgagcttggtggtaaagatgatttcagcactgaggatctggag

SEQ ID NO: 573 - DNA, 527 bp, Oryza sativa
  Clone ID: uC-osflcyp012d01b1
ttagtcgcaccctcactccctcctctctcctctcctcccccccacggcggcggcggcggcggcggcggcaggatggcggattcgacggcgaggacggtgaaggacgtgaaccctcatgagttcgtcaaggcctactccgcccacctcaagcgctccggcaagatggagctccctgagtgggttgacatcgtgaagactgcgaggttcaaggagctccctccttatgatccggactggtactacacgagggctgcctcgattgcaaggaagatctacctgaggcagggtattggtgtaggtggcttccagaagatctatggtggccgccagaggaatggctcacgtcccccgcacttctgcaagagcagcggcgctatctcacgcaacatccttcagcagctgcagaagatgggcatcatcgatgtcgaccccaagggcggaagactcatcacctcccagggaaggcgtgatctggaccaagtggcccgaagagttgatgttaccatcgcctgaacagatccatggat

SEQ ID NO: 574 - DNA, 526 bp, Oryza sativa
  Clone ID: uC-osflcyp012d02b1
ggaccaccgtagcacgccgcctccccgcccagcgacctcggcaactccggcgaagatgggcgccttcaggttccaccagtaccaggtggtggggaggggcctgccgacgccgaccgacgagcaccccaagatctaccgcatgaagctctgggctaccaacgaggtccgcgccaagtccaagttctggtacttcctccgcaagctgaagaaggtgaagaagagcaacgggcagatccttgccatcaacgagatttttgagaagaacccaacaactatcaagaactatggcatctggctgcgttaccagagtaggactggctaccacaacatgtacaaggagtaccgtgataccaccctcaatggtgccgttgagcagatgtacactgagatggcttcccgccaccgtgtcagattcccttgcattcagatcatcaagactgctactgtccactttaaactctgcaagcgtgacaacactaagcagttccacaagtcagatatcaagttcccactggtgtacaggaag

SEQ ID NO: 575 - DNA, 525 bp, Oryza sativa
  Clone ID: uC-osflcyp012d03b1
gaaaggcgtcttcgtactcgcctctctccgcgccctcctccgccgccgctcgccgccgttcgtctccgccgccaccgccgccgccatgagggagtgcatctcgatccacatcgggcaggccggtatccaggtcgggaacgcgtgctgggagctctattgcctcgagcatggcatccagcctgatggacagatgcccggtgacaagaccgttgggggaggtgatgatgcttttaacaccttcttcagtgagactggtgctgggaagcatgtcccccgtgctgtcttcgtcgatcttgagcctaccgtgattgatgaggtgaggactggtgactaccgccagctcttccaccctgagcagctcatcagtggcaaggaggatgcagccaacaactttgcccgtggtcactacaccattggcaaggagattgttgatctgtgccttgaccgcatcaggaagcttgccgacaactgcactggtctccagggcttccttgtgttcaacgctgttggaggaggaacgggctc

SEQ ID NO: 576 - DNA, 286 bp, Oryza sativa
  Clone ID: uC-osflcyp012d04b1
tggccccaagccttggttttgtatcatccctgccaactcaacctaggagttaggtaggatttttggtgtaatgctatcagatataccgagagaaccgatatgtgctgattccccatcagaagaccatgggaaagctctatgttagtatatattgtccatttgtcctatgtatgagctgccaggtgacttgttctgttcttgtcgtatggataaacattttgtcacaacattctcttgtcctagtatgagctaccattggaaagtagcagcattttattctcccgtg

SEQ ID NO: 577 - DNA, 412 bp, Oryza sativa
  Clone ID: uC-osflcyp012d06b1
ttggttagggctgcccgtcttcctctacaactactgcacccacgcagatgcacggcatgttgcaggctgcgagctttggcggaacaaacatccgtccgacggggggggaggacaagaagtgccccggagagtcacgcttacctgaacaggcgaaggttgcgactaggaagatctatgacccgctggaggaggacaccttccggacaatcctcgaccactgcgacgggcccatgttaaggctggaggttagcgttgccgaggcactctcccttgttgacatgttcgcagacaaggaggacgcctgcggctactgtttccctgatgctgcttgttgaggaatatcaggggactgccgcagaaggacacaaggcataaagatcatacgtgtatccgttgagagatatacagacat

SEQ ID NO: 578 - DNA, 523 bp, Oryza sativa
  Clone ID: uC-osflcyp012d07b1
tggccagggctgcccctcttcctctacaactactccacccaccagctccacggcatcttcgaggctgcgagctttggcggaacaaacatcgatccgacggcgtgggaggacaagaagtgccccggcgagtcgcgcttccctgcacaggtgaaggttgcgacgaggaagatctatgacccgctggaggaggacgccttccggccgatcctccaccactacgacggccccaagttcaggctggagctcagcgtcgccgaggcgctctcccttcttgacatctttgcagacaaggatgacgcctgaggctactgcttccctgctgctgcttgctgaagaatatcaggggactgccggtgaaggacacaagtaataaagattcgacgtgtatccgttgtgagatatacatacataaatacataaatacaagtagtaagtaattaacggtgtgtgctgatgaatttggaacgattagtacaatttctgagggggtttcccatctcgcgggctaagagatgatgcgtcc

SEQ ID NO: 579 - DNA, 503 bp, Oryza sativa
  Clone ID: uC-osflcyp012d12b1
tcggacgcgtgggccgagacccgcatcgaggagctcaagcagctcggcctcgagtacaccgtcgtcagcgtcggcaagaagggcaacgcctacttcatccgccgccccttcatccccaccgagcggacgctggaggtgaacggcatccccaccgtgaaggactcccagtccatctgcgacctcgtctactcgctgttcgtgtccgaggcggtggacaaggtggagctcctctactccaagttcgtctccctcgtccgctccgaccccatcatccagacgctgctccccatgtcgcccaagggggagatctgcgacatcaacggcgtgtgcgtggacgccaccgaggacgagctgttccggctcaccaccaaggaagggaagctgaccgtggagcgggagaaggtgaagatcgagacgcagcccttctcacccgtggtgcagttcgagcaggaccccgtccagatcctcgacgcgctcctcccgctctacctcaacagccagat

SEQ ID NO: 580 - DNA, 500 bp, Oryza sativa
  Clone ID: uC-osflcyp012e03b1
gatttggggtggtcgcaggttccattcgggggtggagttacttacgcaggcatatgatgctggggaagcactattgaaaatgctatgggactacaaagacgctattctgcgctgttctttcaaggaaaaacctgcgtttacttttgccaactagatgggactaaacatgctagagacatctctcgtggctctccaagatctctcactggacaagatatttgatgaagccggtaggaaggccctatacaacgagatcccgaaattgatggaacagggagagagccacttgcaaaatccccattttattttccccatgtcataacagcagtgcactaaccgctaaacacaaaccaagtacagaggcaagaactcaccgtagacacagagtaatctttcgatttcgattcagtctgttgttgctcagggttacgtgtacctgtctggtggagcgtgcttgtccgggatggcgcgccatgtttctttcgagcaagctgtagcat

SEQ ID NO: 581 - DNA, 491 bp, Oryza sativa
  Clone ID: uC-osflcyp012e05b1
ttgttatcttatccgcataagctgcagctgagctctgtttctagaattagctccagcactggcggatccaagctttttaggcggaatcgtggggaacgtaatctcaatactggtcttagagtctccaattgcgactctccggaggatcgtgaggagcacgagcacggaggaattcaggtggctgccgtacgtgaccacgctgctgagcacctctctgtggacgttctacggacttcacaagcccggtggtctcctcatcgtcaccgtcaacggctccggcgccgtcctcgaggccatctacgttacgctctacctcggctacgcccccagggagaccaaggcggtgctggccgtgaacgtgtgcgcgctggcagcggaggtggctgaggcgcaggtggcgctgcacggaggtgagcggctgttcgtggtcggcgtgctgagcgcggtgctcaccatcggcatgtacgctgcgccgatggccgtgatgagga

SEQ ID NO: 582 - DNA, 516 bp, Oryza sativa
  Clone ID: uC-osflcyp012e07b1
tatttgactgaagcaatgtacagaatgatgtggggatatttcttccctggtgatgaacagcacccacaaaagcggcaggaacttttcaaagtctccacaacagcagggacacggcgagtaaagaaaagcacatctattgctgaaacgaacagtcccagtaaacaatcatcgaaagactccatgcttttacaaaagcctgaacttcgacgcacatcttcgtttgacaggacgtgggaggaaactgttgctgaatctgtagctaatgaactcgttacacaatttcagagtcagtcaaatgcgccgcctgaatctcaagatgctcctaaggaagccaaattagtacgatctgctcgctctactcgtgaagagaaaaaaaatatggaccctaatgaggtgaaacaaactagacctcagaaaatgatggacttccgcaacataaacataagtcaggttgaattgcagctcacgtacgagggattgccatttgctgttagtgatgtaagactactaatggat

SEQ ID NO: 583 - DNA, 524 bp, Oryza sativa
  Clone ID: uC-osflcyp012e08b1
tgcctgcctccggggctgttccccgccagcgtcaccgccttctccctcgccgccaacggcagcctcgccgtcgacctcggggggccctgctacgcccactacgagtacctcacctacttcgagccccgcgtcactggggtcctccgctacggctccctcaccggcctctccggggtcaaggtccgccgcttcctcgtctggttcgacgtcgtccgcgtcaaggtcgacctcccgccgcccccgcgctacgtctacctcgacatcggctggatcacccgcaagctccccgccgacgagttcgagtccccccacgagtgcgaggactccaagaaatgccgcctctcgtccgcgctcgccacggtcgccgcgtggttccagaacttctttgcccagttttaggggatggagaagggatttggtcttgtgacagtgttacatgagcttcgggccttcacgagtgtagtgattgccagcatccaactacagaagaataagcagtggttgagatatttctctacagcttt

SEQ ID NO: 584 - DNA, 499 bp, Oryza sativa
  Clone ID: uC-osflcyp012e12b1
ttcaagatccccgacaaggagatcctcaagatcgtcaaggagaacttcgatttcaggcccgggatgatgaccatcaacctcgacctcaagaggggcggcgaccggttcatcaagaccgcggcgtacggccatttcggccgcgaggatccggacttcacatgggaggttgtcaagccgctcaagtatgagaaggcatgttgctgaggaagaagataaagatgatgaccatgagaggggggtctgtctctcgatatctacctacattgccggccgttgtcggcgccgccgccgcctacctgatgtgtctttgatcagtagtgactggttgctccatggaagaagaagaagatgggaagatgatgaaagggttgaaatcgacttgcgaagttgctagtgatatcggtgtagcagccagagttttagtgttcagatatcttcggcgttttatccttttttcatttttttgagtcagctgaaactgcaagagagctttgcagtt

SEQ ID NO: 585 - DNA, 529 bp, Oryza sativa
  unsure (1)..(529): unsure at all n locations
  Clone ID: uC-osflcyp012f01b1
tgtctaatccgattcaaacccgccgtttccaagcttgctctcctctcccccccaatccttccctcccgagtggcagggtgctcgacgggatggcgcagaaggaggccaatggcagcagcaacggggagcacaccacccgcccgccgccgacgccctcgccgctccggttctccaagttcttccaggcgaacctgaggatcctcgtcaccggcggagctggcttcatcggctcgcacctcgtcgacaagctcatggagaacgagaagcacgaggtcattgtcgcagacaactttttcactggttcaaaagacaacctgaagaagtggatcggacacccaagatttgagctaatccgtcatgatgtcacccagcccctgcttgtggaggttgaccaaatctatcaccttgcttgccctgcttcaccaatcttctacaagcacaaccctgtcaagaccatcaagacaaacgttatcggaaccctgaacatgctnggactngccaagagagttggagctaggattttgttgac

SEQ ID NO: 586 - DNA, 525 bp, Oryza sativa
  unsure (1)..(525): unsure at all n locations
  Clone ID: uC-osflcyp012f02b1
gttgtgacagatatggaaactaagattgcagcaaagaacttcgagattgcaaggctatccgatagggtccagtactatgaagctgcaaacagggagatgtctcaaagaaaccaagaggctatcgagatgtcgaggcaacaacgaaatatccgaaagaagagacagaagtggttctggggctcggttgggcttgcagttacccttggcacaccagccattgcctggtcctacctacctgcagcgcagccccaagccagtcaagactctaataccaacagcgattagagctagatgaagatgtatcttctcgacccttcagaaatcctaacaagctctaactatacaatcctaggggaaagaaaagattgtataagttcttttggtgatcggccgngatcactgcaatcttcattcgccgcttcctctgtaaatgtcgaatgggccatctccctacaggactggctccattccctcacagtaaatccctctntgcatagttggttgtgcagaaataatacgaggaat

SEQ ID NO: 587 - DNA, 128 bp, Oryza sativa
  Clone ID: uC-osflcyp012f04b1
tcatatgttccgttcaggcgcttaattctacctatctggctgtggttgctgttgtaaacttgtaatacatgatacaatctcttccataagaatttcatgaaataaacagtgcttgttcggttgtgctt

SEQ ID NO: 588 - DNA, 517 bp, Oryza sativa
  Clone ID: uC-osflcyp012f05b1
gcgggagctccggtgtggaacgacaacgaggcgctgacagtggggcccagggggccgatcctcctcgaggactaccacctgatcgagaaggtggcgcacttcgcccgggagcgcatcccggagcgcgtggtccacgcccgcggcgcctccgccaagggcttcttcgagtgcacccacgacgtcaccgacatcacctgcgccgacttcctccggtccccgggcgcccagacccccgtcatcgtccgcttctccaccgtcatccacgagcgcggcagcccggagacgatccgcgacccgcgcgggttcgccgtcaagttctacacccgcgagggcaactgggacctcctcggcaacaacttccccgtcttcttcatccgcgacggcatcaagttccccgacgtcatccacgccttcaagcccaacccgcgctcccatgtccaggagtactggagggtcttcgacttcttgtcccaccaccccgagagcctccacaccttcttcttcctcttcgacgacg

SEQ ID NO: 589 - DNA, 520 bp, Oryza sativa
  Clone ID: uC-osflcyp012f06b1
gcgattccacccccaccgccacccgcgaccacagactccacgattctctcagagagagagagagagagagagaggggactcagcgagcggtgggcgagagggggagatcgaaaccctagctagggtttgcgcgcggcggcggcggggatgtcgacgccggcgaggaagcggctgatgcgggacttcaagcggctgcagcaggacccccccgcggggatcagcggcgcgccgcacgacaacaacatcatgctctggaacgccgtcatcttcgggccggatgatccgccgtgggacggaggcacgttcaagcttaccttgcagtttacagaagattatcccaacaagccgccgactgttcggtttgtttctaggatgttccacccaaatatttatgcagatggaagcatctgcttggatattctacagaaccagtggagccctatatatgatgttgctgccatattgacttcaattcagtctttgctgtgtgatccaaaccccaactctccagcaaactcag

SEQ ID NO: 590 - DNA, 519 bp, Oryza sativa
  Clone ID: uC-osflcyp012f09b1
tgatctatccatccatcccatcctcgatccttcattcctgcccggcggcgagcgagagagaggcggaggagatccgagatggcggggagcgggtggaggaggatcccggcggcgaggaggccgcccatgtcgcgcccggcctcggtctgcctctggatcgtgctcgtcgccgccaccctggcgctcgcccaggcgaagaaatcgaaggcggatttgactgaggtcacccacaaggtctacttcgacgtcgagattgatggcaagcccgcaggacgggttgtcatgggacttttcgggaagactgttcctaaaacggcagagaacttccgagcactttgcacaggagagaaaggaactggaaagagtggcaaagcactccacttaagggaagtgcattccacagaattatacccagctttatgatccaaggaggtgacttcacacttggtgatggaaggggtgggtgatctatctatgggacgaagttcgccgatgaaaactttcagatcaagcacaccg

SEQ ID NO: 591 - DNA, 510 bp, Oryza sativa
  Clone ID: uC-osflcyp012f11b1
tgtcacgctcggtgtgttcactccactgacatgcttcaagcgagtcgattcactgaaatacacgtcggccttatcggttgctctggccgtcgtgttcgtggtgatcactgccggaatcaccaccatcaagctgatgagagggcagattccgatgcctaaactgttccctgatgttcatgactggagctccacctggagacttttcactgcagctccagttcttgtgaccgcctacatttgccattacaacgtgcacccaattcacaacgagctcaaggaccactcccagatcaggccaatagtgcgggcgtcgctgctgctctgcttggccgtgtacaccaccaccagcttcttcggcttcctcctcttcggcgaggcaacgctggacgacgtgctcgcaaacttcgactccgacctcggcatcccctacagcttggtgctcgacgacgccgtcagggtcagctacgtgctccacctcatgctcgtcttccccattgtgttccacgcgct

SEQ ID NO: 592 - DNA, 499 bp, Oryza sativa
  Clone ID: uC-osflcyp012g01b1
gcagtttgtacgtacggtacaagctcgccgtccggcgatcatccttgataatctcaattaaaattatacatccctttgttatcgatcatcgatcatcagattggtggctggctggctaggccttatcagtttggaaccggatgctggttgaggagcagagttggaggatcatccctctggttccaggattcgttcctgttggcgttggtggagggcccagcacaccataaatataatgggcatcttctgctgcttccagtccgaggacagaggaggcgacggggacggcgatggcgacggagcgcctccctcgacctcctctagcggctgcagcaacagcagcagcagcagcaagaagaagaatttagcgtcggagcggagcctgggcgggagcagcagggacaacaacagcaacctggtgaacctggtgaacgagatcgtggcagagtcagtgacttaccggcaccagcgcgtggcggacgagatcctgaagatcggc

SEQ ID NO: 593 - DNA, 492 bp, Oryza sativa
  Clone ID: uC-osflcyp012g02b1
ggtgggctgtacgtagatgaatgctcttttgtgcagtcaactgtaacatagctgcgcattcttagcctctaggtgaagcttgcgaagaatggagtcgaggaagttcttgggttgaaccagctgtgatactttgataaggacggactgccgaatcttaagggcgagctcaagggttcaattgagaagggtatcaaatttgcatatgcgtactgaggccatattgcagactagctactcatacctgcacatgaggcttctgttgatttgatttatgcttttttctaccgcttgtgctgggataccgaggatttgagctttacaataataatccggggggctaatgcctaacagaacagaacttgtacgagaggaactatttgtgtcaagctgtgagttgttacattggacacacattgcattatgcaccttttgccttagcacatgacaaggaggtggaggcgcgccgccgctaggccgagaaggagcgcgccc

SEQ ID NO: 594 - DNA, 531 bp, Oryza sativa
  Clone ID: uC-osflcyp012g03b1
gttgtgtccatgtcggccaaagttgaggaaatggagaaatttgcagtgggtacgaatggtatgctgaatgagatgaggcagagggttgaagacatggtgttggagaccactcgacaaaggcaacgtgcggctgaaaatgagcaggagcttagtcgtgtgaagcatgacttcgagtctctcagaacctatgtcggcactctcgttaatgtcagagaaactcttctttcatcagagaagcagtttgaaacaatggagaaactcttcgacaggctagttgcaagaaccaaccaacttgagagtgagaaagcacaaaaagaagccgaagtccagaaggtggtggaggagaatgtgaggctgcgtgcgatgattgataagaaggaagcgcagcttcaggcgatgagtgagcagtgcaagttcatggcgctgagccgtcccaactagctggatactccctccgtcccaaaaaaaaaggcaaaccctgggttttcgtgtccaactttaacgatggacggtcaaacgttggacacggaa

SEQ ID NO: 595 - DNA, 456 bp, Oryza sativa
  Clone ID: uC-osflcyp012g05b1
tggacgcgtgggttgatctcaaggtttatacgaagtcagatatgggagtgcttggagccacatccatcgacttctctggtcactcatgccgctactttgggtaccttgtctcacgcaagaagtatgtcatctcaattgatgacaattgcctcccagcgaaggacactggtgggttgactgttgatgcagttgcacagcatatgtccaatctgaagacacctgctacacctttctttttcaacacattgtatgatccattccgcaaaggggctgactttgtccgtggatacccatttagtctgcgcgagggggttgagtgcatgctctcttgtgggctgtggcttcacaatgcagactatgacccaatgactcatgttgtgaagagaaatcaacgcagcacaacgtatgtggatgctgtgatgacagctccacttggtgcgatgatgcctgtgagcg

SEQ ID NO: 596 - DNA, 522 bp, Oryza sativa
  Clone ID: uC-osflcyp012g06b1
tgaatgtcctctcaatacaattagaattgattcccaattaatttcttgattgtgatccaacccttctgtacatgcatgcagatttgcagaccatacaaagatgaaggtctcgacggtggcggtgctcgttatggtggcgatgctgatgatgtcggtggctgtttattctgacgatgcaagttctcatggagttactgaaaaacaagttgcagctgctgcaaacgctcatggaagtaatggaggaagcgtcgtcacagaggcagctagtactgattcaacagctggtgcctctggtacttcatcagctggtgcctccggtactaatattgattcaaactattacgtgactatgaaagggtacatggagtacatgaggaagtatggcggtaaacaaccctgagttcgtgtttcttctggggcctgcatatatatgtgtgtgctttctatgtgtgtaaaccttggtacctaaatgtgcaaacaaaatgcgcatagatgtatgcatttcagtatggggatgcgttg

SEQ ID NO: 597 - DNA, 530 bp, Oryza sativa
  unsure (1)..(530): unsure at all n locations
  Clone ID: uC-osflcyp012g07b1
tttaaagcctcccatcaacttcttgcacacaccctccctttggctttcatctgcatctattcagttgcagattgagagccaaagacattatcttgattctatcaggagggttgtgctagcgaattcttgttagcaacaaattgacatattgctcggcacatccccaccgagaataccaagatgacgttctctggtacacaggacaagtgcaatgcttgtgacaagaccgtgcatttcattgatctccttaccgcggacagtattccctaccacaagtcttgcttcagatgcagccactgcaaaggcacactttcgatgtgcagctattcgtccatggatggggttctttactgcaagacccattttgagcagctattcaaggaaacaggcaccttcaagaagaacttccnctcaggtacaaaggcaaacagtgaacaggctaagattcccagcaagctgtcctctgtgttctgtggaacccaggacaagtgtactgcctgcaagaagactgtgtatccattggagaagat

SEQ ID NO: 598 - DNA, 503 bp, Oryza sativa
  unsure (1)..(503): unsure at all n locations
  Clone ID: uC-osflcyp012g08b1
caacttggaagcaattcaaattcttaagaaaactggagggtctctaaaggactcctttttggatgaagggttcattctagacaagaaaatcggtcttggccaaccgaagaggattgaaaacgccaagattttggttgcaaatactgctatggacaccgacaaagttaagatatatggagcacgtgtacgggttgattcaatggctaaggttgctgaaattgaagctgctgaaaagcaaaaaatgagagaaaaagtgcaaaagatcataggtcatggaatcaactgtttcgttaacaggcagttgatctacaacttccctgaggaactctttgcagatgctggcatactggcaatcgagcatgctgattttgagggcattgagcggcttgctcttgtcactggtggtgacatcgcctccacttttgataacccggagtctgtcaaacttggtcattgcaaggtcattgaagagattatgattggngaggacaggctgattcatt

SEQ ID NO: 599 - DNA, 361 bp, Oryza sativa
  Clone ID: uC-osflcyp012g09b1
atatgactattaaaatttaaagaaatttaaaactaaaaaacaaagcacaactgaaaaaaaatcacagagaactaaaaagtgaaaatgaccaacaactaaagctctcaaaagcaaaaacaaacatagacacaggaacatacaaggacatacaatcacgaaaagccaagaatactcatgaaaaaaagagcaaaaatgcacagacaaaaaaaaacaaagtgtgacacaggaggggctggaaacatgtgtcaacaaggcctggcctaactgacgcgaaaaaagctgccaaaacagatgcacgaaagggtagtacacgatagacaagatgggataggacatggagaaggacataaacggggaccac

SEQ ID NO: 600 - DNA, 498 bp, Oryza sativa
  Clone ID: uC-osflcyp012g10b1
gcaaattgcctgagagccgaaacgcgcgaaacgacccgcccgcccacgcggcccagcccaaccaggtcgcacaacgcaactcgcgagggcgagcgactgagaccgtctcctctcgtctcgtctccccgctagggttcaggccatggcgcacggccgcgccgccgccgtacgccgccccaagtcgtcgtcggcgtcgtccgcgggggcggctgccgaacggaagcggaagcgcgccgccgccgccaagaccgtttccctcaagaaccagatccgctccaccgagcgcctgctccgcaaggaccttcctaatgacattagggtagctcaagagaagaaactggaagaattgaagcggcaacaagagcttcagaatcaactggctattcaacgaacagttcagctgagagatagaaagataaaattctttggtctgctggacattctgcttcattcttgctcctgtatgatgacctttaactgaacatatgtacttatcat

SEQ ID NO: 601 - DNA, 520 bp, Oryza sativa
  Clone ID: uC-osflcyp012g12b1
tttgtctcccaccaccacttccccccttctccgatccctcctcccatggacgccgccaaggataccaccgccgccgccgccgaccaaaaccctacccccaaccctcccaccgccgcagctccacccgatgactccgcggcggcggcggcggcggggagacggcccttcaccagcctcacccaggaggaggccgacctcgccctcgcccgcgtcctccaggagcaggagcgggcgtacatgatgctcagcgcgcaccacggcggcgactacgcggcctccgatggtgggagctacgagtttgacgaggaaggggaggggagcgattttgaggacgaggatggggacggggacggcgacggggaggcgctggatgaggacgaggaggtggccgacgcagacgcagacgccgccggtgacccggctgagttggaccccgcgcggtacgaggacgacgaggccttcgcgcgggcgctgcaggacgccgaggagcgcgaggtcgccggccgcctcatggcgctcg

SEQ ID NO: 602 - DNA, 293 bp, Oryza sativa
  Clone ID: uC-osflcyp012h01b1
tttgctgcttccggaggatcagagatgggggcggagaacggcagctgcggctgcaacacctgcaagtgcggcaccagctgcggctgctcctgctgcaactgcaactagaagaaacttatctccatccaattcatcacctgatcaacgagctaccagtaccactacatatgccatgtactagctacctagcttgcatgcaagtccttaatttgctgctagctagctagctagctaccttagcgtctcatgtatgtcatgttgccgcctggcccctaaataaaattccttacata

SEQ ID NO: 603 - DNA, 446 bp, Oryza sativa
  unsure (1)..(446): unsure at all n locations
  Clone ID: uC-osflcyp012h03b1
cccatggctccccctctctgacctcgccggagcgccgccgggatctcgacggtgatgccgccgccgccgcctcccccaccgcccccggcggcgccggatccgccgcagctccatggcgtggtcatcatcaccctccctcccccggaccagccctccaagggcaagaccatcaccgcgttcacctacaccgacgacgacgtcaccccgcccccgcctacgcctccgccgacgcatctgccgacgcgggctctagtgcccgcgggggcgggggcgggggcggaggctaggcgatcgaggcgggggttctcgccgcggcgggcggcggcgatggtgctcgttctcggngcgctcgccgtcgcggcatactactccttctactcggacgtggccgtccagttcttggggatgcaggaggaggcgcagaatgagaggaacgagaccaagtc

SEQ ID NO: 604 - DNA, 520 bp, Oryza sativa
  Clone ID: uC-osflcyp012h05b1
tgctcctcaaccagttcagtcatccattctgtcttctctgcagatactgagagccaagatgagtagcaaggttcttctgatcagtggtgtcctggtggggctcctttctctgagctcatgcaggagcctgggagagttgtctgaacagaagacctactcttctactactcagtatggtggctccccaactccatcatatggatcagatggtggttacaaaccaacaccaaccccaacaccagcttacggctctacaccaacaccatcttatggcactacaccaacaccatcttacggcactacaccaacaccatcttacggcacgacaccaagcacccccagcacacctgatgtccctgaagttccgacaaagcatgatttctgtggatcctgcgattactggaagaaccatccagatgttatcatctcagctattgggtcccttggcgacattggcaagacactcggtactgcttgcagtttgatcactggcaagaagctagaaaatcttcatgatgca

SEQ ID NO: 605 - DNA, 521 bp, Oryza sativa
  Clone ID: uC-osflcyp012h06b1
ttttgggtgagatcggagcagcgaagcggaggcagccgcagccatggcgttggccgctcgcctcgtctcccgctcccggcagctatactctgctcaagctgccttggcaaatggaggtgccactcaagtccgcttgtatgccaaggaggcagatcgtactcccgtcaatggtgatgacctattgaagggcatattttttgaggtaaagaagaaatttgagactgcccttggtgtacttaagaaggaaaagatcactattgatccagatgatcctgcagcagtttctcgttatgcccaagtcatgaagactgtaagacaaaaggcagatcttctatccgactctgagaggattaaatataccatcgacacctttacaaagggcatccctgatgcacggacttacttgaatactcttcaggagatcaggataaagagtggccttatagatgatatgggtgctgaggctatgatgatggaagccctcgagaaagttgagaaggagattaagaagccacttctga

SEQ ID NO: 606 - DNA, 457 bp, Oryza sativa
  Clone ID: uC-osflcyp012h07b1
cagcaggcgaaggcgccggcttggagaggctggtggcttcgtggtctctctcttctctctccccctagcagcagcgcagaggcggaggaggggggagatggccgagaagggtgacaatctggaggccgtgctcaacgagtccgtcgatctcgagaacataccgttggaggaggtgttcgagcacctgcgatgcaaccgcgagggcctcacctccgccaatgccgagcagcgcctcaacctcttcggccccaacaggctcgaggagaagaaggagagcaagttcttgaagttcttggggttcatgtggaacccactgtcctgggtcatggaggccgccgcaatcatggccatcgctctcgccaatggaggagggaagccgccggactggcaggatttcgtgggcatcattacactgctcatcatcaactccacaatcagtttcattgaggagaacaat

SEQ ID NO: 607 - DNA, 525 bp, Oryza sativa
  Clone ID: uC-osflcyp012h08b1
tgccgatcagccggtgaagagcttcgatgatcgccgcagggcgcaggtgttcctccgggacgagataccggactcggtcaccattggctgctatgtcctcctgtcgatcatctccatcgccgccatccctcacctctacccacagatgaggtacagccatgttgcgctcatctacctcgccgcgcccgtcttcgccttctgcaacgcctacggcttcggcgtcaccgacatgaacctggctagcacctattgcaagatcgccatgttcgcgttcggctcgtgggtcggcatcaagagccggcgcgtggtcgccgccctggtcgccggcgggatcaccatgtcgatcctgggcaacgcggccgacgtcgcgcaggacctcaagacgggctacctgacgctgacgtcgccgcgcgccgtgttcatcagcgaggcgatcggcacggcgctgggatgcgtcgtcaaccccaccgtgttctgggtgttctacagggtgtacaagatgggcagcggcgacatgggcgacat

SEQ ID NO: 608 - DNA, 353 bp, Oryza sativa
  Clone ID: uC-osflcyp012h09b1
tggacgcgtgggcaccgacctcccctccccttgcagatctgatcggcgacggcgatcgccggaccaccaccgcccgccgccatggcgctcaccctccgcaagaagcagctcgattcgatcgtgaggatgctgcatctgaaccagcagctgcagggctcgccggacggggtcggcggaggggtggggtcggcggaggaggaggaggcgtacaagatcctggtgatggactccccctgcgtcgcgctcctcgcgccggtgctccgcgtcggggagctccggaggcacggcgtcacgctccacctcaacatcgacaaggcgaggcagcaggtccccgacgcccccgccgtctacct

SEQ ID NO: 609 - DNA, 523 bp, Oryza sativa
  unsure (1)..(523): unsure at all n locations
  Clone ID: uC-osflcyp012h10b1
accacgcccaaccaacgccaccaccaaccccactacgcacgcactcacccaccccacctgtcgccccgccgcgcccgacttcgccgtcgacgtcgacccgctgctgcctccgccgtccaacggcgacaccggcgcggaggcgtcgatggttgtggcgttgggcgtggtgacgtagacgtcgagctcgaacacgccggtgctggcgctcatgctggccgtcttccacaccacgtagccggtggccatcctgaacttgcccgtgccgcccaccacggacagctccctcaccgtggccgtggtgtcgtcgtggccgatcaccgcgatggtgctgccgttgttctcgccggcggtgaagtagaggttcacgcacatcatcagcgtcgggctcgacagcgacgacatcatgtagaacccctgcgcgcgccccacctncggggacgtcgccgacgaggtctccgtgagcgcgtcgtcgacgacggtggtgtctncgagccggtgcttgacgccaccgtggccgacgtcg

SEQ ID NO: 610 - DNA, 324 bp, Oryza sativa
  Clone ID: uC-osflcyp013a01b1
tgtcatccagtgcgtaggtgaggctcatcgcgggggatggtttaggaggatgcactgatccaccggagaagccgagggacatttgcaggaatgtcatgcggaaactgactactggggagacttcactggtagagcgaagtggaacggaatggatcgtagcgctgacggactaatttgaggcagactgcggggagactctggtgatctagatggatctggagaacatctcttagtgtgataagtgtggagtatttgttgaggaattaaggacaccatccacaatgagggttgtgtgcactcattgacccgggctaatgaccatgc

SEQ ID NO: 611 - DNA, 492 bp, Oryza sativa
  Clone ID: uC-osflcyp013a04b1
tttactcgtctgctccggcatcccggcgacgagagagagagagaggggagaaggctgcgcggcggagatggcggtggcggacgtggcgttcaaggcgctgacggcggggctcggggtggcgacgctctacctcgccggaaccttctccgtcaacgtctaccgcggcctctcgtggcactcggagcaatccgtaagcaaaaccctcgcccgcctcgaccaccaaacccttgacttctccccgccgctcgctggggagccgctgattcggggtccttctccgacgatctggtgctactcgctgcatctcccatgtcgaatctccccccttcctttgggcctaggacgagggtttgggtggatatccttcgacctttgttctgttgttttttttttgcatcgacccatgcctgccaaattggaacatgtttggccctttgacttgatgcgagcacatatatttttgcgtgatgctgctgtactgtgcaggagcta

SEQ ID NO: 612 - DNA, 487 bp, Oryza sativa
  Clone ID: uC-osflcyp013a05b1
tcttgagcttggagagagacaacaatggcggctcaggctcttctctctgggaggcagctgctggggaggccattgcaatcttcagtctccaggtcttcttcctccaggaaggcacccttcatggtcagggcagaggccactccccctgccaagcaaggtgctgacaggcagctgtggttcgcatccaagcagtccctgagctacctggatggcacgcttccgggagacttcgggttcgacccgctggggctatcggacccggaggggaccggtgggttcatcgagccacggtggctggcctactgcgaggtgttcaacggccggacggcgatgatgggcgtcgtcggcatggtcgccccggagctcctcggcaagctgggcctcgtccccgccgagacggcgatcccgtggttccagatcggcgtgatcccccccgcgggcacctacacctactgggccgacccttacactttcttcgtcttcgagc

SEQ ID NO: 613 - DNA, 430 bp, Oryza sativa
  Clone ID: uC-osflcyp013a06b1
tttagtattaagttataagttaccatggttgagattctagaagtctgaactttggaatattcattgacaaaaggtaactctgaaagtcagaactttggtttgaaagtttgaaagtgtgaaattctgaacatgcagtggctaatatatatcggtcgtcgaggcgtggtaattatattgaaatttccaatcaattctaatatggttgcataataaatcacattttatcccccaccggctgggttttatttcaatcacattttatgacaatgctgaaatcgaaaacaaatattttacattttatatgtgcagccaacaagtcaattccctgttctgttgtttctgaactctcatgttgcgtgttactgctactgatgatattaatgatacattaactatttccttttgccatgtagtagttcagccaaatttt

SEQ ID NO: 614 - DNA, 484 bp, Oryza sativa
  Clone ID: uC-osflcyp013a09b1
gagaaataaacccgcaacaccagtcatgtaattccaaaagtagaaagatacatacaaagtgcggctggtgttacccctctctgtacattgttcaataagtagcacatttggaagcagctcagcagaaacatcatatcaccacatgcgtatacaatggcacaaagaatatgcatgtctgaagatcaaaagcctaaagagctaactttaatgttcacaccctcctgacactctttccatactccttcctgatctcccacagctgctctccaacttctttcatggtcggacggtcctcccgcgtcggagcggcacactggaatgccaagttcagcagcctttcgagcacctcatcgtccacaggatcctccaaaacggatccaatatctccctcctgttcccttcattgaatttcttgaatgtccatctgatagttattctctctttagcagcccgcttcagttctaccggtcggcgagcagagaga

SEQ ID NO: 615 - DNA, 465 bp, Oryza sativa
  Clone ID: uC-osflcyp013a11b1
tcgttaccaccgggtgccagaagaagctcgagatcgatgacgaccagaagctccgggcattttatgacaagaggatctcccaggaagtcagtggtgatgctcttggcgaagaattcaagggctatgtattcaagatcatgggaggctgtgacaagcaaggtttccccatgaagcagggtgtgcttacttctggacgtgtccgccttctcctccacaggggtaccccctgcttccgtggatatggcaggcgtgatggtgagcgcagaaggaagtcagtccgtggttgcattgtcagccaagatctctctgttatcaacttggtgattgcaaagaagggtgataatgaccttcctggcttgactgacactgagaagcccaggatgaggggacccaagagggcatctaagatcaggaagctgtttaaccttgccaaggatgatgatgtccgcaggtatgtaacactta

SEQ ID NO: 616 - DNA, 306 bp, Oryza sativa
  Clone ID: uC-osflcyp013a12b1
tcgtcaatccgccattgctactagtaggagtagagctctctggacgttggaatacttattgacaaacggctacggttgattaaataatcgtagcagcagaagaagcagctgtttgtagacaaggtgtttgtggaaatgtcgtcgtcgtcgctgtcgccggcggggtcgtcggacggggcactcggcgggggtggtggtggcggcggaccaccggagggagaagcggcggctgtcgaacagggagacggccaggcggtcgcggctgccgaagcagcaccacctgtacgagctggtgcacgaggtggc

SEQ ID NO: 617 - DNA, 475 bp, Oryza sativa
  Clone ID: uC-osflcyp013b01b1
ttctcggctgaacaggggaggcggcgagcagagcatgggagaggaggggatcctgcagggagggagaagttatctggcaatttcagggtgttttgagttaaaggaagttaaaggaaatttgatagtgatagtgttgcaatttgggttttatcaaatcagctatggactcagtggtgttggagtgtggcgacatctccgcttcccaggaagaactccttgcccactcctcattcctcaatggtggtgatgatggtgaggtcttcagcacacctcccacaactcaagaggacgccatcaccatgtgcaccctccccttcacccagtcccagttcccagcaccagcaccattgccatcaccagcagtcgtgtcgcgcaccacccctggatgcagctcctcagaggacaaccgagacgatgagatgagcgatattgacaagcagcggtgcaggcctagggtttgcacaagaaaggtgag

SEQ ID NO: 618 - DNA, 493 bp, Oryza sativa
  unsure (1)..(493): unsure at all n locations
  Clone ID: uC-osflcyp013b02b1
gtgtcagacgacacatagaaggttttcatggagaaagtactggtgctctccttgatatgtatttcactctgccaaggatgggtggtgcaatctttagaatatgatcatacagcaagtattgagtgccttcgcgatccgatgaagccgctgtacaacggcggcatcatccagaacggcgagttcaacagcggcctcatgggctggtccacgcaccgcgacatcaaggccggcctgagcagctcgccgtccggcaacaagttcgccgtggtgcagcgcgccgactccctctccggcgccgccgtgccgtcgcgcagcgtctaccagaagatccagctgcagggcgacacccactnactcgctgtcgcgtggttgcagttgtcggccggcgccgcgcacgtgaaggcgttcgtcaagacgcccaacggcgagcgcgtcgtcgccggcagcgtctccgcccagtccggctgctggagcatgctcaagggcggcatga

SEQ ID NO: 619 - DNA, 501 bp, Oryza sativa
  Clone ID: uC-osflcyp013b03b1
cttgtgttagtcgttcttctagtggcttgattgtccttcaccattttattctggtagtcgttcttctagtggcttgattgtccttcaccattttattctggtaatttactgcacgtaggttaccacaagatcaacatccctatatggggcgtgtggctggttgtgctaacttgttatttctgttgtggtacctgcactcctttcttttcttttttttttctctccgccacttacggagtaataaacctggacggcgccgttcctttgcaggcccatcgaaatcgacatacggtcattggcgcgctaaagttgaaattggagaatagcacatcagcaatccaaagtacctataggtatcgtgaaacagacttcacgccttgattgtccttcaccattttattctggaaagctacggagattcacagctgagaaagcggctgacttccatggcatggcatagactttgagcatcatatccatttggtttcaacagggggattc

SEQ ID NO: 620 - DNA, 469 bp, Oryza sativa
  unsure (1)..(469): unsure at all n locations
  Clone ID: uC-osflcyp013b05b1
ggtggtgacaccgctcgcctccgtccgcctcgcctccaccgagaggttctctctgccgccgattcagatttacagggagattatcttgtgatctgtaaacatgtttgggcgtgtaccgaggagtaacaacaccaagtactatgaggttcttggagttcctaaaactgcaagcaaggatgagctaaagaaggcataccggaaggctgccataaaaaaccatcctgacaagggaggggatccagaaaagtttaaagaattatcacaagcgtatgaggttctcactgatcctgagaagagagacatatatgaccaatatggggcaggatgctcttaaggatggaatgggaggaggcagtgacttccataatccatttgacatanttgagcagtttttcgggggtggtgccttgggnggaggtagctcaagagtacgcaaacagagacgggtgaagatgtggcgcatactttg

SEQ ID NO: 621 - DNA, 378 bp, Oryza sativa
  unsure (1)..(378): unsure at all n locations
  Clone ID: uC-osflcyp013b06b1
ttgcttgctcgctcgctgcgtcgctgcactttctccacagatttttctgctgctgttgcttcgtcgcctcgcccgcggattccgtactactaccggagggtttggttggttgatttggtttggtttagccatggccggtagagggaaggtgatcggctcgggcgccgccaagaaggccatgtcgcggagctccaaggccgggctccagttcctcgtgggcaggatcgcccggtctcttgaaggccggcaagtacgccgagagggtcgtngccggcgccccggtctacctcgccgccgacctcgagcaccttgtcgctgaggctcttgagcttgccgggaacgcggtgagggacaacaagaagaccccgatagtgcccc

SEQ ID NO: 622 - DNA, 509 bp, Oryza sativa
  Clone ID: uC-osflcyp013b07b1
tcgttcgccgctctccggcctccgcccgcgcgctcccgctcccgctcccgcggcgcgcagtcgcctgtgcggccagtcgccgccggtcgtggccccgcggctcggggcgttcccgcggcggcgtggtggggcggcacggtgctcgccgcgcgccgaggccggggacgtggaggcgcttagggcgggggtgtcggtgtacaagccgtggtcctacgacgtgctcgtctccgacgccgcccgctccctcgcctgcgccatggacgagggcaagacccgcctcgagatcgagttcccgcctctgccgagcaacatctcttcttacaagggttcctcggacgagttcatcgacgccaacatccagcttgctcttgctgttgccagaaaacttaaggaactcaaggggactagatcttgtattgtgtttcctgacctaccagaaaagcgcagggcatcccagttgttcgggactgctctagactcgattgagactgcaactatcagttccctgg

SEQ ID NO: 623 - DNA, 405 bp, Oryza sativa
  Clone ID: uC-osflcyp013b08b1
ttctgaaccacatgataggcgctgcgattgttatgctccggtttctgaaggaaggcgctacacgaactaactcatgctgtggagagtgattgcatctacacaccggtggacactgcatgcgacactggctgccatggatcattgctagaggttgagattcgaaggaatgatgcacggcgcagttgagctggtggcatcagattgccctcactggaatagatcagagggggctgatcatctatatgttacaccagatgacttgggcgctgggttgcactagcacgaagaagaggcactgggccgtggcatgctgccatagcttcacagtgctatgctggttgagacctctggacagagaaaccatgtctgatagaaggacggatagatcaccattgcgtcttatgc

SEQ ID NO: 624 - DNA, 504 bp, Oryza sativa
  Clone ID: uC-osflcyp013b09b1
ttctcctcctctaatctcaagtctctgtctcgtcgtcctcgcatctccactcgccatgggcaagattaagatcggaatcaacggtttcggaaggatcgggaggctcgtggccagggtggccctccagagcgaggatgtcgagctcgtcgccgtcaacgaccccttcatcaccaccgactacatgacctacatgttcaagtacgataccgtgcacggccaatggaagcacagcgacatcaagatcaaggactccaagactctgctcttgggcgagaagccggtcaccgttttcggcatcaggaaccctgacgagattccgtgggctgaggctggtgctgagtatgtcgtggagtccaccggtgtcttcactgacaaggagaaggctgctgctcacttgaagggtggtgccaagaaggttgtcatctctgccccgagcaaagatgctccgatgtttgtctgcggtgtcaacgaggacaagtacacttcagatattgatattgtctc

SEQ ID NO: 625 - DNA, 146 bp, Oryza sativa
  Clone ID: uC-osflcyp013b11b1
ttttcttcactgctgctgctgctgctaagcttgtagcaatctagtggtgcttgttgttcttcttctcccgaaatctttgcgatcgattgattgatggcatcgtcaagcgggagcggggggagcgcggtatcatcttcatgggctga

SEQ ID NO: 626 - DNA, 478 bp, Oryza sativa
  Clone ID: uC-osflcyp013c02b1
cacttcgctagctccggccaccaactttgacccgtcctcctcctccgcatcccccatcccctcctccccggcggcggcggcggcgcggaggcggcggcacgggagcggctagtggtttcgtcggcggaggcggcggcggggccaagatgttcgggcgcgcgccgaagaagagcgacaacaccaagtactacgagatcctgggggtccccaagaccgcctcccaggacgacctcaagaaggcgtaccgcaaggccgccatcaagaaccaccccgacaagggcggcgaccccgagaagttcaaggagcttgcacaagcttatgaggtattgagtgacccggagaaacgtgaaatctatgaccaatatggtgaagatgccctcaaggaaggaatgggtggaggcggatcccatgttgatccatttgacatctttgcatgattctttggaccttcttttggtggtggcggcagcagcagggg

SEQ ID NO: 627 - DNA, 450 bp, Oryza sativa
  Clone ID: uC-osflcyp013c04b1
gtttcaaatgcagaaaaaaagcttgtccactgcaaacactactcaaatcattcgtgcaaagacgatttaagacgcgctactcatgtttacctcgcagtcgagctcacatcccaaaatttcgcgagtttgatggcctgccgtggtgcacgtctcagcctatccaatttatgaacttgtagagggtgatcaaaagttggttgttcagcaaaaatgcgggtgtgacttcaaatgtgaacatgacactttattgagttcatgaccaatttatgcttcttgtacagacattttgatgtgaaatccccttgtctatctgaagaggtgaggcggtcggcacagctaggatagccttgatttatgattaatttttcttgtttttcacgcgtccttctttgatgatagttgttttattgtatgtgacaacattctggtatatttcttactttggtcatc

SEQ ID NO: 628 - DNA, 491 bp, Oryza sativa
  Clone ID: uC-osflcyp013c05b1
tcttcccgtcgaaccctctccagtctccactccactgaatcctcccacctcggctcgaaggaatggcaagcggtagtgaagctgagaagtcacctgaggttgtgctggagtggcctaagaaggacaagaagaggcttctacatgctgtttaccgtgttggagatttggatcgcaccattaaatgttacacagaatgctttggaatgaaattactgaggaaaagagatgtgcctgaagagaaatatacgaatgcatttcttgggtttggacctgaggacaccaactttgcacttgaattgacatacaattatggtgttgataagtacgacattggagcaggatttgggcatttcgctattgcaactgaggacgtgtacaaattggctgagaaaattaaatccagttgttgctgcaagatcactcgtgaacctggtcctgtcaagggaggatccactgtgattgcctttgcacaggatcctgacggttacatg

SEQ ID NO: 629 - DNA, 508 bp, Oryza sativa
  Clone ID: uC-osflcyp013c07b1
tcgtcttcctcttgtttttcttggccgaaccccccctcgacacgccgtcgccgccgaggggagagagagagaggccgccggccgccgctaccactgacccccccccctcgccggagcgccccgtcgccggtcgggtttgatcgatggcgtccaagaggatcctgaaggagttgaaggacctgcagaaggaccctcccacctcatgcagcgcaggtcctgtgggtgaggacatgttccattggcaagctactattatgggaccctcagacagcccatttgctggtggggtattcttggtgaacattcatttcccaccggattatccttttaaaccaccgaaggtctctttccgcaccaaggttttccacccgaacattaatagcaatggcagcatttgcctcgacatcctcaaggaacagtggagtcctgcacttaccatatcaaaggtcctcctgtcaatttgctcactgctgacggacccgaaccccgatgatccgttggtgccgga

SEQ ID NO: 630 - DNA, 495 bp, Oryza sativa
  Clone ID: uC-osflcyp013c09b1
ttcatcatcagcaaccaattcgcaccgatcgatcgatcgatcgatccagcaactagatcaacagtactagctaggaagcatggcccgtgcacagttggtgttggtcgccctggtggcagctctgctcctcgccgccccgcacgccgccgtggccatcacctgcggccaggtcaactccgccgtcgggccctgcctgacctacgcccgcggcggcgccgggccgtcggcggcctgctgcagcggcgtgaggagcctcaaggcggcagcaagcacgaccgcagaccggcgcaccgcctgcaactgcctcaagaacgcggcccgcggcatcaaggggctcaacgccggcaacgccgccagcatcccctccaagtgcggcgtcagcgtcccctacaccatcagcgcttccatcgactgctccagggtgagctgagccatcgatcagagagacggatcatatatatacagcagcgcgccggttgccacctagtagattct

SEQ ID NO: 631 - DNA, 168 bp, Oryza sativa
  Clone ID: uC-osflcyp013c12b1
ccctcgactcctcttgcgaccaccaccaccgccgacggcgcctgaatggcggtaatcggaggcggaggcggccgtgacgatcttcacaggcggcgtggaggaatcagaccaaactcccagtgcgttgcaccatggggcaaggctggcagccaagaggaccgtccaggg

SEQ ID NO: 632 - DNA, 495 bp, Oryza sativa
  Clone ID: uC-osflcyp013d02b1
aagattcctctgtgtacttggctgtggcctcgaacataagtggttcaatgccaaaagatctgtttgaagatgtaatggaggagcttgagaaacagtatcaagatgacaaagcccgaattaaagaagcagtgaagtctggaaagattcctatgacgacttcatggacactagaggatttcgaaactgctgttacggaggatgatactttgaaaggaataacaaacataaacatgaagcttatttttgatgatcaagttgaaaggctcagggaaaaggaggtaaaggaagcaaagaagcgccagcgtctgggtgaaaatttctcagatcttttgtactcaatcaaggaaatatcagcttcttcaacatgggatgattctaaagcactattcgaagatagccaagagtacaaggcattggacagcgaaacatactctagagagcttttcgaagagtgcgttgtccacttgtaagaaaggttaatagagaaagagcgct

SEQ ID NO: 633 - DNA, 380 bp, Oryza sativa
  Clone ID: uC-osflcyp013d03b1
tttatttaaaaaaaaaaaaaaaaaaaaaaaaaaaaaaaggaaaaaaagatataaggaaaaaaaaattaaaaaagggggggtcgatttagaggattctggtattgcgtcacatagcatgcaatggggggggtcttttttgggggcccctagtttgggtccacgggggggggacttaaatttttttttttggggaacccttggtttattccaggggggggggttttccacgaggtccccttgggaaaacctggggttcccccaatttaggctgtttgggaaaggtcttcttttcggtgggggggctttaagggaggggggcaggccgattgccctttcccataaagggcgccttgtgagggggttagggcccgcgcctttgg

SEQ ID NO: 634 - DNA, 485 bp, Oryza sativa
  unsure (1)..(485): unsure at all n locations
  Clone ID: uC-osflcyp013d04b1
tgatgatgatgcttggagttggaggcgtcgcaggagcaggagcaggcctccccttggtcctccgccgctgcaaccggtcccgcacccctcccccgccgatggtgatgaccccactccaccgcagctgcttcttcttccgaccacaaccctctagtctctcccactacccatccccatccccatgcgccgccgacgacttgttcaccgtcgactacgacccagaggaggaagaagaagaagaagacgaggagggttctccgtgggaggcgcgggtnggtgtaccggcgggacgcctcggttcaccacctcgagtacgccaccaccctggagcgcctcggccttggcgacctctcctcccctcactctcgggcacgcgctgccaccatgggaatcctcatcctctcctcccccaaccttaccggtaccaaggacgaaacgccagtgctcggctctctcgacgttgccaggcgccggggccgcctgcg

SEQ ID NO: 635 - DNA, 498 bp, Oryza sativa
  Clone ID: uC-osflcyp013d07b1
ttcgatccagaattgggttcagttcgaaggcaacgtcttcagattccctggtggaggaacacaattccctcaaggagctgataagtacatcgatcaacttgcatcagttgttccaatcgccaatggaactgtcaggactgcattggacactggctgtggggtggctagttggggagcttacttattaaagagaaatgtcttggcgatgtcatttgcgccaagagattcacacgaggcacaagtgcagtttgctctggagaggggtgtcccagctgttatcggtgttcttgggacgataaaactcccttacccatcaagagcctttgacatggcccattgttccaggtgtttgattccatggggagcaaatggtggaatatacatagtggaagttgatagggttctaagacctggtggatactgggtgctttcagggcctccgattaattggaaagtgaactacaagggttggcagcgtacatagaatgatcttgaggc

SEQ ID NO: 636 - DNA, 375 bp, Oryza sativa
  Clone ID: uC-osflcyp013d10b1
tgcttgacgccatcagcggacagcagcaaactgcgcgaggcggttgcggcctaaaaagctgaaactacctcaaataagcaagaacattgcatcttgcaactgtaaaatggctctttcagagagagaaccaatggtatatgtgtatactactggtcgcaaggcctaaacatttgggtttgattggaagcgcattctggtgtgatttgtatgtgccctatcatctggtaatgctacattggaagctcatcatgttgccggtgctactaaggatgagcctttgtgtgctctgctagatatgtacatatacaatgtggtggtatttatataccaagggaaggccccttgcaatctggaattatgcatggataatcgggg

SEQ ID NO: 637 - DNA, 167 bp, Oryza sativa
  Clone ID: uC-osflcyp013d12b1
ttttcttttgttatagaggctgagctagcatcgtgcgacctctcggcgagcggttagtgttcgatgtcgtcgtcggcggcggctaggtggtggtggtgagtcgagctcacatcccaaacattcgcgagtttgatggcctgccgtggtgcacgtatgagactatctca

SEQ ID NO: 638 - DNA, 503 bp, Oryza sativa
  unsure (1)..(503): unsure at all n locations
  Clone ID: uC-osflcyp013e01b1
tgcattcgcatccacgagaccactcgaacccgacccgcctcgccgccgccgccaccgaagtaatcccttaattggtcaaaatgtctcgggaggagaatgtctacatggccaagctggccgagcaggctgaaaggtatgaggagatggttgagtacatggagaaggttgcaaagactgtagatgtggaagagctcactgttgaggagcgcaacctcttgtctgttgcttacaagaatgtgattggtgcccgccgtgcctcctggcgtattgtctcatccattgaacagaaggaggagnggtcgtggcaatgaggaacatgttactctgatcaaggagtaccgtggcaagattgaagctgagctgagcaagatttgcgatggtatcctgaagttgcttgactcacaccttgtgccctcatctactgctgcagaatctaaggtgttttacctcacgagaagggtgattacacaggtaccttgcggattaagactgggccgagagat

SEQ ID NO: 639 - DNA, 507 bp, Oryza sativa
  Clone ID: uC-osflcyp013e02b1
ttttaggtggaattatgctcagcataacaggcacagaagcattgtttgctgacctttcgtattttcctgtacaagctattcagattgctttcactgtggttgtgttcccatgccttcttctgcaatatactggtcaggctgcgtttatagctgcaaacacaaaccaagtcagccatgccttctatatctcccttccagctcctatactttggccagcatttgccgttgcaacagcagctgcaatagttgctagtcaggccactatatctgcaacatattcgattatcaagcaagcacttgccctagggtgctttccccgagtgaagatcatccatacttccaagaagtatctcggccagatatacagccctgatattaactggatcctcatggttttctgcatagctgtcactgcagggttcaaaaaccaatcccagattgcaaatgcatatggtactgctgtgatcatggttatgcttgtgacaacatttctgatgatccccatca

SEQ ID NO: 640 - DNA, 506 bp, Oryza sativa
  Clone ID: uC-osflcyp013e03b1
ggaagtcgctgatctgcttatagaacttgagaaagagaggtttagtaagaagagaatagaggatgatttggaggttatgtcaaggaaagctagctctcttagagccaaggcacgtgaatcagcagtcctggaaaagcttcgtcatgaggtcaaggagtatagggggatattgaagtgtggtatctgccatgataggcagaaggaggttgtgattaccaagtgctaccatctcttctgcaatcagtgcatacagaagtcccttgggaaccgacagaggagatgtccttcatgtagcttgagttttggggctaatgacgtgaaacctatctacatatgaggttgttaatttcaagatggtatcgcaggcatctagatcaagctactttgatggtcattactttgtcatatggttagatgaccatgcgagttgaagatatgacaagtactagcttgtacaaccaaacatataagcagaatgtagtagcctaatttggctggctacatgg

SEQ ID NO: 641 - DNA, 487 bp, Oryza sativa
  Clone ID: uC-osflcyp013e05b1
aatatagaagttcaataatgctacaagataatatatgagttctctttatcctttgctatgcaagatgcagttgctggtggtgcacctatatttgtgggtagatgataatattaattttggatatcttggatctattgcttggaagctttaactttttaacttacattattgcttatacttttccaatgacaatcatttctttgctacactgtttcccattcaaaacacatggacagttgtggctttttaggtgagggattgtgctacatgatgtctacataatatattcatagtctcaggatatgcatgtttatttgtgttaggaattgttgcattgcccctaatattctgttttgaaagtggatacttaaatattttttaactgtgtttctaattaccattcacattttgacggccatatgcaggatgttctatggacctggtggaccttatgcgctattcgctggcaaagatgccagcagagcac

SEQ ID NO: 642 - DNA, 492 bp, Oryza sativa
  unsure (1)..(492): unsure at all n locations
  Clone ID: uC-osflcyp013e08b1
gtcgtcctcgcatctccactcgccatgggcaagattaagatcggaatcaacggtttcggaaggatcgggaggctcgtggccagggtggccctccagagcgaggatgtcgagctcgtcgccgtcaacgaccccttcatcaccaccgactacatgacctacatgttcaagtacgataccgtgcacggccaatggaagcacagcgacatcaagatcaaggactccaagactctgctcttgggcgagaagccggtcaccgttttcggcatcaggaaccctgacgagattccgtgggctgaggctggtgctgagtatgtcgtggagtccaccggtgtcttcactgacaaggagaaggctgctgctcacttgaagggtggcgccaagaaggttgtcatctctgccccgagcaaagcatgctccgatgtttgtctgcggtgtcaacgaggacangtacacttcagatattgatattgtctcaaatgctagctgcaccac

SEQ ID NO: 643 - DNA, 491 bp, Oryza sativa
  unsure (1)..(491): unsure at all n locations
  Clone ID: uC-osflcyp013e09b1
gtactatcagctgcagtgtcctgccaggggttcatcccttacttttcacccgttggatcaccttcatcctctaaggtttcaccggccaggtgaaacagttcttcatattgctggttctactattgatctgcggtcatgtgatacaagtttagaggtggctgagatgcgcaatgcgctatttgccgaggaggaatcgactgctttatcaacatgggctgtggcatccatttgtggatgcctcaggttggagcatgtaatgacactttttgctgcagcactgctggagaaacagattattattgtttgttctaatttgggaatgctttctgcttcagttttgtccatcatacctctgatacgcccatatcagtggcagagtctactcataccggtcttgccaaacgacatgatggactntcttgatgcacctgttccatacatagttggtgtgcagaacaagacatccgatgtacattccaggctagtgaacg

SEQ ID NO: 644 - DNA, 477 bp, Oryza sativa
  Clone ID: uC-osflcyp013e10b1
ttcgcgctcccctcgccgccgcagccgccgccgcctcgcctcctcggagatcttcgctgcccttccgtcaacatggggaagacacgtggtatgggagctgggcgcaagctcaagacccaccgcaggaaccagagatgggcagacaaggcctacaagaagagccacttgggtaatgagtggaagaaaccctttgctgggtcatctcatgccaagggcatcgttctggagaagattggtattgaggccaagcagcccaactctgccatccgtaagtgtgctcgtgtgcagcttgtgaagaatgggaagaagatcgctgcctttgtgcccaatgacggttgcctgaacttcattgaggaaaatgacgaggtgctgattgctggatttggtcgtaagggccatgctgtgggagatattcctggtgtccggttcaaggtcgccaaggtctctggtgtgcctctgcttgctctcttcaaggag

SEQ ID NO: 645 - DNA, 488 bp, Oryza sativa
  Clone ID: uC-osflcyp013e11b1
tcttcagactccacgattctctcagagagagagagagtgagagagtggggactcagcgagcggtgggcgagagggggagatcgaaaccctagctagggtttgcgcgcggcggcggcggggatgtcgacgccggcgaggaagcggctgatgcgggacttcaagcggctgcagcaggacccccccgcggggatcagcggcgcgccgcacgacaacaacatcatgctctggaacgccgtcatctttgggccggatgatacgccgtgggacggaggcacgttcaagcttaccttgcagtttacagaagattattccaacaagccgtcgactgttcggtttgtttctaggatgttccacccaaatatttatgcagatggaagcatctgcttggatattctacagaaccagtggagccctatataagatgttgctggcatattggacttaatttagtctttgctgtgtggaccaaaccccaactttcaggaaac

SEQ ID NO: 646 - DNA, 390 bp, Oryza sativa
  Clone ID: uC-osflcyp013e12b1
gtgccattgctggtgctggtgtgctctcaggctatgaccagctgcagatcctcttctttggaaagaagtacggctcgggcggtgcctaaactggcagaaaatgatgacgaacaagtgtttattcctggtcctgcactaacgggatctggtgaattttgcctttttaacattgaaaacaataataattcttgtaggggagaacactccccgacattcgttttttggtggaagcgtttatctccaaacattgtcataggcggaggcgttaatcgcaaacagtttaccatcatagggttgagtttgagttgagtctggccggctctgttatgtctggcgattttcctaccatacattacccctcggtgaaatatcgaaagattattgagttgc

SEQ ID NO: 647 - DNA, 381 bp, Oryza sativa
  Clone ID: uC-osflcyp013f01b1
ttcattttcagataagcagacttcgtctgatttgctgcctgtagaaatggctgtacttcaagatggggaattcacttggttcactgacaagccagcagtgtcaatgttacagaacaaatgaggtccatgcctggatattgtttaagctttcatcttaaataaagatccaggggctaatcccagcctggatactgcttaagctttcaatccaaagctgggttgtaatgatcttctgtctaaaaaaggatccaggtgactgcatagttgcattcctcttttatgcatcacttgtaaggaaaacatgagcatgtatgttgtatgttgttcagagtgatgtatctgagacactcctggtttcgacttagtaaataacctttcctg

SEQ ID NO: 648 - DNA, 504 bp, Oryza sativa
  Clone ID: uC-osflcyp013f04b1
tcgtttccgggcacaagtttgtaggatgtcccatgccatgtggtgtccagataacaagactggagcacataaatcgtctttctagcaatgttgaatatctggcatcaagagatgcgacgatcatgggaagtaggaacggccatgctccgatcttcctctggtacaccctgaacaggaaaggctacaggggcttccagaaggaggtccagaagtgcctgaggaacgctcactacctgaaggaccgcctcaaggaagctggaatcggcgccatgctcaacgagctgagcagcaccgtggtgttcgaaaggcccaaggacgaggagttcgtccggaggtggcagctcgcctgcgagggcaacatcgctcatgtcgtggtgatgcccagtgtgaccatcgacaagctggactacttcctgaacgagctgacggagaagcgggcgacctggtaccaggacggatcatgccagcctccctgcctcgccaaagacgtaggcgaggagaact

SEQ ID NO: 649 - DNA, 448 bp, Oryza sativa
  Clone ID: uC-osflcyp013f07b1
ttaagcagctagaaactgaaggcgagcaaagaagaaaaaaaacactaaattctgctctttttcagttaagtttcagctcgtcgatccagagcatgaaatgttcagtgttcagctatctgcactactacagactgccgattttgtagccaaggatgtataaacgtatgcatgcttgtactaccaccgtataatatacgtacgtgtacgtagtagatcgatgcagacaaaaagtcttagcagaagaggggatccttgtacgtacacaacctgtagtgtacgtacacgatgcgatcgatgatgaactgatagtatatgtatatggcgcagctggtgtattatattacatgcgctagctggaggaggagtgtgctaatgttgtactagtactacgactgatctgtttgcttctcctttgctttctttgtctccagaaaagagggagaggaga

SEQ ID NO: 650 - DNA, 411 bp, Oryza sativa
  Clone ID: uC-osflcyp013f08b1
cttttcctcctcggttcggttccgtggttcgtctagggtttagtgggttgagatggcggcgccggatgtcgagtaccgctgcttcgtcggcggcctcgcctgggccaccgacgaccgctccctcgaggccgccttctccacctacggcgagatcctcgactccaagatcatcaacgacagggagacggggaggtcacgtgggtttggcttcgtcaccttctcctccgagcagtcgatgcgcgacgccatcgagggcatgaacggcaaggagctcgacggccgcaacatcaccgtcaatgaggcccagtcccgccgctccggcggcggaggcgggggctacggcggcggcggtggcggctacggcggcggccgtggaggcggcggctacggaggaggtggcggcggcggcta

SEQ ID NO: 651 - DNA, 504 bp, Oryza sativa
  Clone ID: uC-osflcyp013f09b1
tttcagctagcttgtagcagctaaggttaggtcggatcgagatcgggatcggccgccggcgagcggcgagcggcgaggatggggcgggggaaggtgcagctgaagcggatagagaacaagatcaacaggcaggtgacgttctccaagaggaggaatggattgctgaagaaggcgcacgagatctccgtcctctgcgacgccgaggtcgccgccatcgtcttctcccccaagggcaagctctacgagtacgccactgactccaggatggacaaaatccttgaacgttatgagcgctattcatatgctgaaaaggctcttatttcagctgaatccgagagtgagggaaattggtgccatgaatacaggaaacttaaggcaaagattgagaccatacaaaaatgtcacaaacacctcatgggagaggatctagaatccctgaatctcaaagaactccaacagctagagcagcagctggagagttcattggagcacataatatcaaga

SEQ ID NO: 652 - DNA, 485 bp, Oryza sativa
  Clone ID: uC-osflcyp013f10b1
tccacacggacgctgacgcatcatagcacagagctagtggcatagctgttcttgcatgaaccgaggtctctacagacattgggtttaaacggtggtttctactgctagctgccatgatttgtccagttgtgtacatcttagggcttaggaacttaattggaaccaagatgttaccaatatgatatgttcgattggcaatttgaagcacctgcgttatctgtctctaaattgctatctgcaagaactgcctgaatcggtgtctggtgtttacagcctggagacattggtgatttccaatttgagaatatggagggcaacatacttccacaatcttgtcagacttaaaagtctgcatgtatattttgagtttttggatggatcattgtatcaattttgcaagcttgatatgttggacacactatgtctgaagagatgcagtaacttgcgatacttacccttacatgtaggaagcctcatcaacttac

SEQ ID NO: 653 - DNA, 323 bp, Oryza sativa
  Clone ID: uC-osflcyp013g02b1
tgataatattggaagtggcggaggtggatggggcacaggtggtggttcctcgtgggctggtggtggcgacggaggttctggaggtggtgatagtaaccgtggtggtggtggaggctggggaacacccgtcggcaccgacaccatggtcgccgtggacgtgaaggtggccgtcacccaggcctccgacctctcccggagccgactcacgctccgcgggaaccccaccgcgcgccgatggatcgtcgtgatggccgagtccacccccaggtcggccgccgtcgccgcgttcctcgagcgccgcgagtcggagtgcgccctccact

SEQ ID NO: 654 - DNA, 504 bp, Oryza sativa
  Clone ID: uC-osflcyp013g03b1
tgatgctaaagagaagcttcagccttttgcaaatttgactagtgaagaaagctaccaaagtcgtgacttggaaaaggcctctcaacaagtagcaaagcatctgtatgatatcaaagttcaaccatcaactctgcttccaaaacagatcggtaatatgtacactgcatctctttatgctgcattggcatctgtgatctacaacaagcatgacagtctggatggccagcgaattctcatgttttctatgggagtggattgacatccactatgttttcgttgagactacatgatggtcaacatccctttagcttaatgaacattgcttctgtgcttgatgtgacgacaaagcttgagtcaagacatgtgacctcacctgagagtttattgagacattgaagctgatggagcaccgctatggagcaaaagattttgaaacaagcaaagataccagcttgttgccaccaggaacattctatcttacaaaagttgattcgatgtacagga

SEQ ID NO: 655 - DNA, 374 bp, Oryza sativa
  Clone ID: uC-osflcyp013g08b1
tttagggcatgagcatgaccagcatgtactggtgcggccaggacctgcaggagcttgttaacgccaatggccatggataagaagacgaggaagaagaaaagacttctccggagagggaggacggtggatgcagaccgaatccgatcgacatgcacgccgcggagttaatagggaaattctacgagcaattgaggctgaaaaagtcggactgattcaacaaccgagcctatggatcgatctcagtgctcggatcttgaaattagcagcgttcttctgttacgatgtacatggcggatggggagcaagaaaaatccattgaaatgaagtaatgaagaaaagtatatacctgaatgtcgagagcataattcacattc

SEQ ID NO: 656 - DNA, 235 bp, Oryza sativa
  Clone ID: uC-osflcyp013g09b1
ttcgcaatgacggggtgcttgcccaccgccgggctccggcgggggctgacgctgccgtcgacaggagacacggtacgtattgggcacatgaggaagggttgtatattaaccaggtttgacaatgacattgggacggggtttgtatgaccgtcttggaagtgtttggttgaacctgtctcaaggtctttggtccaagacattattcacctggcttgcttaactcgttttagagaat

SEQ ID NO: 657 - DNA, 471 bp, Oryza sativa
  Clone ID: uC-osflcyp013g11b1
gtagtgaagagctttcagaggcttcccaaatcctttcctgcttgtctgatatggtctactgctcggtttgcgcctgtatgcagacccaacacaaaattgaaatggacaagagagatgggaagttcggcccacagcccatggcagtgcctccaatgcagtaaatgtcgcgcatcgatcagcctattccacctcctgttgggtacacaccacaacagccagcatacggtcagccttatggtggctatcctcctgctccgcctgctcaaggttatccaccagctgcttaccctccggcaggttacccccagggtggcgcataccctccccctggctcttatcccccacctggttcctacccgcctcagggctcctaccctcctccacaaggttactacggcaagtaaaggaaatgcagaaattggagatatgtctttgtgacgaaatcggtatattgtgaacaatgtaaacatt

SEQ ID NO: 658 - DNA, 492 bp, Oryza sativa
  Clone ID: uC-osflcyp013g12b1
gcattagcaagtacggtgacttgggtgccgcactgaatctatgaacaggactgacctgcattggttggatggaggagaaccggagaagtggtgtttcgagtaaacaggttgtctttgaaacatttactcaggtgatgttgccagttgccacactattatataccagtggaacaccaaaaggagtgatgcttaggtgctgaaatctcttgcatgtggtcgaaagagcagtaacattcacttcttttacctgaaagtaatattgaaatataaactgtacttttcttgatgtgatttcttgccatgtgaacatcagaacccctgttcctcttctatccaaattaagttctatgcagttatgtttgtagatgaaaactttctgggatagtattagcagtacctggtgatagtttcctaagcatgcttccaccatggcatgtgtatgaacgtgttatcaagcactttattttagcttatggaattaacatgttacat

SEQ ID NO: 659 - DNA, 379 bp, Oryza sativa
  Clone ID: uC-osflcyp013h02b1
ttctatatccaatcggccagggggcggcgacggcgaggcagccagccgccggctgcgccttccacggtcctccgcgcgacatccacgagcctccaagctgcgccgccacatgcatgccgagcttccgcgagacctcgacacgccgctgttgttgtctccaagcagatcttgcgctcccatcctcttctggtcgactactccacgcggcggcccgctgctacagctattgcacgttgtgccatggctgattagttgccactaatctttctggtttttcatgcttgattgcttcttgctggactattttgtgcttgattgcttttgcatgtgtaagtgtgagacagatcttttgttttcagccatcaaacttgttaatttt

SEQ ID NO: 660 - DNA, 488 bp, Oryza sativa
  unsure (1)..(488): unsure at all n locations
  Clone ID: uC-osflcyp013h04b1
ttcctactggcaggtattgtctttcaggctcatctgattcaatgataagattatgggatctgggacagcagcgatgtattcattcttatgctgtgcatactgattcagtctgggcgcttgcaagcactccttcgtttagtcatgtttatagtggtggaagagatcagtcggtgtacttgacagatttaagcaatcgagagagtgtcttgctctgcacaaacgagcacccgattctacaattgtccttgcaggatgatatgatttgggttgcaacaactgattcttctgtgaatggatggaaagctgaagcgcatgaacccctaaagcttttcaaaaaggttcttcattcttagctggcaatttgtcattctccagggcaagggcttctttagaaggatcagcacctgtccctatacacnaagaaccatcttcattattctggagttccagcaataactcagcatgagatcctgaataatagagacatg

SEQ ID NO: 661 - DNA, 472 bp, Oryza sativa
  Clone ID: uC-osflcyp013h05b1
ttgggctccaacgacctcagcaagtacccgggcaagaagatgcccaactgggtcgaggtccgccatgtcgacaacttcgtcatctccggcaagggcaagctcgacggccagggccccggcgtctggagcaagaactcctgcgccaagaactacaactgcaagctcctccccaacacgctggtgctgaacacggtgaacaacggggtggtgagcgggatcacgctgctgaacgccaagttcttccacatgaacatctaccggtgcaaggacataaagatcagcggcgtgaccatcagcgccccgggggacagccccaacaccgacggcatccacatgggcgactcctccaagatcaccatcgccgccaccaccatcggcaccggcgacgactgcatctccatcggccccggcaccgacggcgtcaacatcaccggcgtcacctgcggccccggccacggcatcagcatcggca

SEQ ID NO: 662 - DNA, 228 bp, Oryza sativa
  Clone ID: uC-osflcyp013h07b1
ttttattatccagcctgcacatatgaatgggcgtggcgaggattcgtcctgagttgttcaccatagggtactaaattttgctacatgcaagtgaattgaataccctgttattattgcaatttagcattcacaggcgaccataacattgatgacagggctagaccattatctatccacttctgtgatgcagaagatgcaccgtcacctactaatatgagagtgtgacca

SEQ ID NO: 663 - DNA, 509 bp, Oryza sativa
  Clone ID: uC-osflcyp013h09b1
gcggtgtccgcattggtactcctgcgatgacatccaggggtcttgtcgagaaggactttgagcagatcggcgagttcctccaccaggccgtgaccatctgcctcaacatccagaaggagcacggcaagctcctcaaggacttctccaagggcctggtgaacaacaaggacatcgagaacctcaagctggaggtcgagaagttcgccacctccttcgacatgcccggcttcaccctcgacagcatgaagtacaaggagtaggaaaacaaaaacacacacaaaccatggtcctaccgccgctaatcgtcgaccagctgtgctctcgtggaccgccgtcgtcgtcatcttcttcctcggcacaagctggccctgtgttacggattttgtctgcccatcgagatgattgggttcattaaacgctctcttccccacccctgtgctgcctctggtttgggtgccaacctcatccccatcggttttttttctcctcttggttctaatttctaggag

SEQ ID NO: 664 - DNA, 465 bp, Oryza sativa
  Clone ID: uC-osflcyp013h10b1
tcttgtgtacgccgatggcaccacggctctgccggagtgggagagggaggccagcatcaggcaattctacggtgtcatcttcccgtcgctgctccagctgccgagtgggataactgaattggacgacaggaagcagaggaggctgtgccttcagaagttcaggaaggtggaggagagggtctcggaggtggatttggagagggagctcgagtgcggcatctgcctcgaggtgaatgccaagattgtgctgcccgattgcgcgcactcgctgtgcatgagatgcttcgaggattggaacaccaaatcaaagtcgtgccccttctgccgcgcctgcctcaagaaggtgaatccgagcagcctgtggttgtacaccgactaccgcgatgttgtggatatggatacgttgactagggagaacattaggcgcctgttcatgttcataaagtagcttccacttgtagtgct

SEQ ID NO: 665 - DNA, 493 bp, Oryza sativa
  Clone ID: uC-osflcyp013h11b1
tcttagctttccttgcttgggctagaatgggtaacctgcatggatggggtggaccactatcacaaaattggctggatcaacaattgacactgcagaagaaaatattgtcccgtatgattgagcttggaatggtcccagttctaccatcgttctcaggaaatgtaccgtctgtgtttaaaaaattatttccatctgccaacataaccaaacttggtgactggaacactgttgatggtgatcctaggtggtgctgtacttatcttcttgatccttctgatgcattgtttattgatgtggggcaggcgtttatcaggcaacaaatgaaagaatatggcgatatcaccaacatctataattgtgacaccttcaacgagaatacaccacccacaaatgaaccggcatatatttcatcacttggttctgctttttatgaagcaatgtcaagaggtaacaaggatgctgtgtggctgatgcagggttggctgttctactc

SEQ ID NO: 666 - DNA, 482 bp, Oryza sativa
  Clone ID: uC-osflcyp013h12b1
tcgtaaacagcaaaaaaaaatcaaacaaaaagaaaaaatattccccatctgtgaaattcgcaaaaccctagcgcggcggcgatgtcgaacacgagggtgttcttcgacatgaccgtcggcggagctccggcggggcggatcgtgatggagctgtacgcgaaggacgtgccgcggacggcggagaacttccgcgcgctctgcaccggcgagaagggcgtgggcaagagcggcaagccgctgcactacaaggggagcaccttccaccgcgtgatcccggagttcatgtgccagggcggcgacttcacccgcggcaacggcacgggaggggagttcgatctacggcgagaagttcgccgacgaggtgttcaagttcaagcacgacagccccggcatcctgtccatggcgaacgccgggcccaacactaacgggtcccagttcttcatctgcaccgtgccctgcagctggctggacgggaagcacg

SEQ ID NO: 667 - DNA, 397 bp, Oryza sativa
  Clone ID: uC-osflcyp014a01b1
ttttataccacgcacccacccctcgagagggaagaaggaacccggaaagggaggaaagcatggccggagcagcagccgcctccgccgccgccgccgccgtggcgtccgggatctcggcccggccggtggccccgaggccctatccctcgcgcgcgcgcgccccacggtccgtcgtgcgggcggccatctccgtcgagaagggggagaaggcgtacacggtggagaagtccgaggagatcttcaacgccgccaaggagttgatgcctgggggtgttaattcaccagcttgtgccttcaaatcagttggtgggcagcccattgagattgattttgtgaagggctttcgaatgtgggatgtggatggaaatgaatatatcgattatgttggttcctgggg

SEQ ID NO: 668 - DNA, 441 bp, Oryza sativa
  Clone ID: uC-osflcyp014a03b1
gccgatgctgtgttcttggacttaccccagccttggcttgcaataccttctgcggggactatgctaaagcaagatggagttttatgctccttctcaccctgcattgagcaagtgcagcgggcttgcgaagctatgagatcatgtttcacagatattagaacctttgaaattcttcttcgcacctatgaagtacgagaaggtggtttgaagggtgccacaaccaatgaagagtctaatgcagtgcctcttgctcagaaaaaaagaaaacttcttgctgctgcagaaactttagatgttaagcagaattctagtgttatggttaggccttgtagcactgctagaggacacactggctacctgacatttgcgaggcttcgtgtgcatggaaactaaactgatcctacatacagggaaacttgtggactcacaccttcataatag

SEQ ID NO: 669 - DNA, 187 bp, Oryza sativa
  Clone ID: uC-osflcyp014a05b1
cccgacgacgccgacgccgacgtgcgaagggtatcaggaggaggagccgccaggatgccagagggccactggctgcgtgcgcggacgcacgacctggtcaagcggccgatcacgaagaaggaggacagttccgttgatgacctacctcacgtacctacaagatgggggagcccgggcacattaagga

SEQ ID NO: 670 - DNA, 440 bp, Oryza sativa
  Clone ID: uC-osflcyp014a07b1
tttagcgtacaaatttaaggccacaaaatcttttcgagttgggtaatggagtaattatgctgagtaaaaagaagtgaatgcctctaatgctctgcttggaacaacaagatttgtatatttggtatccttatccatgaattgatggagtgaagattttcatctaccagatttcagctgttactgtcagagttcttatggccaaccagtcaatggatccacatattcaatcacagcaaatggcacatagcctaaagctctgtgcctacgtattgctcctattccttgatcatagtgattctcctgttaatgaaagcacgacacagttttgtatccgtgcttccagcagccgtcattctgtctggcctcgttcacattattgctgctccaaaatacctccagatgatacatggtcaggcggcgtctggaactgagctcacagt

SEQ ID NO: 671 - DNA, 240 bp, Oryza sativa
  Clone ID: uC-osflcyp014a08b1
tttcacttgacacgctaccaccacggatctggtccctcctatagcttaggccacatccaaatccaagctggcgacaaatacaatagctattaatggctccactaggatggctaagctaatggcacttgatcccctgaatagtgacgacttgaaaggagggcccgaggacaacatgtacattaccacgaactacatcacatacttgcaccagacagacactatgcactatcacctaaagga

SEQ ID NO: 672 - DNA, 423 bp, Oryza sativa
  Clone ID: uC-osflcyp014a09b1
ttataattaaacaggtcaccaagacagagctggactctcttataggatttgctcctcactatttcaggcacttggcagaatcactaacttctaggagcccgacttgtttggctaaaataatgggactttatcaggttaatattaagggcttgaaaggagggcgtgaggtaaagatggatcttatggtgatggagaacattttcttccaacgaacaatatctagggtctatgacctaaagggttccgtgcgggcacgctataattctgatacatccggccacaataaagtacttttagattctaatctcatagaggcacagcatacaaatcctatatttttggggagcaaggcaaaacaaagaatggaaagagctgtctggaacgatacatcattccttgcgtcattggacgtcatggactact

SEQ ID NO: 673 - DNA, 416 bp, Oryza sativa
  Clone ID: uC-osflcyp014a10b1
tttcaaattgggtgtgttcagaatcaaattggagatacagttggttactcttgtttgtatggtttttttggtaccatgtacaatgattgctgcttgatgatgcatgatttcatcttgacaagaacttttttgcttaaacaggtgaaaatgatcatggctaccaatagacctgatgttctggaccctgcgctactgcgtcctggacgtctagacaggaagattgagattccgctaccaaatgagcaagcaagaatggaagttcttaaaatccatgctgctggtattgccaagcatggagaaattgattatgaggcagttgttaaactggctgagggcttcaatggggctgatcttccaacgtctgcactgaggcgggtatggctgcaattcgtgctgaacgggactactttgtcatg

SEQ ID NO: 674 - DNA, 373 bp, Oryza sativa
  Clone ID: uC-osflcyp014a11b1
tctttctgtcgcgctcaggctcagctccctccccgaccccgagagagatagcgtagcttcaattcgctactgctccccgcgcgtgctcctccaagctactagcagtctcccgcctccgtttacccggtccggttccggcatggacgacgccacgtcgtcctcgacgcgggcgcccgggcccaagacggaggagctggacgcggccctccacgccatggggttcgagatccagcggctctcccccgcggaggtcaccggccgcctgctcgtcacccccacctgctgccagccgctcaaggggctgcacggtagcatgttggcgcttatagcgcaggggttggcaagcatgggggcgcacatggcgtcgggctac

SEQ ID NO: 675 - DNA, 468 bp, Oryza sativa
  Clone ID: uC-osflcyp014a12b1
tcgctctcactcaaaacaacgtcgggggcagcgcctctccccaaccttcctcccaccagcgccgacgctccccctccccctccctgcaccggtgaccggcgccaccgctccatctccccctcttcctcctgtctcaccggcacggcgcggcgactgggaggggacccaccagcagcgccgcttcccctcggccactccccccttcctccaccggcggcgctctccttccggcacgaatccggcggcggcggcggctccctcaaccccttgtcacctccctcccgcggtatatccggcggcggtggcggtggcggtggcggcgtcggcgggaggaggtggatccggcagtggcggcggtggctccctccgccccctctcgcctcccttctgcggcagatctagcggcggtggcggactcgcggcggacatgggtggatccagtggtggtggcggctgcggaggacagat

SEQ ID NO: 676 - DNA, 399 bp, Oryza sativa
  Clone ID: uC-osflcyp014b01b1
ggactggtgactaccgccagctcttccaccctgagcagctcatcagtggcaaggaggatgcagccaacaactttgcccgtggtcactacaccattggcaaggagattgttgatctgtgccttgaccgcatcaggaagcttgccgacaactgcactggtctccagggcttccttgtgttcaacgctgttggaggaggaacgggctccggtctcggttcccttctccttgagcgtctctctgtggactatggcaagaagtccaagctcgggttcaccgtgtacccgtcccctcaggtctccacctctgtggttgagccatacaacagtgtccttttcacccactccctccttgagcacaccgatgtcgctgtcctgctcgacaatgaggccatctatgaca

SEQ ID NO: 677 - DNA, 442 bp, Oryza sativa
  Clone ID: uC-osflcyp014b02b1
acattgcaaaatagtctgttagcatgactcctagactagcatgtgcaacatagattatagaataaaataatataaatatcagaatgttacgccagtttttggaatcatttctggactgcattaatttattaccttcttctggtatttttggttgaactccctaaaacagtttgttggatggcaacgatagtagatactttggttggatcatgcatcaataagttgcaagcgatcattacagacaaggcaatactcattttaggtgtgaaagatgagcttgaagaactgcagcgaagaacagatcttattagatcttcttttaatgacgctgaggcaaggaggatagaagaatcagcagttgaaaaatggattggccagatagagatgttatgatgatggtgatgatttattgatttgctagatttaaggaagtgtcctacta

SEQ ID NO: 678 - DNA, 404 bp, Oryza sativa
  Clone ID: uC-osflcyp014b03b1
ccccattcgaaaatcaaaatctcttcctcgcctctctctctgctctctgctctcctcgccttcctctctcgccagttgctccgcgtcctcgctcgagtgcgcggcgatccatccgggagggagagacggtgacggcgcgggttgaagatgaactcaacggcgggtgggatggcttccttcgagatgagtgaactcaagaagattgggctgggcttatctgggttcggaggtctgatctcgattcttgggaacatcatgctgtttgacaagggggtgcttgcaataggaaacattctgttcgtgactggtgcttcactgaccattggaccgaagacaaccgagcagatcttcaccaagcctaagaatcacaagggctcgagtgcttttggaataggcttcttcct

SEQ ID NO: 679 - DNA, 361 bp, Oryza sativa
  Clone ID: uC-osflcyp014b04b1
tttggaggaccccaacaccttcggcaccaggatccaccgcatgctcaagctcggcctgagcatcgacgaggacgagtccgacgaggctgacgccgacatgccgccgctggaggacgacgccggcgagagcaagatggaggaggtcgactaaacgtcatggacccatggatgccattctgtcccttctagttatccctctcctagctctcttctcatagctatctgactgctgctgttcgctttctttttggtacgttggatgcatcagttttgtctttgtcttagctcttaaacaatgcgtggtaccttgtcatactgtttgcgttgcaatgctactagccgaaggatatgccagcttctt

SEQ ID NO: 680 - DNA, 217 bp, Oryza sativa
  Clone ID: uC-osflcyp014b06b1
tgtttactgcccttgctatggctgtgcacttaggagatattatactttggggccgacattgcgtgcacaagactgcgatacatgacgacctacggtagaggttgggagggtggaaccagaaagggcatttgcttacttgcaagatgatatgaacggtgcagaaagatatgtgcagggcctttgcaagtggtttattgagcattgccggggagaccgg

SEQ ID NO: 681 - DNA, 406 bp, Oryza sativa
  Clone ID: uC-osflcyp014b07b1
tatatagcgtggcacaaaataagactcgctaaagtacatcaggtgttgtcccctcaatgatgcttctgaatacatttcaagaaatgcatgcaccatatactcaggatgcatttctgatgactgaagatatgcattaataaaggctccatgctactgaagcttaagacaatgctggtggattatctggtgaattggaacgagatgtattatcttctgatatgtctgcttttaaagctgcaaatccagatgctgtacttgaagattttatgcggtggcactctattggtgactgggtgagtgaggacagagcatatggttttaaagactgtccagccaggaggatggaaaaacaccgtctgtctgaacatgggaatctgtggcgtaaaatcatgaatgacgctcctga

SEQ ID NO: 682 - DNA, 92 bp, Oryza sativa
  Clone ID: uC-osflcyp014b08b1
tgtcctatcaagtaaaaggttaccatcccggggcgggacttttctaatgcaggtgcctccccctacttcatgcacgagggggacaccgtagt

SEQ ID NO: 683 - DNA, 326 bp, Oryza sativa
  Clone ID: uC-osflcyp014b10b1
tgaagattgcgaataggctcaacgtgaagccaagcatgtgaagaaactaaggcacaagaatgcatcatctcttgttaattaattggagtactaccaacaaataaggccagacaatgtcagatgcacgcatcttctgttgtcgttgggccatcttttgtatgcatcctattgttaattactagtacatgatatccaagtgatcatctgcaaggctacagaaattctgtaatacgataaattaaaagaaaccaaaatggagcctgcatatgtgtaacttaattaatgtactggcgtattaatgccactgctgcatgttgtaatactcc

SEQ ID NO: 684 - DNA, 378 bp, Oryza sativa
  Clone ID: uC-osflcyp014b11b1
caatcccctgtttcttgctcctcccctgtgttcccggcggcggcgatggggtgcgcggcgtccaagggcgcggcggtggcgtcgccggcgtacgaggcgaccacgacgtcgtcgtcgtcggcgtcggcggcgtacagcgtgtcgaggagcgcgtcgacgggcgcggcggcggcggaggtggcgtcgatttggagccggccggtgcggctcgacgcgtacgaggatgatggcgacgggaagaagaaggcggcggcgcggggggtggtggagtgttcgtccgtcgtcgtcgtcggcggtggcgtgcggctcgggaacatccacaggtacgtcgaggcggagcaggtcgccgtccggtggccgtcgtggctcagcgccgct

SEQ ID NO: 685 - DNA, 461 bp, Oryza sativa
  Clone ID: uC-osflcyp014b12b1
tttgcccgtcggagttctctgttgcggttaccatctttggtggccgcaaccatgcagggacctgggccaaggggctggatgtcggggcctattcttgcagcaacatggttgagcaggagctgccttctgggggtttgctcatttaccagagcttcactgctactgctgaaatcgccaccgggtcgccacgatctgttctgcattgctttgctgatgaaaacacggagaaagctggtaaaatggaggctctctactgggaagacgatgctgtcgaggagatagatggcacagagggtaagaagatgaggagctgctgatgagggaagcgcactgaagattaaagaatactcaaaactccaatagcgatcactctgttactttgtgaagcagccaggcagactattcatatagtactagtatatgctatgaccaatgttctttattatcttgaatatattctg

SEQ ID NO: 686 - DNA, 415 bp, Oryza sativa
  Clone ID: uC-osflcyp014c01b1
gtttaatccaatcttttcatggtatcagagcctgcttcctcgacgtcgtgattatagcgtcgtcttcatcctcgctagccggtggcgctgctccttctctcgcgcacgcggtcacagagaaactctcccgcagcaactatcctctctgaaaggcgcaagttcttgctgcgctcaggggagctcagatggctggatacatcgacggcacaaaggaggagccgccggccaccatcatcaccaagaaggacgacaaggatgtgcgggtcaccaatcccgcgcataccgagtgggtggcgcaagagcagcaggttctcagctacctgttgctctccctcttacgtgatgtcctcatccaggtggtctcaattcccactgctgttggggtttgggatgccataagggggatgtttgcatc

SEQ ID NO: 687 - DNA, 407 bp, Oryza sativa
  Clone ID: uC-osflcyp014c02b1
gtccattgtacgactggaaagctatggaagcaggtggatttgaatggtggataaaaaggattaatcgtgcccttgatttgtatgatgagttccgtatagaccatttccgggggcttgcaggtttttgggcagttccttctgagtcaaaagtagcgctggttggaagctggagggctggaccgaggaatgcattttttgatgcattattcaaagctgtcggtagaataaacataatagcagaagacctgggggtgataacagaagatgttgttgacctaaggaagtctattgaggctcctggaatggcagttcttcagtttgctttggcggtggttctgacaatccacacttgccccataaccatgaatttgatcaagtagtatacaccggaacacacgacaatgaca

SEQ ID NO: 688 - DNA, 293 bp, Oryza sativa
  Clone ID: uC-osflcyp014c05b1
gtgcctatcggaagcttgttaggagttaccttcctgttgtgaacaaagatcctggtgctgaacagaagttcatggattttggctacgcctacgaggttttgcctgaggactagaaacgaccaagctatgctaaatccggcgaatctcggtcgaggggagctggatggggaactggagattacagatacccatgtgagaagtgtgtaacagtagtcaaaggatttgccggaatggaagggaacgggaggccgtgttggcataagcactgcatgtcaccggtagactgataagga

SEQ ID NO: 689 - DNA, 199 bp, Oryza sativa
  Clone ID: uC-osflcyp014c08b1
ttctttgtttaccaccccaaccgccgccgggtggaattctttagacataaggtccggttggctgactgccgtattacatatgtggtactcattatcttaggccggtaggggtgggaatgtcgagaacgggactactgttgttaagagaccatggacggcagttacaagaacgtgctgcagaccatttggtaaggacctg

SEQ ID NO: 690 - DNA, 457 bp, Oryza sativa
  Clone ID: uC-osflcyp014c10b1
gggtagtcgtcggggggaggggggcgcttgctgctccctccgccggcaccatctccagtgccggtgccgtctctccctactggatccggatccggagtcgcgcctgcactttcttcatcctggtcgagccgagccccttgggatctaccgttgctgtctgtatactacttcggatggaatccagcaagacacaatctcaaggttctgcctctgttccaaagaacccagccatgtcctcttgtcggaagaagaagtctgacgacgttacgttcctcgaagatctgaaagaccatatcgacgagttcatccacgcctccatggatgagcacaagcattgcttcaaaaacaccatccagaagatgtttgggatgtcaaaggttgtcgcaaagcgttccgctgaagcaaaagaagctgaagtcgagagcgctttgcctcttcagaccagtgtctcgcagta

SEQ ID NO: 691 - DNA, 438 bp, Oryza sativa
  Clone ID: uC-osflcyp014c11b1
tctggacgcgctctccaggcccggccagccgaagccgcctgccggccgggaggtgcggttctcgtgcccctacgccggctgcaaccggaaccgcgcgcaccgccgcttccggccgctcaagtcggccgtgtgcgcgcgcaaccacttccggcggagccactgccccaagctctacgcctgcgagcgctgcggcggcaagaagcgcttcgccgtcctcgccgacctccggagccacctccgccactgcggcgaggaggcgcagtggcgctgctcctgcggcaccaccttctcccgcaaggacaagctgttcggccatctcgctctcttcgaaggccacacgccggcgatcgccgagccgacaagggtgtggcgacagcggctgcagaggcatcgatttctatgatggaggaggaggagttgaagcgaattgtgatcgaa

SEQ ID NO: 692 - DNA, 438 bp, Oryza sativa
  Clone ID: uC-osflcyp014c12b1
gtcagcctgtcatggttatggaagcaatgaagatggagcatgttgtgaaggcgccttgtgccggatatgtggaagggctgaaggctactgccggacaacaagtttttgactctagtgtccttttcaccgtgaaggagaacaagccaaattgagaaacccaggcagagattcacgacctgtacagctcaattcacagacgcttcataagttggctgatgatgctgccggccgtccaaaagcaagcaaataataagcgacaacatcgagttcacaacacaaaagcaagcaaaaataagcaacgggttcatctgtgtgaataaattagttgacgagctcccaacccaccccctgttgttgttgtcgcaaacctgaaactgtacagtgtacattactgctgtcacatacagtgacaaaaacaattaaacctcatttgttctt

SEQ ID NO: 693 - DNA, 450 bp, Oryza sativa
  Clone ID: uC-osflcyp014d01b1
gaacgtgctcatctttgacctcggcggcggcacattcgatgtctccctcctcaccatcgaggagggcatcttcgaggtgaaggccaccgccggtgacacccaccttggaggcgaggacttcgacaaccggatggtgaaccacttcgtgcaggaattcaagaggaagaacaagaaggacatcacgggcaacccgagggcgctcaggcgtctgaggacggcgtgcgagagggcgaagaggacgctgtcctccaccgcccagaccaccatcgagatcgactccctctacgagggcatcgacttctacaccaccatcacccgcgccaggttcgaggagctcaacatggacctcttccgcaagtgcatggagcccgtggagaagtgcctccgcgacgccaagatggacaagagcaccgtccacgacgtcgtgctcgtcggaggctccacccgtat

SEQ ID NO: 694 - DNA, 449 bp, Oryza sativa
  Clone ID: uC-osflcyp014d02b1
ggacacttcaacacaccagcacattccatacagagagaacaaaaatttgactgggacagctcgatatgctagtgtaaacacccatcttggaatcgaacaaagcagaagggatgaccttgaatctcttggatatgtactcatgtacttcttaagaggaagtcttccatggcagggtctaaaagctgggaccaaaaaacagaagtacgagaaaattagcgaacggaagattgctacatcaattgaggctctctgtcgcggatacccttgtgagtttcaatcctacttccattactgccgttcactacgttttgaagatttgccagactatcaatacctgaagagattgttcagagaccttttcattcgagagggatttcagtttgattacgtttttgactggaccattcttaagtaccagcagtcacagataccagtgttccaccacgtgc

SEQ ID NO: 695 - DNA, 456 bp, Oryza sativa
  Clone ID: uC-osflcyp014d03b1
ggggttcgggcgggcgcgccgccgtgtggggggtagccatgtcgcagacgaactgggaggcggataagatgctggatgtctacatatatgactattttatgaagagaaatctgcaggcaactgcaaaggccttccaagcagaagggaaggtctcttcggatccagttgcgattgatgctcctggtggttttctttttgagtggtggtcagttttttgggatattttcatagcaaggacaaatgagaagcattcagatgttgcggcttcatatattgaaactcagcacatgaaagccagggagcaacaacagcagcagcagcagcaacctcctcaacagcgacaacagcaaccacagcatatacaaatgcaacaaatgttgctacaaagagcagcacagcagcagcagcagcagcagcaacagcagcagcagcaacagcagcaacagcagcagcagc

SEQ ID NO: 696 - DNA, 62 bp, Oryza sativa
  Clone ID: uC-osflcyp014d04b1
cgaataaaaggctctgctggaaagtctgcaacatgggatgaactaccttggccatccatatt

SEQ ID NO: 697 - DNA, 326 bp, Oryza sativa
  Clone ID: uC-osflcyp014d05b1
tttttctagtaactataaaaccctgtgagtagttttttgttaggagtgcgcactgtgggtcgcccttaggatgacaaatgtgccatgttctgctgcaggcactgggtgttggcctgttgccaatggagacgcgtaggaggtgggtccattcttggtgcaaaaaggcatgtccgtgctacattgctgcaggtactactggaactgcggggccagtctgatgttcctggagtcccctgtgggtgtgggattctgatgcactaacacatactcaggtctgcattggtttgcgtacaagatcaccgctgatgatgaagacatcttgctgc

SEQ ID NO: 698 - DNA, 401 bp, Oryza sativa
  Clone ID: uC-osflcyp014d06b1
ttttgttaccccgacaccgagcgagagagagagatcgtaccgatcgatgtacggcacgagacgaccatggcgcgtcctcggttcgtcaccacggcgctattgttggcgctggacgtcctcgccgtcgtggtgctcgtggttgtcgcaacaagtcccgtcggcttggacccgggaagatttcaaggaaccgggcgcgattactagggcccctgtcgtgccggctggctgaccaacggctccaaaagcatcccaggggcgacggtgtaggtggagtgcatgcactacggggcggggagggagagcctgaacgcggaagcgactacggactagatggggtggttcaaggtggagatcgaccaggaccaccaggaggagatctgctaggtggagcccggcaagag

SEQ ID NO: 699 - DNA, 459 bp, Oryza sativa
  Clone ID: uC-osflcyp014d07b1
ttctttggttgttgccaagtgactctgagacatggagatgcactcaaacactggagctcgtgagttctctggaacataggtttgaggaagcatttttcaaccaagtagcagtgttgccacaagctagccttattttgcttgcaaatgccaaaaagaatgctatttatgctgtgcatgttgaatatggcccagatcctgcttctactagattggactatatagcggattttacagtcgcaatgcctattctaagtctgacaggaacacacgaaagccaactggatactgaacagatagttcaagtgcattgtgtccagacaatggctatccagcagtatggattggaattatctctttgtttgcctcctacagctgataatcctgggtttggtagagatccagctatttttcatgcgtatgagagacctccagcagaagtaactgtggtggggttatcca

SEQ ID NO: 700 - DNA, 266 bp, Oryza sativa
  Clone ID: uC-osflcyp014d09b1
tttctttccactccacacccaggcacccagggcgagtgcgacttgacaaacacatggctcccaccgtggagtctgtagaggtggaggaggagcatcaggcagtggggctgggggaccgcgacttcttcggtcatctctctcctttcgccatttcccggaagagcactggagatgaccatgtggcgataaagattctgggtcgtggaaactgtcactctggcctgcactgcaataagaatgattggaagcactgcatttacccactt

SEQ ID NO: 701 - DNA, 438 bp, Oryza sativa
  Clone ID: uC-osflcyp014d11b1
ttggtatatatacacgcagaggctgaaaggcgccaatgtcaatgatcagataatattaaacaaggtattactggtatcaactagagacaaggcttacattggcatgccagtggtgaccaatgctgctgttcatgcagtggttgaggaacagggacgggatgataaagtgatagtcttcaaatataagaagaagaagaagtaccagaggaaacttggtcacagacagccaaacacaaggttaagaattaccggcataagtggatacgaggacttccctgctgacccgatacttgagtatgttccagcttaagagcaattgtaagttctgtagttacaaacaactggtagtacattagaatacgagtgctaccttttcttgtctggaagaacagtttttgaacaaaatttgctttgttcatgtgttcgagtgctgccagt

SEQ ID NO: 702 - DNA, 453 bp, Oryza sativa
  Clone ID: uC-osflcyp014d12b1
tttcgagcgaaccctagccctagcgccgccgccgccgccgccatgaagttcaacatcgccaacccgaccaccgggtgccagaagaagctcgagatcgatgacgaccagaagctccgggcattttatgacaagaggatctcccaggaagtcagtggtgatgctcttggcgaagaattcaagggctatgtattcaagatcatgggaggctgtgacaagcaaggtttccccatgaagcagggtgtgcttacttctggacgtgtccgccttctcctccacaggggtaccccctgcttccgtggatatggcaggcgtgatggtgagcgcagaaggaagtcagtccgtggttgcattgtcagccaagatctctctgttatcaacttggtgattgtaaagaagggtgataatgaccttcctggcttgactgacactgagaagcccaggatgaggggaccc

SEQ ID NO: 703 - DNA, 419 bp, Oryza sativa
  Clone ID: uC-osflcyp014e01b1
atggacctatgatgcaatgtgccatgatctacttgaaatggatggccaaaaatacatatatgaggtgtcgaaagcgggatcagaacctgagagaaaggaggctttattggaggatcatgatcctctctgggttgagcttcgccacattcacatagctgatgctagtgagaggttgtatgataagatgaataactttgtttcaaagaataaagcagctcaacttcattcaagagatggtggtgaaatttctacaaaggatctgcagaagatcgttcaagctttgccacaatacggtgaacaagttgagaaattgaccctccatatagagattgctggaaaaatcaacaagtttatcagagagtatggtctccgtgacattgggcaggtggagcaggatctagtttttggagatgcaacag

SEQ ID NO: 704 - DNA, 426 bp, Oryza sativa
  Clone ID: uC-osflcyp014e02b1
tcgtcttcgtcctcttccgatacctcacctcaccatacagctgctttctctctctctctccatccacccgaagcagaatccccaaaacaacagcgagagaaaaaaaattcacgcggcgaagccaaaattttttgttgatttcgatttggacataaaccctagctccaatctccccatcgccgcgtcggccccgaacccgtgcgcccccccatcgctcgctgaatcgaagggcgcctaccagtcgattcccccaagacgagattggctgccggcgacgacgagaggagcagctcccttggcagcggcggcggaggaggcgccagattcaccgcccccaaggtccgcacgcgcgataagggcgcgctcgtggccctctgattcgaggagggttgctggtgcgtagacgtggagccttctctgaggaga

SEQ ID NO: 705 - DNA, 458 bp, Oryza sativa
  Clone ID: uC-osflcyp014e03b1
atctggaacatcatcaaccggtgttcaccatcgtggtatacttgagggctggtttggagctcatctctggaattcacgtgccattgttcttcttgcgacgactcttttcgtgtttgctccattggtgagctttaagcgtctggattcattgagatacacctctgccctatcggttgctcttgctgtggtttttgtcgtcattactgctggaattgctatcatcaaactcttcaatggaactgtagcgatgcccaaactttttccagaactagatggtcttagttccatctggaagctcttcacagctgtccctgttcttgtcactgcctacatctgccattacaatgttcacagcattgacaatgagcttgaagacagaacacaaattaaacctattgtgcgaacatccctgttcctctgctccagtgtttacattgctacaagtttctttgcatatc

SEQ ID NO: 706 - DNA, 302 bp, Oryza sativa
  Clone ID: uC-osflcyp014e09b1
tttggcgctcgctctcgtagccaggtgcagagattattggctcatacatctactagcaacaggggaatggagagggggggtcgtccgggagggctacatctcgcaaggtggctgggtggcgccaatgctacctaggacaggatacaaagtttgcaatgataaccttcttattgtggcgtccatgctaacgctgtttgatgtggagtttctcctatccagtaaagttgacagtgtccaggatggctgaagcctctactcatgcattggattgcacggtgctgatgatcacacacttggtagta

SEQ ID NO: 707 - DNA, 451 bp, Oryza sativa
  unsure (1)..(451): unsure at all n locations
  Clone ID: uC-osflcyp014e10b1
gtcgcgctcttcgtcgtcaccatgtacatcaacgactgccccgcgcatatgcaggccaccggcgacgcgatcggcggtgacgtcggggagggcgccgcctcgcaggggtgctggctggagccggagctcgggaggttcgcgttccagtcgtacaaggagaatcccctcatcgggccctcctccgcaacgctgttgaaaatgggggcactagaaaccagtaaagttaccaatgaccatgaaggctggcgcctcattacatgcatttggttgcacgctggtgttgtccacatacttgctaatatgttgagtctcctattgattggaatcagacttgagaaggaatttggtttcatgaggattggcacactatatgtcatcttggngttggtggtagcttgctgtctgctctgttatggtgtcaaatatcttgatggtgcctcaggtgcactgt

SEQ ID NO: 708 - DNA, 455 bp, Oryza sativa
  Clone ID: uC-osflcyp014e11b1
tgctaatccccctcctcttcctcgtcgccggcgagagctcttcgtcttctccaactcgaccggaagcaagcgcgcttccgatccgccatggtgctctcccacggcgtgtcgggctccgatgagtccgtccactccacgttcgcctcccgctacgtccgcacctccctccccaggttccggatgccggagcagtcgatccccaaggaggcggcgtaccagatcatcaacgacgagctgatgctggacggcaacccgcggctgaacctcgcgtcgttcgtcaccacgtggatggagcccgagtgcgacaagctcatccaggcctccgtcaacaagaactacgtcgacatggacgagtaccccgtcaccaccgaactccagaccgatgtgtgaacatgattgcacacctcttcaatgctcctctaggggactctgaaacggccgtcggagtcggcact

SEQ ID NO: 709 - DNA, 454 bp, Oryza sativa
  Clone ID: uC-osflcyp014e12b1
tttttggaggatgataaaagtaagcggcaccatcgtggacggaagtctaaggcctcatcccaagtttcaggtgaaaatcacacagcattagctgctttgaaggatgccgcttcaactcaacaaaagagtgcaacgccaaggagtctagctcaagaagacaaatctccaaaggagaatggagatacccgtacaaatggtgttactgaatcaaaaactgaaaggaatgccgatattgctctaaccagcaatcgaagcaaatctaggagccagagcatgagtgctaaccactcaatgagcaagagtatgagtatcagtccaaggagaagcccagtcaaaaggtcagccatcagcccgaagatatcattgataagcaggagtcctgatgtccaaggccatggtagaagtcctgtccgtgctcctgaaagaagtgaaagcaggagcccacctcgagaga

SEQ ID NO: 710 - DNA, 371 bp, Oryza sativa
  Clone ID: uC-osflcyp014f01b1
gctcgctcatcgccatctctctcagctctcacagctcactgcatcaatggccgcggccaccatggcgctctcctccccggtgatggcccgcgcggcgccgtcgacctcctccgcgctcttcggcgaggcgcggatcaccatgcgcaagaccgccgcgaagcccaagccggcggcgtcgtcggggagcccgtggtacggcgccgaccgcgtactctacctcggcccgctctccggcgagccgccgagctacctcaccggcgagttcccgggcgactacgggtgggacaccgcggggctctccgccgacccggagacgttcgccaagaaccgggagctggagggtgatccactcccggtgggcgatgctgggc

SEQ ID NO: 711 - DNA, 363 bp, Oryza sativa
  Clone ID: uC-osflcyp014f03b1
gggttcaacatgctcatgctgctctgcatgtactggaaggagctcgacggcggcgcctgcagccccgacgaggtcgccgccggcaagcagatggaggccatcgaggagggccgccgcacggtgctcaacaacaacaagaaagacgacggcgacgccgccacccccgcatcgccggaggacgacgacggcggcgacgccgagtcgatgatgtcggagaacatctcgacgaagcaccggtggttcatgcagtgctcggagcaccggcggaagctgttcctcaagagcttcgcgtacgtggtcaccgtcggcatgctcgtcgcctacatgctcggcctcaacatgtcgtggaccgccatcacgacc

SEQ ID NO: 712 - DNA, 311 bp, Oryza sativa
  Clone ID: uC-osflcyp014f05b1
gcgtttttgtcgcctaatgagtctgcgacatgctgatgaatgaagtgtcagagattgatgcgcgcacacatacattgcagttcagctggcgttcatgagcctaataatgggagggagcctcatttggttgaattcgtttgcagaacacgccttaggcggctttctatgctgcacatgttagctatagcccaaggccgggtggtactagcttggactatgtagaggaggtcccagattgttgcataattctacagtacgactgacactgacgttgatgaggaaacactctgctcagatgagccatgtgggag

SEQ ID NO: 713 - DNA, 451 bp, Oryza sativa
  unsure (1)..(451): unsure at all n locations
  Clone ID: uC-osflcyp014f11b1
cttagcagcaagattccagcacatatctgctgactcagttatcacagatagatacaggcacatctctcttgcaattcactcagttaacttggatgaaaaatgggaaggagcttcatttgggtcaattcttagaaggaacaagcttcaggatgctactctcagtgaaaatattcttcgcataatcattaagctgaattcgaccaactcaagtgtcaaacaagtccaatattgttccataattctacagcctattgacctgaaggttgatgaggaaacactaatgaagattgtgccattttggagaacatcccttgctcctcctggaacgccaagcacacaattttactttaggcattttgaagtacatccaattaagattatcgcaagctttcgactnggaagtccatacacaacttatagttctgctcagaggctctgagagcattattga

SEQ ID NO: 714 - DNA, 456 bp, Oryza sativa
  Clone ID: uC-osflcyp014f12b1
tttgagaccactacaagcagcaactagcttagctagctagctactggtgatcaggcacgagctagccggccatggcgaggcgtcgccatgcttgctttcttctcctgctgcctctgctggtgctgcagcttcttcttgctgggggaagcttggttgatgatcttcctgctgcaactcatcaggtgccgaggttagtagggccacagcgcaagttacagcagcttccaaacccaaggccacagccgcaaccattgccccagccaaacccaaatccacagccacaaccactcccacagccacagccacagccacaaccacaaccacaacctgtgccacaaccgcagccgcaaccacagtctttaccgctaccaggcccacaaccattaccgcatcccggcccgcagtcgaacccaaacccccaaccgttaccacagacaaacccagatcctcagcctt

SEQ ID NO: 715 - DNA, 462 bp, Oryza sativa
  Clone ID: uC-osflcyp014g02b1
gccggccggcgtgcggcggccggccggcacggcggcccctgccctttccttgaccaaacctcgagctctagcaaccggtcgccagcaagcacccgacagctgccgctctcgacaagctcgacggagcctcctctctcaccacacgccgttgtctccgtcttgcataagttgtttcgatccaattttctcagctcctttcctctccttttttttcttcgtagcgtgcagcacaagagcgcactccagcaagcagcgagcaccacaaggttgctgatgctccagcctccatcatgatgctgaccagcaatggaagtacaaatccaagtaagtgttgtttcaactgagctcgaactgaagtttctttcatatgtgtgcccatttgcatattatcttgatctgggctggtgagcatgctatttgggttttcttttcaagaggcaagggctggaagcattggagaac

SEQ ID NO: 716 - DNA, 253 bp, Oryza sativa
  Clone ID: uC-osflcyp014g04b1
tctaactgattaaagacaaccaacacaaacggggtgggaaccttaagcaggcgccggctttccccgagagttggagacaggttctcgtcgatcttcgacctctgcagtttactgtgatcctcctgtgcacccttaaactgaggcctactggggaaatgttttcccaattggagtcaggagaggatcttaccagggtaagagtgtcgcataaacactgatttttgatgcatgacaggtttcatggaattgccat

SEQ ID NO: 717 - DNA, 450 bp, Oryza sativa
  Clone ID: uC-osflcyp014g05b1
gcatgattaagatcggaatcaacggtttcggaaggatcgggaggctcgtggccagggtggccctccagagcgaggatgtcgagctcgtcgccgtcaacgaccccttcatcaccaccgactacatgacctacatgttcaagtacgataccgtgcacggccaatggaagcacagcgacatcaagatcaaggactccaagactctgctcttgggcgagaagccggtcaccgttttcggcatcaggaaccctgacgagattccgtgggctgaggctggtgctgagtatgtcgtggagtccaccggtgtcttcactgacaaggagaaggctgctgctcacttgaagggtggtgccagaaggttgtcatctctgccccgagcaaagatgctccgatgtttgctgcggtgtcaacgaggacaagtacacttcagatattgatattgtctcacatgct

SEQ ID NO: 718 - DNA, 449 bp, Oryza sativa
  Clone ID: uC-osflcyp014g06b1
gtttctgcaaactgaagttagcaaggctcgcatccagctcatgcaaccaattattaaaggctctgccggagtggaatacctgcagaaggctttcacggatcgctatggacctcctgctaatgcatcagtgtctctccctataactaagcagtgggtttcggcaacgaagagcatcgtggaacaagagtggagctcacatttggagtctctccaagctttgccagcagatcatgctcagcacgttgttccggtacttcgagctggtcacggtgctccagcgccgcaggcttcttcgtctgcagctagcagatctggtctcccagaatgcaagggtgagaagatcgacaagctgacaagggttggcttgttgcaacttatcagcaatgtggagggcctgaacatgcagtcaacccctgagaccttccaaataatctgctgaggctgagggc

SEQ ID NO: 719 - DNA, 342 bp, Oryza sativa
  Clone ID: uC-osflcyp014g07b1
tttgcttgacagagtaccatgggaggaagaacttccccttctcagagacatatgtcccatgatccgcgaagaacggatacttctcgacagtgtcattggactctccagcatcttcggacactggccatttgtgatgcccaacgcttgatgcttctgctttgaaatctgcctccatgtagatatcataaagctgttgactattcttctattgtgataacggcgggagcagcgaattactaccatgtgccatgcgtactgccccatggcatatctgatgaccatatttagaacatgctctcctccacctaggttgtcaaatccaagtaagaggcttgcttctac

SEQ ID NO: 720 - DNA, 417 bp, Oryza sativa
  Clone ID: uC-osflcyp014g08b1
tctggctccctactacattgacggcttgccggactgtttttacaccaggctcttccccgaccgctacgtgcacctcttccactcctactactgactcatgtggcgctccaaggtgcctgacatgctaactagcggtgaggaggtgaacgcgggcaacatgtacatctgggagaccacgccgacctcggtggtcaagctgtaccacaggcagttccaggaggacttctcgcagatcctggcgctacgccacgacgagctcgtatccggcggccagatggtgctgacgttcctgggcaggaagaacagggacgtgctccgtggcgaagtgagctacatgtatgggcttcctgcccaagcgtcccagaccctagtccaagagggacgcgtggaggaggagaagctggacaggttcaacct

SEQ ID NO: 721 - DNA, 445 bp, Oryza sativa
  Clone ID: uC-osflcyp014g10b1
tagcaagcaagaagagacgagacgagggagagaaggagaagagggggccggccgcgggcgtcgtcgtgttcctccccccctctctctcctctcctctcctctcgatctccatccttccttccatccattcctccccgcacccttcgcattgctctcgtcgtctcgattcggtcgaggatctccaggaaaagaggaggaagcgatatgggttgcttttcatgctgcggagcggatgatgtcggcaagaagaagaagcgcgacgatccttacgtcccgatccctgatccaggtggtaactatggacgaggcaagcccgggcccccagccccttcgcgttctccccccaccagcagaaatctgccaattgcagtaccggcaattccccttgatgaaataaagggaataaccaagaacttagcagtgatgctctcatcggagaaggctc

SEQ ID NO: 722 - DNA, 379 bp, Oryza sativa
  Clone ID: uC-osflcyp014g11b1
tttccacgcgtccgaaatgcccctcgcgccatgcccctcgccgcccctcccctcctccccgtggccggcgcgcgccccgcgccggggcggcctcctccgcgcccgcgcggtgcgggcggcgccccggccgccgagcaagtggtcgctgggtagctggcgcagcctgacggcgctgcagcagacggagtaccccgacaaggcggagctggatgaggtgctccggacggtggaggcgttaccgccgattgtcttcgccggcgaggcgcgcaagctggaggagcggctcgcggaggccgccgtcgggcgcgcgttcctcctccagggcggcgactgcgccgagagcttcaaggagtttaacgcgaacaacatccgggacacc

SEQ ID NO: 723 - DNA, 450 bp, Oryza sativa
  Clone ID: uC-osflcyp014g12b1
gcctcctcggccacctccgtggctccattccaagggctcaagtccaccgccggcctccccgtcagccgccgctccaccaactcgggcttcggcaacgtcagcaatggcggaaggatcaagtgcatgcaggtgtggccaattgagggcatcaagaagttcgagaccctatcgtacctgccaccactcaccgtggaggatcttttgaagcagatcgagtacctgcttcgatccaagtgggtgccttgtctcgagttcagcaaggttgggttcgtctaccgtgagaaccacaggtctcccggatactacgatggcaggtattggaccatgtggaagctgcccatgttcggctgcaccgatgccacccaggtgctcaaggagctcgaggaggccaagaaggcctaccccgatgcctttgtccgtatcatcggcttcgacatcgtcaggcaggtg

SEQ ID NO: 724 - DNA, 421 bp, Oryza sativa
  Clone ID: uC-osflcyp014h01b1
ttgtcatatctcctcccgtcctttcgaagcctctcgaatcgcatcgccgagccggatggcggtcaccgccgacgtgaagctcgagggcctccgcgccgccaccgacaagctcgaccagatcagcgagaacgagaagtccgggttcatcagcctcgtttcgcgctacctcagcggcgaggcggagcagatcgagtggagtaagatccagaccccgaccgacgaggtggtggttccctacgacacgctctcggctgctcccgaagatctcaacgagacgaagaagctgctcgacaaactcgtcgtgctcaagctcaatggaggcctcgggacgaccatgggctgcactggtcccaagtctgtcattgaagtccgcaatggctttacgtttctagaccttattgtgattcaaattgagtccctg

SEQ ID NO: 725 - DNA, 378 bp, Oryza sativa
  Clone ID: uC-osflcyp014h02b1
tttattcgctatgctcacaatggctggagctcggttgtctctcgtgttcctgtgctttgtggtggaggtggtgatctacgaactagtccgcggtgccagtgcaaggaagactgtctctgagtacgtgctcaggaagggggacttcttcgtgaacatcaccaactggggagcagccatgatgacggacgtactccctgatttcaaagggaatttggctgatgatgtacttggcctatacaccattgctgactacgtgaacgacaataatgactttggaccgattaccggtcgcatagtacacaggatagacagggggggttttgatctacacgggaaggcgtatctacacgtacatcaacgtccgatggaaccagattc

SEQ ID NO: 726 - DNA, 308 bp, Oryza sativa
  Clone ID: uC-osflcyp014h03b1
ttctaccaccacctccatctcgcagtcgcagtgccagctaaggccttgtacagggcttcgctccccacacgttttcttctccccctccacatctcccctctcgccgccgccgccgccgcattccgttcagggacttctccgccggcgccatggctgccgctgcaaggttcttggcggtcttgctcctcgttcttgctgtcgcggcggcgtcttccgcggcggcgtcattggctggcggcggcgaccgccacctgcagctggggatgctgtccaccggcggcgagtgccggggcacggtgggggagtgc

SEQ ID NO: 727 - DNA, 433 bp, Oryza sativa
  Clone ID: uC-osflcyp014h04b1
tttgtggcatgggaggcatggcagctgctccttttccaggcaaatgcttcctcctcctccaacaagtacccaagccatcggcggcgctggccgcagctcacccattactactaggacgccgtcggctggctgccctcccggagacggccgcagcgtgcgtggccgccgcggggttggtgggagtcgcagccagcttgctagtgggcagggcggcggaaggagcacgacgagaagaggaagaggaggaggaggaaggagtgctcggagtgcggcgggacggggctgtgcccgcggtgcaaaggggaagggttcgtgtcagacaactgccggaggaggcggccagcaaggcccggaaggcggccaagaacatggccaccagatacacttccgggctgcccaccaagtggacctactgcaaccggtgatccttcac

SEQ ID NO: 728 - DNA, 383 bp, Oryza sativa
  Clone ID: uC-osflcyp014h05b1
ttgtttgaaagggtggctcaaatgagtgcgattacttaatggaagagactggtgccacccgtaacatttctgataatggtgagcctgtcagtaaaaggaaagcaacatagttaaagtcattggggaataaggcggtcgagaaaaaggattatctttctgcaacaggattctacagtaaggcactggacctttaccctgatgatgcaaccttgttgtcaaatagaagcctttgctggcatcacatgggtaatggaggcaaggctttgttggatgcttatgaatgcaggaaattgcggcctgactggccaaaggcctactaccgacagggtgctgatctgatgctactgaaggactaccagagtgcttgcgaaacactttacgat

SEQ ID NO: 729 - DNA, 272 bp, Oryza sativa
  Clone ID: uC-osflcyp014h06b1
tttttaaaaaaaaaaaaaaaaaaaaaaaaaaaaaaaaaaaaaaaaaaaggggggtcgatgggggggctctatagtgaatcccagcttcctgccacgtgcaagctattctatagtgttactatagtgcaacctaatgtcacttgattggccgcggttttacagggaaaagcctgggaaaacccagctgattcccatcttaatagatttgcattacatccgcttgtggacaggtggagaaggaccgaacaggcccccttccaaacactttccca

SEQ ID NO: 730 - DNA, 438 bp, Oryza sativa
  Clone ID: uC-osflcyp014h07b1
tgtgcgacagctttgatgcttgtacatattatccctgacttgctgagcgtgaaaacaagggaattgtttctgaagaataaagctgaacagcttgatagggagatgggcttgattaggacacaggaagagactgggaggcatgttaggatgcttacccatgaaatcagaagcactcttgatagacatacgattttgaagactacacttgttgagctaggagggaccttgggcctggaagaatgtgccctatggatgccatcaagaagcggttcaagtcttcagctttctcatactctccgccaccagattactgttgggtcaactgtatcaattaatcttcctgttgtcaatcaagtgttcagtagcaacagagcaattataataccccacacatctgctttggcacggatccgacctcttgcaaggagatatgttcca

SEQ ID NO: 731 - DNA, 403 bp, Oryza sativa
  Clone ID: uC-osflcyp014h08b1
tcgggctcacccagatggagagtatgcaactgcgcgtgctgcatcagcagcgggcactataatgacattgtcatcatgggctacttcaagcgttgaggaggttgcctcaactggaccagggattcgtttcttccagctttatgtttacaaagacaggagggtggtggagcagcttgttaggagagctgacagggctggattcaaggcgattgcgcttacggtggatactccgcgacttggccgtagggaggctgacatcaagaacaggtttgttctgccaccatttttgacactgaagaactttgaaggcctggagctggggaaaatggaccaggctagcgattcaggactggcttcttacgtcggcgggcaaatcgatcgcaccctgagctggaaggatgtg

SEQ ID NO: 732 - DNA, 401 bp, Oryza sativa
  Clone ID: uC-osflcyp014h09b1
gctagcttccccccccccctccatttcccacaccttccagtacgcgcgtctccgtcgcgctcgcgccggccggctgcgtctgcgcgcgcggtacaagagatcgttccatcagggagcgcgggtgatcacagcagccgacgcgcgcgcgcgcgcggcagcacggcgtttcaccgatcgcgtcgttgcgcgcgatcgagctaccgcgttgttgtttgaggagatttagctagctgcgtcgtcgtcgtcgtggaggtcgtcgcttcctttgtgacgtgcctgtcgtcgtccccgtcgccggagaagtgcgagctgccgccgctgcgcgttcgcaccggagggttcatcagcgaaggttaaagcaaaaaaggccgggaagggtttccttgataaaaaaaaacgag

SEQ ID NO: 733 - DNA, 444 bp, Oryza sativa
  unsure (1)..(444): unsure at all n locations
  Clone ID: uC-osflcyp014h10b1
nctttcgcccgcctcgtcgtcttcctcctcccactctcgcactcctcgcatcgcaaagctcgccagcaaaagcaaagcaaagccaagccaagcttgaagctccccgcactgagccaagaagcctccacctcaatccgaaagagatctcgtgcgcgcacggcgatgcggtgaatcgggcatggcgccgccacaggagcgggactacatcgggctgtcgccggcggcggcggcggcgctggcaacggagctgcgccttgggctgccggggactgcggaggaggctgagtcggagggcggcggaggaggagggacggatgcggctccgctgacgctcgagctgctgcccaagggcggggccaagcgcgggttcgcggacgccatcgtggggggtcccgccggccagcggcgggaggcggtcgggggcaaggcggcggcggcggcggc

SEQ ID NO: 734 - DNA, 426 bp, Oryza sativa
  unsure (1)..(426): unsure at all n locations
  Clone ID: uC-osflcyp014h12b1
tctggctcggctcgctcactcggtcagctgcacacacactgcacttcggctcactctctccactgttcttcttcctcggcgaggggggaaggaggaggcgagagctcgaggcggctaggaggaggagatggagggagattcggcgaggaggctcgcattgctggggctgtgcctgggcctgcttctgctggcgccctcccatctggcctcggccgctgcggtggaggatggcttgctcagcaatggtgactttgagacagcaccagctggtggttttgtcaaatctgcttcagttgctgaaggtgcatcatcgatccctggctggacgatcaatgggacagtcgagctcatctcagcaggccagcaccagggtggcatgattcttattgttccacagngggatcatgctgtacgtcttggaaacga

SEQ ID NO: 735 - DNA, 510 bp, Oryza sativa
  Clone ID: uC-osflcyp015a01b1
tttcttcttgctgatcatcatatatctcttgtgagcttcagcaatgggggctctgccaagggctctagtcctcggcgtttgcgccgccgtcttgctggtgaacgtgctcgccgttgccgccgacggcgacgccgcggcggcggcgtccatggtcgtcggattggccaagtgcgccgactgcaccaggaagaacatgaaagctgaggccgttttcaagggtgttcgcgtggcgatcaagtgcaagaacagcaatggcgagtacgagacgaaggccaccggcgaggtcggcaagtctggcgcgttcgccgtgcccctcgcggcggacctcctcggcgacgacagcgagctgaggcagcaatgcttcgcgcagctgcacagcgcggcgtcgaaccagccatgccccgggcaggagccgtcgtggatcgtcaacgccgccgccgacaagaagaagaccttcgtcgccgtcgccggcgacacccactttccgtcgtcggagtgcgcgttggcgtt

SEQ ID NO: 736 - DNA, 540 bp, Oryza sativa
  Clone ID: uC-osflcyp015a02b1
tttcaaagcctcaaacagaaccgtgccgattgaacaaataaataagggaagataatgagctcgagtatgcatacatacttcgagcgacaactttcgataacatctcttcggatgttcaacaaacggagcaaacagtgtaacaaagaacaagacacgtggtcacaaatcaaaataataaaggcataagcggtaaaagttttgcattttgttgataaccaacagcttacgagttggatgtatcaacagatgattaagaagctagctggttgtgactccatagtgagaacatccccttgtactttgcagccacaaactggcgtgacagaaagctcaaaggctgctccttgcagcagctggagctgcgtttgatcggctccaatgtcttcagcacaggaacggtccctgcaagtgatgcactctcagatgtcaccagcggagatagcttgctacaatgaggaacggtagggtcagttctgctgccgctagtgctgttgtacacattacgatatgttgcactctcagacggcaccaacggagata

SEQ ID NO: 737 - DNA, 435 bp, Oryza sativa
  Clone ID: uC-osflcyp015a04b1
tgtttaagcaacacacgggattaactcatcactcacttagctaattaaatcttcgaccatgtcggacaagtgcggcaactgcgactgtgctgacaagagccagtgcgtgaagaaaggtaccagctatggcgtcgtcatagttgaagccgagaagagccacttctaggaggtcgccgccggcgaggagaacggcggctgcaagtgcggcaccagctgctcctgcaccgactgcaagtgcggcaagtgaagtcacgaagcaaccgaacactcgccgtcggcgagtcacctaccttaattagttcacaataaaaaccacccatatcagtgtggtttgtgtgtgtgctgattattgctgaattaaacccgtgtgatatcgattaattaaacagttggtcgcttcgcgactatgcgtgtatcaacctatgaatttgtgtg

SEQ ID NO: 738 - DNA, 519 bp, Oryza sativa
  Clone ID: uC-osflcyp015a08b1
tcggtcgctcgcccctcctccgcaactccgcgctttccgccgcgatggcgacgcccccctcttcttcgccgccggcgagtcctctcgcgctacatctcgatctcgatgcgggaggaatctagtctccgtctcctacggtggcttcgcccgcgcgtgctgcctcttctccgccgccggcagccgcagccgcagcaagcaggatgaagctaggaaagcagtggaaaatgccctggggtggaagaagacggggcttccaaaattgggtatgcgaattgaaagaaggcagcaaagactgcctccttcagccggtggtggaggatggtctggagaggtgggttggttaaaggtggttcagcagtggaggtttctgggatgctgcaaaacaaactcttcttacgatcggcggtattatcgccgcgtttttcctgattgcaaacttcaatgtgctggtagcagctattgtaaattcactgctggctgtgctgcggcaaattcggcgtgcactgtcattcgtagctc

SEQ ID NO: 739 - DNA, 357 bp, Oryza sativa
  Clone ID: uC-osflcyp015a11b1
ttctttgagaagctcgtcgccggcgtcccgctgcatccatcctctccggcgatggcgattactttgtccaatgtcaactctgaggcaggcctccagaagcttgatgagtacctccttactcgcagctacactcagtgggtaccaggcttcaaaggatgacatgactgttttcacctcacttccttctgctcccgcagcaagctatgtcaatgtcacaaggtggtatgatcacatcagtgctttcctaagatccagtggagttaccgcatagggtgaaggtgtgaaggttgagtcaactgcttgatctgtgtatccaactgctgaccaaaaggcaccagcagctgatgaagaagatga

SEQ ID NO: 740 - DNA, 368 bp, Oryza sativa
  Clone ID: uC-osflcyp015b01b1
tgcttttcgacgataccactgacccctccccctcgctggagcgccccgtgagcgctcgcgttcgatcgatggctatcacaaggatcctgagggagccgaaggatctgcacaaggactctcccacctcatgcagatcatgtcctgtgcgctaggacatgttacattgacacgctactatgatgggaccctcacacaggccatttgctggggggggattcatgacgaacattcatttccaaccggattatactttcaaaccaccgaatgtatgtttccggaccaaggttttacacccgaacattactagcattggcaggatttgactctgcatccttaacgaacagttcagaggctgcactcaccatatc

SEQ ID NO: 741 - DNA, 269 bp, Oryza sativa
  Clone ID: uC-osflcyp015b02b1
ttgtacgcgagcgcccatggtaggaggtacacgatcacccacaccatggtaacgcgctgtaacttcattagggcgagagcctattaagccccaatgcgcggggagcaatagcgatatgactgaaaatactgtgacagtacaacctggggaagtcgtgtatgacatacagagcaatgcagcttccaaagtgaacagcaggatctctaggcctgcccttacaaggacttggccgcactggggtacgagagagactcatggatgttatggct

SEQ ID NO: 742 - DNA, 520 bp, Oryza sativa
  Clone ID: uC-osflcyp015b03b1
tgcttatgctggcgtgaagcaggaattgggcttgacgtccgcggtggcgacttcctcgttgccggccgagtcttctccctcatttcggtttccctcccttctttggccggaccttgttctggtcgtggggaacgctagggggagggcggaggcttcggcttgctgtaggagttggtggccagggtccgtctttgccgttggttacggttgaggtatgggtgcttgtgagacgtcatggactattctgtggccgtcaatgtgggggtgcttgtgtgggtgatgtgaagatgctggcgaaagccttgccgtgcctttggccggttcgacgacggcggcgctcgtgggcgtcgtttcccttcttggaggcattgtcatggcattctttcatatcccccacaatctctaggtgaaaaccttgttccggctttcagacgagcgacggcggcgttacacgtcgtgtcctccttgggggcgtcgcttggagaagttccatgcatcgacgaccgtgatggctttttcg

SEQ ID NO: 743 - DNA, 545 bp, Oryza sativa
  unsure (1)..(545): unsure at all n locations
  Clone ID: uC-osflcyp015b04b1
ttgctcctctcgatccaagataatttcactccagcgtgcgtcggccatgtcgagcttgatggacaaggcgaaagggttcgtggcggagaagatcgcgcacatcccaaagccggaggcgtcgctggacagcttgtcgttcaaggggatgagccgcgagtgcatcaccgtgcacagcaacgtcaacgtctccaacccctacgaccaccgcctccccatctgcgagctcacctacaccctcaagtgcgccggcaacgttgtggcgtccggcacgatgcccgatccgggtggatcgcggcgagcgacacgacgaagctggagataccggccaagatcccctacgacttcctcatctcgctggtgaaggacgtgggccgggactgggacatcgactaccagctcgacgtcggcctcaccatcgacctccncatcgtcggcaacttcaccatcccgctctccaccagcggcgagatgaagctccccacactcaaggacatngtctaattattttatctcttatctcatcaaccaactccgatcgatcgaac

SEQ ID NO: 744 - DNA, 526 bp, Oryza sativa
  Clone ID: uC-osflcyp015b06b1
tgctcaagctaatccccctcctcttcctcgtcgccggcgagagctcttcgtcttctccaactcgaccggaagcaagcgcgcttccgatccgccatggtgctctcccacggcgtgtcgggctccgatgagtccgtccactccacgttcgcctcccgctacgtccgcacctccctccccaggttccggatgccggagcagtcgatccccaaggaggcggcgtaccagatcatcaacgacgagctgatgctggacggcaacccgcggctgaacctcgcgtcgttcgtcaccacgtggatggagcccgagtgcgacaagctcatccaggcctccgtcaacaagaactacgtcgacatggacgagtaccccgtcaccaccgaactccagaaccgatgtgtgaacatgattgcacacctcttcaatgctcctctaggggactctgaaaggccgtcggagtcggcactgtcggctcgtctgaggccatcatgctcgccggtttggccttcagaggaggtggcagaacaagatg

SEQ ID NO: 745 - DNA, 527 bp, Oryza sativa
  Clone ID: uC-osflcyp015b07b1
ttaaaactaaaaaataattctatgagcaagagcaactctgatattgtcgtacgtcatccgtcagaattgcctgcatcagccaactggtttaactccaagtcaggaaagaagattcctttaagatcagttacttcgatcatcgatgggttaaagaaatcttacattgagaagttgaggccactagaaaaaacatatcagttcgatgactttgtttcacctttgctgactagcagtgatttcgatgcgaagccaatggtcatgttgctgggtcagtattccacaggaaaaaccacattcataaagcatttactgaagacaaattatccaggtgctcatattggtccagagcctacaactgacagatttgttgttattacttctggacctgatgaaagatgcatccctggaaacacaattgccgtgcaagcagacatgccatatagtggcttgtcatcttttgggacagcatttcttcaaagtttgaatgttctcagatgcctcatccactactggatcatataaccttt

SEQ ID NO: 746 - DNA, 533 bp, Oryza sativa
  Clone ID: uC-osflcyp015b08b1
tggcggtagtgaggaccaccgcagcgcatggttattaccatgctcattgagttacatggtggcctacttctctaccacagcggcggtgtcggcaaccagatctgagagtgattgtcggggccaaacctatggtggctcgttgctgagctggtgtcgttcatggaggcatcgagtggaaagcggtggccagagcggaaggacctggcgtgttgcatgtgcgccagccactggcggtgcgaggccacggcaaccgtcatgctgccgctgtccaggggtggctcttctgcgggcgatgaaaagggcagtggcaacatcaatgtatcgacgaacgtaatgtgcttgctggcctagtagacatgaacacatatcactaagagggagtgaaacggtgttgacgagtagcctgcttttggttgtaggtaactcttgatctggtaaaggtgtatatgcaaagttcattgactgggatgaacaaatgttcgatcgggaaacatcacagctattagtgaagaccttggacaggttgagtacat

SEQ ID NO: 747 - DNA, 382 bp, Oryza sativa
  Clone ID: uC-osflcyp015b09b1
agctgcagcagtattagcagctgagcttgaagcatcatagcgaggtatacatggccgccgccaccatggccctttcgtccccggcgctggccggcaaggccgccgcgaaggtgttcggcgaggggcgcatcaccatgcgcaagtcggcggcgaagcccaagcccgccgcgttggggagcccgtggtacggcgccgaccgcgtgctctacctcggcccgctctccggtgagccgtctagctacctgaccggcgagttccccggcgactaccggtgggacaccgtggggctctccgccgacccggagacgtttcgccaagaaccgggagctggaggtgatccactccaggtgggcgatgctcgctgcgctgtgctgcgtgttcc

SEQ ID NO: 748 - DNA, 353 bp, Oryza sativa
  Clone ID: uC-osflcyp015b12b1
tcttaccacagccatgccgccgaagctcgacccgacccaggtggtggatgtgttcgtccgcgtgaccggcggtgaggtcggttcggagtcgtctctcgcccccaagatggggccgctcggtctctccccgaagaacactggagaggacatcgccaaggagaccgccaaggactggaagggcctccgcgtcaccgcgaagctcaccgtccagaaccggcaggccaaggtctccgtcgtcccctgaggctggacgctagccatcaaggcgctcaaggggcgctcgaggcgcccgtaggaaggggaagaacatcaagcacagcggcaacatcagcctcgacgacgtcatcgagatc

SEQ ID NO: 749 - DNA, 533 bp, Oryza sativa
  Clone ID: uC-osflcyp015c03b1
ggagaagctggacagcttcaacctgccgttctactcgccatcggtggacgaagtgaaggcagtgatcaggcagagcgggctgttcgacataagccacatccagctcttcgaatccaactgggatccacaggacgacagtgacgacgacgacgtggcgacgctggacagcgttcggagcggcgtcaacgtcgccaggtgcatcagggccgtgctcgagcccctcatcgctcgtcatttcgggaggtgcatagtggacgacctgttcgacatgtacgcgcggaacgtagcacagcacctcgagcaggtgaagaccaagtaccctgtcattgtgctctccttgaaggcaagacgctgaacctatccgttcgtcggctcgtggtacacgatgttgcattttataagtagcgtgccagtgtgtgttgttggggaccgattgatcacccagctgctctgcaaattgggtctgccatagcctttgtctagctttgagtccgttgtcgttgtaagttaaatgcgacgtgtgcgtgagtcag

SEQ ID NO: 750 - DNA, 82 bp, Oryza sativa
  Clone ID: uC-osflcyp015c05b1
taaattatcccctcctttccggccccttcccttccatccccggcggcttcccagccgtcggcaagggggtagggggggggtg

SEQ ID NO: 751 - DNA, 323 bp, Oryza sativa
  Clone ID: uC-osflcyp015c06b1
ccactacgcactagtagtagcactctggtattctcccatggcgactgcgaccgaggaggttgccgctgcggctgctgccgccggcaaggcgccgccgccgccgccgccagcggtggtagaggaggtgaaggaggcggtggaggcaccgaagccggaggaggcgccgaaggctgaggagggggaggagaagaaggcggagggtgagaaggagaaggagaaggctaataaggagaggtaaccgagggcgaggaagccccgattcggctgagcctcatcacccgtttttatttctagaatgatcaaggaggctttcatgggacttt

SEQ ID NO: 752 - DNA, 507 bp, Oryza sativa
  Clone ID: uC-osflcyp015c07b1
tggcggcgatggtggtggcaatgtcggtgctgctgctgggcggcggcgaggcggcggcgccgcggaagccggtggacgtggcgttcgagaagaactacgtgccgacgtgggcggaggaccacatccactacgtggacggcgggcgcgaggtgcagctctacctcgacaagtccaccggcaccggcttccagacccggggctcctacctcttcggccacttcagcatgcacatcaagctcgtcgccggcgactccgccggcaccgtcaccgccttctacctgtcgtcgcagaactcggagcacgacgagatcgacttcgagttcctggggaacaggacggtgggagccgtacatcctgcagacgaacgtcttctccggcgggaagggggaccgggagagaggatctacctctggttcgaccccaccaggactaccactcctactccgtcctctggaacctctcatgatcgcgttttcgtggacgacacgcgatagggtgttaagacag

SEQ ID NO: 753 - DNA, 533 bp, Oryza sativa
  Clone ID: uC-osflcyp015c09b1
tcttacgcaccatagtttaacccaagctagaagaagaagacgatagatatgagcactactcgcggcgtctcctcctcttctgctgctgctgctcttgcgctgcttctcctcttcgccctctgcttcttctccttccacttcgccgcagctgctcgcgccgttcctcgtgatgaacaccaagagaatggcggtgtcaaggcagtagcagcagttgcagctgatcagcttgtgctccagctggaaggtgacaccggcaatggcgacgaggtctccgagttgatgggagcagctgaggaggaagcagcagcatgcgaggaggggaagaacaacgacgagtgcgtgcagaggaggctgctcagcgacgcccacctcgactacatctacacgcagcacaagaacaagccttgatcgatcgatccatccatccaactacacgctgaaatccaaagcctatacaaggaagatcgagatcgagataaaataaccaactctatatgcatatctatctatccatctacctctgcatgctgttt

SEQ ID NO: 754 - DNA, 531 bp, Oryza sativa
  Clone ID: uC-osflcyp015c11b1
ttttgatcattcatattgctgttccgagaaacagcggagggtattttggccatgtccttgcaaagcttgaacctagcattgacatgaaagataatcttggattaacaccgcttcagctatctattcttcttggcaaatatgctgcgatgcaaaaattgatagactttggggctgacattcatatccattctctttatggaggaccaattcacgcagcagtagcactggatgatgaaattgctcttgaagctcttatgagaaagaccaatacacgtcttttgctatgatgtgttttcacataatatgaatctagtgttttcacataatgtgtctttattaataggtggatgatattattgatggaggtataacacccttagcatgtgcggcatacaatggttcagttacaagcatgaaaacgttgttgcaggctggagctaatgttcagatttcaaagccaatcggcaaagctatagtagctgacctcacttcatctgaatctatggttcaaattctacttgatctggtgct

SEQ ID NO: 755 - DNA, 512 bp, Oryza sativa
  Clone ID: uC-osflcyp015d01b1
tgctggccgccgctaccactgacccccccccctcgccggagcgccccgtcgccggtcgggtttgatcgatggcgtccaagaggatcctgaaggagttgaaggacctgcagaaggaccctcccacctcatgcagcgcaggtcctgtgggtgaggacatgttccattggcaagctactattatgggaccctcagacagcccatttgctggtggggtattcttggtgaacattcatttcccaccggattatccttttaaaccaccgaaggtctctttccgcaccaaggttttccacccgaacattaatagcaatggcagcatttgcctcgacatcctcaaggaacagtggagtcctgcacttaccatatcaaaggtcctcctgtcaatttgttcactgctgacggacccgaaccccgatgatccgttggtgccggagattgctcacatgtacaagactgatagggccaagtatgaatccaccgctcgctcctggacacagaagtacgccatgggc

SEQ ID NO: 756 - DNA, 530 bp, Oryza sativa
  unsure (1)..(530): unsure at all n locations
  Clone ID: uC-osflcyp015d03b1
ttcacgcacgcaacacgcacgcacccctagctcatgtgcaagacgagccggcgagctgtatacgtagcagctggactctggagaagcatcagctaagctgtacgtactactgtagttcgatcgatggatgctggtaataacgcaatcgctgcggcgtccttcgccatcgtcgtccttgtcgccgccgccgcctcgtctttagcggcggcggtgccggcggtgtacgtgctcggcgactcgctggcggacgtggggaacaacaaccacctgctgacgctgctcaaggcggacttcccgcacaacgggatcgactacccgggngggaaggccaccggccgcttcagcaacggcaagaacttccccgatttcctcgctgagaaccttgggttggcgacatctccaccgtaccttgccatatcgtcaagcaagagtgctaactacgtgaatggcgtcaactttgcttcaggtggcgccggaattttcaactctacaaacaaggatcagtgcatcagctttgacagcagatcgag

SEQ ID NO: 757 - DNA, 485 bp, Oryza sativa
  Clone ID: uC-osflcyp015d05b1
tgtttctgtcaatcagcacataattgaaacgccaactgatggtcagacattggcctccaaagagcaatctatcccatggtcccttgttgtctcagtacttaaggatattgaggcagttgttgaggtggctgcccagcactttgttggagatgatcgcaaatggagctttcttgctgttacagaagctgtgaaagcaggtgtcaggttagctgctttcggggagagtggctacaagatgctcttacaaggaggagaggtggcaaatgaagaggagattaatattcttgatgaaaattttggagccaaaagtaatggagtaccagtcatttatccgatgaatggccatttccaaaatggtcatggggttgcatctaatggtcttgatggaaaggctggatttgtatcaaagagtctggagggaagagctgtagctgctcttaacaagtttggccagaatgcaaagatgacgtcagatccatgtggat

SEQ ID NO: 758 - DNA, 487 bp, Oryza sativa
  Clone ID: uC-osflcyp015d07b1
tctcgggcctcgtcgccggcggcgaaacaacctcgcgggctgcgcggcgccgccgcgaggccattgactccgacgaggactagctgtccacctcggcagcaacgccactactaccaagtggaggagtagtagtactccaccaagtcgcctctcccctctcccatctcgccaccaccactacgcccaaaaatggcgagttccagatgccgcgtggcctacgtcgtcctcgcggcgctcgcggcggcgccgttcctgctgctcctcctctacggcggcgggtccccgtccgcgctctgcctcgccgccgtacgctccggcggagcgtcgcgccggctccagtacccgtctgttgccgtggtcgctgcgtgccccctcttccggtgctcccgtcctcgccgctcccgtcgctgcgcgcctcagggtggatcatcttcgccgggggtggcccaccacccgggccaccgtccgttgccccgggtccccgggt

SEQ ID NO: 759 - DNA, 509 bp, Oryza sativa
  Clone ID: uC-osflcyp015d08b1
tctgagcttgggaagctctctaatatatatacgttgttcttgggtaacaataacctttctggggaagtcccgaaagccctgtataatttgtcttctcttcagtacctaggtttggagattaataatctgggtggtacagtgccacataatattggcgatatcctccctaatctcaacttgcttggtctgaatcgaaacaagtttcagggtcagatccctatttccctaggagacatctccgggttggaaagaatagaattagggaacaacaatttctctggacaaattccttaacaagaataaacatgagaggtgaaaggggatcaccttgtcttaaagctctgaaatactttatttcctctcctggtgaaccattgaggagaatctttgaagaggaggaggaaagcaaatttgacacccaattacgccatcttgatccgaaacccaaagattgtaggactttcaacaggtaaggccagcttacagagtcaaatgcttttgaaatgtcg

SEQ ID NO: 760 - DNA, 420 bp, Oryza sativa
  Clone ID: uC-osflcyp015d09b1
ttcacagacgggaccagataaacgaatacgcacgcaccacctacaagctgaggagccgccatgctgctgacgcgcgcgtcccccaccttgctgccgtggacctgcgccgcctcgccctggccgtaccacagcgccgtcctccccgaccttaggaaggagcgcatgaccggcggggaggtggattggaggccgtgtcttttgcgggggccggtgcatggctgtgctgccagcagggggcccagagatctgcggcaggcgggacggacccagcgaagaaagtggagaacgccgacgagcttatcgtcttgattgagacgtgcatatatgaatgcaacagagtgattaggaagggcgacaagctgatcgacggattgacggacacgctcgagaagctcagatcaaagggcaagatgctgctgt

SEQ ID NO: 761 - DNA, 366 bp, Oryza sativa
  Clone ID: uC-osflcyp015d12b1
tcttttggagctgcactttcaatggtttatatatctggagctccagtcatgttcgttggctgtggtcagtcttacactgacctcaagaagctcaatgtcaaatccatcgttaaaaccctgctgaagtgaatgtggtgcgccgttgtgcggcacctcgaattcgtactgccagtattgctatcgtcgaaacccccatgacctcgtcgtcatcgtgttggatgtgttctgtcctggtttactgttgtagtagcacaaactatcgtgcgctttttcagttatgtgactgctttgtatcacaggttttacctgttttaccctggaatatatacttactagtggttaacatggaaaaaaaaaatcaaaata

SEQ ID NO: 762 - DNA, 516 bp, Oryza sativa
  Clone ID: uC-osflcyp015e02b1
tttttccagtcgcgaacgcgactgctgcagcacttgcgcgggtttctgctatgttcaatgccccgcttgctcgtgctgttgtctttgggattcatatcgatgggcacttggtcgtcgaagggcttctcattgccgcaatactcttccagctctccaggaagagctacaagcctccaaagaagccactcactgagagggaggctgatgagctctgtgatgagtggcaaccagagcctctctgcccacccatcaaggagggagctcggattgaggctcctacattagaaagtgctgctggaccgcatacaattgttgatggaaaagaagttgtaaactttgcgtcagcaaactaccttggtttgattggcaatgaaaagatactcgattcctgtattggttcggtggagaaatatggcgttggatcatgcggacctcgtggcttttatggaacgattgatggtcaccttgactgtgagacttaaattgcaaagttcctgggaacgcaagattcaatct

SEQ ID NO: 763 - DNA, 474 bp, Oryza sativa
  Clone ID: uC-osflcyp015e03b1
cgaggtcgtcaccctcttctgcgacgacgccgacaggatcatcaacgagatcgccaccctgctggagcaacccgtcgtcaacttcgataaggtcgacgcctacgttcatcagctcaaaggcagcagcgccagtgttggtgctcagaaagtgaagttcacttgcatgcagttccgtcagttctgtcaggacaaaagcagagatgggtgccttatggcattggctgttgtgagaaacgacttctatgatctgcgcaacaagtttcagactatgcttcagcaaatccaggcttatgatcccaagcagcaataattgaagcaaaagagtgtagctgcatgtgatctcacatgataaatgtatctttgaagatgtagaccatgttcaatgggcttctggttaaaagtgtgtgcgcgtgtgcaaaatcaaatcatttggtttgaggcttcatgctttccactttgagctcataacccttt

SEQ ID NO: 764 - DNA, 471 bp, Oryza sativa
  Clone ID: uC-osflcyp015e08b1
cgttcggtgagggggagcgaagctttgcgttctctaatcgcctcgtcaagatgcagatattcgttaagaccctcactggcaagaccatcaccttggaggttgagttctccgatacgattgacaatgtgaaggctaagattcaggacaaggagggcatccctccggaccagcaacgccttatcttcgctggcaagcagcttgaggatgggcgtactctcgcggattataacatccagaaggagtccaccttgcaccttgtcctccgccttcgtggaggcatgcaaatattcgtgaagaccctcaccggcaagaccattaccctggaggtcgagtcctccgacacgatcgataatgtgaaggccaagatccaggacaaggagggaatcccaccagaccagcagcgtctcatctttgctgggaagcagctcgaggatggccgcacccttgcagactacaacatccaaaaggaat

SEQ ID NO: 765 - DNA, 196 bp, Oryza sativa
  Clone ID: uC-osflcyp015e09b1
ttgaaaagaagagaaaaataaaaaggagccgcattataagtaggtagtggtggtggtggaggaggaggacagccaatcgaggtagccatggcgatgcaggcctccttctccgcctcgatgctccctcatctggctcaacgtatgggaagcgatcgcgcggtgttggtggctccatcttcgccttctccttagagcc

SEQ ID NO: 766 - DNA, 495 bp, Oryza sativa
  Clone ID: uC-osflcyp015e11b1
tcttatggagttaatgttgtagttgcaatcaacaagtttgcatcagatactgaagcataaatggacgtggtgcgaaatgcgtctttggctgctggtgcttttgatgctgatgtctgcactcaccatgcgcatggtggtaaaggagcggttgatcttggactcgcggttcaacgggcatgtgagagccaggcagaccctctgaaatttttgtatcctttagaatctggcataaaggagaagattgagtcaatagctaagttctatggtgctagcggcgttgaatactctgaacaggcggagaagcagattgaaatgtataccaagcaaggcttctcaaacctcccaatatgcatggtgaaaactcagtactcgtttttccatgttccatccatgaagggcgcgcccgctggctttgggcttcctatcagggttgtgagggccagcattggtgccggtttcatctacccactggttggcaccatgagcacaatgcct

SEQ ID NO: 767 - DNA, 541 bp, Oryza sativa
  Clone ID: uC-osflcyp015e12b1
tcttcagcacataatcccattctataagacatttaatggcaagaaatgggagaaattcaatagtgaaaaggtggcgtcgctcgcatacgcccggattcaaggaaggagtgctttgattgctcattttcagaattctagcctgatgaatgaagacaaatggtgtcgacctatgcttttccacaaagatggtccaaatgcaggagatcaggagccttttcctgtggggaacaatgtccggtctagggctgggagaaataggtcgctcatcagcttggacactaaagatgcaagtccatcaagctccccagaccaagaaagcaattctgtcggcaccgcgaactcaacttgccgtacgaccttggagcaaacctaatcactaactggagggcacaagaagctgtaatgataaactagggaattcccaagtttgctaagtatttatttgactatcagggagccaaagtttgtgacctgtgagtgtaatgatgaatgaaaggctctgccaggccaggcatcacctccactaaaattatgagaggga

SEQ ID NO: 768 - DNA, 374 bp, Oryza sativa
  unsure (1)..(374): unsure at all n locations
  Clone ID: uC-osflcyp015f01b1
tcgccacgcgcctttttacttaatactagaaagcggggtgtatcacggtactgctcagggaccggagagaacctctaccgtgatactccatgaaagcaggacacatgcgtcgcactgagagtgctgtcaataatgagagtcgtagatagcttcatgttcctacacatacatgatgagcactctcacttcctgatcacttcatcatggantatatgcatgagcgtaggctagttactcacatcataaaggcacctgctgttaaaacgccagcctatgtattacatggatcattttttattcagaaagtgacattgcaaatcttgaatgtcaccgtgataccggggcccttttgttttgcagacaagacttattac

SEQ ID NO: 769 - DNA, 279 bp, Oryza sativa
  Clone ID: uC-osflcyp015f07b1
taaaaaaaaaaatagagtagaatatagaaacatattgaagttacatgagacgctgaagagattcagaaaaaaaaaaaaaaaaaaaaaaaaaaaaaaaaaaaaaaaaaaaaaaaaaaataaaaaaaaaaaaaaaaaaaaaaaaaaaaaaaaaaaaaaaaaaaaaaaacaattgtttaaaaaaaagttaatttttataaaacacatattttattcaatatatggcttaaaaaataaaaatataatattacatcttgaattaaaaaaaaaaaacgcatcctt

SEQ ID NO: 770 - DNA, 524 bp, Oryza sativa
  Clone ID: uC-osflcyp015f08b1
ctacaactgacagatttgttgttattacttctggacctgatgaaagatgcatccctggaaacacaattgccgtgcaagcagacatgccatatagtggcttgtcatcttttgggacagcatttctatcaaagtttgaatgttctcagatgcctcatccactactggatcatataacctttgtggacactcctggagttttatcaggggaaaagcagcgaaaacagcgtagctatgacttcactggagttacatcatggtttgcagccaagtgtgacctaattcttctcctatttgatccacataagcttgacatcagtgatgagttcaagcgtgtaattgggtcactcaaagggcatgatgataaaatacgtatagttctgaacaaagcagaccaagttgatgcacaacaactcatgagagtctatggagcactgctatggtcgcttgggaaagttctgaacacaccagaagtcatgcgtgtgtcataggttcatttaacgacagcccattaggagacagtagct

SEQ ID NO: 771 - DNA, 538 bp, Oryza sativa
  Clone ID: uC-osflcyp015f10b1
tatcgaaggcacaccctccagcaatatcagaagaaaattatgctatccatgatgagctgaagcaagttgatcctttatcacctgaagaatattctgatgaagggtggcaagcagctaatttgcgtggacgatctgcaaatgtacggaagaaaagcagtcgcagaaggcccgctctcactaaattaatggttgatcgcttggaagatggccgcacaggttctgcttatagggctggtgtacaacaacacatgaaaggagataaagaagatgttataaactcttctagccagctctcctttggcagctttctaaaaactgacaaggtgaatgggaattccagcaatattgaaaataaggttttcaatgctatatctaaaccagaacgaggcataaagctttcaggaattaacagacctgctactatagcttccaagttggtatcatacaaagatgtagcagtgtcaccccctggcacagtcttgaaaccgattttggagcagaaggaagcaaaggagaaggataatgcacaaaatactga

SEQ ID NO: 772 - DNA, 488 bp, Oryza sativa
  Clone ID: uC-osflcyp015f11b1
tcttttcgcacccgccgcggtgcacgtccaagtgcggcagctgcagcccgtgctcccccgtgcacgtgtccgtcccccccggcgtcctcgtcaccaccgagtactaccccgaggcctggcgctgcaagtgccgcaaccgcctctacatgccgtgacgactccacaccccccacccctctacgtacgccgtctcgatccaaccgcacgagaccaccgagatggcgccgtgacacaacaggtaggcgcaccgtccgcccgtcgtctctgccgctgcatcatcgcgtccggtgcggcatgcctctctttctctctctttctctcgccgtctcgcgcgcgcgcgtgggggcatgcgtgcatgggtggtgcaggtggggcgcggggcgcgtgacggatggggccgcggtggactggcctaccacgcgcgcgcggtggcacggcgcatgcacggcggcagctgggggggccggggcctgggcagcgtgatcgtc

SEQ ID NO: 773 - DNA, 459 bp, Oryza sativa
  Clone ID: uC-osflcyp015f12b1
tctgttctagatctcgagcggagccctttttttttttttttttttttttcgagaagaccagtactactttattcatgccatgaccatgcatacatatgggcttttacagatccgtgaagaatttcctcgcccgaaaccgaaacatacatatatagcaaactcactcactctggctgcagagcgaccgggcgaagtgcgtactcacacgcaattttattagatcgatcggggccggcacgggggcgcacacgtttacttcgccgcagacgccgacatgatgccgccgtcgaacggcgcctggccgaagcagtccaggttgggcccgtagccgacgccaagcacgtggcataagcgcttggagaacgcgacccggtccgcgccgacgttgtcgccggcgcaatggagcccgccggtgaggatgttcgtggtgagcccgaagcctggcgcgcggccggccgc

SEQ ID NO: 774 - DNA, 245 bp, Oryza sativa
  Clone ID: uC-osflcyp015g01b1
tctttcgtccgccggtgactctcctacgcggggggctgattctgaccacccccaccctcactcgcctcgttgacggaaaattgcatttcgcgccgctcgccgctccccccccctcttggaggccccggagctagctgcttggggggatcctcctccgctcggcgggcggtgatctcgcggtggtccccgaggaggcggcgaggtcctggctgcgaccagatgccccgatcccagcaatgatgcgc

SEQ ID NO: 775 - DNA, 138 bp, Oryza sativa
  Clone ID: uC-osflcyp015g03b1
tcactttttggaaagctcgcacgcctgcacgttcccgcccggaacggctcggccgacccacgctttcttgaggaatcagacacgcctgtcaaatagctgtgcattgttctggcacggcgagtgcggcacaacccctgc

SEQ ID NO: 776 - DNA, 526 bp, Oryza sativa
  Clone ID: uC-osflcyp015g04b1
tcggggtgatcgagggcgtcttcgagcgccgcgccgaggtggccgacccgcccgtcgccaacgtcgaccgcctcgtcctcctcttcgccctcgaccagccccagcccgagcccgctacgctcaccaggttcctcgtcgacgccgagtccaccgggatacctttcgtgctcgtcttcaacaaggtcgagcttgtggacgacaagaccatatcatactggagagataggatgaagagttggggatacgatccactatttttaagtgttgatcagaaatcaggattatccgctcttgaagaaacattggaaggacagacaactgtaattgttggtccaagcggtgttggaaagtccagtctgatcaatgctttgagaagcaaccagaacatctcagaagaagatcccatacataaactagttgagcagaatagtaaatgggtttggtgaacaacgggtcggtacccggtcgaagaaaagcggcataggaaagcacacaacacgtcatgtttcattgcttcctatagctg

SEQ ID NO: 777 - DNA, 503 bp, Oryza sativa
  Clone ID: uC-osflcyp015g05b1
tttccaagcatcacagaccaaccatatacggcaaagatgagctccctaagagggcttggaaatatcgccagaagatggagagagctcaatggtgtgagttactggaaggggttacttgatcctcttgacgttgatctccgcaataacatcatcaactatggtgagctttctcaggcagcctacacggggttaaacagagagagaagatcaaggtacgctgggtcttgcctcttcagtcgcaaggacttcctcagcagggtggatgtatcaaacccaaatctgtatgtcattacaaagttcatatatgcaatgtgtactgtcagtttgcctgatgcattcatgataaagtcatggtcgaaggctgcatggagcaagcagtcaaattggatggggtttgttgcggtggccacagatgaaggtaaagaagtgcttgggagacggtgatgtggtggtggcatggcgtggaacaatacggatggtagaatggatggatgaccttgata

SEQ ID NO: 778 - DNA, 535 bp, Oryza sativa
  Clone ID: uC-osflcyp015g06b1
aaaaagcattcgcatccacgagaccactcgaacccgacccgcctcgccgccgccgccaccgaagtaatcccttaattggtcaaaatgtctcgggaggagaatgtctacatggccaagctggccgagcaggctgaaaggtatgaggagatggttgagtacatggagaaggttgcaaagactgtagatgtggaagagctcactgttgaggagcgcaacctcttgtctgttgcttacaagaatgtgattggtgcccgccgtgcctcctggcgtattgtctcatccattgaacagaaggaggagggttcgtggcaatgaggaacatgttactctgatcaaggagtaccgtggcaagattgaagctgagctgagcaagatttgcgatggtatcctgaagttgcttgactcacaccttgtgccctcatctactgctgcagaattaaggtgttttacctcaagagaagggtgattacacaggtaccttgcggaatttaagactggtgccgagagaaaggaagctgctgagagcacaatggtg

SEQ ID NO: 779 - DNA, 417 bp, Oryza sativa
  Clone ID: uC-osflcyp015g07b1
tttctgtcgccgctgatcggtcgctcgtgccgagggtgactactactgggggttacgtctggtcggttgctgcatcggtgatcattgcggccggtggattcatgtggatggcaaggtcgctgtatgggatgactcatgctgaggacgggtcgtcattactgctggaaaggatatcatcaaggctgtccatgcaactgacggcgacagctccagagcttttcaataactacgatggacttagatccatctggaagctctccacagctgtccctgttattgacactgcctacatatgccattacactggtcacagcattgacagtgagcttgacgaccgaacacatattaatccttattgtgcgaacattcctgatcctttgctccagcggttacattggtacaagcttttttgcatat

SEQ ID NO: 780 - DNA, 535 bp, Oryza sativa
  Clone ID: uC-osflcyp015g09b1
ttgaggaatcagacaagcctgtgaatagctgtgcattggtctggcaggggagtgtggcaaaaccctgctttaccaggttcagtgtacacaattgccgtagtgaggctgctgccaagaaggtgtttgcagatgcttcagttccacactactgggacctggctgtcaatttctcagaagattcatcttgagctgagcttctgttcagaacatggaggcgcctgctgttgaaacccctgcctagggattacgatgttcaattctcatgcagtaagtgatgagtagtagctaatttctcaccgtgggtaagtgtcctcttcaagttacgtacaagccttattacttgctctggaagcatttgtggactgagtaatacttcgtactgtcatgaacatacccttgtaagggactgctgatctttttcgtgcgggattacttatgtgagctagaaactgaatgcatggaggaactgttgaaatttttgcagtataagcttcaactatatctggactgctcaagccttgaatatgttatggga

SEQ ID NO: 781 - DNA, 526 bp, Oryza sativa
  Clone ID: uC-osflcyp015g10b1
tctgtatgaggctatgtggcacgatataactagacaaacaggaggaaacattatttctgtcaccattccagtaatgtttgggaggtatcttgagattcctaaaagttgcaatggagtggcaaggtttgacttcgagtatctgtgtggccgcccagttggagctgcagactatatagcaatagccaggaactaccatacaattttcatatcggatattccagctatgagtatgaagattcgtgacaaagcaagaagatttatcacccttattgatgagctctacaatcatcactgccgtcttgtatgtctagctgcctcatccattgatgatctttttcaaggaactgatgaaggacctctttttgacttggagagttttcagttcgaaggtgaagctgaaggggcaaagcttaggagggatgttttagcagaaggtaatgttggtgcagcgccttctcctacaggcctagtggcaattttgtctggccaagaagagatgtttgcatttcctagggcgatatcccgt

SEQ ID NO: 782 - DNA, 533 bp, Oryza sativa
  unsure (1)..(533): unsure at all n locations
  Clone ID: uC-osflcyp015g11b1
tcggaaaaaaagagagtcgtagttcgcctcttcttcctcctctcgttctcgcggcggcggcggagatggcgtcgttctcggaggctcccccgggcaaccccaaggccggcgagaagatcttcaagaccaagtgcgcccagtgccacaccgtcgacaagggcgccggccacaagcaaggtccaaacttgaatggtctgtttggaaggcagtcaggtaccacccctggttattcctactctacggccaacaagaacatggctgtgatctgggaggagaacacactttatgactacctgcttaatcctaagaagtacatccctggaaccaagatggtcttccctgggttgaagaagccacagnagcgtgctgatcttatttcctacctgaaggaagcaacctcttaaaggagtggagctgtcgtaacatgagacaatcggacaattcattctacagttaaataaaaatatttagacatctgggtcgctctggttntacagggtgcaatccacgagacaattatcttgttatatttt

SEQ ID NO: 783 - DNA, 535 bp, Oryza sativa
  Clone ID: uC-osflcyp015g12b1
tctgtcccgtgcacggagagcccatgaggctaagcagaagggacgtcactctggctatggtaagcgtaggggtacaagggaggctaggctccccaccaagatcctgtggatgaggaggatgcgtgtgctcaggcgtttgctgcgcaagtatcgtgaggccaagaagattgacaagcacatgtatcatgacatgtacatgaaggtcaagggtaacatgttcaagaacaagcgtgttcttatggaaagtatccacaagtctaaggctgagaaggcaagagagaagacactctctgaccagtttgaggctaagcgtgccaagagcaaggcaagccgtgagaggaagattgctaggagggaggagaggttggctcagggcccaagagagccagcagctcctgcagcggcagctcctgctcaaactgcagcggcacctaagaaggcaaagaagtgaacacctggcttgaagtgtggtcgtcttagtgaaaccagtggaggtgttagcttgatttgaaatacgacccgtttggcctagtat

SEQ ID NO: 784 - DNA, 485 bp, Oryza sativa
  Clone ID: uC-osflcyp015h01b1
tgcaccttttatgggaatgagagcggagatgcacttagagatgtcgaactcctcaatgctgttgccaataattctcatgtcatcaagtttttgactgtcatgaccctttgcaatactgtcattcctataaaaagttctagcggagcaattttatataaagctcagtcccaggatgaggatgctcttgttaatgcagcctctaatttgcatatggtgcttgtcaacaaaaatggaaacactgctgaaattcacttcaacagacgggtggttcaatatgagatacttgacattctagagtttacatctgatcgaaaaagaatgtctgtcgtagtattggattgtgaaagtggaaagatttttctcttatccaaaggtgcagatgaagcaattattccatgtgcttattctggacagcggataaagacatttgttgatgcagtcgacaaatatgctcaactgggattacggacactctgtttgggatg

SEQ ID NO: 785 - DNA, 540 bp, Oryza sativa
  Clone ID: uC-osflcyp015h05b1
tgtttgtagctggagggccccacaccccttcaaatattgacccatggtctatcattggagatgaatcctctatatacgtcacgactgattgctcatcttgtttccgccaaaatattgttgctctaaggatggagattctctgtgataattgtccagccggcggtgtcggcatttacaacccaggattctggggcatgaatatagaagaaggaaaagcctataatctagtcatgtatatcagatcattagaatcagtcgaattgacagcttcgctcacatgctcagatggaatgcaaaatctggcatcagtttctatacaaggtattgatctgtcaaattggacaaagatagagttgcaattactagctgaaggaacatgcagaacttcaagacttgaattaacaagtatgaaaaagggaataatttggtttgatcaagtgtcactcatgccttcagacacatacaagggccatggctttcgcaggaactactatacatgcttttgaattaaaaccacagttcctacgctttcctgggggg

SEQ ID NO: 786 - DNA, 531 bp, Oryza sativa
  Clone ID: uC-osflcyp015h06b1
ttgttttatatcagttgcctgtgcatagctccccttatggtccctcaaacagagtccctgacaactatcttcctgttcggtgcacgcatttgcatctccgcaagcttcattgtcttgcacatctatgctcctgagatatacccaaccgcagtcagggctaccggagtcgggtttgcgagctcaatcgctcgtttcggtgggatcttgtgccctcttgtggccgttggtttggtgcacgcgtgccatcagactgcagccatcctgatattcatcacggtgatgctcgtctcaggtgttgcagtctcatactttcccctggaaacaagcggccggaaattgagtgaccacatcgcggcgtaagagctaagttgcgagcagaatctgacagtgttgcaagtgctaggttctttagctatacaaaattacaggattgagctcctagaggccattcagattttttttttctttcacttcgctaaagatcatatatatagaatagaaatgaaagatggtggatttcagattttaaat

SEQ ID NO: 787 - DNA, 363 bp, Oryza sativa
  Clone ID: uC-osflcyp015h08b1
tcgtcagaaacaaacccctgtcactcccactaccatggatccttgcaagttccggccgtcgagctcgttcgacacgaagacgacgacgacgaacgcgggagctccggtgtggaacgacaacgaggcgctgacagtggggcccagggggccgatcctcctcgaggactaccacctgatcgagaaggtggcgcacttcgcccgggagcgcatcccggagcgcgtggtccacgcccgcggcgcctccgccaagggcttcttcgagtgcacccacgacgtcaccgacatcacctgcgccgacttcctccggtccccgggcgcccagacccccgtcatcgtccgcttttccaccgtcatccacgagcg

SEQ ID NO: 788 - DNA, 308 bp, Oryza sativa
  Clone ID: uC-osflcyp015h09b1
gccgtcgccgcgtgactctcctccgcggcggcctgagcctgaccacccccaccctcactcgcctcgtcgccggaaaattgcattcgcgccgctcgccgctccccccccctcttggaggccccggagctagctgcttggggggatcctcctccgctcggcgggcggcgatctcgcggcggtcccgaggaggtggcgaggtcctggctgcgacgagatgccgtgatcccagcagtgatgcgcggatcggagcatgggtgtgagccctccagggtgtacctgtaggcggcgggcgaggagcgggaagttgc

SEQ ID NO: 789 - DNA, 537 bp, Oryza sativa
  Clone ID: uC-osflcyp015h10b1
tctttggaacgcgtacttacccacaagttaggtgcatgccatggcaccattcatggcgtgcgcctcgccaccggtactcacgctggccctgctcgcgtcgtgcggtgcccttctcgccacctccatgctcccggcgcgtgcgacggcgggcagctgcttggacgtcggcgacatggtgatgatggacaggttccgcgcttggcagggagctcacaaccgatcgtacccgagcgcagaagaggcgctgcagcggttcgatgtgtaccgccgcaacgcggagttcatcgacgccgtcaacctgcgcggcgacctcacttaccagctcgccgagaacgagttcgcagacctcaccgaggaggagttcctggccacgtacaccgggtactacgccggcgatggccccgtggacgactccgttatcacgacgggtgccggagacgtcgacgccagcttctcctaccgcgtggacgttccggccagtgtcgactggagggcccaaggcgccgttgtgcctcccagtcccaaacgtaacatgca

SEQ ID NO: 790 - DNA, 210 bp, Oryza sativa
  Clone ID: uC-osflcyp016a01b1
ttttctagcctcgacgagcgcttcctgcgactgcgtcgtctcgtcgatcttggttgtgcagccgagttcttctctagtcggtgggtgggggataggatggcagcacgcggaaaggctgatcggtgccggtgccgctaagaacgagacgacgaggagcttcaaggccgacctgcagttccccgtcgggaggatcgccagggtcctcaaggc

SEQ ID NO: 791 - DNA, 489 bp, Oryza sativa
  Clone ID: uC-osflcyp016a03b1
ttcttagctagcaggtagctgagagagttggttcgatctcgatctctgcacggtgacgataagataagcaatggcagtctcgtcgccggcgccgtcgtctctgcatgtgccgatggccgctgcggcactattagggatgctgatgatgatgtcgtcggcgccggagatgaaggtggaggcggccggcgggttgtccgtcgggttctacgccgaatcgtgccccaaggcggaggcgatcgtccgggacacggtgaccaaggcgttcgagaaggcgcccggcacgccggccgacctcatccgcctcttcttccacgactgcttcgtccgcggatgtgacgcatcggtgttgctggagtcgacaccagggaacaaggcggagagggacaacaaggcgaacaaccctagcttggatgggtttgacgtcgtcgatgatgccaaggaccttctcgagaaggagtgtccacacaccgtttcttgcgccgacatcct

SEQ ID NO: 792 - DNA, 212 bp, Oryza sativa
  Clone ID: uC-osflcyp016a04b1
taatagaggccacccgcgccaccgagcgggggcttttggacacaaagggctctagccccccgagccacaagcgcggcaccaacgacggcacagacaagggggagggcaagaagaaaggccccaaggacgggccggcgctcaaggaggccgcgactagcacacaggacgcatcacaagcgacgccccggacaagggccgctgcaaggaccgca

SEQ ID NO: 793 - DNA, 348 bp, Oryza sativa
  Clone ID: uC-osflcyp016a06b1
attaaccctaatccacaccctctcaagcggggcatgtataagcgcgacggcgtttgtcgcccccagcgcggcgggttcggccgcggcttcgggcgcagcggacgcggcgaccgctgagggcagccgggcggacgccgcggcccgcgccaggaggaggagaagagggtgcccgaaaccaagctcggccgccttcggaaggaaggccaggatttcaagatcgaggagatctacctgcactccctccccgtcaaggagcaccagatcgtggagaccctcgtgccggggcttaaggacgaggtgatgaagatcacacccgcgcagaagcagacgcccgccgggcagcgcacc

SEQ ID NO: 794 - DNA, 496 bp, Oryza sativa
  Clone ID: uC-osflcyp016a07b1
tgttgattcactgaggaccacagacatacaggggtttgtttagatagaaactcctttagtgagccctgctgcgctgaggccacactgggcgaggagggttgatggaaaggcacaggtcgcacaggcacagggagatgggctagaagttgtaccggtcggcacttccaacggaaacggggtaaaaagtctgatggaatcactttgtgctagtccagatgaggtcatggcactaggcgatggagaaaacgataaagagatgctccaacttgccggccttggtgtcaggctctgcaacggctgcgaggcgacaaaggtggtagccgacgaaatcggcgcgagcaacgacaaaagcggcgtggcacaggccatttacaaatacctctagaaggggatcccacctagctggcttagcatttctactgtggtgtggtagggcctaaaataactagcttgcagcatccatttgcaagcgcaccatatataaacttcaataatt

SEQ ID NO: 795 - DNA, 275 bp, Oryza sativa
  Clone ID: uC-osflcyp016a08b1
cgcggacggagatcatagatcatccgtgctacctacgggtaggcttgcgcccagcgacgtggctgccgtcttctaggacgccgggaggcgcatgcgcagcaagcaggacgaagctaggaaagcattggaaaatgccctggtgaggaagaagacggggctctccaaaatcgggtatgcaaatggaaagaaggcagcaaagactgcctccttcagccggcggtggaggatggtctggaggaggtggttggctcaggaactacaaccacggcggccac

SEQ ID NO: 796 - DNA, 492 bp, Oryza sativa
  Clone ID: uC-osflcyp016a10b1
atcggcagaaacaaacccctctcactccgggggccatttatccttgcatggtctttccgccgagctcgttcgacacgaagacgacgacgacgaacgcgggagctccggtgtggaacgacaacgaggcgctgacagtggggcccagggggccgatcctcctcgaggactaccacctgatcgagaaggtggcgcacttcgcccgggagcgcatcccggagcgcgtggtccacgcccgcggcgcctccgccaagggcttcttcgagtgcacccacgacgtcaccgacatcacctgcgccgacttcctccggtccccgggcgcccagacccccgacatcgaccgcttctccaccgtcatccacgagcgcggcagcccggagacgatccgcgacccgcgcgggttcgccgccaagttctacacccgcgagggcaactgggacctcctcggcaacaacttccccgtcttcttcatccgggacggcatcaagttccccg

SEQ ID NO: 797 - DNA, 274 bp, Oryza sativa
  Clone ID: uC-osflcyp016b05b1
tgatatgggctatcatcgcatcctggggactgtaccagatgaccatcttcaacgaccgcgtaagccgtggcgacgcccgattgctggaagctaacgagatcttcctcacgggggtggcgctcggacctacatgggattggtcaccgtgctctttttctacctggcgcacgacacgaacttcttcatggatgtccacggcgtgacacctgtcagatagagcgagagggcactaatggcacacgctgcacctgcagaagaccatgaacaaccaggc

SEQ ID NO: 798 - DNA, 384 bp, Oryza sativa
  Clone ID: uC-osflcyp016b06b1
aatgatgccaggccaacaccggtaccaacaggggctttttgagagagagcttcgtcttttgccacacgaacaacaacaagcccacgtacgacaccgcatggggctgtgccacggtgtgccgggctatgatgagttacatcactgcaggagcgtatcccaccacgaggaaggacccctccgcaggctccggatgccagagcagcctagccgcagggagggagggcaccaaggcagacacgaggagccgatgcgggacggacacccagggctggaccgaccgtcacgagctaccagacagatggagcccaagggagacaagaagatcaaggccatggataccaagaagcacgcggacgtgaacgagcacccatacaccaccaaagt

SEQ ID NO: 799 - DNA, 266 bp, Oryza sativa
  Clone ID: uC-osflcyp016b08b1
tgttggccggccgtgaggaccaccgcagcggggggtttttataacgcttattgtgttacacggaggcctacctctctaccacagcggcggtgtcggcacccagacctgagagtgactggcggagccaaacctatggtggcccgtcgccgagctggtgtcctccatggaggcatcgagtggaaagcggtggccagagcgcaaggccccggcgtgtcgcacgtgccaccagccacaggcggtgcgaggccacggcaaccgtcatgctg

SEQ ID NO: 800 - DNA, 443 bp, Oryza sativa
  Clone ID: uC-osflcyp016b11b1
atctgagcgccggcgggctccatcgcaggggggattcttgccaaagtccacacggtttcccctgctgtggaacgccataaaccacacagagggggagaagaagtggaagcgggagaccaacggaccgcacgcgatgcaccagcagtgcgatgccgatgcccgcgcaggcgccgtctactgccggaattaccacccagcagatgcaaaagtatctggatgaaaacaagcacctcactttggctatctcggaaaataagaatctgggaaagccggcagaatgtgctcaccgctaagcgcagctacagaagaaacggttgaactaggctgtgatagctgatactaaaccgactaccactatatgtcgaacgcagatggggccgcatggggcatcgccggcgtcaggggggaaaagcatgcctgcgaggccaatgttcccccccagg

SEQ ID NO: 801 - DNA, 454 bp, Oryza sativa
  Clone ID: uC-osflcyp016c07b1
tctctatccttcaccattcgcctcctactcgggtggctgtagagaagaagaaggctacccccaaccaacgaatgcaataaggagaagagagagacgtggatctctatctgaagcggcactcggctatgaggcaagctaaggcggcgcgggagcaataatggctcacaccatggctggggccatgcctgcctgctgggaaaggggccatgtgctggcggcggctgaagccaaggcgtgggccaaggcgattgccagtggatgactccgtgacctgattcggcctggggatattgctgtgtcgccagcatcacctgcattaatccgggtggtggcatccatgtcggagatgggacaacgatgattgacttgcgagtgtcatgattgatggaagaaggttgtatcatcctagtgggtatggagcagtgttatgttttgatccaggaaagggaaatga

SEQ ID NO: 802 - DNA, 459 bp, Oryza sativa
  Clone ID: uC-osflcyp016c08b1
ttttggtttaagatgcacggacccggacctgtggactttttcgaccctgcgacgcgagtagtgaaagaccacaatcgacacgacgccctcaaggacggctactccgacgaactaaccccgctcggagcatgcctccggcgagcctccgtcctggacctagcttttgtcggcggcggcaccagcaagggctggcggcctaggaggggagagggggcgattcatacggttaaggactccactcgacgatgacctgagcggcgcctcaaagagagtccgttgtgccggcagtgaggtctgtacctgggggacgggtaaggcatgcacgtctgatgcgaccatgaggtgctcaggatgcgctggtggctgcatgataagcaccagtcagcggctgggtgcttgcatgacacctgagatgcagaaggctcgcaatgagcggactgcgactgatgagagcaacct

SEQ ID NO: 803 - DNA, 434 bp, Oryza sativa
  Clone ID: uC-osflcyp016c10b1
aataccctactatcgttcgctcgcggctggcttatgaggaggagaggcgggggccacggcacgcaaatgctctgcaccgctccggcctatttcggcggaatagcaactcaatatcgagttctggtacagaaaattatggagagggaaattcgtgccttatatgaaccaaaaagaaacaatgaaataagaatcccagagagttcagacgagatgctcaacagacactggctgagtatattttgcatgcacgataaacatgctgataaagaagggggctactgtgctattgccctgtgtggaggccctctaggcagatcttcggggaaactttgtgacgcgccatacaacaagaccttgaattggtacaaatggaccctcttcatggatgatgagcgagctgtaacacagaatcatgccaagagtagttataggat

SEQ ID NO: 804 - DNA, 66 bp, Oryza sativa
  Clone ID: uC-osflcyp016c12b1
tatcagtcccccccctcccgcccagccaggggggacctttaaaaaccaccaggcgtcaaccccccc

SEQ ID NO: 805 - DNA, 494 bp, Oryza sativa
  Clone ID: uC-osflcyp016d04b1
ttctcgcggagacgacggggagcaccgggaggctgttccggcgggaggtcgccgagatcgcgttcacggtgagcaacatccgcgccgtgctccagcacggcgccggccacctcgagctgcagcggctcggcgccgaggtgctcacccgcctcgccatggacgcggacgcgcgcgagaagatcggcggcaccggcggcgtcgtctccctcctcctcgccatgttcctccagccctccatcaccgacgagggcgacgccgcgcgcgtcgaggccggcgaggcgctcgccatgctcgccctcgacagccgccgcaactgcgaccgcatactccgcgccggcggcggcggcggcgccgccaccgtcgcccgcctcgtcgacgcgcttaccgacgacgcggtcggcatcggcgcggcccggatcctgaccaacctctgcgcgtacgccggcggcgagtggttcttcgaccttcaccttgtcaccttccgcgccgccacg

SEQ ID NO: 806 - DNA, 348 bp, Oryza sativa
  Clone ID: uC-osflcyp016d06b1
aatgattcctgataccccaagcatctggcggggggtatttttaggggcttattagcttgtgtgaccctctccctgtgcgctacggagactagtgcacccttgacctcttagctggggacttggagtacgataaagaagaacaaggatgcaactactaccaccacgatgggctctgtctgtggacgactccggcatcttcagcgaaaccagctatggctgagggagacacccggggtccctccattgagccgaggcactagaaggatcccgacttccctgaggggaagactgcatcggatgacctccaccacgtcaagtttacgttcacaagtcatgctttctgggctg

SEQ ID NO: 807 - DNA, 160 bp, Oryza sativa
  Clone ID: uC-osflcyp016d07b1
attggcggcggctgtggtgaaggtggtggtggtggctctgggtatggttgcggacaaggttctggatcaggatatggctctggtgcttttggagctggtggttatggaagcggtggaggtggcggaggtggtggcggtcaaggtggtggtgcggcacctg

SEQ ID NO: 808 - DNA, 255 bp, Oryza sativa
  Clone ID: uC-osflcyp016d08b1
atcggagctgggggagaaccctaatgccatgggaggattttaggatgacaaggttccatccaaactatcacccatggaagccgatcaagggtgcagaaaaactatcgtatatgaggctaatgatacttgcgatacttgcaatggaagtggtgttcctgctgtcactgctaattacacatgtaaagcctggccaggcacatggggtgatagccacgcatccgtagtctcccgagagaccaaaccaccttggcctag

SEQ ID NO: 809 - DNA, 297 bp, Oryza sativa
  Clone ID: uC-osflcyp016d10b1
ctcgaggatcggtgcgaacaggggggacgacttcttgctatacatggagttagaccaaaatcctatggtagtcaaacctgatgaaggcatcaacaagacagacaatgctgagaggctgcagggtaacaccaccatgggagagggccagttggccagacacaaggactatggcgccaggagaagggagggacaacttactactctgttggattactggagaaggaaagagagctggcgagagctatcattgactacttgcgccagagcaccagggacaagcggctctggacctgggtg

SEQ ID NO: 810 - DNA, 502 bp, Oryza sativa
  Clone ID: uC-osflcyp016e03b1
tctaaatcaaaattgagaggggcacgccgtgttggtttgtgggacatagacaaatatcccgagaattcgaaaaatggatctgaggatactgatggtccagttccaatttcagttttcatggttgcaagtgttctcaaggaaaaaagagaaaagctattacaggaagctagaggactggatgatcttattaggattctgaatgatgtaactggaaatttagatgccaaaaaagcttgtgctggtgctttgaagcttcataagaaatacctgaaaaaagtacagacaaagaaactctaaactgtcacatatcttttcactgggtgattcttttccatgtggacatagcaaactatacttgacagaatggtcgccatctaaaaccggcctggtttgtgaagataccagctagtcggtctgagtacaggaagaatgcgacccttgtatgtaaagatctcgaatactttctactccataattttgctgcttgcaaagacagaagatg

SEQ ID NO: 811 - DNA, 497 bp, Oryza sativa
  Clone ID: uC-osflcyp016e04b1
aatggcaaagcagagatagggcgcaaccgggggggagttgtctcttcagagctagtctgcccactaacctgcagcccatttccatggtctgccctcccgacctgcaggtgcagtgactatgatccatgtgatgccatagaaacacaggatggatccgaggagcaatctcctcagccatcgcactgcgcaagcatggagatggacaagagggaacagcaggatcttgaccggactagctgctcaggcatgtgctggagccgaagaagctgccacagggaggagcagtgaaaagcagagatcaatgcttgattgtttcttctctgtggagtgctacatatctggatacatagcagctcaatgtgggagatgagcagcggttattttccttggctccccagctgtggttctttcccctatttgcagccaagattttcttgattggagaagagaatcctgcagctctttggctgctgtagatttcactgtactgtagcatt

SEQ ID NO: 812 - DNA, 468 bp, Oryza sativa
  Clone ID: uC-osflcyp016e05b1
attcatctccgccgtgtcgccctgcctcaggggcgcttgttgaggctccggcccgtcggcggcctgctgcagcggcgtcaggagcctcaactacgacgtcagcaccaccggcgaccgccgcaccgcctgcaactgcctcaagaacgtggccggcagcatcagcggcctcaacgccggcaatgccgccagcatcccctgcaagtgcggcgtcagcatcccctacaccatcagcccctccatcgactgctccagcgcgaactaatctgatcgatcgatcgctaccggccggagggtgtgacatcgcaggccgcacatgcacctgtcgtcggctcacgctgtgcatcttgtgctatctgcgattatgctgaataaaatgagagctagctagctaggtcgatcgatcgatcgccatgcatgacgagactagctagcattgctgctagaacgatgcatgcatatggttgatcg

SEQ ID NO: 813 - DNA, 398 bp, Oryza sativa
  Clone ID: uC-osflcyp016e06b1
aatgattgcctttgctattcgcaattgcaacgggtgttttcaatgcaatcaccgtgatttcgctcagattcaaaaatttttcttcaaactcccaacttttctatcacatcaaatgtttgggcacatgcatagagcattaaatgtgaacgaaaaaaaacaattgcacagtttttatgtaaatcgcgagacgaatcttttgagcctaattacgccatgatttgataatgtgatgctacagtaaacatttgctaatgacgaattaattaggcttaataaattcgtctctcagtttacaggcggaatctgcaatttgttctgttattagttcacgtttgatacttcaaatgtgtgttcgtatacttaaaaaaaattggcacgcgaactaaataatactcatc

SEQ ID NO: 814 - DNA, 410 bp, Oryza sativa
  Clone ID: uC-osflcyp016e07b1
tggacggcaccgtccgtcgcatcggcccggggccctttccgccctccggcggtggctgccaggcccccggcgctgacctcaaggtggagacgagcaccctgctggacgggacgcagctcggggacagcgtggccgtcgacggggcctgcctcaccgacgaggacatcgacgcggcggcgtcgacgctcaccttcggcgtcacgccggagacactgcgccagacgtccctcggcggccggaccgccggcgacgccgggaacctggagcgcgcgctcacgccgtggtcgcgcatggggggccacttggtgcagggacacgtggacgggacgggggagatcgccgcgttccggaccgagggggactcgctacgggtcaccgcgcgcgcgccgtcggagatcctgcggatgctg

SEQ ID NO: 815 - DNA, 144 bp, Oryza sativa
  Clone ID: uC-osflcyp016e08b1
ccaatagtgagggcgagcgaaggccccccacaggaggatcttttagaaggaagtcgggttgtcccaaagacccgcaacgacaagacaaccaggaggggacccagaaaatgattctcacctcgacagcacgcggaaagcaccgac

SEQ ID NO: 816 - DNA, 477 bp, Oryza sativa
  unsure (1)..(477): unsure at all n locations
  Clone ID: uC-osflcyp016f01b1
tttgtggcacagcatgaggcgctggaccaccgtatcctctcactgaaaacctcgagaacggaaggtctcacacaaaccaagatggagatcgctttaaatccactagacatcaccattgcctttgcatctgcatataaagcagcaggtggccactgtgcaggctgcatagcgagaagaagctaggctttgttgtcaacatggcaagagctgtgcttacactgactgttcttgccttcttgtgccttgtggccctcggcttgtccggcagagccaatgccaatgcaacggcggggaggaagatggctggggtgtatgagctgaagaagggggatttctccatcagggtcaccaactggggagctactctcatgtctgtgattcttcccgactccaaagggaatttggctgatgtagtccttggctacgatacagttgctgaatacgttaacgggacggnctacttcggaggactgatcg

SEQ ID NO: 817 - DNA, 435 bp, Oryza sativa
  Clone ID: uC-osflcyp016f03b1
actcatgcattcacacagacaacttcgatgggggcttttttagcgcacactctgtttctaccagaggttgattgtgagtgtatgggtttatatcctccttagataagtgtgttgtggcttggctgagcagaagtcattgcggatcagtagctttgatcaatacagctggggcctggaggaaaaagctaagattgaatccatctaactttgagtaactaccgtgacaaaactgttagcatacgggctacctcaagaactgacctgagttacatgaccacatgagggctagatttgtcggacaaggaaagtcatgcagaaaacaaggctcaaactttttaggttgggattcttagatgcataggctattcattttaaaatttttggttcgtacctaccattattaataaacttcaataaaagaagaacaattttttg

SEQ ID NO: 818 - DNA, 335 bp, Oryza sativa
  Clone ID: uC-osflcyp016f05b1
aatgattcaacagtcccctcctctccaaatcgaggtccttttacccattcgccgtttttaatcggaatcgcggcggatcaccctccgcctccgacgagggttcgacccgatcgactccccctgccccggcgggctcgcgggcggcgggcggggggctgagctgagagctgaattcgggctcgatctgtggccatggacatggcgagcatcgagtgcgtctcctactccgacagcatggatgacgacgaccactatggcgtcggcgtcggcggcgtcttccacctgccacgccccatccttgtcaagccctcctccgccgccgccgccgtcaacgt

SEQ ID NO: 819 - DNA, 404 bp, Oryza sativa
  Clone ID: uC-osflcyp016f06b1
aatggaaccggcaagctgtacccggggccgggggtcttttataagagccgtcttctcggtaccctgggccgccatgggggcgctggagccgtggatgcataaggggaacgagacggaggggagcctgcacatcgcgctcaacgccatcaacgatcctcctcttcatctggcagatccccaccggcctcgagatcgtcggcaaggtcttcgagttcaccacatggccatgaacaaacaacacaacacaacacaatgcagtgctgcaattccattctcctcttaattaggttttcttttgactccatagccgatcttgcgtgtgttcagctggttcaccttccacagtgttcattggttcgtccctgttcaaaaaatatagtgaatgaatgacatgaaagaattca

SEQ ID NO: 820 - DNA, 367 bp, Oryza sativa
  Clone ID: uC-osflcyp016f07b1
tggtagggcacacctcgcacgtcgcacactctacgtgggaaatatatatagacatcctcagagttctagcggagctacacaaacgcgcacagggactgcgacgccaagaccgaatacccgcccggcggcggcgaccgcccgccgaccaaggaggaggcgcaggccaagaaggagggggaggagaagctaggctctgctgccaacatggcaagagctgggctcacactgactgttcttgccctcttgcgcctcgtggccctcggcctgtccggcagagccaatgccaatgcaacggcggggaggaagaaggctggggctgtatgagccgaagaaggggggattctccatcggcgcaccactggggagc

SEQ ID NO: 821 - DNA, 343 bp, Oryza sativa
  Clone ID: uC-osflcyp016f11b1
tcggccatccgccacctctccgccgggcggggggttgtagatgctatgcgagttcggccacgcctgtgcctgctccgagccgtggcgccgtgcccagtacgaccaccaccccgggcctcgctcgccggtcgtcgcacggtctcctcgtggggcggagcggcgaggaccgcgaccgccggagatgcgccgccgccggcgcaccgaaccaggcctcaagggcgggaggaagagcgcgccaccgacgccgcctgccagggggtcgtccgggaacccggggcatggcttcccgccgggggtggatcgggacgcgtcggtggtggcggagaaggtgacaccggcgtcg

SEQ ID NO: 822 - DNA, 252 bp, Oryza sativa
  Clone ID: uC-osflcyp016f12b1
atcggtctaatagtggtgagaatttctgcgggctattttataagctgttccgtggtctccggcaagggggatcatatgtgctagatgcaggcctggaactgcagctcggagctgagaattggtcagatctagggatggtgtacatatatagctcgggggctgattatgccatcaaattctattgaatttatcagatcttttttttcaaataatcaagaaagaaaaagtcaataggctccaatgaatataatg

SEQ ID NO: 823 - DNA, 448 bp, Oryza sativa
  Clone ID: uC-osflcyp016g03b1
acgtgaccctcaacttcacgcaacgaacagggggggttttttaagctaagctgcgcttaagcaccacgcgccctttcgtcatcgtcggcgccggagtttgattccgccggagctagctagcaagaggaagaagaaaatgctggccatattccagaagcaggtggcgcacgcaccggcggagctgaacagcccgcggagcagcgcggcgaagcccaagaaccccgacgagatcctcagggacttccacgccctccaccccatcgaggccttctccacctccttcggcggcggcaccgccctcgcctgcgtcgccggccacgcccgcaatggcctctctggctacgagaggacgccctgcgggccggatgacacctactgcgtgttcatggggaggctggacaacctgagcagcccgatccggcagtacgggctgcgcagccgctccacc

SEQ ID NO: 824 - DNA, 389 bp, Oryza sativa
  Clone ID: uC-osflcyp016g04b1
attctggccgttcagcgcgtcgggggcgctggggggttttaactacctggcgtttggcaccacggacgggctctccgagcagcagatggtcgattgcgaccatgagtgtgattcatcagaacctgattcatgtgatgctggatgcaatggtggattgatgactaacgccttcagccatcttttgaaatccggtggccttgagagtgagaaggattacccctacactgggagggatggcacctgcaaatttgacaagtcgaagattgttacttcagtttagaacttcagtgttgtctctgtcgatgaggatcagactgctgccaaccttggcaaacaagggccacttgcaattggcatcaatgctgcgtacatgcaaacatacattggtg

SEQ ID NO: 825 - DNA, 167 bp, Oryza sativa
  Clone ID: uC-osflcyp016g06b1
ttttgctcgaacgaaacgcgagggtttcgcatgtgcgtctacgcctagaggaaggagggatcccccgcccgtagcccagccatgccgaagaacaagggtaagggagggaagaacccccagaaggtgtagaaccaggcccaacactacaagcccgagctggtgttcaa

SEQ ID NO: 826 - DNA, 396 bp, Oryza sativa
  Clone ID: uC-osflcyp016g07b1
ttatggccggctcctgctcgcaccaactccggggagcgtttgatcaccgccggcagtgaccccggagggggtggcatggaccggaggaccggagcactgaacgtcccgttataccgaggtggccctcccttccgcgtagccgactagctggtccttactacggccaaaaccctggccgtcccatgcgccaacgcgattatctacacgggcgaccgcgtccggggcagcggcgaccctgcgatcgagcggatgacggacgccgcctacctggctcggctccttgccagtaagctcaccgggaaggccaacgcgtgggcggtggatgccgactgcttcgctggttcgtatgcagatgaccgagcacacgatccagccgtggacaccgagggcgacccc

SEQ ID NO: 827 - DNA, 437 bp, Oryza sativa
  Clone ID: uC-osflcyp016g08b1
tctgagcttcgagtggccgacgtgcggggggactttttgacggatttgaattgctctatgactatacttgttgagccaatgatccaaactgggggaccagatctgcattgagatcatatctgaggccatttacgcacaggcatacattcatgctttccagctcagagaaatcacaatttggcagacaatcgagaagttactcgtggctagacaaggtgaggttagggaacatgctgctggggtcctggcaggcttaatgaacggcatagatgaagacctgtctaaggactttggagatcggtcatatgcacaggctcagaggatccttgatacacgggagagaggtgcaaaggcaggccactctggtgctactatccatggtgcagttcttgctttgacggcttcagagctttctgttccaacgacatgccaagctg

SEQ ID NO: 828 - DNA, 408 bp, Oryza sativa
  Clone ID: uC-osflcyp016g09b1
tatcagttaattcctcgcgccacaggccaggggcagctttttagcgcggagttcgctttaagccacacgggcggtgacaccaagtgccgggagccagcttccttctcctggctcccgcctcgccggcgccagagcagacgccggcaaagccgcacggtgacaaggacggcggcggcggagcctactttttctctctcaaggagcacgctggggcaccggcggctctggagcgactgaaggcggctgcggaggagcccgttagatccacgccgctcaggccgaatctggcagtgtggcggttggcggcggtgaaggcgaccgccgcgggggtgacgacggctatggcgaggggccttgggcgacggggacgaagatggcggtcgtcatggagacggcggacaggcttgg

SEQ ID NO: 829 - DNA, 368 bp, Oryza sativa
  Clone ID: uC-osflcyp016g11b1
atcgttctcgcggggcgcgagccgcaccgagggatttattggccgaagatgttggggaccgcgcaccacgacaaccagtcaccggcggcgccgaccgacccgaaccacagctagaagatcttctggcgcagccaacgagaactactgcctcaccgtccgggacggcgcccacaggctcggccccagcaaccccgaggacgagcaccagcactggggcacggccacggggtatagcaccaaggcgaacgacggggagggcatgccggcggtcgggctatcacaaaggacaccggcctcgtcgtcaagcactgcctcggccagggccaccccgtgaagcttgtggcgttgaacacggagcacgaggacgc

SEQ ID NO: 830 - DNA, 496 bp, Oryza sativa
  Clone ID: uC-osflcyp016g12b1
ttgctcgatcgaaacgcgagggtttcgcatgtccgcctacgcctagaggaagaagggatccgccgccggtagccaagccatgccgaagaacaagggtaagggagggaagaaccgcaagaggggtaagaacgaggccgacgacgacaagcgcgagctggtgttcaaggaggacgggcaggagtacgcccaggtgacgcggatgctcggcaacggccgctgcgaggccatctgcgtcgacggcaccaagcgcctctgccacatccgcggcaagatgcacaagaaggtgtggatcgccgccggggacatcatcctcgtcggcctccgcgactaccaggacgacaaggccgacgtcatcctcaagtacatgaacgacgaggcccgcctcctcaaggcctacggcgagctccccgacaccctcaggctcaacgagggcgtcgacgtcgacgggcccgaggacggcggcgaccacgacgactacatccagttcgaggacgag

SEQ ID NO: 831 - DNA, 326 bp, Oryza sativa
  Clone ID: uC-osflcyp016h01b1
tgatcaacatatgccaaggcaaaatctagggcaaagaaggaagccgaaagcaaagctcaggagaaagcagaagcaccaccaagtgaagatgcttctacttcaatgcaggtcgatggtgtggcggagaagaaagcccctgagcccgaaccgaccttccagatcctgactaacccggcccgggttgtcccggcccaggagaagttcataaaattcctggagggcggcaggtacgagcctgtgaagctggcgccctccggatttgtcctcctacgggacctcaagcccaccgagacggaggaactagtcctcaccgacgccccggcaac

SEQ ID NO: 832 - DNA, 478 bp, Oryza sativa
  Clone ID: uC-osflcyp016h04b1
taattctgtgtgttaaatcagttccagtgggacattttcaacctgatgaacgttttctagcgggacgcattggtccaaaagagtacaggctatacagggtcatcgtgaggtatgggtaccgtgatgtgcagaaggatgacatacagtttgaaaaggacctagtcagcagcattgcagagttcatccgcagtggggattctcaccacaacggtgttttggaggacacagacaagtcgtgtgagaaactgtcttccatcagtaatggtattccattgtggatggaggatggagaggtcgatgcttcagcatcccctcataaggagacagatacacagatcatatcaccaaaccgaaagaaagcaaggttcgtgctgtccaagaatgcccaggtggacagcgatatgcgccgggagctgcaggagctcatggatgcatgggaggctggaatgtccttcatcttaggacactcctacatgaa

SEQ ID NO: 833 - DNA, 499 bp, Oryza sativa
  Clone ID: uC-osflcyp016h05b1
tgatcactgttcactttattaaagtgtggggctttttttgaacatctcagttttgtataaggatcctctacatcttacctatccagtgtttaaattcagagtgtggtgcaataatgagaactaataatgtttgaggtatatagtgtgtgcaagatgattgagtgaaacaaattttgtggagcaggcttttgttcccctgtttcaaaaggtagggcttattgtattcttgctgagccattaaattagtcaacttagatttatttaatcaataagttcttacataaatggagagacatataattggcgacaatttgttaaaaatatattgagaaaatttgttcaaaaaaaatcgattggttggtggcttcaagttgagtatagcttctaaatatctagtgaataaaagtaggaaaagtgcaaatgaaatagttgaaaaggactgtgtgaccgaacatgcgtgtctgaaatgtttcttcatcattcgtgaactcctattttg

SEQ ID NO: 834 - DNA, 99 bp, Oryza sativa
  Clone ID: uC-osflcyp016h06b1
attatccgatcgtggtaaggccagacggagggggagtttttaagcggttacgcctataacattcttcaggcagggcgagaaggttctctctttatcatc

SEQ ID NO: 835 - DNA, 321 bp, Oryza sativa
  Clone ID: uC-osflcyp016h08b1
taatggccactcctcttcaattctcacgcactgtccgttttagtgacacacacacacacgaccgctcgctcgtttgccttgctgctgccttagcgagaaaccgggagttagcgagcgagccgtcgtcgccggcgatgaggcaacaacaagcgggaggagttggcgacggggtgagcccgggcaatgtccccgtgtgctactacgggcccgggggccgcgtgccgtcgtcgctggagcggcgggcgcgcgccgccgaggtgctcctgcgctgcgccgcctgcggcctcgccgtgctcgccgtcgcgctgctcggcgccgacc

SEQ ID NO: 836 - DNA, 331 bp, Oryza sativa
  Clone ID: uC-osflcyp016h09b1
tgatggtcgaagactcaggactctcctgcgggggggtttataggctgaccacctcaaccatcactaggagagtccgcggaaaaatgcattcgcgtcgctcgccgttgccatccacctgttggaggcaccgcaggtagctggttggtgggaacctgcaccggtgggcggacagggatgtcattgtggtcccgaggagggagccagctactggatggtaggagaggcagggagaccagtactgatgagatgatcggagcatgggagagagtccttgaacgagaaactgtatggttcgggtagggagggcatgcagggcacctgggggattaca

SEQ ID NO: 837 - DNA, 377 bp, Oryza sativa
  Clone ID: uC-osflcyp016h10b1
atcgggggaacgcgctcttaaccacagggggggggaataggaggggacagttcatggaccgcgccaagacaccgacagtaacactggacatggttgcgcagcgcagtgcaattcatggcacatacaagctcaagtcgcgggagacggagaaaccggagcagcacgccgaccaagatgtgaaagctgacaggagcctgtcttgctagctggagtacgacagatcgacccaggaggcagaaaagggcaaaagtaaagacagtgtataaccgccgcacaagggagattcatctactcccacagacttgtgcggagacacgcagttaccagattagtcgagaacgaagttgcagaccataccgaggaggagtccctggcca

SEQ ID NO: 838 - DNA, 245 bp, Oryza sativa
  Clone ID: uC-osflcyp016h12b1
ttttcgaccacgcttgcttcgccatcccgcgtgggcatttcccgccgccgccgtcgcctcctgctcgaggtcgcggctgcgttgccggtgctgcaggaggtgcttcgggggggagatctcggtggggtttgctgcttgctgctcgaggtggtggcagttgaggaggaggaggaggttgctgaggttggcgaggtggggtggggcttggagtaagcggagggggaggaggagaggctctaatgcat

SEQ ID NO: 839 - DNA, 310 bp, Oryza sativa
  Clone ID: uC-osflcyp017a02b1
tgtaacccggcggcgccaataagctgtacgaggccaaggtgtgggagagggcgtgggagaacttcaagcagctccaggatttcaagcccctcgacgacgccaccgcctaaacgtacatagatcatcgtccggctgctgaatcatcggcttaaagcagagccatccagtgatccaattatctgctactagaacatgttactggtcttgctggaaggtgtaatatgatgaataaaacctgctgctttgccgggtcataatagacatatcacttctgtatttcctagtgcaatacacaacattttcgcagtct

SEQ ID NO: 840 - DNA, 464 bp, Oryza sativa
  Clone ID: uC-osflcyp017a05b1
ttctccatccaatttttcaggtgattgtattctgtactactgcaatggtcaccaaacttgttgctgaagttctttcccagctgaaactgaatataagagagatccattcgagaaagtcgcaatcagcaagaactaaggtctcagatgaatttaggaaatcaaagggtctgatattagtgagttctgatgtatctgctcgtggtgttgattatcctgatgtcacccttgtcatacaggttgggctgccagctgatagagaacagtatatacatagacttggtagaactggacggaaaggcaaagatgggctaggtctcttactgttggctccctgggaaacatactttctgaataggcgtcaagatttgtctggatcacaagctggggtaccttacatttgattcgagcattcagacaggagtcaaagatgcactccggagagtggaggacaagagcaaggaatc

SEQ ID NO: 841 - DNA, 369 bp, Oryza sativa
  Clone ID: uC-osflcyp017a09b1
ttttgcctgaatcacgcaacaatggcttggagatgcagtccgtaaataacaaaggactcgttgaagaactagaaaagttgcttgatcgcttgcgaattccacaggagtttgcagcatcattaactgggggttcgtttgaagagtcacgaatgctgaaaaatgttgaggcatgtgaatggttgacaggggccattcgcagccttgaagtgccaaatctggatccatgctatgttaacatgcgagctgttagggaaaaaagagcagaactggagaaactgaagacaacttttgttcgacgcgcatcagaatttttgaggaactacttctctagcttggcggactccatgataagtgacaaaagctactttt

SEQ ID NO: 842 - DNA, 367 bp, Oryza sativa
  Clone ID: uC-osflcyp017a11b1
ttaaacccctctcactcccactaccatggatccttgcaagttccggccgtcgagctcgttcgacacgaagacgacgacgacgaacgcgggagctccggtgtggaacgacaacgaggcgctgacagtggggcccagggggccgatcctcctcgaggactaccacctgatcgagaaggtggcgcacttcgcccgggagcgcatcccggagcgcgtggtccacgcccgcggcgcctccgccaagggcttcttcgagtgcacccacgacgtcaccgacatcacctgcgccgacttgctccggtccccgggcgcccagacccccgtcatcgtccgcttctacaccgtcatccacgagcgcggcagcccggag

SEQ ID NO: 843 - DNA, 403 bp, Oryza sativa
  Clone ID: uC-osflcyp017a12b1
ttttcccgtcgacggcgacggcagcgtcggcagcgtcaggcagttcaacttcacctcagccatgccattcagccacatgaaggagaggctggagttcctggacgtggacaagtgcgagtgcaagtcgacgctggtggagggcggcggcatcggcaaggcgatcgagacggcgacgtcgcacatcaaggtggagccggcggcgaacggcgggagcgtcgtgaaggtggagtccacgtacaagctcctccccggagtggaggtgaaggacgagatcaccaaggctaaggagtccctcaccggcatcttcaagaaccgcgaggcctaccttatcgccaacccggacgcttacaactaaatcgttatcatgcctatgcccccaaaatatgtttgataatatttgaac

SEQ ID NO: 844 - DNA, 486 bp, Oryza sativa
  Clone ID: uC-osflcyp017b01b1
ttttgacgccgaggaggccggccatggcggcgccgcccaggcccataccctccatccaccggcaaccgcccaagccaaccaccacccacgtcgcccgctgcttccgcgacccgcccaaagcccccgacaccaacagcaacaccaacccgctcctctccctcctctccgccgtgcccgactgggccgacgccgtctccgagcgccgcatccgcgaccgccgcccgctctacacccacgccgactggcgggagcaccgcagctcccgccgccacctgcgccacctcctctcctccctcaccttccgcgtcatcctctccctcgcgccccccgtctccgccttcaccgccttcgccgtcggcattgtcacctacaacacccttcttcccgtctacgccctcaccgtcttcttccctccctaccaggttaccgcccccggccttgcccttctcctcgctttccgacccggggcttctacggccgtttgac

SEQ ID NO: 845 - DNA, 362 bp, Oryza sativa
  Clone ID: uC-osflcyp017b02b1
ttatggtgttagcaaagggtctggatttgttgcattttcaactcgtgaggaagcatctcaagctttaactgaaatgaatggcaaaatgatatctggaaagccattgtatgtcgcatttgcacaacgtaaagaagacaggaaggcgatgttgcaggcacaattttctcaggtgcgccctgtaccgatgacaccttccatggctccacgtcttcccatgtaccctcctatggctcctcttgggcagcaactcttctacggacaagctccacctgctatcatgcccccacagcctggatttggtttccagcaacagcttgttccaggcatgaggcctgggggtgcccatatgccaaattactttg

SEQ ID NO: 846 - DNA, 426 bp, Oryza sativa
  Clone ID: uC-osflcyp017b03b1
ttttaatcagcacggatgataagatccacgatgagcttgacactgatgtgctgggtcacggcgagcctgagagaaacgatctggttgagtactttggtgagcagctttgtggctttgcatttactgacaatggatgggtgcaatcctatggatcccggtgtgtcaagccaccaattatctatggtgatgtgagccggcccaacgccatgactgtgctctggtccaagatggcgcaaagcatgacctatggccccatgaagggaatgttgactgggaccgacacaatccttaactggtcttttggcaggaatgaccagccgaggtttgagacatgctaccagattgctgtcgccatcaagaatgaggacgaggacctttagggtggtgggtaccgggcatccaaatcgcttaggctgatttgagaga

SEQ ID NO: 847 - DNA, 424 bp, Oryza sativa
  Clone ID: uC-osflcyp017b04b1
ttcgcccgccgccgcccggcgtcgtcgtcgtgtgcacgctccctcgccaccgcgcgccctcccggcctagcccgccgggcccccgctgctaccagagagggcgatggcgacggcgagcggcgtctccactcccctgcagctcccctccacgcggcgggtgggcggctgctgctcccgccccggcagcccggccccgggcaagaacgcgttcccgcggagagcagccggtggtgccccggcaggtacattttttttgaagagagattctgtatataaagaacagagttgtcatcaatttttaccattgaaacaaagcggaaggttgcaagcagcagttctgcctgttactccacctttgttagatgatgaagaaaaaccggagcaaatgtgtgaagaatatggattcaaacacattggagaacag

SEQ ID NO: 848 - DNA, 409 bp, Oryza sativa
  Clone ID: uC-osflcyp017b06b1
gttccggcgccgccccctccggcgaacattccggtgaacttgccggccaacgtgccaccggagatgccagccaacttgccggccaacgtgccaccggagatgctggccagcttgccggcgaaccttccggccaacgtgccaccggagatggtggccagcttgccggccaacgtgccaccggagacgctgtccaagatgccggacttctccggcttgaccgacctgtcgttcccgccgatgccgtcggcgaagatgccgtcgatgccgcacaacatcacgctcttcgggttcgacgtgcagatccccgagtttatcaacaagatggtggatgaagaaaccacttaagcttgatcgagcttggcaatggcgatggcgtcatcattgcctcgagtttttgtgacatgggtgg

SEQ ID NO: 849 - DNA, 515 bp, Oryza sativa
  Clone ID: uC-osflcyp017b07b1
gtgaacggcatactggagttcgcggctgagcaaacgcagctgtacgagtacctgtggcagcacgcgttcatatcggactcggcgcacgcgctcatcacgcagagctgcaagtaccccgacgaccacccgtcggcgctctgcgagtcggcgaggaaagcggcgtatagccggattggcaacatcgacatctacaacatatactcgtccacctgccacgaacagaaagtcaggccctcagcctccaagtgcatggatttggctgatccgtgctcccaatacttcgtggaggcgtacatgaaccagccccaggtacagaagacgatccatgcgaacacggagttgaagtatccctggactagatgcagggtttacaacctagaccacttcggcgactcgccaaagtcaatgctgccatacatcaaggcagtgataaccggccgcatccgcatctggatattcagcggcgacttggatgcgatggtgccggtgacggcgaccaggcagtcgatggagag

SEQ ID NO: 850 - DNA, 404 bp, Oryza sativa
  Clone ID: uC-osflcyp017b08b1
gtgcgccgccctttttttttttttttatcacgtggtccaaaacatactattccacacacacatatacatagattttttaagttctacatatataggaggcagagaagttccacacgaattttataggaatccccacatctaaaaacacacatcacagaattcctataaaattcctgcgttccaaaggaggccttgcggcacgtagccgagacgacaacgaactaacgctaattaaattactactatatatgtgtacgtcacaaatagtagttcatccatctcttcccttttaaatgcgatgcggtgcatcgatcaagcatctcgatatcgatctcgaacagaaagtagcagtagtagtactggcagtagtaattaattaggattcttgggggttagctagatag

SEQ ID NO: 851 - DNA, 260 bp, Oryza sativa
  Clone ID: uC-osflcyp017b09b1
acgcgcgcttcacaagcatcctgatccacgacacgggctgcttatcacgccagcaggggacgaaccccaacgcaacatccataagaggtttcaacgtcgcacacaccatcaaggtgcatgaccagggccggcgcatacataccgtcttgtgtggcgacattgttgctgtagaggggctacactgcgaagggcacatggagaaaccgagatgaccggatgaactcccacgtgaaggctctacaccgggccgactagaggtt

SEQ ID NO: 852 - DNA, 455 bp, Oryza sativa
  Clone ID: uC-osflcyp017b10b1
atgaaagatatgaaagaactgctccaagagaaagtctatgtgatcaatgtcttaggttacatctcttacaactttgtcattggtgcctattcctactggggccctaaggctggtcaggatatctacaatatggcgagtgcagatataatgtttggtggaataacaattgtctgtggaatatttgggactctttcagggggtttcattcttgacaagatagactcaacaatatctaatgctttcaagcttctttctggtgcaacttttcttggagcaatattttgttttggtgccttttgtttcaagagcctttatggattcatacccttcttttcagtaggagagcttttggtctttgcaactcaggccccagtaaactatgtatgccttcattgggtaaaaccaagtttgcggccattatcaatggctatgtcaactgttgcaatccatatatt

SEQ ID NO: 853 - DNA, 446 bp, Oryza sativa
  Clone ID: uC-osflcyp017b11b1
ttaacgaccatcgttggcagctgctggcaatccggtacttgctcttctgtttctatgggttcttagctggggacatgtaacggcggaaattgatatcgccaacatgacggcgctacagaaacatgtttcgttcttcgaccggaacaaggatggcattattactccgtcggagaccattgaaggggttgttgcaatcggttgtgacttcgcatttgctagagacctagccgccagtgtgcatgctggtcttggtcctaaaacaagccccgtactctctcattccctcccataactctaatccaaaatcatataaaaataatgacttgtttattatgaatttggtccaaaatagagtaactagatatgctatttaatttattgtacacaagggaaaaattcacccggtattggttccgcattcaaatgcgcagaaggatgcaccatta

SEQ ID NO: 854 - DNA, 462 bp, Oryza sativa
  Clone ID: uC-osflcyp017c02b1
gtgaagtattcggaaagaagagaaggaaaaaaagaatttttagagagaggaggaaaaaaaatatccccaatcccatcatcccttcacccacccgcacgcgtctcctccgactccgatccgagctccagatctgcggcgccggcgaccaacctctccggcggcgggggcggcggcggagatccacgatgccttcgtcggagcagggggcctcgcccctgcgccgcctcctccgcgtcgacgccctcgtcctcccctccgcttgctcccaccgccttaagccttggtctctccatccccacctcctctcatcctcctaacgccatccaatctctcttctccccgtctctttctcctgctccccgttgccctcccatttcttccccttttcttctcgtagctatagggtgatacacttctctgattattggtgttgttcttcccgtgctgatttggatttaatta

SEQ ID NO: 855 - DNA, 469 bp, Oryza sativa
  Clone ID: uC-osflcyp017c04b1
gtgaagctccacggtgccgccgagctcaaccttggcagattgagggacggtgtcaacctcggcggcggattgaggcggcccctcttctccaccccttatcggtgaacacagatgcaagtggtgtgggtcgacgactgcagatcgagcgatgaataacatctcatttggtcatggatcctgacgggtgagatctactcagctattttgcattcgtgcatggtgggtaccgactcaccatcagcctctccaccacttacattttcctggtttttcctgcttagcagagtttgatcgttgcgaagtctctaggccgcatcccgtgcagctgagcgcaactggcgctctggagactcggatctggtgtacctgcgggtcagccatcgtttagagagcaatcttctttatactggaagagaaatcatggcatctatggaagacattggaagtgcattaatccccctagtgggta

SEQ ID NO: 856 - DNA, 261 bp, Oryza sativa
  unsure (1)..(261): unsure at all n locations
  Clone ID: uC-osflcyp017c05b1
cttctttcccctttcccgcaaggctcccacgctgacgaaatcgacgccgatttcccgaaatccccaatccccaatccagaatccactcgcttttcgataaaatttctgttgattgcgtcgaaaccttcgcaatcctctcgcacgcatcacgccttgcgcgccgcatctcgtagccctgaattttgatttgattctgctgcctccggcgcgcccctgattggcgaggaggcggcggctggtttgtggtggnttgcggccatg

SEQ ID NO: 857 - DNA, 453 bp, Oryza sativa
  Clone ID: uC-osflcyp017c07b1
tgttagtggactctcaaggagaacagggaggcattctccaggatcttgtttcgtccccgcatcctgatcgatgtctcaaagatcgacatgtccgcaactgttcttgggttcaagatatcaatgcccataatgattgctcccagtgccatgcagaagatggctcaccctgacggatagtatgcaacagccagggcagcttcagcagcaggaactataatgacactgtcatcttgggctacttcaagtgttgaggaggtcgcctcaactggaccaggaatccgtttcttccagctatacgtgtacaaggacaggaatgtggttgagcagcttgtcagaagagcctagagagctgggttcaaggcgatcgcactgaccgtggacactccgtgactgggacgcatggaagctgccatcaagaacaggttcgttctgccaccatactcgacactgaag

SEQ ID NO: 858 - DNA, 323 bp, Oryza sativa
  Clone ID: uC-osflcyp017c10b1
tttaaaaaaaaaaaaaaaaaaaaaaaaaaaaaaaaaaaaaaaaaaaaaaaaaaaaaaaaaaaaaaaaaaaaaaaaaaaaaaaaaaaaaaaaggacaccagggggggcgatcgggggggtccgttctagggtacccggggttccctccccgggcttgggccttttagtctcttttatggggctccttgttccgcatctctgggccgggggctcccgcggcgctaccggggaaacccctggagttacccagcctttttcctttgggcggtatccccttttggccggctgggatgatggccaaaaggccctgccgacaggcctttt

SEQ ID NO: 859 - DNA, 233 bp, Oryza sativa
  Clone ID: uC-osflcyp017c12b1
atttgatctgtgtgatctgagtgagcgagtgacactcctctgcaggagggatcttggcttggctcgattcggtggcatgagcaggactttgcggcaaggtactccaccaccacccacaacaaggccatgatccaccaacaccacaaaaccaacaccaccccgacgagctcaccgactcctgcaagcgacaacaactcacccgaacttctacaacgcctactccggaaaccaca

SEQ ID NO: 860 - DNA, 431 bp, Oryza sativa
  Clone ID: uC-osflcyp017d06b1
ttttacgcgtgggcaaaattgtgctggattacaggagctctggaggaatggagatggcggtggagagcggcgagaacggcggctgcggctgcaacacctgcaagtgtggcaccagctgcagcggctgctcctgctgctcctgcaactgaatctatcgtcgtcgtcgcccggctgcatgaggatttatcgtatggatgctgctactgtcgatcagagctttgatcgaggccttaatttgcttgcattagtacccagcttatatgtaggcaggccttgccttttgctctgacgcctaaataaaaccgtcgtcgtcgttgtcagtgtgtgcgtgtgtcgatcaatgttggatggatccctagctagcttggatggatcatctatcatcatggtgatctcatcatgtactcctgctccatctcctcatgcgtgcc

SEQ ID NO: 861 - DNA, 461 bp, Oryza sativa
  Clone ID: uC-osflcyp017d07b1
ttaagaggacgtcggagaagatgatgggcggattcctctcccgggtcctcctgttggcctttggctacgcctatccagcatatgagtgctacaagactgtcgaactgaataaaccagagattgagcagctcatattttggtgtcagtattggattctagtagctctgatgacggttatggagagatttggagattttacaatatcatggctaccattttactcggaagcaaagctgatgttctttatatacttgtggtaccctaagacaaagggaactacctacatttatgggactttctttaggccatatatttcacagcatgagaatgaaattgaccgtaatttgcttgagttgagagctcgagccaccgatgtagttgtcctttattttcaaaaggctgctactgtaggacagaatacattctttgacgttttgaagtatgttggtttgcaatcacca

SEQ ID NO: 862 - DNA, 406 bp, Oryza sativa
  Clone ID: uC-osflcyp017d08b1
ttatggttttcagagacgtaccagagccaacagcagcagcaggctcgccggacggccagccagccatggcgtcctacgacaaggccatcgagtcgtacaagagggccgtcaccacggcggcgtccctggcggcgtcggcgatgctggtgcgcggcgtcgtgaacgagctggtgccgtacgaggtgcgggacctgctcttctccggcgtcgggtacctgcggtcgcgcatgtcgtcccagcacacggtcatcatcgaggagaccgagggctggaccaacaaccagctctacgacgccgtcaggacgtacctcgccaccaggatcaacaccgacatgcagcgcctccgggtcagccgcgtcgacgagaccaagagcatgatgttcagcatggaagaaggcgaggagat

SEQ ID NO: 863 - DNA, 287 bp, Oryza sativa
  Clone ID: uC-osflcyp017d10b1
gtcgcgccttctcctcctccttcctctcctccccattccgccgcccgccactccaccccgcccgctccttcgttcccccccgcgccgccatggcatcctccgccgcgccgttccacatggtccagatccagcgcgacgacacgacttttgatgcctatgttgttggaaaagagaatgctcctggaattgttgctctgcaagagtggtggggggttgactatgagatcaagaatcatgctgtccacatttcccaaattggtgaaggatacagagctctcattccagat

SEQ ID NO: 864 - DNA, 78 bp, Oryza sativa
  Clone ID: uC-osflcyp017d11b1
ggaattcactgaccgacccacgcggccggtaacctccatcaacacctctccacaaaaggggcaggaggcactggagca

SEQ ID NO: 865 - DNA, 458 bp, Oryza sativa
  Clone ID: uC-osflcyp017e01b1
ttcttcttccccccacctctgcggcggcggcgggcggcgagatggcgaagtcgctgcggtcgaagcgggagaagcggctgcgcacgctgcggcgggagatcgcgcagcccttctacgacaagaaggaggcggccaaactcgccgcgcaggccgccgcgctcgaggcgcccgcgctgccggtccgcgcgcctccgccgccgtccaaggattccggcggctcccgcgccgcctccagctcggcatcggccatggacgttgagatggcggatgaaggaaataacaagtccaagtccttcttgaagccaattggtagcattagcaagaagaaggtacaacttcacttgaagatcaagaaagataaaagaaaagctaggaagaaggggaggtttagtaaaaagtaggtgtcaaagcttactctgttatgagaaccatcattttggttagtttggacaatgcat

SEQ ID NO: 866 - DNA, 416 bp, Oryza sativa
  Clone ID: uC-osflcyp017e02b1
tttaaagaaaggtgggagtctttaggtttctactcctaaaaattgtttctttcttatgtgcagcagtcggtgtaactaatgggggagatgaaccagccgccgccgccgccggtggccgtgccgccgccgatggtgatgcagccaatcatgcatccgcccgtcggcaccggcgccgtctttccgccgcacgagcagctccaccatctcgcctactgcgttcactccaaccctttctgggttcaggtggccgcacttgcattccttcactatcttgtgacgctgggttctactgtcatgcttgcatcaactattgttctgcaatgggtggtaccccaggggatatggctcgtgttatcaaacctttctatttatgagtggcatcaatactcttctccaaacacttgttggaccgcggc

SEQ ID NO: 867 - DNA, 460 bp, Oryza sativa
  Clone ID: uC-osflcyp017e03b1
tttaaacaaacccctctcactcccactaccatggatccttgcaagttccggccgtcgagctcgttcgacacgaagacgacgacgacgaacgcgggagctccggtgtggaacgacaacgaggcgctgacagtggggcccagggggccgatcctcctcgaggactaccacctgatcgagaaggtggcgcacttcgcccgggagcgcatcccggagcgcgtggtccacgcccgcggcgcctccgccaagggcttcttcgagtgcacccacgacgtcaccgacatcacctgcgccgacttcctccggtccccgggcgcccagacccccgtcatcgtccgcttctccaccgtcatccacgagcgcggcagcccggagacgatccgcgacccgcgcgggtttgccggtaagttttacacccgcgagggcaactgggaccttcttggcaacaactttcccgtttttt

SEQ ID NO: 868 - DNA, 480 bp, Oryza sativa
  Clone ID: uC-osflcyp017e04b1
ttgtttatgactggccacaacactgttcatcttgcaattctgttctggaagctggaagcgaagaaactacacgattgggttgcttgcatgtgatgcacacaagatgtttgatctcacacatacaaagttattcaacccaaactgcaccagctggatatgtttgtccttcatgttctacacctatatggcctccttcaactattaaagatactggctcgcgccttcactctaaactaaaggaagcaatagcccagactggattggagaagaacgtatttggaaatcattttgtgacaatgcctaaagctgatactcgcacccctcctgcttttgcttcagatcctcttaaacgtgtatccatttttggtgatagagaatcaaatggtgcaaacataatcaattctgctatagatgcacatgtgcaatctggtggaatgtattcctctgctactgtgggatctgggacacctagtcacgttg

SEQ ID NO: 869 - DNA, 308 bp, Oryza sativa
  Clone ID: uC-osflcyp017e06b1
ttttccttcccctccgccgccgcacgccgccggcatgggtatcgacctcgtcgccggcggccggaacaagaagaccaagcgcacggtgcccaagtccgacgatgtctacctcaagctcatcgtcaagctctaccgctttctggtgcggaggaccaagagccccttcaacgccgtgatcctgaggcggttcttcatgagcaagaccaaccgcccgccgctctcgctccgccgtctggtcaggttcatggagggcaaggagaaccagatcgccgtgatcggaggcaccgttaccgacgacatgagggtct

SEQ ID NO: 870 - DNA, 481 bp, Oryza sativa
  Clone ID: uC-osflcyp017e08b1
tttaatcgcagagaaaaaaaaatctcccctcgaagcgaagcgtcgaatcgccttctcaagatgcagatctttgtgaagaccctcaccggcaagaccatcaccctcgaggttgagtcctcggacaccattgacaatgtcaaggccaagatccaggacaaggagggcatccccccggaccagcagcgtctcatctttgctggcaagcagcttgaggatggccgcaccctggccgactacaacatccagaaggagtccaccctccaccttgtgctcaggctcaggggaggcatgcagatcttcgtcaagaccttgactgggcagaccatcacccttgaggtcgagtcgtctgacaccattgacaatgtcaaggccaagatccaggacaaggagggcattcccccggaccagcagtgtctcatcttcgctggcaagcagcttgaggatggccgaccctggccgactacaacatcagaaggaggct

SEQ ID NO: 871 - DNA, 400 bp, Oryza sativa
  Clone ID: uC-osflcyp017e09b1
tttgtcctccaccaagatccccttcctcctcctcgccgtcctcctcctcctttccgtcgccttcccagcggaggtgatggcaggagggcacgggcgcggcggaagcagcggcggcggcggaggggtggccggcggcgggaacctgaggccgtgggagtgctcgcccaagtgcgcgggccggtgctccaacacgcagtacaagaaggcgtgcctgacgttctgcaacaagtgctgcgccaagtgcctgtgcgtgccgcccggcacctacggcaacaagggcgcctgcccctgctacaacaactggaagaccaaggaaggcggccccaagtggccctaagaagcaagccttggttcttttcttctttttttttaccctatgaataaataccttcttctacta

SEQ ID NO: 872 - DNA, 448 bp, Oryza sativa
  Clone ID: uC-osflcyp017e11b1
ttttgagttaattgctagaagaatgctatgatgtccttccctcccttgcaaggccatgtaacagcatacaattatacttctgttgcaggtactggctgtctgttggtgctcagccatcagatcctgtgcagcgcatcctttttcgagctgggcttctgcctccacctccaatgctagctatggctcgaaagggtggacctcgtgataggcgcccaattcatccgatgactgggcgccccttggatcttgagggtgtcacggttgttgatgactccaatgttcccgaaggtggtgctgaggaacctgtgtcagaagagtgatgctgcagtaggtctccacttgtttgttgtgcctctgataagatcatgagtactgtacaatatggaaacttcctaatcatgtaatcttccattgttttctataatttacaaggtccgagtgctgcact

SEQ ID NO: 873 - DNA, 361 bp, Oryza sativa
  unsure (1)..(361): unsure at all n locations
  Clone ID: uC-osflcyp017e12b1
ataaccttagccctcgtgcggctgtcgaagaagctaccacgtgcactggctgctcttcggccgcgagctcgggcattttcaaaactatgaaggaaaacatcatgaagaagagcatcgtgaggcacatgaagctcgagatcgaggacgaccacagggtgggcgcattgtacgacacgatgatctctgacgaggccagtgacgatgctgtgggctaggaattcaaggtctatggctctaggatcatgggggtgctgtgacaaggaccgttagggtatcagcagggtagggctcagtgatgaagngtgtcccccttcttctttacaggggcacaccttgctctcgtgggtatggcaagcttgat

SEQ ID NO: 874 - DNA, 432 bp, Oryza sativa
  unsure (1)..(432): unsure at all n locations
  Clone ID: uC-osflcyp017f02b1
gtgtgaccaagtttggccactcggtcttcactaggctacacatgtggatgaggacgtggcaccgaatatgccgaacatgtagcattgtaaacgcctcacaaaagaccgtacattagggaggggattaggcaacaaaagctcgtcgtccatccgcagatacggaactactcccctatccaacacctccgagtccgagcaactcaagatggcgtcgtggtcgtcgcccgtcgccgccgccgccttgcaggtccatttcgggtcctcctgcttcttctccgcccgatcgccacgacagaccctcctcctaccacctctcngccgcaaccctacactgaccatccagccccggccccattccttccggaacatcaactccttctcctccttcagctggatgtgccacgccgtcgccgccgaggtcgaggggcttaa

SEQ ID NO: 875 - DNA, 437 bp, Oryza sativa
  Clone ID: uC-osflcyp017f03b1
acttggtgtccgcctcttgtaatagcccatcattcacaatttgggacgtttctcaagggttgggaatgcctataagacgtggattaagtagtatatcattagtgcagtggtcacctagtggagattaccttttaactgctaagcttgatggaacttttcacttatgggaaacaaatacatggacgtcagaaccatggtcttcatctaatggatatgtatctggagcaaattgggatccagaaggccgtattgtgttattgtccttttctaactcaacaacactgggctcaattcacttctcatcaaaaccaccatctttagatgcccatctcctaccagtcgaacatcctgaaatttcctctctgattgtcagccgaggcatagataaattagcatgggattcttcaagagagcgcttggcattatcgttcaaagat

SEQ ID NO: 876 - DNA, 350 bp, Oryza sativa
  Clone ID: uC-osflcyp017f04b1
attaaacctcatcatcagtgtgctgctcggattctacctgggagtaaacccaagtcaccttctctgtcataggagaggtaattaactgaccggagagagagatgtcgtcggaggttgagaggaagacggtgtgcgtcaccggcggcaacgggtacgttgcttcattggtcgtcaagatgctcctggagaagggatacgctgctcagacaaccgtcagagatcccaataacccggagaaggtctcccatttcaaggacatggaaaaactcggccccctgaaggtctttcgcgccaacttggaggatgaaggcagcttcgacgaggcccgtcgcggctgccactacgccttc

SEQ ID NO: 877 - DNA, 491 bp, Oryza sativa
  unsure (1)..(491): unsure at all n locations
  Clone ID: uC-osflcyp017f08b1
ttctcactctcgaatccttcgtacagttgttcagcatgcttgctcgcggtatccgtctcttgtaccatgcagtaatgcatggactgctttgtccagaaaaatacaagcagcaaaacaagcagaagcaatccaaaaaggtacatccaaaaaaaaggtctttgtgatctttggtggtgacacttctgagcggcaagtctctcttatgagtggcacaaatgtctggcttaatttgcaaggctttgatgatcttgacgtgacaccttgtttgcttacatctggaaatggttattcttccttccacaaccaaaatatgaatggaatttcacgtgatgtatggacattgccatattcgttagtgctacgacataccattgaagaagttaatgccgcgtgtattgaggcaattgatccagaacggatggaattaacatccngtttacgtgaccaagtaatgaatgaacttggacagtcattaagcaaatatgattggt

SEQ ID NO: 878 - DNA, 404 bp, Oryza sativa
  Clone ID: uC-osflcyp017f12b1
ttcatcgccatctctctcagctctcacagctcactgcatcaatggccgcggccaccatggcgctctcctccccggtgatggcccgcgcggcgccgtcgacctcctccgcgctcttcggcgaggcgcggatcaccatgcgcaagaccgccgcgaagcccaagccggcggcgtcgtcggggagcccgtggtacggcgccgaccgcgtcctctacctcggcccgctctccggcgagccgccgagctacctcaccggcgagttcccgggcgactacgggtgggacaccgcggggctctccgccgacccggagacgttcgccaagaaccgggagctggagggggatccactcccggtgggcgatgctgggcgcgctcggctgcgtctttccggagcttctcggccggac

SEQ ID NO: 879 - DNA, 412 bp, Oryza sativa
  Clone ID: uC-osflcyp017g01b1
gatccatctgacggttagttccaagggaaagaagaaatggaggcttcacgcaaggtgttctcggccatgcttctcatggtgctgctgcttgcagccactggtgagatgggcgggccggtgatggtggcggaggctcggacgtgcgagtcgcagagccaccggttcaagggcccgtgcgcccgcaaggcgaactgcgccagcgtatgcaacacggagggcttccccgacggctactgccacggcgtccgccgccgctgcatgtgcaccaagccctgcccctgatcgatgaaccagccgctagcgcagcagcttgtgccgccacctcgcgcatgtgccatcgtgtcgatcgatcggatgctagctgccctatgaatgaataaaagtgtgtggcttatgcgtggttttctcttgg

SEQ ID NO: 880 - DNA, 417 bp, Oryza sativa
  Clone ID: uC-osflcyp017g05b1
ttttctgaagtgaaacagcaaaaaaaatcaaacaaaaagaaaaaatattccccatctgtgaaattcgcaaaaccctagcgcggcggcgatgtcgaacacgagggtgttcttcgacatgaccgccggcggagctccggcggggcggatcgtgatggagctgtacgcgaaggacgtgccgcggacggcggagaacttccgcgcgctctgcaccggcgagaagggcgtgggcaagagcggcaagccgctgcactacaaggggagcaccttccaccgcgtgatcccggagttcatgtgccagggcggcgacttcacccgcggcaacggcacgggaggggaggcgatctacggcgagaaggtcgccgacgaggtgttcaagttaagcacgacagccccggcttctgtccatggtgaacgccg

SEQ ID NO: 881 - DNA, 407 bp, Oryza sativa
  Clone ID: uC-osflcyp017g06b1
gtttcactttgtggttctggtattttttgcattcttgctgattccctgattaaaatggagatctactcagactatgtccaggcacatcttgcacctagtggttacatgaaaatcccaactgatatttcagattatttaaagggttgtagatttcttccaaagcttaacaatgagttaccaggtgaaagaaatgccacctacaaggaaaggtttagcagcttagagaatttgatattaatcatgtttcaggatgacgctgtcttgatacctcgggaaacagcatggtttggttactatccagatggaggtttcgatcctgtcctgccccctcagaagacaaaagctgtacatggaggactggattggtctcaagaccctggatgatgaagggagaggtgaactttgtg

SEQ ID NO: 882 - DNA, 487 bp, Oryza sativa
  Clone ID: uC-osflcyp017g07b1
ttcgagtcggcggcgacaacaaatcgaaaatcgaacgggagaaattctctctgattctctctcgcgggcggcggaagcaatcgtagttagcagaggccggcgagcgagccgccaccggcgatgggcgacagccagtactccttctccctcaccaccttcagcccgtcggggaagctggtgcagatcgagcacgcgctgacggcggtcgggtccggccagacctccctcgggatcaaagctgctaatggagtagttattgccaccgagaagaagttgccttctattttagtggatgaaacatctgtgcaaaagattcagtcgttgactccaaatattggtgtcgtctacagcggcatggggccagacttccgtgttttagtgaggaaaagtcgaaagcaagcacaacagtattatcgtctgtacaaggaaactatacctgttacacagctagtccgagaaactgctgctgtcatgcaggagtttacac

SEQ ID NO: 883 - DNA, 188 bp, Oryza sativa
  Clone ID: uC-osflcyp017g08b1
ctcttttcctcctcggttcggttccgcggttcgtctagggtttagtgggttgagatggcggcgccggatgtcgagtaccgctgcttcgtcggctgactagcctgggacatcgactaccgttctccttaaggtcgtattgtccacatacggtgagatcctcgactccaagatcattaacgacagggaga

SEQ ID NO: 884 - DNA, 346 bp, Oryza sativa
  Clone ID: uC-osflcyp017g11b1
ttaccccaaaaccctagccgccgccgccgccgcggcccccaaggccccgacggcgccggccgccgtctccttcccggcctcacatgccgcctgcgcgccgctcgccgcccgacgccgcgcggtcaccgccatggtcgcggcgccgccggccgtcggggccgccatgccgtcgctcgacttcgacacatccgtcttcaacaaggagaaggtctccctcgccggccacgaggagtatatcgtgaggggtgggaggaacctgttcccgctgcttcccgaggcgttcaagggcatcaagcagatcggagtgattggatggggctctcaggggcctgcacaagcccagaac

SEQ ID NO: 885 - DNA, 428 bp, Oryza sativa
  Clone ID: uC-osflcyp017g12b1
caacgaccatcgttggcagctgctggcaatccggtacttgctcttctgtttctatgggttcttagctggggacatgtaacggcggaaattgatatcgccaacatgacggcgctacagaaacatgtttcgttcttcgaccggaacaaggatggcattattactccgtcggagaccattgaaggggttgttgcaatcggttgtgacttcgcatttgctagagacctagccgccagtgtgcatgctggtcttggtcctaaaacaagccccgtactctctcattccctcccataactctaatccaaaatcatataaaaataatgacttgtttattatgaatttggtccaaaatagagtaactagatatgctatttaatttattgtacacacgggaaaaattcacccggtatttgttccgcattcaaatgcgc

SEQ ID NO: 886 - DNA, 438 bp, Oryza sativa
  Clone ID: uC-osflcyp017h01b1
gtacaactgaaaatgtgttactgtccagcatgccacgtgatgagtttgacatcaatgggtatacaagcgacctccacaggctggaatcgagaaccacgtcagagagattgctatccgtgacagagactgggaaagttcctgatttcgaaggggtgcagccattggtgctgaaagggcttatgtctagtgttagccatggatctgcaattgaggtgttatctaggattaccatcccaacatgtgattctatatttgggagtcctgagacaaggctgttgatgcacatcacaggtcttcttccatggcttgggttgcagctcaccaaagatgcatcttccctcgggtcatcttcacctatacaagagcagaatcagaaagcttactatgtggcatccaacatttcggtgtggtgccgtgtcaaatctttagatgatttag

SEQ ID NO: 887 - DNA, 497 bp, Oryza sativa
  Clone ID: uC-osflcyp017h02b1
gtttcgcgctccgcacgtcgccgcagtggctgggcccgcagatcgaggtcatccgcgccgccaccaagtccatcgagcgcgaggtcaactccgtgaacgacaacccggtgatcgacgtccaccgcggcaaggcgctccacggcggcaacttccagggcacccccatcggtgtgtccatggacaacgcccgtctcgccatcgccaacatcggcaagctcatgttcgcgcagttctccgagctcgtgaacgagttctacaacaacgggctgacctccaacctggccggcagccgcaacccgagcttggactacgggttcaagggcaccgagatcgccatggccttctactgctctgagctccagtacctcgccaaccccatcaccaaccatgttcagagcgcggagcagcacaaccaggacgtgaactcgctgggtcttgtctcggccaggaagaccctggaggcggtggacattctcaagctatgaccttcacctaca

SEQ ID NO: 888 - DNA, 411 bp, Oryza sativa
  Clone ID: uC-osflcyp017h03b1
gtatctagctagggagagaaaggaagagacgagaggagagagatggccactgcttatgctcccatggcgagccagctgatgaagagcagcttggtgtgctccaagccgagggggctgtctggtgcttcgctgacaaggaggccccgcttcacagtcaaggccatccagtctgagaagccaacgtaccaggtggtgcagcccatcaatggcgaccccttcatcggcagcctggagacgccggtgacctccagcccgctggtcgcctggtacctctccaacctcccggcgtaccgcaccgccgtcagcccgctgctccgcggcatcgaggtcggcctcgcccacggctacctcctcgtcgggcccttcgcgctcaccggcccgctccgaacacgccggtgcacgggcaggccg

SEQ ID NO: 889 - DNA, 514 bp, Oryza sativa
  Clone ID: uC-osflcyp017h04b1
cattgattgaatcacgcaacaatggcttggagatgcagtccgtaaataacaaaggactcgttgaagaactagaaaagttgcttgatcgcttgcgaattccacaggagtttgcagcatcattaactgggggttcgtttgaagagtcacgaatgctgaaaaatgttgaggcatgtgaatggttgacaggggccattcgcagccttgaagtgccaaatctggatccatgctatgttaacatgcgagctgttagggaaaaaagagcagaactggagaaactgaagacaacttttgttcgacgcgcatcagaatttttgaggaactacttctctagcttgggggacttcatgataagtgacaaaagctacttttctcagcgagggcaattgaagcggcctgatcatgcagacctaagatacaaatgcagaacttatgcccgacttttgcagcacttgaagagtctggacaagagcttgttaggcccctttaggaaagcatactgtcattctcttaatta

SEQ ID NO: 890 - DNA, 514 bp, Oryza sativa
  Clone ID: uC-osflcyp017h05b1
gtaaagacaggatctggaaaaactcttgggtatctacttcctggatttatgcatattaaacgcttgcaaaacaacccaaggtctggtccaacagtgctagttttggcaccgacaagggagcttgcaactcagattttggaagaagctgtgaaatttggcagatcatcaagaatttcttccacgtgtctatatggtggtgctccaaaaggcccccagctaagagatttggatagaggggtcgatgtcgttgttgctacaccaggaaggttgaatgacatcctagaaatgcgaaggataagccttaagcaagtgtcgtaccttgttctagatgaagctgaccgtatgttggacatgggatttgaaccacaaattcggaagatagtgaaagaaattcctccttgtcggcaaaccctcatgtacactgctacttggcctaaggaagtccgaccaattgcagaggatctttttggtcaccctgtccaggtgacccatgtaagtgttgatgagcttgttg

SEQ ID NO: 891 - DNA, 395 bp, Oryza sativa
  Clone ID: uC-osflcyp017h07b1
gcgttaacgtcagatacaatgctaggctcaggggatgcttatgtgatccagaaaaattgtgacactgcagatctatatgaggcggaggacaaagatactgagcagagacctgtacttcatacaaaaaatgggatagcaccatcatgaatgcgtgagcatacatagtatggacatgctgatcagttgctttgatttggttcaaatgatgtggccacagaagctaataagccaggacatgggggggagactatatcatgcagtcaagatgaaggagcagacgaattaaaaaaccagaacagtttatacgagtgtacaacacccgacaaatattttgcctcttctggaatatctgctcccacactggtctctgcagctatacgggtgctgtactggac

SEQ ID NO: 892 - DNA, 386 bp, Oryza sativa
  Clone ID: uC-osflcyp017h08b1
cccgtctcctcgcctgccgccggcgccgatctccatcctgctagcagaggtggcgccggcgttctcctgctcccgccacatcatcgctaatccatcccatccggcctcggccaccccactgcttctacgagttccatacccagaccgccgccgccgccgccgccgccattggtgaagcccgtcgccatcgccgtcgccgcttccacgcaagtccgtagcagcggattcctgcagcgccccccgaaacatcccgaatccccagccatggcggccggagcagcagcagccacccgccgcagtctctccgcgctccttctctcctcccgcgctctgcaacgccgctatcgcccgctcgccgccgccgcctcctcagactacctcgcccc

SEQ ID NO: 893 - DNA, 440 bp, Oryza sativa
  Clone ID: uC-osflcyp017h10b1
ttcgccgccgaggagagtccaatcgagaagaagggaggagaggcaagcggagaggaagaagaagaagaagagaggatgggcttcgagaagacgatcctgaaagccggcaccggtcccaagcccgtcaagggccagaaggtcaccgtccactgcaccggcttcgggaaagataatgatctcgctaagaagttttggagcacaaaggacgcaggccaggagccattcagtttcaatataggccagggttcggtgatcaaaggatgggacgagggagttatgaccatgcaagtgggtgaagttgctcgtattcagtgcaccccggattatgcgtatggagctagtgggtttccggcctggggaattcgaccaaactcagtgctggtgttcgagattgaggttcttagcgcccagtaaacgcatcatgtaattccggatggatc

SEQ ID NO: 894 - DNA, 512 bp, Oryza sativa
  Clone ID: uC-osflcyp017h11b1
ttaaccactcgccatcaaagcccccagagagcgcgccatggcggcgcagcggcggtggccgacgtcgacgctggcggcggtggcagtcgccgtagtagtactactggcggcgtcggcggcgacgacggcggaggcgcagtcggcgccggcggcggcgccggggccagcggggccggtgctggaccaggcgtgcctgacggcgctgctgaacatgtcggactgcctgacgtacgtgcagaacgggagcagggcgcggcggccggacaagccgtgctgcccggagctggccgggctggtggagtccaacccggtgtgcctctgcgagctcctctccggcgccggcgactcctacggcatcgccgtcgactacttccgcgccctcgccctcccggcatctgccgtgtttccacccctcccgtcttcaactgcgcagcctttggattcaatgttccaatgggcccaacgccgtcgccttcgccggcaggcgtctcgcccttcggtgagggcccaca

SEQ ID NO: 895 - DNA, 406 bp, Oryza sativa
  Clone ID: uC-osflcyp018g02b1
ttttatataggtggaccaggtgggggcgatggctgatgcttgagggcccttgagaatgttgccctgttaattcgcgatgaagactttccaaaggtggaccaggaggaccagtaggggcctgacatggataaaaccaaaggacgaagtgatgcaaatgcacaagttaaattaagtggtgtaaacttttatgaagatggagatgttacaagtgctgctaataatgttacaactagattgactacaaattcaaaaggccaggcgtcttcctcttcagaaatgctaactggcagacagcacttgcctcaagatgctggacctgctatttctcagacatctaacggaactttccctagtcttgaaaagaccgaagaagtttgcatagaaactgggagagaactaccaacag

SEQ ID NO: 896 - DNA, 100 bp, Oryza sativa
  Clone ID: uC-osflcyp018g07b1
ttaaggccgacggcccggaatatagacagacgcgaaggaagagcaagaggggagggaaaaggaaaaccctttctatctgtctctatcaaactctttctcc

SEQ ID NO: 897 - DNA, 169 bp, Oryza sativa
  Clone ID: uC-osflcyp018g09b1
ttaaaatgcagtaatgagactgtctgtcccttttccataccaattaatagacgctgctgaccggaatatcctttaatactggatggttacaagaggattcccgcatcagacaaaggtaggttctttgcctttggtcgtgtcttctctgggagggttgcaactggcatga

SEQ ID NO: 898 - DNA, 412 bp, Oryza sativa
  Clone ID: uC-osflcyp019a02b1
tttcctctcgtcttctccttcgagttggtggctacctccttattcaaccatgggtaaggagaagacgcacatcaacattgtggtcattggccacgtcgactccggcaagtcgaccaccacgggccatctgatctacaagcttggaggtatcgacaagcgtgtgattgagaggttcgagaaggaagccgctgagatgaacaagaggtccttcaagtacgcgtgggtgctcgacaagctcaaggccgagcgtgagagaggtatcaccatcgatattgccctgtggaagttcgagaccaccaagtactactgcacggtcatcgatgcccctggtcaccgtgacttcatcaagaacatgatcacgggtaccttccaggctgactgtgccgtgctcatcattgactccaccactggt

SEQ ID NO: 899 - DNA, 395 bp, Oryza sativa
  Clone ID: uC-osflcyp019a03b1
tctagaagcttcttccgagatgaaggtgatcgagaagatccaggaggcggcggcggatgggcggacggtgttctcgttcgagtacttcccgcccaagacggaggaggggctcgacaacctgttcgagcggatggatcgcatggtggcgcacggccccaacttctgcgacatcacctggggcgccgggggatccaccgccgacctcaccctcgagatcgccaaccggatgcagaacatggtgtgtgtggaaacaatgatgcacctgacatgcaccaatatgccagttgagaagattgatgatgccttaacaacaataaagtctaatgggattcaaaatgttctggctcttaggggtgatcctccacatggtcaggacaaatttgttcaagttgctg

SEQ ID NO: 900 - DNA, 420 bp, Oryza sativa
  unsure (1)..(420): unsure at all n locations
  Clone ID: uC-osflcyp019a07b1
tctgctctccctctccatcttcctcttggtgcgcgcttgcctgcttgctcgtctcctctctctcccagtgggtgcgtttgtgcgagacttgaggctgagcgagaggggaggagagatcgtgctccgcgagggaacggcggcgaggagctgggtgcatctcggttggacttttcctactggaactgcagtactttcaacatgctttttgcaaatgcctgcattaaggatgaataaaatgttaagcaccgactatttagggacgcaggagcttcattcattttgcaagaccaccgaaatattggaagactcacagtctcaagagattgcactcgatagaacagncgtggggtcaacacttctaagtcatcaaaatgtttgctctacttctgaagtatcagggggaaactttggaatcgctga

SEQ ID NO: 901 - DNA, 411 bp, Oryza sativa
  Clone ID: uC-osflcyp019a09b1
tctgacactgtgaccgaagaccggttcgggttggagcatggcaccaaaggttggcctgatgcactcgatcatcacttcaggcggctcctccaatacagaataagtgcatttttctgctgatggggagatagcatgcgcattctagcatacacatgcccttggcctgctgaccatccaaaggcgaacgaatatcactctgatccaagactagcagcatatgctgtaccatatgcacctatgctatcaggcactgatgctgcgaaaaattccctgcgaagagaggttgaaatcttgaaatcagaggctcattggtcgaactcttacttctatctgtgggatgagccactgaatatggtacaggatgatgtaatctgcagcatctctaatgagttgcgttcatatgcatctgat

SEQ ID NO: 902 - DNA, 198 bp, Oryza sativa
  Clone ID: uC-osflcyp019a11b1
tctcagtcaagaaaaaaggaagattacaccagcaaacaaactagctagccaagggcctctttgtcctctttccggctcgccgaggcggtggcggcactgttggttgttggctcctattccactgagctcaccgacaaggtcgactctgacctctagcaaccggacgtgtatgaggcaataggtaatgtatgccagctc

SEQ ID NO: 903 - DNA, 366 bp, Oryza sativa
  Clone ID: uC-osflcyp019b01b1
ttatgtccggagttggaagcgatcgatggggggtactatcgacgggacgagtggttgcactcggcgcggtggccgtggtggtggcgctgacattcctcgccggcggcgcggacgccgactgctacgacttctgcttcaaggactgcatggccagggagaacaacatgggcgactactgcagctacgcctgagacaagacgtgccagccggacaagcccacgctgtactcgtcgtcgacgtcgtcccgcctcgccggcgacatggagtgccaactctcctgcgccttgggctcctgccaccgcctcctttcggacggcaagggcgccggggaggcctgcttcgggcagagctacgacggctgcaaga

SEQ ID NO: 904 - DNA, 417 bp, Oryza sativa
  unsure (1)..(417): unsure at all n locations
  Clone ID: uC-osflcyp019b02b1
ttcgccgtcgcagatccgatccaggaagaggtcgccgccgccgctgccatggcgctctccgtggagaagacctcgtcggggagggagtacaaggtgaaggacctctcccaggcggacttcggccgcctcgagatcgagctcgccgaggtcgagatgccggggctcatggcgtgccgcgccgagttcggcccctcccagccgttcaagggcgcccggatctccgggtccctccacatgaccatccagaccgccgtcctcatcgagaccctcaccgcccttggcgccgaggtccgctggtgctcctgcaacatcttctccacgcaggaccacgccgccgncgncatcgccagggactccgccgccgtgttcgcctggaagggggagaccctcgaggagtactggtggtgcaccgagcgc

SEQ ID NO: 905 - DNA, 419 bp, Oryza sativa
  Clone ID: uC-osflcyp019b03b1
tttcttgctgagacagctgacaacaagctggtcgctgctgatgcaaagttgaactttgatgacaatgctgcctttaggcagaaagagatatttgccatgcgtgacacaacacaggaagatcccagagaggtggctgctgccaaagctgacttgaactacattgggcttgatggagaaattggctgcatggtgaacggtgcaggattggcaatggctacaatggacatcattaagttgcacgggggtacgcctgccaattttcttgatgttggtggaagtgcatcagagggacaggttgtggaagcatttaagattttgacttccgatgatagagtgaaggctattctagtgaacattcttggtggtatcatgaaatgtgatgtgatagcaagtggaatagtgaatgcagcaaaacagga

SEQ ID NO: 906 - DNA, 407 bp, Oryza sativa
  Clone ID: uC-osflcyp019b04b1
tctaaggcctcgagccctcccctaccttgttgtacctcctcccatggaggtagaacaagttctatctatcacctccaactccaaggtagacaatatcaccaatggcgacaatgtgatcatcatccctagtgtgagcacggaggagaaggagcacatcaatggagctgcagagacaaatcatgttgtgatgatcaccgctgcttccatggacagaaccgacggcgacgacaagacgacgatggaggaggagtcggacgtcggcatcgccatcgccaggagcgcctcctccaacggaagccggcagcaagacaagaagcggggcgcgttcggcctcttccgggcgatgttcatgtccttcaacggcagcgccagcatcaagaagagggccgccgccaccatgggcaatc

SEQ ID NO: 907 - DNA, 382 bp, Oryza sativa
  Clone ID: uC-osflcyp019b05b1
tgtcgttccacttctccccttccctccccgggcgctcccaccgcgaggccacgcgcgtccacgaggagcgcgtcgccgacctcctccaggccaagccgggacaccgcctcctcgacgtcggctgcggcgtcggcgggcccatgcgcgccatcgccgcccactccggctccaacgtcgtcggcatcaccatgaacgagtaccaggtgaaccgagcccgcgcgcacaaccgcaaggcctggcctcgactcccgctgggagggcgtctgcggtaacttactctccatgccgttctccgacgcctccttcgccggcgcctactccatcgaggacacctgccacgcgcccaggctgcaggacgactacggtgagggctttcgcgtgc

SEQ ID NO: 908 - DNA, 278 bp, Oryza sativa
  Clone ID: uC-osflcyp019b06b1
tttacttcccacgcgacctctggtgggccctactcgtggggctactgctacaaggaggtgaagggcgcgacgtcagacttctgcgtgccgaacgcgcgctggccgtgcgcgcccggcaaggcgtaccacgcccgcggacccatgcaaatcgcatacaactacaactatggggcggccggcgaggcgatcggcgcggacctgctgggcaacccggagctggtggcaaccgacccgacggtggcgttcaagacgctgctgtggctgcggatgacctcccg

SEQ ID NO: 909 - DNA, 414 bp, Oryza sativa
  Clone ID: uC-osflcyp019b07b1
tggcgaagccgcctgttcgatcatctaggtcccagtcattgggtgatcgtacagagaagcccttcatacacttgcagataggaagcttgctctcttcgcaggctgtgaaagctccacagatgccatacacatcacactgctttgggttggtgtaggttggtacccaatcttgcacatgctccacccacaaaaatatcttggtctgaccagagatgtccagcataaaacgcatgatcgttgcgttatctagtaaggtatatgtgaagcacacttcttcatcattgctgacaaaagtaaaatcaattaagcgttgacctgtcatctctggtatggaaccaaagtaatgtccgttccattctccactagaccagtatggatagaggagcctgagagctgcaaggatgaacctggcag

SEQ ID NO: 910 - DNA, 418 bp, Oryza sativa
  Clone ID: uC-osflcyp019b08b1
tctggttcattggctccttgatggacatggggcttcacaacagtaatggtgactttcaaaatctggcaggtgtagatctggcgctcaagaaacaagggttaagcattctcaaagaaatatacttgaatccatcttcgattatgggcgaaggagacagagaaaggttcatcggctccctgatggacatgtttcttgacaacagtaagggcgactttggaaatctgccaggtgaagatctggacctcaagaaacaagagttaagtattctcaaagaaatatgcatggatccatcttcgtttatgggcgaaggtgacagagaaaaattcatcggcaccctgatggacatgtttcttcacaacagcaagggcgacttgtttgaaaaactagcaggtgatgatctggtgcagatatgtagaag

SEQ ID NO: 911 - DNA, 419 bp, Oryza sativa
  Clone ID: uC-osflcyp019b09b1
tcttaagtatcaaatatggcacgtattaagaagaattttgcggcattaataggtgtttgctatccatggattcatgcgaccaatgaaggtctctcatttgcttaccagttgctgtatttgttggatggtactgcattttatagtccagcactgcatgctcttgggcttcatgtttgtcgtgctacaggacaagagctgatggaatcatcttctagggtatcaagaatcagaaatcgagaacttgagagacttcgtggtcctccatggctgaagaccatgcaaagggtgttacttaactgtatgtacactagcctagattatgcacaaactggtttgattgctgcagttttctttttcaagatgatggaatggtggtatcaatctgctgaggaaagaatgtcagctccgactgtatatcc

SEQ ID NO: 912 - DNA, 421 bp, Oryza sativa
  Clone ID: uC-osflcyp019b10b1
cgagcaacttctgttcgctccattgcatgtgcctccatcacaaggccgccgcaagcaccaaaacccagatgacgctgtgctcgccgccgccatctcctccgccttctaacccgcgccgcgcgcttcctcctcctcctcctccagagcaactacctcctcccccgcctctcccctctctaaaaccctagtccttctcgcccgccatggggtacgcgcagctcgtcatcggccccgccgggagcggcaagtcgacatattgctccagtttgtatcaacattgtgagactgtgggtaggacaattcatatggtcaacctcgatcctgctgcagagcacttcagctatcctgtatctacggatattagggagctcatatcattggatgatgtcatggaggaacttgggatgggaccaaatggcgg

SEQ ID NO: 913 - DNA, 418 bp, Oryza sativa
  Clone ID: uC-osflcyp019b11b1
cgatacatcgcccctcccaacatcgccggcaaactgatcacgaggcactatgcgccggagtgggagtggaagaactgggcgtggcgctcggacggagacctgttcatgaacggcgcctacttccaggcgtccaacggcgccatcaacaggaaggtgaagggctccgacatggttaagcccaagccaggctcctacgtcaggaggctcacacgcttcgccggcgcgctctcctgccggcccggcgagccgtgctgatccgccggcgagatgacgtcacgtaggcatgcagcatgagcgaccacggagatcatcatcatcaagaaaaaaaaatataatggggaaagaaaattaaacatttggacgacatagaagggtgacaaatggaagggtagccaggttaaatttcctgtccattttg

SEQ ID NO: 914 - DNA, 417 bp, Oryza sativa
  Clone ID: uC-osflcyp019c01b1
taggacggaagggggccaaccatttgggacaaattcgcacatacatttggaaagatcattgacttcagcaatgctgatgttgcagtggatcagtaccaccgtttcgaggaagatattcagcttatggcagacatggggatggatgcatatagattctcaattgcatggtctaggattttcccaaatggcactggtgaggtcaaccaggcaggcattgatcactacaacaagctaatcaacgcattactagctaaaggaattgaaccatatgtaacgctctatcactgggaccttccacaagctttggaggacaagtacactgggtggcttgacaggcagatcatcaatgattatgcggtatatgctgagacgtgcttccaggcatttggggacagggtgaagcactggatcaccttc

SEQ ID NO: 915 - DNA, 418 bp, Oryza sativa
  Clone ID: uC-osflcyp019c03b1
tttatcgagcaagggggcgaaaggacgagctacggaccgagccatggaggaattcaaggctcgctccttcgtcgccttgtctccctcgggtgaaatttcatcaatataggaaaatagattataccatcagtttttgcacacgcggatgaaatttgactaggagaggcaccatggagaaagtcgaggtcgatgggaacttcattggtacgggtaattggaagctgcatggagcactatgtaagcaacttcacaaagtagttcttgaagtattggatgttattcctgtccttgaagctacaaggcctggaaacagttctggacttcttgcattgagttccttgcgcatagctgttgagaaggccaagaatctacttcagtattgctcacagtgcagcaagctatacttggcctttacagc

SEQ ID NO: 916 - DNA, 415 bp, Oryza sativa
  Clone ID: uC-osflcyp019c04b1
gctgtagaaacaagcaagattattctagccaactggctagcttgcgaatggcttccttgtcctccttaatgctcgtcacggcagtggccgcattgctggtcattggctcatgtggcactgaggtcaccttcaagatcggtgagtgctctaccacctctacactggaactcatcaccaatgtcgccatatctgaggtggagatcaaggagaagggtggcagcgactggagggggctcaaggagtcatcggctaacacctggaaaatcaaaagtgatgcaccgctcaagggccccttatccgtccgcttccttgtcaagaacggtggctatcgcgtcgtcgacgatgtaatccccgaaacctttaaggccggctccgtctacaagagtggcatccaggtccagtgatggacatgcat

SEQ ID NO: 917 - DNA, 413 bp, Oryza sativa
  Clone ID: uC-osflcyp019c06b1
ccggtgtcgagggcaccagggagaagctcacagatgagcagatcattgacctgatcatcacccttatatactctggatatgaaaccatgtcgacgacctcgatgatggctgtcaagtacctgtcagaccatcccaaagctcttgagcaactcaggaaagaacattttgatatcaggaaaggtaaagcgcccgaagatgccatcgactggaatgatttcaagtccatgaccttcactcgagctgttatcttcgagacattaagattagctacagttgtgaatgggctgctgaggaaaactacccaagatgttgaaatgaatgggtatgttatcccaaaaggttggagaatatatgtttacacaagggaaataaattatgatccattcctgtaccctgatcccatgacattcaat

SEQ ID NO: 918 - DNA, 422 bp, Oryza sativa
  Clone ID: uC-osflcyp019c08b1
tttagcaaatgaagtttataatgcacatactaatgttcagtatattatactgagaatcaactttattctcagctgtatatacactagtatgccagccattggtagctacttgaaaggatggtgaaacgcatatgattacccatgatgagcatgtgtgttccctttttttattagtgctaagctggaaatcaataaatccaagatattcatggagcatgctacctgtgatgatgtgcatgagcatgctataaatgtatcacatggagaaactgcatcaacatcaaccagtcatcaagatttgcacagtgattcagatgattcacatcaggatgataggccttcaacaagcacacaaaccccatcaccacagtcttcagcatcaacttcgcccactgcatataacaccagaaatttatcctttt

SEQ ID NO: 919 - DNA, 419 bp, Oryza sativa
  Clone ID: uC-osflcyp019c09b1
tgacgaagagttagcaactgaggtggcatgggttgtggtctatctttcagcactttcagacagaggtattagcttaatagtaagaagttctgtgcctcagctgctgataggacgactgttctcatctgagaacttgcagttgctgatcccagtgcttcgtggtttgggaaatcttattgccgctgatgactacatggttgattcagtcctaactgttggaaacaatatcattgatcaagcattgtcaggtcttataaaatgtttgaagagtgataacagggttctcagaaaggagtcatcatgggcattgtcaaatatagcagcaggcagttttgagcacaagaaactgatttttgccagtgaggccacgcctgtgctgatacgccttgtcaccagcgcgcaatttgatattcgcaggg

SEQ ID NO: 920 - DNA, 409 bp, Oryza sativa
  unsure (1)..(409): unsure at all n locations
  Clone ID: uC-osflcyp019c10b1
atcaaagcttctaaactgaagcttaatctatatataaggagagttcattttgattttggtgaggaagaagtaagtagaagtgaattagtgatatcgatcagagtgtgaagaagatgtctctggtgaagctgtttgatacgctggcgttcgacgcctggaacccgttcagcatcttcgggacgacggtggcggcggacgcgtggctggcgagcgacacgtcggcgttcgccaacacgtacatcgagagccgggagacggcggaggcgtacgtgttccgggcggacctgccggcgggggtgaagaaggaggaggtgcggtggaggtngacgaggggaacgtgctggtgatcaccggcgagcgcagccgtcggcgggaggagaaggcccagcggtcgcaccacattgagcgc

SEQ ID NO: 921 - DNA, 423 bp, Oryza sativa
  Clone ID: uC-osflcyp019c11b1
ttctaacaattgattcagcatcaccatatgagctctctccccagatctgctgcaccaagcaatacaggtggatattcagaccgcttgaacatgccaagttttcagggtatgatgtacccatcaagtgctgcccaagtgggtgttcctagtcaatctcctcaattgaagccttcgtcagccagagcaacaggtgcacctgctggtgtggcttcccctggtgcttcaccctctaatttgattgtgatgaagagtggtctccatcagcaacaagctaaggctcctatgcagtctctctctacctcaaaccaccaaccccagagttcatcaaagatgggtcctgtcactaatatgtctactggaggaggggatttgtcaagatcttcaaatgctcccgttgcttctggttcaccatccaattcagtc

SEQ ID NO: 922 - DNA, 419 bp, Oryza sativa
  Clone ID: uC-osflcyp019c12b1
tgccggggcaaaaagaatggtctgaggcggacgaagaagtggtggctcccatcacctcgtgtgccagatatagggttgtctcaatttcagagaaataggcttgtttttcaggctaagctggttcatcaaatcctcaaagctgcgatgtcaatcaatgaagaagtcctgcttcagatacctattcctccagctgtcacggatgctcttcctaagtctggcagagctagcttgggtgaagacctgtaccatgctataaccacagagtacattcccatagaggaaattttcctctctcttagtttaaaaacggagcataccgtgcttgagactatgaaccggttggagggtgcagtttttgcatggaatcaaaggatctcagaggaaaagagcaagaaatccccaggaaggcattcctggaa

SEQ ID NO: 923 - DNA, 376 bp, Oryza sativa
  Clone ID: uC-osflcyp019d01b1
tgcattcataattcatacaaaaattattgagacatgatcgatcgatcgatcgatcaagagttgcatcccaaaataaataatccaccgcaaaagctacaggcgccagcctccaggtagcttcgctatagcccatcaaacaagcaagaaagggggagagaagggaaggagaggtcgtcgtcgccgtcgacgacgattcaccggccatgtgctgctgctgcggcggcggcggggactgctacggcgacggctgcaagtgccggccggtggggtggctgctgggtctgcctttcgcgctgctcgccgtccttgtgttcatcgacggcgccatcatctggatcatagggctggcgatctcgggcatctgcccttgctgcct

SEQ ID NO: 924 - DNA, 411 bp, Oryza sativa
  Clone ID: uC-osflcyp019d03b1
tgtaccctcctctcacattttccccaaatggtaatagaggaaggggaaaaacacatttgcagccacatcatccatggcctctctccgcaccattccggtgatcttcggcatcctcttctatgtccttgccagcactgccactgccaccgacgcaccggactacgtcgtccaaggccgtgtctactgtgacacgtgccgcgccgggttcgagaccaatgtcaccgagtatatcaagggtgccaaggtcaggctggagtgcaagcactttggcaccgacaaggaccagcgtgcgattgacggcgtgactgatgagaccgggacatacaagattgagctcaaggacagccatgaggaggacatctgcgagggtgtcctcggtcacagcccccttgcaaactgctctgaaatcga

SEQ ID NO: 925 - DNA, 418 bp, Oryza sativa
  Clone ID: uC-osflcyp019d04b1
tttctagtatgcagtcaagtgagccatcgggtacaagcagcaatcctagggatctggcaaatgaagttgcaagtcattcaaaaatgccctctagaacaactgaagatcatacggagtcaccactgaaatctcaagtgctcttgcaggctgcagaaatcgagaatttgaagctagacaagctgaggttggcagaagagaaagatgggctggaaattcacagtcaaaagctggctgaagaatcatcctatgctaaagaattggcagctgccgctgcagttgaactaaagaacttggcagaagaagttacgaggctttcttatgaaaatgcaaagctgaatgcagatttagctgcagcaaaagatcaaacaaggagcagtatccagagtgacacaaaacgccgtgatcaggagaatggaat

SEQ ID NO: 926 - DNA, 413 bp, Oryza sativa
  unsure (1)..(413): unsure at all n locations
  Clone ID: uC-osflcyp019d09b1
gcaattcttgagctcaatcagcaacagcatctatctccttcttgcttagttaagtccttcgccctcccaagaagaagaagatgtcttgctgcggcggcaactgcggctgcggcagcggctgccagtgcggcggcggctgcggcggatgcaagatgttccctgatgtggaggccacagccaccaccaagaccttcgtcctcgctgctccatccaacaaggcgagctctggaggaatggagatggcggtggagagcggcgagaacggcggctgcggctgcaacacctgcaagtgtggcaccagctgcagcggctgctcctgctgctcctgcaactgaatctatcgtcgtcgtcgcccggctgcatgaggatttatcgtatggatgctgctactgtcgatcagagctntgatcgag

SEQ ID NO: 927 - DNA, 413 bp, Oryza sativa
  Clone ID: uC-osflcyp019d10b1
tctttggtaaagttggttcttggtctggttcatctgccttgttactatcttccttttgctaatcttgttctgcttagattgtcttttctcttggggcatcctttgcattttggctaatcttgtcatctccttttgaagtttcacctctcttcctgcatctcactacctgatttggtgcttagtctaatccaattcctttttggttcttgcgattgcagtgggtgattaggtgcttaacataatcccaatcctagaaaaatacattcggagtggttgctgctgagctcaaccaatcaagcttgttggggaggcaagcagtcacaatgatgagcttcaacaagagccaagaaggatttgggcaggttgctgctgtggccaccctggcctccaatggaggaggctctctaccatgg

SEQ ID NO: 928 - DNA, 416 bp, Oryza sativa
  Clone ID: uC-osflcyp019d11b1
tttaacaccaagaacttgttggagctgagacagcagcaccaagcaagaaaccggatccaatccatccatccatccatagtttccaatggctggcaagtacatcgccgctggtcttgttggttcctttgccatctcatatgtttgtgatcattttatcgctgagaagaagatatttggaggcaccacaccacataccgtgtccgacaaggaatggtggcaagcaactgacaagaagtttcaagcctggcctcgcactgctgggccaccggttgtcatgaaccccatcagtcgccagaacttcatcgtcaaggatctcgagtcctaagattgtagtgggagcatatatgctgaaggttgcgccgtgactaaaatggcgatggctgtggctacaaactacctacctatgccgtactccc

SEQ ID NO: 929 - DNA, 415 bp, Oryza sativa
  unsure (1)..(415): unsure at all n locations
  Clone ID: uC-osflcyp019d12b1
cgacgacttctccctctccctcctcttgcactctcctcctcctcctcgtgagctccgaggttgccgacgacgacgacgacgaggtctcacccatggcgacccgcgaggtgcccctcctcctcctcctcgtcgtcgtcatggtcctcgccggcgccggcgccgcccgagggttctacctccccggcgtcgccccccgcgacttccgcaagaaggaccagctggcggtgaaggtgaaccagctgagctcgatcaagacgcagctgccctactcctactactccctccccttctgccgcccggccaccatcgtcgacagcgccgagaacctncgcgaggtcctccgcggcgaccgcatcgagaactccctctacgtgttcgagatgagggagccgaggctgtgccagatcgtctgcaa

SEQ ID NO: 930 - DNA, 423 bp, Oryza sativa
  Clone ID: uC-osflcyp019e01b1
tcagctttcaagcatggcaagacgaataagagacccttttccttaattttgtttgatcattccctttcagctttgattttcctggtatgacatgaagcattgctcagattatttgttgcctgaagcccttatcaagatttgattccagattacctagaaactcaaggtttcaataaactaacaacgatggaggacggcatggttctgagccctcattaaaatagcacagaacagaatcgaaccagctttgaagaagatgatcaattcagcattcgatcagcaccctccaaaccatctccagacaagaaatcgaagcccaagaacaagccgaatcatcactccaacaagacggcgaacccgccgccgcagaagtccgagacgaccgcggcgctggtgacgacgaccgcagcagcagcaacagca

SEQ ID NO: 931 - DNA, 427 bp, Oryza sativa
  Clone ID: uC-osflcyp019e02b1
cacgcgttttcacgcactctccggtccagagacacacacacacacgaccgctcgctgggttgcctcgctgctgccttagcgagaaaccgggagttagcgagcgagccgtcgtcgccggcgatgaggcaacaacaagcgggaggagttggcgacggggtgagcccgggcaatgtccccgtgtgctactacgggcccgggggccgcgtgccgtcgtcgctggagcggcgggcgcgcgccgccgaggtgctcctgcgctgcgccgcctgcggcctcgccgtgctcgccgccgcgctgctcggcgccgaccgccagacccgcgtcttcttctccatccagaaggtcgcccggtacaccgacatgcagtccctcgtgctcttggtgatagcaaatgggatggctgcgtgttatagcctaatccagggtgcaa

SEQ ID NO: 932 - DNA, 415 bp, Oryza sativa
  Clone ID: uC-osflcyp019e03b1
ttaaggcctttcttttgcttttcgcattggggatgctgcaatcactgcgccaaacgaaggtcaaggatggcgaagaaactcaacagtaccacaagaaggctatggaacagcaagtgtcatacctgaccaagggattttccttgcagcatcagtttaccgtcctgtatttgagtttatgaataaaattggactgatgcttccgcagaaatattggcaacttgggaatgatgggctattggcttttgtgaacaacttcttgaaggagcacttcttgccagcaatatttgtagattaccgaaaatgtgttcaacaggctatatctagtccagccgcatttagaccgcgtgtccatgcaacctcagtgtatagtccattagtcgaaaatgggcgtcctgtactacaagggcttttggct

SEQ ID NO: 933 - DNA, 421 bp, Oryza sativa
  Clone ID: uC-osflcyp019e04b1
tttgctcacacactgaggtagcataggcgtgggtagctcaccagcatggggtgcaacaagaacgccatgtcttcctcgggtctcttcctcgccgcgctgctgctgctctcgtgcagctccatgagcagcgcggcacggtggctcgaggaggagtacccgccgcaccccggcgtgccggagctgcccaagcatgaggagccgccgcaccccgtcgtgccggagttgcccaagcacgaagaggcgccgcaccccgccgtcgtgccggagttgcccaagcacgaggagccggcacaccccgtcgtgccggagctggcaaagccggaggtgccacacgccgccgtgccggagttgcccaaacctgagctgccggcacaccccggcgtgccggagcttcccaagcacgaggagccgccgcaccccc

SEQ ID NO: 934 - DNA, 420 bp, Oryza sativa
  Clone ID: uC-osflcyp019e07b1
gtctcgggaggctcctgcagcagaagctcgacatcctccggactcccgagcacgaccaccacgacacccatggccctgtggatcacgacggcctccacctggtgcctcagctccacccggtgctccagccagtcggcgatctgggccgcgtcacactgccaccgctctgtgcccagccctctcagcagaatcacccggctcctgtactcttcctgctgcgccgccgccgcctgcgtgatcacgtacggcggaagcaggagacggagcaaggacgacgtgccaccctcgtccgggagcagcagcgaggaggagtccagcatccggaggcccgtcctgacgagcaaccgcggcgccctcctggcaaccaactccgtggcgtccgcgtcgtcgtacacgagcacgccggcgtccccgcccctc

SEQ ID NO: 935 - DNA, 276 bp, Oryza sativa
  Clone ID: uC-osflcyp019e08b1
tcgtccactcccccgtttccatccccgggaatcttcttcttctcttcttgcggtgactgagaagaaaaaaaaaagaaagagaagaaaaattgctacgagattccttcttcgtcgccgccgctgctgctgcgttatccccaaggtgagagctttttgtgctttgagcctttggatggtgtggtttggtgggggcgctgatggttggggacctgggtggtggtgtttgcccgtccccttttcgttgccctcttccttcttgcttctcggcttggggtc

SEQ ID NO: 936 - DNA, 395 bp, Oryza sativa
  Clone ID: uC-osflcyp019e09b1
tttgcggtcacgaggctttggctttgtcaggtttgaaaatgaggacgctgttgaaagggttatgtcagaagggagaatgcatgatcttgcagggaaacaggttgaaataaagaaggctgagcctaagaaacctggcgggggtgattctagctctaatgggagacatagtcacgggagtggtggtggccaccgtagttcttaccgtggtagtggtggtggcaattctggaagcagcagcagcggtggctatggtggatattggtggtggctatcggtcagctgctgcagcttattacggtagcacaggttatgctggctatggcagaggttatggatattgaggtaaccccgcatttgggccatgctttggcttttgcttttggggctcaatggat

SEQ ID NO: 937 - DNA, 414 bp, Oryza sativa
  Clone ID: uC-osflcyp019e10b1
tctctttccctcccggcgtgtggtggtcggaggttgccattcattggccgcccccaccatcgcgcccgccggtgaggagggacaccgccatcacattcttgctatatccaacgacctccattgattagctacgtgcgtgtgagaaactaatcaaccggccggcttgctggctttcctcatcttcaagatgcaccggtggttcattgccagctgcggagacatacgtgcggcggcggcgcgctcatcccgccgccgaggaggcgatgcgattgcgcccaagtcggcgccgccgtcgccgtcgccgccgccgaggctgaggaagacggtgtcggagacggcggcggtgatgctggccgtgcccaaggacgtgcaggagttccggaccatgccggcgtacgggaccaacctcgagca

SEQ ID NO: 938 - DNA, 419 bp, Oryza sativa
  Clone ID: uC-osflcyp019e11b1
tctgcggcggcggcggctggcgatttcgcagtagcgtcgagagcgcaaggcggcggcgcttgcgaggcgacggcgcgacggcgcgggaggcggcggcacgcacgagaggtggctgagtgcgcgggaagggcggcggcggcagggcgcagcggcaacggcggtggggcggcgcggcgacgacgcgcggcggagagggccgcggttctcctccgcgcgcagccagggccacggcggcgagcctcgacctcgcgcggcccatgggaggcagggcaggcgtgaggccggtccaggacgacggcgaggacgtcatcgagcgcgcgggcgagctgatgccacgcgcggcgacgacaacatgttcataatgccatgtcacaagcaacttaaaagcggtgtcctctgcagttattacacatgcgaat

SEQ ID NO: 939 - DNA, 419 bp, Oryza sativa
  Clone ID: uC-osflcyp019e12b1
tttccatgatgcaaacggatctggtaaagggctatctagcggggaagacccgtggtcgcagattgaagagctaaagcaagaactgggccatgagaagaatctaaatggagatctgcatttacaattgcagaaaatgcaggaatccaactctgagctacttctggctgtgaaggatcttgatgagatgctggagcagaagaacaaggagatatcacttttgcatgaagaaacactggaggatccccaggaggctgaatatgagctagcattgtcaaatgtgcataatgctggacacaaaatagacatatctgaaacaagttcagttcaagagaaagaagatgagctgatgctggatgcattggcaaagacaaccgatggcatcgctacctctgaacttcaaaataaaattgttgagctga

SEQ ID NO: 940 - DNA, 419 bp, Oryza sativa
  unsure (1)..(419): unsure at all n locations
  Clone ID: uC-osflcyp019f01b1
tgaaaggtgacaggggcatggaccttcttcaagagatcttgcagcatcttcgcgaactccggagcgtggaacttcatgttaagcatgctggtgatgcccttgctgcaaattcagcatagcacatgcctctcatatataacatgtgattaccgtagcttgctattgatttagtggatcggctttggtgagtcgatcggaatgatctgaagtacttggttggtgatggtacctttgaaagataatggctgatttcatgggaggttttgctcattttgccggtggcacggaagcaaagcctcttccttttgtttctggtccagcattgccggctttatgatgtggtagttgtagaaatcattagtccttccaaagctgcacaatgttgaatcattggtgccagcttcngatgtatgcacaac

SEQ ID NO: 941 - DNA, 356 bp, Oryza sativa
  Clone ID: uC-osflcyp019f03b1
gttaaagacttggatgaaaggacttgggctggcgaccataacaggttctgtgatcacacacaatgggatacatgttccaaggatacaggatcctaccagagaaaggaggatgagatttgcagactctgtaatcgatgagctatatacctacattgatggttatgatacacgcaacccggccagagcaaacccatgagaatccctcaattgaactgggtgcagagttcaagaaggtcgggtgtttccttggtcgctgtaagcaaatccccagcattgttgagcttgacaccttgactgtatggcgggatgcacggattggctctagcatcacattgaagggcaaggtgaccattaca

SEQ ID NO: 942 - DNA, 390 bp, Oryza sativa
  Clone ID: uC-osflcyp019f04b1
ttttcggggggagccacacgcgcgtctacccccacagggaaggatcgacggaggtgctgtttaattgataacgggtgttaaactatacttcgcactggcaaccttgcgaagtaattggcgatcaaagaaaaggggcaagactgaagaatcttggttgctgaatcagtgcataggaggaacattgggactgattcttgcaaaggcaagaacctgggccaagtcacgacgagcgataggtgatgcatactcgaaagtacccacagtatagcaggtactcatgtgacagatcaatgctaattgccagttcattcatcgctgcacgcgtgcttcgaccaagggaccgctctatcaggaaaggctcagctgctctatgggaacatgtgaacactt

SEQ ID NO: 943 - DNA, 418 bp, Oryza sativa
  Clone ID: uC-osflcyp019f05b1
cgccatgcccgtcttcaagggccgcacgcccgtcgagtgctacaccgacttcatgcgcgccttccgcgaccacttcgcctccttcctcggcgacaccatcgtcgaaatccaagtcggcatgggccccgccggcgagcttcggtacccgtcctacccggagagcaacggcacctggaggttccccggcatcggcgccttccaatgcaacgacaggtacatgcgtagcagcctgaaggcggcggcggaggcgaggggcaagccggagtggggccacggcgggccgacggacgccggcggctacaacaactggccggaagacacggtgttcttccgcggcgactgcggcgggtggagcaccgagtacggcgagttcttcctgtcgtggtactcgcagatgctgctggagcacggcgagcgc

SEQ ID NO: 944 - DNA, 358 bp, Oryza sativa
  Clone ID: uC-osflcyp019f07b1
tacatgctgcaatggttggatccttgcacccaacaccaattgctacgctgccatttcttgctccgcattctgctgtggtgcctttctgtgacgggctctacaggcatgccacagcttgggatgcattgaggaaagatgcagcaacattggcccaagacgtaacttctttgacagaagacatggcccagaaatcaggaatcactattgagcaagtaagagagaggttgcgatcagtgctgtctttgactgacgtcactcgatttccagtgccaaagaacccacaggctgtcatttttgttggtgcaacggatgacggctacatccccaaacattcgataatggagctccaaaaggcatg

SEQ ID NO: 945 - DNA, 417 bp, Oryza sativa
  Clone ID: uC-osflcyp019f09b1
tgttcacttggttgaaagggcttggtctggccaccatcatggttggagttagcttattcaattggtacaagtatgagaaatacaaaaagggtcacataaatgaggatgaagttaattcaccttcattcgatggagatgccaaatacatcattctagatgacttggaggaccaggatgagtttcaggatgaagatacataattttgcaatgtggcaacattttaactgtcacttggatttttatgccctgaaaccattcatgtctgcttattgattgaaactataagtacttatggatgtttccacttaaacgaggtgtcacggacaagggcactgctagacttgctgatgttctgcaaccaaacttaaaaattatctgccggagcttgtccgtctccaaacaatgaaatggtttctc

SEQ ID NO: 946 - DNA, 417 bp, Oryza sativa
  Clone ID: uC-osflcyp019f11b1
tctggttggcttctcctccccctctttaccttttcctcctcggttcggttccgtggttcgtctagggtttagtgggttgagatggcggcgccggatgtcgagtaccgctgcttcgtcggcggcctcgcctgggccaccgacgaccgctccctcgaggccgccttctccacctacggcgagatcctcgactccaagatcatcaacgacagggagacggggaggtcacgtgggtttggcttcgtcaccttctcctccgagcagtcgatgcgcgacgccatcgagggcatgaacggcaaggagctcgacggccgcaacatcaccgtcaatgaggcccagtcccgccgctccggcggcggaggcgggggctacggcggcggcggtggcggctacggcggcggtcgcggaggcggcggctac

SEQ ID NO: 947 - DNA, 414 bp, Oryza sativa
  Clone ID: uC-osflcyp019f12b1
tctcgagcgccgcagaggagagcagcagtgaggccgtcgctgatgagatccgcctcgcaggtcctccgccgccgccgcggctactcctccgcctccggccagccggagcggaaggtcgccatcctcggcgcggccggcggcatcgggcagccgctctccctcctcatgaagctgaacccgctcgtctcctccctctccctctacgatatcgccggcaccccgggcgtcgccgccgacgtctcccacatcaacgccccggcccaggtgaaggggttcatgggggatgaccagctcggggaggcgttggaggggtcggacatcgtgatcatcccggccggcgtgccgaggaagcccggcatgaccagggacgacctcttcaacatcaacgccggcatcgttaagaacctctgcacc

SEQ ID NO: 948 - DNA, 238 bp, Oryza sativa
  Clone ID: uC-osflcyp019g01b1
tttaaagccaaaaccaaactccatcacctcctcctccgtctccttcccccaccatttctcccccaaatccgtctcctcctgctcccccacccaaatcccccacctccgccgtcgcggaatccgccgcgacgacctcccctcgatccgcccgatccgaccccggatcggatcccaccgtcgccgcccgcgcgcgtggtggttgggtgtgcggggctgtggaaaccctaggcatgcgatc

SEQ ID NO: 949 - DNA, 287 bp, Oryza sativa
  Clone ID: uC-osflcyp019g02b1
tttctcctccattattcatgcttcaattggggatgctttactctactgctcattggacacattcggcaaatttgacagatgggtatattggccatctgggaggacctgcaatgctgccgctgtgatgccaagatcaggaaggtcctgggctgccttgtagaggagtactgcatcgagaaggcggagtccgacgtgaagaacaacagggcgatcgcgcgcgggaagatcgacccggagaagctgtgcaagaagatctggtgcaagggcggggagatcatcaaggagat

SEQ ID NO: 950 - DNA, 388 bp, Oryza sativa
  Clone ID: uC-osflcyp019g07b1
tctccgacgccaacggcggcggcgaggaagccaatcggccccgcgtggaaggcgacggcgaaggtgtcttgcagagcaacgagtcctccgcgaaggtcgatgagccggtagctacagagaacagtgacgctgctcctgctgaggcatctgtagatgctgtgaacggcaagattcctcctaccaagttgattccccaacatcctctggaaggtgttacattgacagaaagaactgtacgtattactgggaataagaagcagatagaagcggcaaaagatattattaagcaagctatgagtcaggtttttggtagaagcaaatggtgtaacacggacattggttttgaataggccgaagcagttgaatgccctctcctctgcaatgataa

SEQ ID NO: 951 - DNA, 302 bp, Oryza sativa
  Clone ID: uC-osflcyp019g09b1
tttgaaagtcaagaaacccaaataacagatatggctgttgatcgacctataggagataggtgtcttgtgagcaactcgggtgatgtctctacagctcttagaaagctaattgaccaaggaatggttaatgctggtgatatagaatcagaattgggtgtgtcttcagaatctttggaagctgctctcgtgcctgaaacatcgaccttctcccctggtctgaagttgaaaataatcaagttactgcaaaacaccattcgtgtaccttctgttcaagagaagtgctctaaagagggatctttggc

SEQ ID NO: 952 - DNA, 410 bp, Oryza sativa
  Clone ID: uC-osflcyp019g10b1
gtggccgcctgccaatggggagcccctatgggccgccgatgcatatggcagggcctccatattctgctggatccatgatgggaccaggtggaatgtatgggatgcccatggacagatatagcttgggcttacctgctggtcctggtccaatgggcgcgagggctggttcatattccgaggaaggatcccagaagaagcctgcaggagctgggcgtgataatgattggaaatgccctaattgcaacaacattaactttgcattccggacagtctgtaacatgagaaagtgcaatacaccaagacctgaaaaccaggggtccaaacctgatggtgcaagaggtccaaaaccaaagatgccagaaggtagttggaagtgcgagaagtgcaataacataaactatccattccgc

SEQ ID NO: 953 - DNA, 411 bp, Oryza sativa
  Clone ID: uC-osflcyp019g11b1
tgagagtgctggtggggttgttatgtgggctggaacttggagggtaggtggtgtacttgcaatgtctcgggcatttggcaaccgcttgttgaagcaatttgttgttgcagatcctgagattcaggaacaagaaatagatgatgaattggagtttctgattttagctagtgatgggctgtgggatgtggttccgaatgaggatgctgtttcactcgtgaagattgaggaggaacctgaggcagcagctcggaagctgacagagactgcattttcccgagggagtggtgacaatatcacatgcattgtcgtgaaatttcaacatgacaagatggacggtgattcctcaccaacaagcgataaaagctgattccatttgttgtttgttatacatgttgtcggtcgtttaacttc

SEQ ID NO: 954 - DNA, 418 bp, Oryza sativa
  Clone ID: uC-osflcyp019g12b1
tctcaaccatttacttaatggatgctcattgggtaactacaataatccatgaaccataagcaaactgaaatctttaacttgtacctagttatttctcaaagtagtattgaagtaggcagcattagcaatcagtaatgactctgcgcaaggttgaagcattcaaactgcatatatttactgcaagaacttgtgcatagtacacaacttgttataaacgcaaacctgtcaattcttcatgtttgtgtgctactagtgggagagttcagaggacatgaagagttgctgcaactctgctcatttgcttgaattggtggtccagcatttctggaaaataactgcaaaacttttggatcaagcaaaatcttgcaattaggcgtcaactaatatcatccaaactgaattaaaaattaggataggt

SEQ ID NO: 955 - DNA, 373 bp, Oryza sativa
  Clone ID: uC-osflcyp019h01b1
taaaccgttacaagctgcttcagaatcacaaagtttcttttattcctggatgggattgccatggccttccaatcgaattaaaagttctaaagtcactggacaaggaaacattgaatgctctgacacctataaaattaaggcagaaggctgcaaaatttgctaaagcgacggttactacacaaatgaattctttcaagcggtttggtgtatgggcagattgggacaacccttatctaactctgtcaccagagtatgaagctgctcagctagaagttttcggccaaatggttatgaaaggatatatctaccgggggcgaaaacctgttcattggagtccgtcatcacgtacagctttagcagaagctgagttgga

SEQ ID NO: 956 - DNA, 210 bp, Oryza sativa
  Clone ID: uC-osflcyp019h02b1
gggacgacaccagtccttttggagcgtggcgcagaaagagcaggacggacttgtctgatgctaccgaaggcatgctgtctggattggcgcttccagttgcaaaaagcgcgtaagcagcactgacccatgctcatgcaagacctggatgctcatgtcctacatctacaacatcttacccactgattatgaacacggcggtgtgatgacaac

SEQ ID NO: 957 - DNA, 416 bp, Oryza sativa
  Clone ID: uC-osflcyp019h05b1
tttcaaacctatggaatatacgatttcagaccagacaacggctatatacaagatcagcatgctgctttgagaaccagaaatttctatcataccgatgatgcttttgcagattcaattagcacagacttctcagatgctacatcaagcgaatggtcactgtttaccagctctgatgaatcctcatttacgactgaaagcactagagattcattcagtgttgtggactatggtgacaatgctggccttgatccaatttcctctatatttgggccttattatgctcaagaccatcctcctggcagttttgcctcgtgtacaaggttgtcaccttccaatccacaaacaaggtacttccaagagaacacaggctttgtctcagattcttccatgccggctcacctgcccggcaatgtaca

SEQ ID NO: 958 - DNA, 377 bp, Oryza sativa
  Clone ID: uC-osflcyp019h08b1
tcttcccgagccgactgccgccgccgcggccatgctcctcgcgaagccccacctctcctcctcctctttcctcccatccacgcgggtgtctagccccgctccgggtcccaaccacgcaaagcccatcgccgcctctcccgcccctcgacgctgcctccgtctcgccgtcacatccgccgcggcgccggctgcttcgtcggcggaggcggcggcggcgctgagccgcgtggatgtgctctcagaggcgctccccttcatccagcgcttcaaggggaagaccgtggtggtgaagtacggcggcgcggcgatgaagtcgccggagctccaggcttcagtgatccgcgacctggtcctcctctcgtgcgtcggcctccacc

SEQ ID NO: 959 - DNA, 427 bp, Oryza sativa
  Clone ID: uC-osflcyp019h09b1
taaagaatttcagaaagctcaacggttagcggtagaaagagaagctgcttatgcacccttcatttctcaagcgggcttgccacaaagctataactcgagcgaggtgaacaatggtgctgataagttggctgagcaacgcacggcgcttctagaatcaagaaggcaagaattagtcttcttggataatgagatcgtgttcaatgaggccgtcattgaggagagggatcagggaatacaagaaattcagcaccaaattactgaagtaaatgaaatcttcaaagatcttgctgttctagtccacgatcaaggacaaatgattgatgacattgacacccatatcgagaatgctgttatagcgactacacaagcaaaaggccaactctctaaggctgctaaaactcagaagtcgaactcttcgctgatatgc

SEQ ID NO: 960 - DNA, 413 bp, Oryza sativa
  unsure (1)..(413): unsure at all n locations
  Clone ID: uC-osflcyp019h10b1
ctatactgaaacttatatttccttttatatttggctttgtatatgtttatgaaatctgaatcacgctgttgaaccctctactataaatgagacctggagcccaaaattccaaagttataagcactctgcaggaaattccaaatctacactcaaatggttctctgcagatagttatacctagctaatttatcatgatggcctctgttttccatctgaattttaggagtccagcattcaaatgatattgtacacttcggatatcccaaggtatttatatnggaagttctgttttccagctgaattctgatgagtcatggttgtcattcaaccaagaagctaaattgctccataacaaggtgagttccttatttccagcatactcatccatgctattgccaaccaactctggtagg

SEQ ID NO: 961 - DNA, 419 bp, Oryza sativa
  Clone ID: uC-osflcyp019h11b1
tgtttttactcatacagtctccactcacacgcatggcatttgataggctacagtggaggggaaggaggaggacgtgcggctgggggcaaacaggcactcagagaggcactcatttgggacggcgatgcacggcgccattgacaacatggactacgaggagccggcaacggcgcccatgatggagccaggggagctcaaggacctgtctgtgtacctaggcgagatcggcgagctagacgacaccttcctcttcctctacatgagcatgcttaccgtcttgtgagtctacaagtcctgctacaagtgcgccaccgtgggcatgcacagcatctgctgtgccttgggagggatgagcttggaactcgactactgcaccgacggcatttccggaggacacatcagcccagcagttacttttg

SEQ ID NO: 962 - DNA, 483 bp, Oryza sativa
  Clone ID: uC-osflcyp020a01b1
tttctgatccctcaaccctagctccccaggtgtgcttttacggcggcgcggttgtccgacagggaggcggagcctggcgtcccagggggtggcgcgggaggcggtgtccggcggtgcgggaggcggagtgcgggggcagcgcaggagtctgaaggcggcgtcgtgtctgcatcagcatcgcttttctcctccgaatcctctcccaaaaaaccgagagaaatatgttggtaaccagatcgaggttatttggagtgtcccagttgcgcaaatcctctcttaagcatctgttgaagttcaggtctatgtctgatcagtcatctgttctagctgccgatgataccgaaacttcatgggctatgtctgatcagtcgtccgttccagctggcaaggctactgaattttcattaggtgatttccctaagcatctgcgcaagctaccaccatggatccatgagccggcgtctgttcatgaagttaatgata

SEQ ID NO: 963 - DNA, 484 bp, Oryza sativa
  Clone ID: uC-osflcyp020a02b1
ttctctccgccgcgaatccgacgagctcgggggcgtttgcggggactctctctgtctctctctcttcgacccggatcgattgtatcgatctcgccccgtcggtcgatcgatcgatacctggacacggagcgaccgatgacgaagcagagcgtggtgctgccggaggtggcggtgccggtgccgcccaactccgcgccgctgctcccgtacccgccgccgcgggccgcgccgggcgtcgccgtgcgcaagaagtacctccaggcgcagctcgacctcggcgcgggcctcccgctcatcaacggatggggtggagtccatgcgggcctcctaccccacccacgccaaggacgccgccgcgctcgccgtcgccggcgccgtcgacgacgagcgcgccgcctggatggtgaggcacccgtcggcgctgagcatgttcgagcagatcgaggcggcgtccaaggggaagaagatcgtcatgttcctcgac

SEQ ID NO: 964 - DNA, 384 bp, Oryza sativa
  Clone ID: uC-osflcyp020a04b1
ttcttgattcgattctggtcgtagcagcgggggcatttttagtcttcactggttcgttctttgcttatttataaggagcagcgcccaatccgagctgctgctcctccaccgcggcggcggcggcggcggtgtttgatcgatgcttgccttggtggccaccttcgtcttggcctgcctcgtgttcttgtcgaagccatgcgcgcgtgagatgagattgttcctgtcgacgctgtgccaagaactcgccctcgcgctgctcgggttcctggccgggctccggctgctcggcggcgtcggcgccggcgcggcggccgagaccaccatgccgctgatgccgtccttcaagaaggaagcgcgcggcggccgttgaggagggcggcggcg

SEQ ID NO: 965 - DNA, 487 bp, Oryza sativa
  Clone ID: uC-osflcyp020a05b1
tgtttgcttacctaacatacttttacaagggggcctttgtacattgccaaagtccttcgatctcgcctcccagatctgccccgcgtcggcgaagatgaagatcaacgtgcgggggtcgacgatggtgcggccggcggaggagacgccgcgggtgaggctgtggaactctagcctggacctggtggtgccgcggttccacacgccgagcgtctacttcttccggcgcggcgaggcggcggcggcggagggcgggagctacttcgacggggagaggatgcggcgggcgctggcggaggcgctggttccgttctacccgatggcggggcggctggcgcacgacgaggacggccgcgtggagatcgactgcaacggggaaggcgtgctgttcgtcgaggccgacgcgccgggcgccaccgtcgacgacttcggcgacttcgcgcccaccatggaccttaagcgcctcattcccaccgtcgactacaccgac

SEQ ID NO: 966 - DNA, 314 bp, Oryza sativa
  Clone ID: uC-osflcyp020a06b1
ttgtttcgtacaatgcatgatcaagcaagggtgatgttgtccatgaattcgattcaagcattaatgctcaacacatcattcacacatcctctgcaacaagatggagatacacagaccttcacgtgcccctttgcatatgcaactaccatatgatgtactggatcaaggctgatcgctgacgggccaacctaggactcctggtgctttcagcttgcctgaggggcttcaacggtcattgggcaccggactgactggggccgcgatatgaggtgacgccacttggacagggaacgcctgcttgtgcagcacaacct

SEQ ID NO: 967 - DNA, 487 bp, Oryza sativa
  unsure (1)..(487): unsure at all n locations
  Clone ID: uC-osflcyp020a07b1
tttgactacacccgcttcgcttcctcccgtgtctattccggggaagctaagccatggcgcccgtcaccgcccgcaccccggtcgcagccctccgctcgtcggcgtcgctcaagtctaccttcctagggcaatcctccacccgcctcgcccgcgcaccgactacgaggcgtaatgttcgggcggaggccaagggagagtggctccccggcctcccttctcccacctacctcaacggcagcttgccaggcgataacgggttcgacccgttgggtctggcggaggacccggagaacctgcggtggttcgtgcaggcggagctggtgaacgggcggcgggcgatgctgggggtggccgggatgctgctgcctgaggtgctgacgaagatcgggttgatcgacgcgccgcagtggtacgacgccggcaaggccacctactttgcgtcgtcgtcgacgctgttcgtcatcgagttcatcctgttncactacgg

SEQ ID NO: 968 - DNA, 414 bp, Oryza sativa
  Clone ID: uC-osflcyp020a08b1
cttgtttttcagaggaaaatgcccccacgggggggttttgacaaatgtaccgtgtaaagcgctcatcaaccgaccctacgcttgtacggcttttgctgacggctgccgactagtgcgagggtatgctgagcttgaggagctgcattgagtacctgacactctcgactgtgactacttaatctgctctactatacctaaatcttacatggtccatttagctggtggctgtattataagctctaccacttgcaggctaggactactatatcaacagatacagagacgcgactaggatccaagatgaagggatgaacatacgtctagctggaatcgaacccatgatgaggtggtatgacctccaggcggcatctgaagatgctctctaccagtgctcgatcaggtgggctcgcgcac

SEQ ID NO: 969 - DNA, 454 bp, Oryza sativa
  Clone ID: uC-osflcyp020a09b1
tttcgaggactcccaagtccagccatgaggggcactttctacagcagtggccctcctcgtggccgccgcggccatggcggcgcaggtagtcgccgagcagtgtggctcgcaggccggtggggcgctgtgcccgaactgcctctgctgcagctcctacggctggtgcggctccacttccgactactgcggcgacggctgccagagccagtgcgacggctgcggcggtggaggtggcggcggtggcggcgggggcggcggcggaggtgagggtggcgccgcggtggaagcggtcgtgtcgaaggagctcttcgagcagctgctgctccaccgcaacgacgcggcgtgccccgccagagggttctacacctacgacgccttattcaccgactgcgccgggtttccggacttcgccgggacgggcgacgacaaggcgcgcaagcgtgagggcgccgcg

SEQ ID NO: 970 - DNA, 494 bp, Oryza sativa
  Clone ID: uC-osflcyp020a10b1
ggagatcgccaccagatcgccatggggacgctggcgagcgccatgcggtgggagaaccgccgcttcaagcccccctcctcctcctccgcctccgcctccgccgccctctcctcggggagggtccccctcgtcatggccttcctctcctgcctcgcgtggctctacgtcgccggccggctgtggcaggacgcgcagacgcggatgatcctgtctggtctcctcgagaagagctccggcaatcttccgaaggtgctgtcggcggaggacaagctgaggaatctaggatgcattggaattgggaggaagattgcggaggcagaaatggaccttacaaaggcgaagagcgaggggtatctgcgggggaatggaactgctactggcagttctgacaagaagaagctccttgctgttattggagtttacactggttctggttcccggctcaagaggaacaccttccgtggctcatggatgccgagaggtgatgctctgaa

SEQ ID NO: 971 - DNA, 498 bp, Oryza sativa
  Clone ID: uC-osflcyp020a11b1
ttctcttccgtctctttgtctcctccgctccttgcgccgtcgagacgagtcgcggttgaacaggggaggggcggcgatctccatcggggcgagcagagcaggggagaggattcatggtttatcactctagctttgttgatgacaccgggattaccaaagcatgcggctgtcctttgcttccactaaaaactcatataaggggcccagcgccagcattcgatcaagacaaggctgacattgttgatgaagcaattacattcttccgagcaaatgtcttcttcaaaaacttcaatgtgaaaagcccagcagacaagttactgatctatctgacattttacatcaatattgccctgaaaaggctggaaggttgccgaacactggctgttgggacaaaggcaatcattaatctgggtttggagaaagttcctgtgcctggggaaccagggtttcccttccctgatcttttcactctaccccaatctcaggaggaagcagaac

SEQ ID NO: 972 - DNA, 318 bp, Oryza sativa
  Clone ID: uC-osflcyp020a12b1
tcttgtcacacaaagcaaggaaaaaagtcgtttctttctccgggcagatgggccaccgccgcatcattctcctctttgccttctccgccgtcgtcgcaacctcaaccgaatccgccgccatgtgggagtgcatctacacccacatgatccagtccggcatggaccacgccaactcctggctggagctaaactgcattcgagcatgtcatccgaacctgatgagtcagatgccctttgacaggtactgcgcaggaagggaaagaggtaccaacaccctgttgaaggagactggcgcttgcagaactgttccagagctgt

SEQ ID NO: 973 - DNA, 71 bp, Oryza sativa
  Clone ID: uC-osflcyp020b01b1
ggaccccgccccaaaacccccggcccgacccaccccttttggcccggagcaaccaaccacccccgaggggg

SEQ ID NO: 974 - DNA, 483 bp, Oryza sativa
  Clone ID: uC-osflcyp020b04b1
tttaatctcaagtgcgtgcccggtatcaggtggaccggtctcgcacctgcatccaaaccacacacagctagctatcatggcctctaagccagggcctctcactcagtggccgtggaataaccttggaaactacaagtacgcgctggtggcgccgtcggcggcgtacagcacgtacaggttcgtgacggcgagcagcgcggcggagcgagacctcctcaacttcatggtgttccccatgctgctcctccgtcttctctacggccagctctggatcaccgtctcccgccaccagactgcccggagcaagcacaaggatcgtcaacaagagcctcgacttcgaacaaatcgacagggaaagaaactggggatgaccagataatcctgacggcgctggtgttctacttggtgagcgcgacgatgccgcaggcgcaggtggcaccgtggtggagcacaaagggatggggtgacggcggtgctgcacgc

SEQ ID NO: 975 - DNA, 496 bp, Oryza sativa
  Clone ID: uC-osflcyp020b06b1
ttgttcgaatgttatcatgaggcctgtcccaggaggaatgaagatccgggggccatactgcgggttctgccgctcttctgaaaacatagtaaggatcaatgtgccctacggcgcaaagctgctctatcaagagctattcagcatggggatctgccttagatttgagacggaagtctgctagaactccacatctactatcgactcaccatgtatatatatcctcgttgtcccttggagattctattatgggcattagtgttgtagccacatgacttctcttccggttggacgatggcatagctaggaggggcgaatctgaagtcaggtgaaacctttcttttgctatttatttgggtgaagactcaattcccatcacctgcctttgatgtcctgtgaccaaccgatggcatagttagggatggggtgaatcagaggtcaactgaaaacccttttgctatagttcgatgtttcaccttggcactgtactatgcacatt

SEQ ID NO: 976 - DNA, 477 bp, Oryza sativa
  Clone ID: uC-osflcyp020b07b1
tttggaatggagtagttggcaattcaacatggggctgtcttcttcacaagaagcaaatcattgctgtcgacgacaatatcgttaacctgaaggtggctgctggtgctcttaagaagtatggtgccgaagttacttgtgcagacagcgggaaaaaaagcaatcacattgctaaaacccccgcacaattttgatgcttgtttcatggacatacagatgccagaaatggatgggtttgaagccactagaaggattagagtgatggaaagagatctaaatgagcgaatagaacgcggagaggcgccaccagaatgtgctagtattcagaggtggcgaactcctatattggcgatgacggcagatgttatacaggcaacacacgaggagtgcctgaaaagcgaaatggatggctatgtctccaagccatttgaaggggagcagctgtacagcgaagtagcgcggtttttccataatcatgac

SEQ ID NO: 977 - DNA, 483 bp, Oryza sativa
  Clone ID: uC-osflcyp020b09b1
tctcggacgcgtgggcagcaccacccctggggctgcttctcccacctccctctgaattgcgggcctgaggcgatggcggcgctcgccccgtccaagatgctcggcacccggctcaacttcgccggctcctcccgctacgccaccgcggcaccgaccaccggagcgcagaagatcgtctccctcttcagcaagaagcccgccccgaagcccaagcccgccgccgtcacctcctcgagccccgacatcggcgatgagctcgccaagtggtacggccctgacaggaggatcttcttgccggagggtctcctggaccgctcagaggtgccggactacctcaacggagaggtccccggagactacggctacgacccttttggcctcagcaagaagccagaggacttctccaagtaccaggcctatgagctgatccatgccaggtgggcgatgctcggcgccgctgggttcatcatccccgaggcctgc

SEQ ID NO: 978 - DNA, 314 bp, Oryza sativa
  Clone ID: uC-osflcyp020b11b1
tcgaaggaatggcaagcggcagtgagggggttttttcacctgaggttgtgctggcccggcctacgaaggacaagaagaggcttctacatgctgcttaccgtgttggagatttggatcgcaccattaaatgttacacagaatgctctggaatgaaattactgaggaaaagagatgtgcctgaagagaaatataccaatgcatttcttggatttggacctgaggacaccatctctgcacttgaattgacatacaattatcgtgttgttaatgacgacattggtgcaggatttgggaatccagctttcgcaactgag

SEQ ID NO: 979 - DNA, 483 bp, Oryza sativa
  Clone ID: uC-osflcyp020c01b1
tttttcctcctcctcctcctccgcctcctggggtcattcccaactcatcgatccatcagcagctagctagctagctagctgcattgtccggcgagagagatagctgctgcagggggcggccatggggaggggcaagatcgagatcaagcggatcgagaacgcgaccaacaggcaggtgacctactcgaagcgccgcacggggatcatgaagaaggccagggagctcaccgtgctctgcgacgcccaggtcgccatcatcatgttctcctccaccggcaagtaccacgagttctgcagcccttccaccgacatcaaggggatctttgaccgctaccagcaagccatcggcaccagcctttggatcgagcagtatgagaatatgcagcgcacgctgagccatctcaaggacatcaaccgcaacctgcgcaccgagatcaggcaaaggatgggagaagatctggacgggctggagttcgacgagct

SEQ ID NO: 980 - DNA, 484 bp, Oryza sativa
  Clone ID: uC-osflcyp020c02b1
ttttgaatagcgccggtgatccttcgacgtacagtctcttcaccatcttcgacaagctggcctcgtcgccggagtaccagcagagggccgccatggtcgagcacttcaacgccggcaacaggtggaagaagcggggcatttcttgcgtgccgatcacctacgacgtgaggctccggccaactccggggaaggtgtccatcatgaacgacggctccatcgccgttgaggtcggcggcgtcgagatcgggcaggggctgtggacgaaagtgaagcagatgacagcgttcgcgctgggccagctctgcgatgatggcggcgagggcctcatcgacaaggtccgtgtcatccaggccgacaccctgagcatgatccagggaggcttcaccggtgggagcacgacctccgagactagctgcgaggctgctcggaagtcgtgcgccgccctcgtggagaggctgaagcccatcaaagagaaggctggcac

SEQ ID NO: 981 - DNA, 483 bp, Oryza sativa
  Clone ID: uC-osflcyp020c03b1
ttttgacctctcctctcagtgtatgacaggtgtggtgtttacagacaagcaggctgatgcgcaacttgctctgtggtggttagcaccgaatcatgtagtactaatgaagctaattaggcgcaagaggtgagaggtggggcagaggcggatcatgcctgatgtcgggatgtgcgagtaaattagagggttgaaaagggcggcgaagttgtgaagagctgattccaatcctcggtctgactttgggatcaattgacatatctctaaagtgctgcagttgtagtaggggtctctgtataaaccactcttgagctttctcaactccaagtggatctattgcaaccaacacagtggctctccctgctgaccatgtatgtgtcttacttctgagataagtctgttttagttgaatttcctatttttattataggaaatatccaatttgagatatgaattgagatattaccctacctactctgttatatg

SEQ ID NO: 982 - DNA, 461 bp, Oryza sativa
  Clone ID: uC-osflcyp020c04b1
ttctgaaatgagggaaaaacagctttctcctgaaaaggttgttgctgccattgatccagagaaggttggcattcaccaaagatatttgcaatggttgattgaggaacaggaatgtgatgagcctcactatcacacgtcatatgcattgtccctctccagatctgccatggacgcagtccgtttgggatccaacaatgaagagagaaacaataaagaatttgattctgatatgcagttcatttatctattgagggaaaggctgcaattttttttgcaatcgtcagatttgtatgacccagaagaagtgctatatgtgatttcagaatctgagctatggctggaaaaggctattttgtataggaagatgggccaagagaacattgtacttcagatattagcgctgaaactggaggatagtgaagctgctgagcagtactgtgcagagattggtcgagatgatg

SEQ ID NO: 983 - DNA, 487 bp, Oryza sativa
  Clone ID: uC-osflcyp020c06b1
ttggcacgcgtgagagtgaggagctcgcgagctccattaccctaaccctctcggagcttcacatcggcggcggcggcggcgatggcggagggtggcggcggaggaggagggtcggcggcgtcggcggcgctgaaggatcaggggaacgagcagttcaaggcggggaactacctcaaggccgccgcgctctacacccaggccatcaagctcgaccccgacaaccccaccctctatagcaatcgggctgctgcatttctccatctagttaagcttaataaggcactcgctgatgctgatatgacaataaaactcaagccacaatgggaaaagggtcatttcaggaaagggtgtgttttagagtcgatggaacactatgaggaggcaatatcttcttttcagatagctttgcaacacaatccacaaaatacagaagtttcaagaaaaattaagaggcttactcagttggcaagggaaaagaagcgggctc

SEQ ID NO: 984 - DNA, 488 bp, Oryza sativa
  Clone ID: uC-osflcyp020c07b1
tttctcggcaacaacttccccgtcttcttgatccgcgtcggcatcaagttccccgacgtcatccacgccttcaagcccaacccgcgctcccatgtccaggagtactggagggtcttcgacttcttgtcccaccaccccgagagcctccacaccttcttcttcctcttcgacgacgtcggcatccccaccgattaccgccacatggacggcttcggcgtcaacacctacaccttcgtcacccgcgacgccaaggccaggtacgtcaagttccactggaagcccacctgcggcgtcagctgcttgatggacgacgaggccacgctcgtcggcggcaagaaccacagccacgccacccaggacctctacgactccatcgccgccggcaacttccccgagtggaagctgttcgtccaggtgatcgacccggaggaggaggagaggttcgacttcgacccgctggatgacaccaagacatggccggaggacga

SEQ ID NO: 985 - DNA, 483 bp, Oryza sativa
  Clone ID: uC-osflcyp020c08b1
taagataatggaactatacaggttacatctttgtaagatactgaagcagagtctattgcaaggattggccataggttttggctttggattctcgcagtttcttctttttgcctgcaatgcccttcttctttggtacactgccatttcagtggacaagcagcgactcacaattgccacagggttaaaagagtacattctcttttcatttgcatcatttgcattggtggagccttttggactcgctccttacattcttaaaaggcggaagtctctcatttcagtgtttcaaatcattgaccgggaaccaaagattgatcctgatgataacaccggtttaaaaccacctaatgtttacgggagcattgaattcaagaatgttgatttctcttatccagctcgtcctgaaattcttgtgctgagcaattttaatcttaaagtgagtggcggacaaacagttgccgcggtaggggtctcaggatcggg

SEQ ID NO: 986 - DNA, 394 bp, Oryza sativa
  Clone ID: uC-osflcyp020c10b1
actagctcctctctcccaattccactggtcgcttctcgcgcaattcttgcgggtttgtgttttttttttcttcttcttcttttggtttcttgatcgatggacagcgactacgttgccggccttctcatgagcgccgccgccgcggggctcgacctcggtgtgctcgacggcggcggtggcgctttcttggagacgctgtgcggcgggcccggcttcgcggagcgggcggcgaggttgtgcggcggcggagctgggctcttcgggctgcctgcggcggggaacgccgagcgcggcggctgctcgagggaaggctcgtcggtgtccgaccctgcgtgggcgcacgccaccggcggcggcggcgacaatgccaggacgaggaaagctccggcgagcg

SEQ ID NO: 987 - DNA, 477 bp, Oryza sativa
  Clone ID: uC-osflcyp020c11b1
tcgggagaagaaggagaggagcagccatggggtcttttgtggcagcggcggcgagcacgttcctggggacgaggctggcggacccggcgccgcacagcgggaggatcgtggcgaggttcgggttcggcggcgggaagaaggcggcggcgaagaaggcggcgaggccgtcggcgccgacgacggacaggccgctgtggttccccggcgcggtggcgccggactacctggacgggtcgctcgtcggcgactacggcttcgacccgttcggcctcgggaagccggcggagtacctgcagttcgagctggactcgctggaccagaacctggccaagaacaacgccggcgagatcatcggcacccggttcgagaccggcgaggtgaagtccaccccgttccagccctacaccgaggtgttcggcctccagcgcttccgcgagtgcgagctcatccacggccgctgggccatgctcgccaccc

SEQ ID NO: 988 - DNA, 480 bp, Oryza sativa
  Clone ID: uC-osflcyp020c12b1
tcggacaagcgtaggggccggccgctggggggcattttcgcctcatcctccgtcgccgggcgtcggcgccggctcccctccatcgccggctgcctccgtagccccccctcagatccgtcggctgcccgccttctcttccactgtgaagtcctcgttctctccgttgagcccatcttcttcgtcggttttcttcctcacgccctctcctcttcggttctctccgacgagctctccggtaagtgcaaggatggtatgccgccgcccattgcagggttgggaatcctctcccctttcctacccccttcaattttgtgtccactctttctttgatttctgttcctctttgaggatgagagcacatgtccccttcataaacaaacctagatctactaaaatgtgatggattttaggctgatctgggtgcaacaaagtgctgcataggcttggattttgctatatatttttgccatgttatgcact

SEQ ID NO: 989 - DNA, 482 bp, Oryza sativa
  Clone ID: uC-osflcyp020d02b1
ttctcctcatcccatagcaagaagctaaggggctcctcctatcgcatggcagccatggccaccaccgcgtacagcctgctcaagacctccttcgctggcgcgcgcctccccgccgccgcccgcaaccccaccgtctccgtcgcgccgcgcaccggcggcgccatctgcaactccatctcgtcgtcgtcgtccactcccccctacgacctcaacgccatcaggttcagccccatcaaggagtccatcgtgtcccgcgagatgacccggcggtacatgaccgacatgatcacctacgccgacaccgacgtcgtcgtcgtcggcgccggctccgcggggctctcctgcgcgtacgagctctacaaggacccctccgtcagcgtcgccgtcatcgagcagtcggtgtcccccggcggcggcgcgtggctcggcgggcagctgttctccgcatggtggtgcgcaagccggcgcacctgttcctcgac

SEQ ID NO: 990 - DNA, 478 bp, Oryza sativa
  unsure (1)..(478): unsure at all n locations
  Clone ID: uC-osflcyp020d03b1
tttgggccgccgccggcgaggctgccggggtcgacttcgggtggacatggcgtctagccacctgctgcagggccccgactgggccatcaacctcgagatatgcgacaccctcaacgccgaccgctggcaaacaaaggatgtggtaaaagctgcgaagaagcggttgcaacataaagatccaagagttcagtttttcactttgacgttgttggagacaatgatgaagaactgcggtgaatatgtccattttgaagttgttgaacaacatattttgcaagaaatggttagaattgtccagaagaagcatgatactcaagtgagggataaagtattgatacttctggactcatggcaagaagcatttggtggacctggaggcaaatatccacagtattactggtcatacattgaacttaagaggtcaggaataatgcttcccaggcgccctgtagatgctcctncaatatttactccccct

SEQ ID NO: 991 - DNA, 481 bp, Oryza sativa
  Clone ID: uC-osflcyp020d05b1
tttttaggccttgataccgaaggcaatgagcttcctcgtttagtctatgtgtctcgtgagaaacgtcctggattccaacaccataaaaaggctggtgctatgaatgcacttgttcgtgtatcagctgtccttactaatggacaatacttgttgaatcttgactgtgatcactacatcaacaatagcaaagctctccgagaggctatgtgcttccttatggatccaaacctaggaaggcgtgtctgttatgtccaattccctcagaggtttgacggtatcgatagaaatgatcgatatgcaaacaggaacaccgtgtttttcgatattaatttgagaggtctcgatggtctccaaggaccagcttatgtgggaaccggttgtgtgttcaacagaacagctctttatggttatgaaccccccattaagcagaagaggccaggttacttctcttcgctttgtgggggacgaaagaagacaaaaa

SEQ ID NO: 992 - DNA, 469 bp, Oryza sativa
  unsure (1)..(469): unsure at all n locations
  Clone ID: uC-osflcyp020d06b1
tttcctgcttctgctttctctctcttctctgctctcctttcctcttgagaaagaggaaagggagagagaaagaggagaagagcaatcagcccaagaaggagaggccttcatcttcacctgatcggttcttcttcttcttcagcaggcagcatagtacttcatggctggacaaggccccgtggtgcccaaattcggatcgtgggacgccgagaacatcggctacaccgtcttcttcgacaaggtgcgcgagaacaagaccgcgcccacgccggcgacggcggcgccggcgacgcacgacgacgactacgagttcgatccctacgagcactacgagaacctgagcaggaaagcgtgcgtcgcgcccgccgagctcgcacggccacgggcacggtcacgcgccgccgtcggtgcaccaccaccaccacaccgggcgccgtcgncgccgcagcagcagcagcatcaccaccac

SEQ ID NO: 993 - DNA, 487 bp, Oryza sativa
  unsure (1)..(487): unsure at all n locations
  Clone ID: uC-osflcyp020d07b1
tttcgcgaatcccctaaccccaacccaacggaatcctcccaagaagaagaagaagaagaagggttattgcatcgatcgcagcgagggggaaaggggtaatcgcggagcagatcgaaacccgaatccaatcgatcgagccgccatgagcttcatcttcggcaagcggaagaccccagccgagttgctgcgggagaacaagcggatgctggataaatccatcagggagatcgagagggagaggcagggcctgcaggctcaggagaagaagctcatcgccgagatcaagaaggtggccaagcaaggacagatgggagccgtaaaaattatggcaaaggaccttatccgcacaagacatcagatcacaaaattctatgccctcaagtcccagctacagggtgtatctcttcgtattcagacattgaaatgaacacaagctatggctgaggccatgatnggtgtcacaaaagccatgagacagatgaacagg

SEQ ID NO: 994 - DNA, 479 bp, Oryza sativa
  Clone ID: uC-osflcyp020d08b1
tctgccaggtcatcggcgccgtcgtcgacgtgcggtttgacgaggggttgcctcccatcctcacggcgctcgaggtgctcgaccacaacatccgcctcgtgctcgaggtggcgcagcaccttggcgagaacatggtgcgcacaatcgctatggacgggactgaggggcttgtccgcggtcagcgcgtcctcaacaccggctccccaatcactgttcctgttggcagggccacgcttggacgtatcatgaatgttattggtgagccaattgatgagaagggtgacataacaacgaaccacttccttcccatccatcgtgaggcgcctgcttttgttgagcaagccacagaacagcaaattcttgttactggaattaaggctgtggatctgcttgcgccctaccaacgaggtggaaagatcggtctttttggtggtgcaggagtcggcaaaactgtccttattatggagctgatcaacaat

SEQ ID NO: 995 - DNA, 483 bp, Oryza sativa
  Clone ID: uC-osflcyp020d09b1
tcttttctttcagctaaacagttcagacggggatttttttgcaatgcttgcttaggcgcctgcaaagccggcagagcctgttgatctcatgcctccagtcaaacctcttgcttccactgagacattcgagatgaacatgctctctgatacgagcagcaacccatttggctcttcagactttggttgggaggatgacaccctgaccccagactacacttcagtcttcgttcctaatgctgccatgccagcatatggtgaacctgcttacctgacaggtggagcgccaaagagaatgaggaacaactatggtatcgccgtgccccagggaaatggcatgcctaatctcgcacaaaacatgcccaccttcgatcccgagatgaagtatttgccattaccttatgttgagagcagctcagatgaatcaatggacaaccttctgcaaaatgatgctacacatgacggggcatgcaacgagggcatctg

SEQ ID NO: 996 - DNA, 471 bp, Oryza sativa
  unsure (1)..(471): unsure at all n locations
  Clone ID: uC-osflcyp020d10b1
tttcntaaatcggtaaccagttcgaatcagatccttccccgaataatcctactatggattgggaccctcaggcaatgctgagcaacttatccttccttgagcagaagatcaagcaggtaaaagacatcgtgcagtctatgagtaatcgtgagagccaagttgctggtggttccagcgaggcacaagcaaagcagcagcttgtcactgctgatctcacttgtattataattcagcttatttcaacagctggttccttgcttccttcgatgaagaacccaatcagcagcaacccggcactcagacatctcagtaacacactttgtgctcctatgatcctgggcaccaattgtaacctgcgaccaagcgcaaacgacgaagccacaattcctgacattagcaagacccatgactatgaggagctgatgaatagccttaatactactcatgcagaaagcgatgagatgatgaact

SEQ ID NO: 997 - DNA, 413 bp, Oryza sativa
  Clone ID: uC-osflcyp020d12b1
tctggggcgcgcgccgaacaagagcgacgggaccatgtactacgagatcctgggggtccccaagaccgcctcccaggacgacctcaagaaggcgtaccggaaggccgccatcaagaaccaccccgacaagggcggcgaccccgagaagttcaaggagcttgcacaagcttatgaggtattgagtgacccggagaaacgtgaaatctatgaccaatatggtgaagatgccctcaaggaaggaatgggtggaggcggatcccatgttgatccattggacatctttacatcattctttggaccttattttggtggtggtggcagcagcacgggcataaggcaaaggatgggagaggatgtgatccatccgcttaagggttcctagaagatctttacaatggtacttaaaagaagct

SEQ ID NO: 998 - DNA, 486 bp, Oryza sativa
  Clone ID: uC-osflcyp020e01b1
tcatcacacacaaggcacacaggattgagggagaagttgataaggagagagatagagagggggagggagggaggggtagcaaagcaacttagctagctttgccagccatggcgaggagctctccttgccttgccgtcgctgtgctcctccttggagtggcggtggcggccattgcagcctttgctgatgaaggggcggcgagcggctggggactagggcatggcgcccgtttcctcagcaggcgaggccgtgctgcgtatgagaagtcgacagagccagaggcaaagcctgcgtcgcagcaggagccgaagtcggattcttactcgcaggcaaagcctgggccaaaagatgagcccaagccggagccagaggcaatgtctgcatcgcagccggagtcgaagccggcaacttactcggagtctaagcccgaatcaaaggcagagcctgaatcaaaaccagagccaaaggcagagtccacgccacaac

SEQ ID NO: 999 - DNA, 488 bp, Oryza sativa
  Clone ID: uC-osflcyp020e02b1
ttctccctcgttagaacgatggccgcgtgggggctgttccagaccaccagctttctcggcaccgcccctcgccgggatgagctcgtccgccgcgtcggcgactccggtggccgcatcaccatgcgccgcaccgtcaagagcgcgccccagagcatctggtatggacctgaccgtcccaagtacctgggcccgttctcggagcagacgccatcgtacctgaccggagagttcccgggagactacgggtgggacacggcggggctatcggccgacccggagacgttcgcgaggaacagggagctggaggtgatccactcgcggtgggcgatgctgggggcgctgggctgcgtcttcccggagatcctgtccaagaacggggtgaagttcggggaggcggtgtggttcaaggccggcgcgcagatcttctccgagggggggctcgactacctggggaaccccaacctggtgcacgcgcagagcatcctcgc

SEQ ID NO: 1000 - DNA, 488 bp, Oryza sativa
  Clone ID: uC-osflcyp020e03b1
tctagggagatgagattgagtgctcgtctgggcaatttttcatcgaatggagtttcacgactgatgtccattggtagcaatgaagctggcccaagaagaggaatggttcttccatttactcctctatccatgtcttttgatgatgcgaactactatgtcgacatgcctgcagaaatgaagcagcaaggagcggtggatgataggctccaattgttacgtgacgttactggatcattcaggcctgcagtgctgacagcactcatgggagtcagtggagccggaaagacaactcttatggatgtttcggcaggaagaaagactggcggttacattgaaggagatatgagaatttctggatatcctaagaaccaagaaacatttgcaagaatttctggctactgtgagcaaaacgatatccattcacctcaggtcacagctagggagtctttgatatactctgctttcctgcgccttccagaaaaaatagg

SEQ ID NO: 1001 - DNA, 462 bp, Oryza sativa
  Clone ID: uC-osflcyp020e06b1
tgtgcccacccaccactccaccccctctggtgtccgttcgccgccgcagaattcctcgccgccgccgccgccgccgccgccgtgaggtccatcgagatcgcgaccggagcaggtgcaggttgcgatggcccgcgtgtacgtcggaaacctggatccccgcgtgacggcgcgggagctcgaggacgagttccgcgtctttggagttcttcggagtgtatgggtcgcaagaaagccaccaggttttgcattcattgattttgatgacaggagggatgctcaggatgcaattcgtgatatagatggcaagaatggatggagagttgagctgtctcgtaatgcaagcagtggtcgtggtggccgtgatcgatatggtagctctgagagcaattgctatgaatgcggtgagactgggcactttgctcgtgaatgccgtttgaggattggttccggtggtctaggcag

SEQ ID NO: 1002 - DNA, 491 bp, Oryza sativa
  Clone ID: uC-osflcyp020e08b1
tttggtgatgatgctttcaacaccttcttgagtgatatctggtgctgggaagcttgttccccgtgctgtatttgttgatcttgagcctactgtgattgatgaggcgaggactggttgctaccgccagctcttccaccctgagcagctcatcaatggcaaggaggatgcagctaacaactttgcccgtggtcactacaccattggcaaggagattgttgatctgtgccttgaccgcatcaggaagcttgctgacaactgcactggtctccaaggtttccttgtgttcaacgctgttggaggtggaacgggctctggtcttggttcccttctcctggagcgcctttctgtggactatggcaagaagtccaagcttgggttctctgtgtacccatcccctcaggtctccacctctgtggttgagccatacaacagtgtcctctctacccactccctccttgagcacactgatgttgctgttctgcttgataatg

SEQ ID NO: 1003 - DNA, 486 bp, Oryza sativa
  Clone ID: uC-osflcyp020e09b1
ctctggacatactctactactactagccagggagctttctaactaactacgtggctatggcccccaccgtgatggcctcctcggccacctccgtggctccattccaagggctcaagtccaccgccggcctccccgtcagccgccgctccaccaactcgggcttcggcaacgtcagcaatggcggaaggatcaagtgcatgcaggtgtggccaattgagggcatcaagaagttcgagaccctatcgtacctgccaccactcaccgtggaggatcttttgaagcagatcgagtacctgcttcgatccaagtgggtgccttgtctcgagttcagcacggttgggttcgtctaccgtgagaaccacaggtctcccggatactacgatggcaggtattggaccatgtggaagctgcccatgttcggctgcaccgatgccacccaggtgctcaaggagctcgaggaggccaagaaggcctacccagatgcct

SEQ ID NO: 1004 - DNA, 466 bp, Oryza sativa
  Clone ID: uC-osflcyp020e10b1
tcttccgcctcgagcattccctctcatggggccgttttgagcgtccggttcgtaacgaccacggcgaaggggacaagaaggcggcagcagaccagcagtggccatggtgatggtggatctagcaaggcggaggctggcgttggggtggaccggtggagggcagcgtgaaggctggcaacgacctcaacttctccggatctggtggttgtaagtggcaatggaggaaggtgcaagcgcaggcggcaacggtgtgaccacaacatcaagtggtccagcgctgttcatcttctatccaggctagtcgccatcgatctagtgccggacctgaagaagctgaagaaagaggtcaagatggatatgtaagaagggatttgtcaattgctttaggttgcaatgctaattttgttggggtgagttggagttctcccatggatccctttgttagatttatttgggtgaatctttg

SEQ ID NO: 1005 - DNA, 484 bp, Oryza sativa
  Clone ID: uC-osflcyp020e11b1
tctaataaacacaaactcactccacacacagtaactactgcacaaacgcagtctgcgacagcgaggatggccggccgagccagatgcgtactcatactgctactggacattgccggcttcgccaacgtcctcgccgccggcggaacgacgccatcgtcgtcgacggcgcaggagagcacagacacacggcagcggagttgaaggaggtgaacgggatgcttgcgtgcatgatcggatgcttcacgcaaatgatcgagtgcgccttcaggtgcatggctaagggccccgacacgacactctgcgtcgtgagctgcaaccagagcagcatcgtctgcatggggcgttgcgccctcacgccgccgtcatccaagcccaagcccacgccgccgccggccgcgcccacgcccaagcctgccgctccctcggcgtatgcggcgtcaggcaaagccgccggccacggcgtcgctggcgaccccttggccta

SEQ ID NO: 1006 - DNA, 464 bp, Oryza sativa
  Clone ID: uC-osflcyp020e12b1
tttctttctaactgtacataaatggccggtgaagattttaactctttttggttttaacgcccacacaagagaggaagtgggacaagaaaatttcttcctttctggtgccaaggcagatcaagtcgctgggctgaggaaggatagagagaatggcttgttcaaaccagacccacgttttgaagaagccaagcagcttataaggagtggcgctttaggcacctatgactatgctcccctcttggattctcttgaaggaaactccggatttggtcgtggagattatttcctcgttggctatgatttcccaagctatattgatgcacaggcccaggttgatgaagcctacaaggataagaaaaaatggatcaagatgtatatactgaacacagttggaagtggcaaattcagcagcgaccgtactatcgctcagtatgcaaaggaaatatggggcattcttgctagcc

SEQ ID NO: 1007 - DNA, 353 bp, Oryza sativa
  Clone ID: uC-osflcyp020f01b1
ctcgccgaggggtacgagcactggtaggagggggattccagccacgctgtcggttaggcccacggccgacgctaggaaagcaactacagccaggcacctcgccactagtggcgaactggcgtcgtcgctacatggggcgcgacatggccaccgcataagcccacctgcggcacacgaagggggactaccgcgaacttcccccaggaggagccgttgccacaggatacgacacgacggaaggctgcccggccggcgatcacagctgctgacgaacacgacgaagctaaggctgctgacgacggcggagaaggcggtgctcctgtcggcagcggagcgcgcctggctgacgctga

SEQ ID NO: 1008 - DNA, 442 bp, Oryza sativa
  Clone ID: uC-osflcyp020f02b1
tcgaagcgcgagatcccaaaaaaaaaaggggggaatttttagaaaattggagcttgcgaggaacaggagaagcgccgcggcagctagctgccacgtggacctcgccgccgcgcgtggatgcccccgcggagcccgcgcccatggcgtccgtttcgtcgtccccgtcgtactcgtcgcaggccgccgtcctcctcctcctccaccagccgccgcaccagcacgggcacggcggcgcgtgcctccggtaccgcggctcgcagtcgcaggggagagggaatgccgtagctacgtcgctggggctctccgcggcggggcggggcggagcggggggcctcctcctgctgccgccgctgcccgcgctgcgggcggcggaggggaaggatgggcgggccgtgaccaaggatgaggaggaggaggcggcggcggcggcggtggaggagga

SEQ ID NO: 1009 - DNA, 441 bp, Oryza sativa
  Clone ID: uC-osflcyp020f04b1
ttgtaattcttgagctcaatcagcaacaacgggtatcttcttcttgcttagttaagtccttcgccctcccaagaagaagaagatgtcttgctgcggcggcaactgcggctgcggcagcggctgccagtgcggcggcggctgcggcggatgcaagatgttccctgatgtggaggccacagccaccaccaagaccttcgtcctcgctgctccatccaacaaggcgagctctggaggaatggagatggcggcggagagcggcgagaacggcggctgcggctgcaacacctgcaagtgtggcaccagctgcagcggctgctcctgctgctcctgcaactgaatctatcgctcgacgtcgcccggctgcatgaggatttatcgcatggatgctgctactgtcgctcagagctttgatcgaggccttaaattgttgcattagtaccc

SEQ ID NO: 1010 - DNA, 445 bp, Oryza sativa
  Clone ID: uC-osflcyp020f05b1
tcaccacaagctctagcttacagctcactgccagtgtacattgttgctagttagctagagctagatctcgatcgagacaatggcgggtgctcgcaggacgatggcgctggttgcgttggtggcggtggtggcggcggcggtggtggcggagagggcgtcggcggcggtgagctgcggcgacgtgacgtcgtcgatcgcgccgtgcctgtcgtacgtgatggggagggcagagctcgccgtcgtcgccgtgctgcagcggtgtgaggaccctcaacggcaaggtctcgtcgtcggccgaccgtcgcaccgtctgcaggtgcctcaagaacatggcctcctccttcaggaacctcaacatgggcaagagccgactccattcccaacaaatgtggagtctccgtctgattccccatcagcaccttcgttgactgctccaagatcaact

SEQ ID NO: 1011 - DNA, 471 bp, Oryza sativa
  Clone ID: uC-osflcyp020f06b1
ttcttgagctcaatcagcaacaacatctatgtcctttttgcttagttaagtctttcgccctcccaagaagaagaagatgtcttgctgcggcggcaactgcggctgcggcagcggctgccagtgcggcggcggctgcggcggatgcaagatgttccctgatgtggaggccacagccaccaccaagaccttcgtcctcgctgctccatccaacaaggcgagctctggaggaatggagatggcggtggagagcggcgagaacggcggctgcggctgcaacacctgcaagtgtggcaccagctgcagcggctgctcctgctgctcctgcaactgaatctatcgtcgtcgtcgcccggctgcatgaggatttatcgtatggatgctgctactgtcgatcagagctttgatcgaggccttaatttgcttgcattagtacccatcttatatgtaggcaggccttgccttttgctctga

SEQ ID NO: 1012 - DNA, 473 bp, Oryza sativa
  Clone ID: uC-osflcyp020f10b1
tttaaagaagcgaaatgatttatcggtgatgcacacctatgccatgaaagcagcacagatgggtcttatggcaactacctcagagcatttaaaaatgcagtcaaaagctatgaagcaactttgcagattgttcccattgcgacgagttattaaggatggcgaacagaatgatggctacaatggtccatatgatgtaatatgcaacgctcgtctacctcgtggtcttgacccacattcagttccatccgaagaattatcagcttctttggggtacatgttacagctcctcagtattgtagttcctatcctagccgcacctgccctccacatatctggctttggggcttcgtgttcacgtgtatggcagcgtagttcctactggagcacacgacagtcccaaagcaaagtctacccactttttatacctaggaaaaataattgctctgttggtgaggataattcatggacggaaa

SEQ ID NO: 1013 - DNA, 470 bp, Oryza sativa
  Clone ID: uC-osflcyp020f11b1
ctctataggcttcgaccaatacgatactgggggtctgtttgacctattgctgttttccgaaggagccgaagcttgcaggagaaaaatttccgtgaaataatctaattaagagaaggccctcgtgccgctcagccccagggcggcacgggcggcgaccagacgagcgcgccgccgccaacctcttcctcttctcccctccaccttgccgccgctcgagcgcccgccggcaaagccggggggacgcaatgacagcggcggcgaggctccctacctcctctcgcaggcgcggcggctggggcgatgccatgaccggagagaggtctcgcgggtgcagcggtcgccggcggccagatccggcgtcggtaggaccggatccggtccccacacggctggatcgggcgtctcagccggtggcgacaggaaggaggcgcacgctcaacgaggagcgcggaagatgcggctgaagtggc

SEQ ID NO: 1014 - DNA, 398 bp, Oryza sativa
  Clone ID: uC-osflcyp020g01b1
tttcgagatggcgggaggcggcgtggcggcgctgggggtgaagaaggagcgggcggcggagtacaagggccgcatgacgctcgccgtcggcatggcctgcctcgtcgccgccgtcggcggcgccatcttcggctacgacatcggcatctccgggggagtgacgtccatggatccgttcctcaagaagttcttcccggtggtgttccggaagaagaacgacgacggccagaacaactactgcaagtacgacaaccagggcctctcggcgttcacctcctccctctacctcgacggcctcgtctcctcccttgccgcctcgccggtgacgaggaactacggccgccgcgccagcatcgtctgcggcggcctcagcttcctcgccggcgccacgctcaacg

SEQ ID NO: 1015 - DNA, 401 bp, Oryza sativa
  Clone ID: uC-osflcyp020g02b1
tgtcttgcctcaccgagtgaacgcacgcgctcgccggttgcgaccaagaaaccacgcgaagacatggcattcccgagcggcaaagcctactacctccacctcctcctgctcgcgatcctgccaagcctcgtcgcgcggcgcggcgcggcgcagcagggcggcgtcgacgagaagcagctcctgctccaggtcaagcgcgcgtggggggaccccgcggcgctcgcgtcgtggacggacgcggcgccgcactgccgctgggtgtacgtgtcctgcgacggcggcggcaccggccgcgtcacgtcgctgtccctccccaacgtcgcggtcgccggcgccgctcccgacgcagttgcggggctgacggcgctcacggtgctccacctacagaacaccagcgttgg

SEQ ID NO: 1016 - DNA, 458 bp, Oryza sativa
  Clone ID: uC-osflcyp020g05b1
tgtgccttcccccggaccagcaacgcatgatctttttcggcaagcatcttttggaccgcaggacccttgctgactacaacatacagaaggagtcaacgctgcaccttgtgctccgtctcaagggaggcatgcaaatcttagagaagactgtgaccggcaagaccatgaccctggaggtggagtcttctgataccatcgacaatgtcatggccaagatccaggacaaggagggcattacctcggaccagcagagcctcatctttgctggcaagcagctggaggatggcaggaccctcgctgactacaacatccagaaggagtccaccctgcaccttgagctccggcttcgtggcggcatgcagatctctgtcaagaccctcacaggctagaccatcaccctggaggctgagagcgtcgacaccatcaacaacgtaaaggtcaagatccaggacaaggag

SEQ ID NO: 1017 - DNA, 294 bp, Oryza sativa
  Clone ID: uC-osflcyp020g06b1
tctctcatcttccggcggcgcaccagggtggggtttttgaggagtgttagtctgcgccagggacgcggttcgggcggcgagggcggcgcagctcctggcggcgcagtcggcaaggacctagggggggggggggggcatcctgcataccaacacccattttggaccttccataactctacaattcaagatcttgcagcaaccgctgcaaactatagacggcgggatttgacagcctggctcccaagaccaagcacatactggtgcttggtggactacttgattttcgccttggcg

SEQ ID NO: 1018 - DNA, 440 bp, Oryza sativa
  Clone ID: uC-osflcyp020g07b1
tttcggacgcgtgggcacgcacgttgccaccacaggctacgcaaaattctctcccttcctcctccaccacctccactccgacgatcctcctcctgatcctgtgccggccggcgatggcgtaccggttgctggagctcacgctggtctccgcgagcgacctcaagaaggtcactctcttctcgcgcatgcatgtctacgccgtcgcctccatctccgggagcaacgtccccatgcccatgcacggcacccacgccgaccgcaacggcggcagcaaccccgcgtggaacaccgtgctccacttccccgtccccgcccgcttcgacacccgcggcctcgccctccacgtccagctccgcgcccggcgctccttcggcggccaccgcgacgtcggggacgtgttcgtgcccctcgacgacctcctcgccggcgcgcacgacggc

SEQ ID NO: 1019 - DNA, 472 bp, Oryza sativa
  Clone ID: uC-osflcyp020g09b1
ctctaataattcaattagatgtttcccactgctttcttgatgataatgtgtatcagatgcccgaatcattccagagagagaagtgcgtcctcctccaccagtaagaccgccacggcctatgcatggtgcacagcacaagcgtctgctcttcacaattgcggcgactggaatcgcagttatgattggttcgatactttttcagagggaggagagtttctaagtccagtgtctatggtctctccccatcgagttgattccaacagcaacagcataaagagttaccttgatgtataatttacccctcataatcagtctataaaatcactttgtttgtttgaaaaaaaaaaaaaaaaataaaaaaaaaaaaaaaaaaaaaaaaaaggaaaaataaacaaaacaaaaaaatttaaaaaaacaaaaaacaatataaacctccttcttttatatacccaaaaggggggggcccttttaa

SEQ ID NO: 1020 - DNA, 482 bp, Oryza sativa
  Clone ID: uC-osflcyp020g12b1
tctgtccccttccaccgccgccggatccaagcatcttccttggccggccccatcctgcactgcactgcttccgccgttttggatccgggctcccttctgcactgcactgcttccaggtccccagatcggcgaggggcgcacggtctcacatgatgttgtgatgtgctcatagggagagtggctcaggagattggggcttggggtggatcaacaacttggtgagggaggccggtggcgaagtagcaaggaaggccgggcgatgcagatccatggcagagcagcttctcttaggagctcagttgcgactccggcgcaggatctcgcgcagctgtgcgggaatcatgcagcaacccatggttgattggtggctcgagcaacagccagccacgccgcagccgccatcattaacagagggaagcgctttgagaaaattttctgaatgttatattgtttattgattccatattttgcttccttgcctg

SEQ ID NO: 1021 - DNA, 380 bp, Oryza sativa
  unsure (1)..(380): unsure at all n locations
  Clone ID: uC-osflcyp020h01b1
tttcatcctcttgtctccttctggcctgtgtggtggcatcggccatggtgcctgcagcgccatgcgggccgcccaaggtgccgcctggccccaacatcactgcggcctacggcaaacagtggctggaagctaggggtacctggcacggcaagccaaagggtgccggccccgacgacaacggcggcgcttgtgggtacaaggacattgacaaggctcccttcctcggcatgaactcatgtggcaatgaccctatcttcaaggatggcaagggctgcggctcctgctttgaggtcaagtgttccaagccagaggcctgctccgacaagcccgtcattatccacatcaccgacatgaacactgagcctatcggcgnctaccac

SEQ ID NO: 1022 - DNA, 351 bp, Oryza sativa
  Clone ID: uC-osflcyp020h02b1
ttttgtcctgtcgcagcacagacagggacgggtgaacgttcaaggcagagcaggtttcagctacaacaggatcgacggcctgaaggctggcaccactcatcatgtcagtgttgaccagacgatatcgctgtcaggtgaccgaacaacagggctggatgaatgcagaatctactacctgattgacagtggacaggctcttcccgctaaagtcctttagggagacggtacccactgcccgcgcttaatgagccaaagaccgtcgcacttctagtgtatgaccaaggaacaggtgctcctcgaccgatcacaacatgcgctggtgtcggaaacttacgaacacaactatacatt

SEQ ID NO: 1023 - DNA, 367 bp, Oryza sativa
  Clone ID: uC-osflcyp020h06b1
tgcgagctgaccaacaaacccaaccccgagccgtgctcgccgcccgccagcgtggtcgccgccggcgtctaagctctcattcatggcggcggaggcggcctccggtggcggtggtgggtaccggatgctgccgcaggcggggttgccgatcggtttccggttccgacccaccgacgaggagctcctgctccactacctccgtcgcaaggtcatgtcgcgccccctccccgccgacgtcatccccgtcgacgacctcgcccgcctgcatccatgggaccttgcaggcgagggagacggcgagaggtacttcttccacctgccggcgacgagctgctggcggaggggcggcggccgtagcatggctgtc

SEQ ID NO: 1024 - DNA, 502 bp, Oryza sativa
  Clone ID: uC-osflcyp020h08b1
ttttgatcttcccagatggtgagggacgagtgaaccattaaggcgtagcatattacaacaatcttataaactaccttctgcagaaaggtatcactccttatgtcaatctttaccactacgatctccctcttgcgcttgagaagaagtacggaggctggttgaatgcaaaaatggcggatctattcacggagtacgcggacttctgtttcaagacctttggcaatcgtgtcaagcactggtttacatttaatgagccaaggatagtagcacttcttggttatgaccaaggaacaaatcctcctaaaaggtgcacaaaatgcgctgctggtgggaactcagcaacagaaccatacattgttgctcataattttctcttatcacatgctgcagctgttgcaagataccggactaagtatcaggcagctcagcaaggcaaagctggaatagctcctgacttcaattggtatgaagctctttccaactcaactgaagaccaagcagc

SEQ ID NO: 1025 - DNA, 373 bp, Oryza sativa
  Clone ID: uC-osflcyp020h09b1
ttttaccgttgtaacaacaaatgacgcttgcggtgggaagtctgtagatgttgatatggctgacaagcctggagattcagatggcttcaaacactttgatgttcagcagtgccctccagaccatcattacctggaaaacatggcgcagggcactggtggaagaaagcgggtaaaaaaggcacagcaggaatggaacatacttgagaaaaatctaccagattatatttatgttagggtatttgaggactcgaatggacctcataagagccgtgattattggagcaagtggaacaccataccaagatggtcttttcttcttcgacttccaccttccacctgagtttccacatgttcctccgtcggcgtactatca

SEQ ID NO: 1026 - DNA, 380 bp, Oryza sativa
  Clone ID: uC-osflcyp020h10b1
tttatatttacgatgtctatctggtacttgggcagctttacaagggatgctcttttgtcattaatcaccagattggctgcagtggcagatcagttcttaagagagtgtttgcagatgcttgtgaacaacttcactccacctggatcacttactgctttcatcggccaaccgagatggcttgcaaggaagaaggaaatctattctcagttgcatgagagtttgagaatgatctctgatactgtacccttagcaccaaggatgttaaaggatataatagataggagtatgccgaagttatttgacaacaaagctaagatggtttcgtttgctgagtgcatgctgggtcttgataatgataggatgggcgacctcattggagc

SEQ ID NO: 1027 - DNA, 434 bp, Oryza sativa
  Clone ID: uC-osflcyp020h11b1
tctcccacgcgtccggatcaataattctgctgaatcgtcgatatattgatttttttagttagtggtataggatcttggtgcgataccgcttccacagtcactcatttgttatttttttctctttttattttcaaaggtttgttgttattttctagcaaaaccataagcagtgatcttgatatgctggaaatcctggaagccttcctgtaagggcaaatttcattgttttttgacacaaattgctgataaaaagaagtgtacattgtctcttaccattctgagatgcaagcttgtgaactgaactatagactacaaaaaaaaaaaaaaaaaaaaaaaaaaaaaaaaaaaaaaaaaaaaaaaaaaaaaaaaaaaaaaaaaaaaaaaaaaaaaaaaaaaaaaaaaaaaaaaaaaaaaaaaaaaaaaaaaaggggggg

SEQ ID NO: 1028 - DNA, 287 bp, Oryza sativa
  Clone ID: uC-osflcyp020h12b1
ctctgcgagagaccgatagcgaacaagtaccgcgagggtagaaaagaaagaggagaagaaagaagagaagaaggaagagaagaaggcggagaagaaagaggaaaagaaagaagagaagaaatgataaaattatgaaatatataacaccattgcatagtgtctctcccatctgcaagtgaaacagccaataccttggacttttgatcgatgttttatgtgaaattactctgtaccataatactgtaaagaacatattggtacacgtaagtaatattgcttacagttac

SEQ ID NO: 1029 - DNA, 509 bp, Oryza sativa
  Clone ID: uC-osflcyp021a01b1
gtaccgacaaaacaaaaaggcttgatgctatgagtaaagtgatttatgaagtttttccggaaccaaaccagcaactattgcagaggattcttaagatgatgcagattgttggatcacacaaagctgtgaataggatgtctccatcggctttggcggcttgcatggcaccactccttctccgacctcttcttctcggtgaatgtgaaattgatagtgactttagtatggctggggatggttcattccagctgcttcaagctgcagctgctgccaaccatgctcaagcaattgtcatcattatgctcgaggaatacgacgagatatttgatgacttggaagacggttcctgctcttcagatgcatatactgattcagaagatggcgatgttgacaaggaatattctacggacaatgatgtggatggctcttatgattctggtgaagataacattgaagaagacatggaagatgatactgagtacttctctggtggcagtgaatgtgatgac

SEQ ID NO: 1030 - DNA, 400 bp, Oryza sativa
  Clone ID: uC-osflcyp021a05b1
gcgttcaaccttccactgatccacacacagccgcgaggagagagaaagagagaggagagagagatggcggcggagctgacggcggcgcagctgcgggcgtacgacgggatcgacccatcgaagccgatctacgtctccgtccgcggcaaggtctacgacgtcacctccggccgcggcttctacggccccggcggcgcctacgccgtcttcgccggccgcgaggccagccgcgcgctcggcaagatgtccaaggacgacgccgacgtctccggcgacctctccggcctctccgacaaggagctcggcgtcctcgccgactgggagaccaagttccaggccaagtacccccgttgttggccggctcaccgaatgaaaaaaaaaaatccccccaaatcaaccc

SEQ ID NO: 1031 - DNA, 416 bp, Oryza sativa
  Clone ID: uC-osflcyp021a08b1
tcgattttacttgagctaatctgaggccatgagccaatctcaaatgacaactttgggctccactgccgtaacattgatgaatgggctagaccgcacatggagagtggggatatccacggcatcattgatcagtcgttagacgcagggtacgacctgcagtccgcgtggtagattgctgaggggtcgactatatgcttgaagcccaagggggtgctagaggccacacatctcagaagggctcaaggagattaaggacgccatcgccatcaagctgcatcgggagctggccttcagcattcaccacctcatgtacaagaggtgtctcttcatagccggcaacacgaccagcaggctgcaagacctggagcaccatgcatcaggtgatgagctgcttatgcgcccaagtgtcaaggaca

SEQ ID NO: 1032 - DNA, 258 bp, Oryza sativa
  Clone ID: uC-osflcyp021a10b1
ctgccgtgcagcttccttttctgcttcaatcaccttctcaagctgctgctggaactgcgcgagcttccggcgctgcgtcttgagggtgaggatggccctgtccacgtccgtcaccttgggcttcttcacgaagatgttccccatggccgcgtgctgctgctacctacccggcgccctcttcttccttccgacgcggcggcggcggcggcggcggagatggccggagaggggaggtggataggggagggcggcacggtg

SEQ ID NO: 1033 - DNA, 408 bp, Oryza sativa
  Clone ID: uC-osflcyp021a11b1
tcgatagccggcattcgttgccagggcgttcgttggcattgtcaagcttcacaaactctgctactcactctcgtgtttgtgtgtgtctccgatcttggccatttccaacatttggtatcagagcgagtttagagaggggagatgatgacgccgacgaagactcttcgcatcgaggactcgagctctagcggcaccggttatggcagcacaccgcgtaaggccgtggtggagcgcgtcgtgcccaattccagcgtcgtggagctgccgatgctaaccagggctaactatcatcagtgggccttggttatgcgggtgagcttggaggcgctggtgttgtgagacgcggtggaggcgggcaccaacgaccgcgccaaggatcggcgggcgttggccgccatcttgcgtgca

SEQ ID NO: 1034 - DNA, 291 bp, Oryza sativa
  unsure (1)..(291): unsure at all n locations
  Clone ID: uC-osflcyp021a12b1
aagctgcgcacgccggcatggtaccgggccggactggctggaccgacccacgcgttcgttaaaaagcgattttttgctctcctcttgatggttgctgcgaccttcgatgtccctatgcggaatgaaatctcctgctggggcggctaaaaatcggagattttctgtctttttgatccgtctttagtggagctttttgagcctgatttatgcgatgggcttcttggcgtggttgttcccatgtcctcaagaggtgagagattatgattaggaaccaagaacctnncatgactt

SEQ ID NO: 1035 - DNA, 489 bp, Oryza sativa
  Clone ID: uC-osflcyp021b01b1
tttatttgcaccacttcgagtcgaaggccgacgccggctcgttcaagacctacccgcagcaggctggtactattcgcaagaacggtcatattgtcatcaagaaccgcccatgcaaggttgttgaggtctccacctccaagactgggaagcatggacatgcaaaatgccactttgtggccattgacatcttcaatgggaagaaacttgaaaatattgtgccctcctcccacaactgttacgtcccccacgtgaaccgtactgattatcagctgattgacatttctgaagatggatttgtcagcctcctgactgaaagtggaggcactaaggatgacctgaggctccctagtgatgaggctctgcttactcagatcaaggatggattctcccaggggaaggaacggattgttaccgggatttctgccatgggtgaggagcaaatctgcgctctgaaagatattggccccaagaacttaaataccttgttac

SEQ ID NO: 1036 - DNA, 523 bp, Oryza sativa
  Clone ID: uC-osflcyp021b02b1
ctctaccaaccaagaaacaagaaacattacaccaaaaaactagctagctagccaatggcctccatgtcctccttccgacttgccgtggcggcggctgcactattggtcattggctcatgtgccacagagctcaccttcaaggttgctgagggctctagcgccactagtctggagctcgtcaccaacgtcgccatctctgaggtggaggtcaaggagaagggcggcaaggactgggtggggctcaaggagtcgggctctaacacctggacactcaaaagtgaagcaccactcaagggccccttctccgttcgcttccttgtcaagaacggtggctaccgtgtcgtcgatgatgtcatccctgaaagctttactgccggctctgaatataaaagtggcatccaactctaagtaacaggcatgcatactcttgtgttgggtcatattggaattaagaacctctaaaaattatgtcttaaagagatcactccatgttcgagcgaaccattaattaatttttctatta

SEQ ID NO: 1037 - DNA, 511 bp, Oryza sativa
  Clone ID: uC-osflcyp021b03b1
ctgagtatattctttttttgaacgaacatacggagtatattctataaataaaggaaaaggcctgggagcgaagcggcagagaatggcagggaaagccggcggcctcaagggcgtcgccctcatcggcggcgccggcggcaacagcgcggtcgccggcgccctccacttcttccaggacccctccaccgggtataccgaggtgagggggagggtcaccggcctcgctccgggcctccatggcttccacatccactcctttggcgacaccaccaacggctgcaactctaccgggccccattttaatcctcacaataagtcccatggggcaccatctgatgatgaaagacatgtgggcgacctgggaaacatagtagccaacaaagatggtgttgcagatatcttcataaaggacctacagatttcactaagcgggcctgattccatattgggaagggcagttgttgttcatgctgattctgatgacctaagaaggggtggtcatgaactcaat

SEQ ID NO: 1038 - DNA, 494 bp, Oryza sativa
  Clone ID: uC-osflcyp021b04b1
ttagttaagagttttcacaggaaaggacagagtcacaccaggaaggccaacaatactttctcttgaactaactggtgaggccattgaggggaccacaatggttgccagcagaagatattggggaggagaagaaggggagaccatattccgttggatattgactagttcagatggatcacaaaaacaaattgaaggggctgcaagttcatcatacaccttgaactgtaatgatattggcttttacatatctgtcttgtgtgagcctgttagaagtgatggagttcatggctctctggtgtcaacagaagagtctggtcctattttacctgggaccactaccatgcttaattgtttgagtaagttggccctatggttgaaggtggtggtttgacctttcatgctgagtatacaggaggtttcatgggagactgcatccaaaaatggttcagattacattctgatggcaacaaagagaaattgtctactgatgaatg

SEQ ID NO: 1039 - DNA, 486 bp, Oryza sativa
  Clone ID: uC-osflcyp021b05b1
atgactcctgagtttctcaagatgaatcctattgggaagattcctgttctagagactcctgatggtcctgtttttgagagcaatgcgattgcacgatatgttacccgctcgaaggctgacaacccactctatgggtcttcactgattgaatatgcccacatcgagcagtggaatgacttttcggccacagaggttgatgctaatattggaaaatggctctacccacggctaggaattgctccctatgttgctgtgagtgaggaagcagctattgctgctttgaagagatcattgggtgccctcaacacacaccttggatcaaacacataccttgttggccattcggtgactcttgctgatattgtgatgacctgtaacctctacatgggctttgctcggatcatgaccaagaattttacttctgagttcccttatgttgagaggtacttctggaccatggttaattagccaaactttaagaaagtc

SEQ ID NO: 1040 - DNA, 409 bp, Oryza sativa
  Clone ID: uC-osflcyp021b06b1
attagctacacaagggattaactcatcactcacttagctaattaaatcttcgaccatgtcggacaagtgcggcaactgcgactgtgctgacaagagccagtgcgtgaagaaaggtaccagctatggcgtcgtcatagttgaagccgagaagagccacttcgaggaggtcgccgccggcgaggagaacggcggctgcaagtgcggcaccagctgctcctgcaccgactgcaagtgcggcaagtgaagtcacgaagcaaccgaacactcgccgccggcgagtcacctaccttaattagttcacaataaaaccacccatatgagtgtgggttgtgtgggtgctgaatattgctgaattaaacccgtgtggtatcgattaattaagcagctggtcgcttcggcgactatgcgt

SEQ ID NO: 1041 - DNA, 460 bp, Oryza sativa
  Clone ID: uC-osflcyp021b08b1
ttctttcaggtggttgccaagattatgactcatggcatcaaaatcctcagtaccggcttagagtaacaggacgggatgcactgtatcctgtacatgtatttattacccttacgcagggtgttggtttttctagaaagacaaatggtttccggaactatcaatctagccatgactcttctatgttttacattggaatgaggatactcaatacacggggctgccgtgctgcttacaatatctacatgcatgaatcagtgggtggaacagattatgttaactcaagggagatatcatgtgaattagtgttggagccttatccaaaaggatacacaattgtgcccacaaccatccatcctggagaggaagcaccttttggtttattagttttttacaaaaggaccaatcaagctagaagctgtttaatgcaagagtcatactaaatttgttcgctgctgggagc

SEQ ID NO: 1042 - DNA, 347 bp, Oryza sativa
  Clone ID: uC-osflcyp021b09b1
ctcggacacggctacactagctagcaaatgagagctgagcaggcgagcgagcagacatggcaggatcactccaagccgaggacaccctgatgcatccagacaagctcggcatgcgaaccttatacggcgaactggcatattgcccgtacatgcacgtagccagggcgaccggattacaaaccagcaccgacggaaggatcaccttctctctgcaaggctacatcctgctgggctccaacaagtgcgactatgccgccaaacttgtccgattaagactctgcacgcttatgtgtgctcgtctgagggcgccagatgctgagggcgtgaccctggaggatcacctttga

SEQ ID NO: 1043 - DNA, 415 bp, Oryza sativa
  Clone ID: uC-osflcyp021b10b1
ttgtttcggcagaagttggtggagcggtcgcagttctgggtaaccgagttggggcttaggaatgtttattttatgtttgcaaatgcaacagtgtctttcaaccagattgcgtcttcgtaccctggtcccctgtcacttgtttctatactgtgtcctgatccccattttaagaagaggcatcacaagagaagagttctacaatcgcagttggtggattcaatcacaaataacctctgtttaggtggacgggttcttttgcaatcggatgtactcgaagtggctgcagacatgagggaaaggtttgatgaatactcggatgtgtttgagcatgttgactgtattgataaagatcttcgatgtgacaatgaaggatggcttctggacaacccaatgggcatacggacagagagagaag

SEQ ID NO: 1044 - DNA, 334 bp, Oryza sativa
  Clone ID: uC-osflcyp021b11b1
ttcgttgcacagaccactcgtttcctccacaaagagggagggaacaagggaagggtgtcgccctccccccaccccgatctgcctccgccgttccgctcctccgcgcctgcgaaatttaccaacgctaactcagcaagatgggtgccggcggcaggatgaccgagaaggagcgggaggagcagcagaagctgctcggacgcgccggcaatggctcggtcgttcagaggtcgcctacggacatgccgccgttcacgctggtgcagatcaagaaggccatcccgcctcactgctttcagcgctcggtgatcaaaacctttttctacgtggaccatga

SEQ ID NO: 1045 - DNA, 364 bp, Oryza sativa
  Clone ID: uC-osflcyp021b12b1
tttcttttttgcgcctttgcctatcaatcgccttgggccccatagtagtacagcgtggatctctgcagccgtgggtagcaacagcaagcgaaggcgagtgaaagaaactcgatcgatcatcagtggcggtgaaagaaacaaaccatgacgttcgaacgatacaggagagatgaagatggagcaggtttcgcagaggaaggcgccgctcctggttctagtaatcttgtgtggccttcttcttcttcttcccctggtttcatctgtgcctttgttcagaagcgtgtccttgaggaaccaccaagcatcagtctctgctctggaggcgcctgttcaggttgtggcggcggcggctgaagagcgagac

SEQ ID NO: 1046 - DNA, 498 bp, Oryza sativa
  Clone ID: uC-osflcyp021c01b1
gtaccaaccaaaaggcgcgcgaacacacgagtcggcggcggcgcggcgatggggagcaacacggaggtggagaagaagaaggccccaacggcgctcgcgcccatcgcgaagcctctcgccggcaagaagctctgcaagcgaaccctcaagctcgtccggcgagcatcggaggccaagtgcctgaagcggggagtcaaggaggtggtcaagagcatccgtcgtgggaacaaagggttgtgtgtaattgctgggaatatttctcctatcgatgtgattacacatgttccaatactttgtgaggaagctaatattccttacatatatgtgccatcaaaagaggatcttgctactgccgggactactaagaggcctacctgttgcgtcctggttatgaccaagcctgccaaggggagatcaatgaagaggtgaaggagaaactgaagtcagactacgaccatgttgtagcttgagttgcagaggttacatcttcaatgttct

SEQ ID NO: 1047 - DNA, 420 bp, Oryza sativa
  Clone ID: uC-osflcyp021c03b1
ctcgtgcgcccacgagcctggtcccctctctgcctcattccaatcccccttcgtctccggcgacgacaggaggaggaggaggaggaaagaggaggatcgcggcgcggcggatgtcggatcgggagctccgcccgctgcgatcgatccgaattacaggcgatgggagatgcctctttaggtctgttgcgtacggtgcctgcttaaggagaggaaagcagtcgccaagcgatagcatccataaggagcttgccgatgagcttcgatcgaaagtagcagatgagtttgtcaggagaagaggggacactgaatggtttcttgaaggagatttcgagagctatgtgagacagataagaaagcctcatgtttggggaggagaacctcgactgctcatgtgctcccaagttcttaggatgcctatca

SEQ ID NO: 1048 - DNA, 504 bp, Oryza sativa
  Clone ID: uC-osflcyp021c04b1
gatgtgaactttatgaccagataatttattcatcagttctgctgtctacacaatgccgacatgcgtgtgcgttgccacgtgtcctcaagcttgctagacttttgacgccgcgattatatgggattaattggtagcgatcgtcggcggccagggataaggatggggagggtgaagctaccgatcaagaggatcgagaacacgacgaacaggcaggtgacgttctcgaagcggcggaacgggctgatcaagaaggcgtacgagctgtccgtgctctgcgacatcgacgtcgccctcctcatgttctccccctccggccgtctcagccacttctccggccgtcgcggggtggaggacgtgattctccggtacatgaacctctcggagcacgacaggggagaagccatccagaatcgggagtatcttatcagcatgcttcagcggctcaagcgagagagcgacatggcgacacatttagcaaacccaggtgccctgaatgagaaaatt

SEQ ID NO: 1049 - DNA, 399 bp, Oryza sativa
  Clone ID: uC-osflcyp021c05b1
ttataataagaaagcgcgatcgcggctagggttttattcctttcctcacaaacacaccctctgccccctcactacgtctctctcctctctctctccgccgccgccgccgccgccgactcttgcctttcccacgccctggatcttggcggctggagagccatggcgatgcagtccggcaggcgagcctcgtagccaggaggggtcagttccccagtcacccaccccacacacgaagatagcgagcttgtagcgcgattttttttgtaggccgtcgaactcgcacctatggcgaccgcgaacccctttgacctcctcggcggcgacgacaacgacgaccccgcgcagctgctggccaaggcggccgtcgcggcgcagaaggccgaggcgaagaaggccgcg

SEQ ID NO: 1050 - DNA, 526 bp, Oryza sativa
  Clone ID: uC-osflcyp021c06b1
gtccgttctacgtcagcgacaagccggggaaccacaacttcgatctgctcaggaagctcgtcctccccgacggctccgtgctccgggcgcgcctccccggccgccccacccgcgactgcctcttctccgacccggcgcgcgacggcgagagtttgctcaagatatggaacctgaacaattgcggcggcgtggtcggggtgttcaactgccagggcgccgggtggtgcagggtggccaagaagacgcgcgtgcacgacgcggcgcccgggacgctcaccggcgccgtgcgcgccgacgacgtcgacgccatcgcgcaggtcgccggcggcgacggcggaggctgggacggggaggccgtggtgtacgcgcaccgggcgcgtgagctggtccggctgccgcgcggcgccgcgctgccggtgacgctcggggcgctcgagtacgaggtggtccacgtttgccccgttcgcgccatcggcggggtgccgggcggcgccgacgtcgcgttcgcgcccgtcgggcctcctcg

SEQ ID NO: 1051 - DNA, 450 bp, Oryza sativa
  Clone ID: uC-osflcyp021c09b1
tcgttcctctctcctccttgcagggcctgtctgtttctcaccatagtaaggaaggaaagaaggaaggaagaggaaaaaaaaggatcatcaaccatgtcgaattcggcgtcgggaatggccgtgtgtgacgaatgcaaactcaagttcctggaacttaaggcgaaaaggagcttccgcttcatcgtgttcaagatcaatgagaaggtccagcaggtggtggtggacaggttggggcatccgggtgagagctatgacgacttcactgcctgcttaccagcagatgagtgccgctacgcggtatttgattttgactttgtcactgatgaaaactgccagaagagcaagatattctttatctcctgggctcctgatacatcaagggtgaggagcaagatgctgtatgctagctccaaggatcggttcaggaaggagcctgaccgcatccaagtg

SEQ ID NO: 1052 - DNA, 518 bp, Oryza sativa
  Clone ID: uC-osflcyp021c11b1
ttcgttacgcgtgggcgcgactcaatagaatcacctgataacaggtataactcccctaggctcttgccgaatgaagctccagaatcatcaataatctgggcagatgaaaggcatggactgccaaggtttcagcctcagaataacagagtgttgccccggttttcgttcaccaataggagcagctcacggtcagattggcaccgtatccgacggccgagtagacagagcctagcgcgtcgaggcttgttgaatcgaccctacaggaacaacagcgactatcatggctttcgtccccagctatttgatcagccgaatggtagtagccatcgttcaggtatcaacaggagccttgatgacccatcatttgtgcccagacggcagcgtttgagatacacccacaggagccatcatatccgtgattgatctaaagcagcattgctcttgctgaataaattaatttggcaaacagccaagctatccttggtaatagtaatgccaaactcaaaattattttcttt

SEQ ID NO: 1053 - DNA, 514 bp, Oryza sativa
  Clone ID: uC-osflcyp021d01b1
tgtcagtaagctagctaactaactacgtggctatggcccccaccgtgatggcctcctcggccacctccgtggctccattccaagggctcaagtccaccgccggcctccccgtcagccgccgctccaccaactcgggcttcggcaacgtcagcaatggcggaaggatcaagtgcatgcaggtgtggccaattgagggcatcaagaagttcgagaccctatcgtacctgccaccactcaccgtggaggatcttttgaagcagatcgagtacctgcttcgatccaagtgggtgccttgtctcgagttcagcaaggttgggttcgtctaccgtgagaaccacaggtctcccggatactacgatgggaggtattggaccatgtggaagctgcccatgttcggctgcaccgatgccacccaagtgcctcaggagctcgaggaggccaagaaggcctaccccgatgcctttgtccgtatcatcggtttcgacaacgtcaggcaggtgcagttgattagctt

SEQ ID NO: 1054 - DNA, 504 bp, Oryza sativa
  Clone ID: uC-osflcyp021d03b1
ctagttagcataagcaacacaagggattaactcatcactcacttagctaattaaatcttcgaccatgtcggacaagtgcggcaactgcgactgtgctgacaagagccagtgcgtgaagaaaggtaccagctatggcgtcgtcatagttgaagccgagaagagccacttcgaggaggtcgccgccggcgaggagaacggcggctgcaagtgcggcaccagctgctcctgcaccgactgcaagtgcggcaagtgaagtcacgaagcaaccgaacactcgccgccggcgagtcacctaccttaattagtccacaataaaaaccacccatatgagtgtggcttgcgtgtgtgctgattattgctgaattaaacccgtgtgttatcgattaattaagcagctggtcgcttcggcgactatgcgtgtgtcaacgtatgaatttgtgtgatgtgatgtacccgtgctattctcagtgaaactaatcaatcgtgtattcgtgtgggttgcct

SEQ ID NO: 1055 - DNA, 493 bp, Oryza sativa
  Clone ID: uC-osflcyp021d04b1
ttttctgaacacagcaccaccccttctgctgcatctcccacctccctctgaattgtgggcctgaggcgatggcggcgctcgccccgtccaagatgctcggcacccggctcaacttcgccggctcctcccgctacgccaccgcggcaccgaccaccggagcgcagaagatcgtctccctcttcagcaagaagcccgccccgaagcccaagcccgccgccgtcacctcctcgagccccgacatcggcgatgagctcgccaagtggtacggccctgacaggaggatcttcttgccggagggtctcctggaccgctcagaggtgccggactacctcaacggagaggtccccggagactacggctacgacccttttggcctcagcaagaagccagaggacttctccaagtaccaggcctatgagctgatccatgccaggtgggcgatgctcggcgccgctgggttcatcatccccgaggcctgcaacaagtttggcgc

SEQ ID NO: 1056 - DNA, 523 bp, Oryza sativa
  Clone ID: uC-osflcyp021d05b1
tctcacactgccctgccctatcgcaatttccatttccatctctcctcctctcctcctcctcctcgtcctacaaatgcggcgcaggacgagagtcagagcggagtagtagcagacgaacacgacgacatcggagcgctcttgtctcctcctcgtttcttctgctcccgagtcaagcagatcctccaagcccagcgagggggcgggcgcgccgccgctgccgttgttgttgtcggccgcagcgcagacatggacccgtccggcggcggcggcggagtcggagtcggaggcatcggcggcggtgaacaaattctttgggactggcaagctgcggagcagtgcgagagcaatgctgcaaatcatgatgtttctagattcatgtgggactgcctcaatcaagatgatgatgacctactgggattgctgggcaatcaaactcctctaagagattgtcgcggcttctttgatattgatgatttcacctgcaaggagacgttggacctagaggaatctcggggaatcaaag

SEQ ID NO: 1057 - DNA, 522 bp, Oryza sativa
  Clone ID: uC-osflcyp021d06b1
gtctgtatccagaaagtggagagacaattatttctgggatgggtgagctgcatttggatatctatgttgaacgcatcaggagagagtacaaggttgatgcaaaggtcggaaaacctcgtgtgaacttcagggaaactatcactcagcgtgctgaatttgattacttacacaaaaagcaatctggtggtcaaggtcaatatggacgagtttgcgggtacattgagcctcttccatcagaatctgatggtaaatttgagtttgataacatgatcattggacaagcaattccttcaaacttcataccagcaattgagaagggttttaaggaagcttgcaattctggttcgttgatagggcatcctgtggaaaatattcgaattgtgctgactgatggtgcttcacatgcagtggattccagcgaacttgcttttaagttagcttctatctatgcttttagacagtgttatgctgctgctagacctgtaatattggaaccagtgatgaaagtggaactaaaagttc

SEQ ID NO: 1058 - DNA, 502 bp, Oryza sativa
  Clone ID: uC-osflcyp021d07b1
tcgtgctgctccacttccccccttttaatccaccgctttttctctcgcatcgtcctctcccccgaacccgcagccgccaatccacacgccagaagccgcgccagcttccagaagcttccccagggggaaggtcgctctcactcatgagcgtctgaccggccgtcgccatgggttgcgccggatccacacctaaaaccgatgataacagcaagaagctgaaaaagcccaagccttggaagcacaatcaagcaataacaacaacacaactcaaacagatgcgtgatgaattctgggacactgctccacattatggtgggcagaaagagatttgggatgcgcttcgagctgctgcagaagctgagttatctcttgcacaaacgatagtggacagtgccggaatcattgtatcaaattctgacatgacaatttgctacgatgaaagaggtgccaaatatgaattaccaaagtatggtctgagtgagccaacaaatttgatcaggga

SEQ ID NO: 1059 - DNA, 509 bp, Oryza sativa
  Clone ID: uC-osflcyp021d08b1
ttctgaagctgaaagggcacagcatcttaaacaaatccatgatctccaagaacatctgcgagaaaaggaaagccaaatgcttgcattagaggaacagcatagggctgctcaagataacattatttacaaagatgaacaattgagggaagctcatgcttggatggcacgagttcaagaaatggatactttacagtctcagacaatgcaagctgagttacgtgatcgtactgagcaattcaatcaatattggattagtttccaacaacagtatgttgagatgcaaaggggttttctgcataccatacaacaacttcagctagaactaaatgaattaagagaccgaactggagcaccaaaagatggttcacaaactgcacaggagagttcggccgagtcaacacttggtcagaacaaagggaacaacatggctgcaaatggtagtggaacaacagatagtagtcagtcagtgaaaagtaatggagttccagattgttccacaaagggaaaca

SEQ ID NO: 1060 - DNA, 497 bp, Oryza sativa
  Clone ID: uC-osflcyp021d10b1
tcgttttggaaccagaaggcacaagtgaatatcatcttggtcaaagctggcaagagagaaatagtgggagtagagggaaacgtcccgcagggagaaggaaggccttgaacaccgatggcggtagcgccattgggaaggatcgagtggtgggtggcagttcattctccgactctgaggtaacacgcaatggttttgaaccaaaatggagatccacgactagagggcgcacaacgaatgatgttaggaggtggaatccccccaacgaaggcggtaggaatgttcctagaaagggttggacggatgatgagtttggttcaaattcagacagtggaatggatcacaagttgatgccaaaatggaaaactcagaacaggttgaaccgaagcgaaaatggcagagatagaccggagctgaaatatatggctaataccaacaatggggagaggactaggaggtacatgagggggcacgattgtgagggaagaaaaatcggtttg

SEQ ID NO: 1061 - DNA, 517 bp, Oryza sativa
  unsure (1)..(517): unsure at all n locations
  Clone ID: uC-osflcyp021d11b1
gtcagtaagctagctaactaactacgtggctatggcccccaccgtgatggcctcctcggccacctccgtggctccattccaagggctcaagtccaccgccggcctccccgtcagccgccgctccaccaactcgggcttcggcaacgtcagcaatggcggaaggatcaagtgcatgcaggtgtggccaattgagggcatcaagaagttcgagaccctatcgtacctgccaccactcaccgtggaggatcttttgaagcagatcgagtacctgcttcgatccaagtgggtgccttgtctcgagttcagcaaggttgggttcgtctaccgtgagaaccacaggtctcccggatactacgatggcaggtattggaccatgtggaagctgcccatgttcggctgcaccgatgccacccaggtgctcaaggagctcgaggaggccaagaaagcctaccccgatgcccttgtncgtatcatcggcttcgacaacgtcaggcaggtgcagttgattagcttcatc

SEQ ID NO: 1062 - DNA, 401 bp, Oryza sativa
  Clone ID: uC-osflcyp021d12b1
ttcttcaaacaggtatctaactaactacggggccggggcccatacaaacatggtgctgtaggacacaccactggctgtgtacctaggcataaagcacagcctcgctctggccgatagccgcggtttcacgaacttgatctatggatacctcaacgctggcgaatgattcaaatggatacggggataccctcgacaactaataaacaaaaaagataccctataagacccaccaccattaacggtggtggatcgcttgatacagatggagctcctgatagtatgcctgtggctatctggtctcgtgctgggtatgggggccccccgggagacgaggatccacatgtcgcgggggaaatacaatgacattttttagagccttttggaaatgcccatcttgggaa

SEQ ID NO: 1063 - DNA, 408 bp, Oryza sativa
  Clone ID: uC-osflcyp021e01b1
tttattgcatcttgcatggcaacatacatggtctgcaattctattttcagctccatcatgaagcttgttgggacaaagaattactatgacgttaggaaggaatgcgaagggaaactttgctatgatttctcaaacttggagaagttttttggagataaagcagtcaaagaagcaattggagttggcgaccttgaatttgtctcatgcagcactactgtttatcaagcaatgctgacagactggatgagaaacttggaagttggcatcccagctctacttgaggatgggatcaatgtgcttatatatgctggagaagttgatcttatatgcaattggcttggaaactcgaggtgggtccactcgatggaatggtctggccagaaagactttgtatcatcttatgaatcg

SEQ ID NO: 1064 - DNA, 503 bp, Oryza sativa
  Clone ID: uC-osflcyp021e02b1
gcagttttcaactgtgtggttgaaattcctagaggcagcaaggttaagtatgagttggataaggcaactggtctaattaaggttgatcgtgttctttactcatctgttgtttacccacacaactatggtttcattccacgcacactttgtgaggacggtgaccccatggacgtcctcgtcctgatgcaggaacaagttgtccctggatgtttcctgcgagctcgtgctattgggctcatgcctatgattgatcagggtgagaaagatgacaagatcatagctgtttgtgctgatgaccctgaataccgccacttcagggacatcaaggaaatcccccctcaccgccttcaagagatccgccgcttctttgaagactacaagaagaatgagaacaaagaagttgctgtcaatgagtttctcccaggagaagatgccatcaacgcaatcaagtactcaatggacctttacggcgcctacatcattgagagcttgaggaagtgatc

SEQ ID NO: 1065 - DNA, 496 bp, Oryza sativa
  Clone ID: uC-osflcyp021e03b1
cgaggtggtgtggttcaaggcggggtcgcagatcttcagcgagggcgggctcgactacctcggcaacccgagcctgatccacgcgcagagcatcctcgccatctgggcggtccaggtggtgctcatgggcgccgtcgaggggtaccgcatcgccggcgggccgctcggcgaggtcgtcgacccgctctaccccggcggcagcttcgacccgctcggcctcgccgacgacccggaggccttcgcggagctcaaggtgaaggagatcaagaacggccgcctcgccatgttctccatgttcggcttcttcgtccaggccatcgtcaccggcaagggccccctcgagaaccttgtcgaccacctcgtcgaccccgttaacaacaacgcctgggcctacgccaccaacttcgtccccggcaagtgagcgccgccgccgccgtgctgccatggcgacgcatcgccttcagctaagctagctaggttgacgacgatgcgcgtc

SEQ ID NO: 1066 - DNA, 407 bp, Oryza sativa
  Clone ID: uC-osflcyp021e04b1
gttctagatcgagctgaaaaaaaaagagaggccacgaagagagctcagctgctgcctctagcttacttggtgataaggaggaggaggaggaggagggcaccgacatggccgcagccacggcgtacaccgtggcgctcctcggcgccaccggcgcgcgcgtccccgccgctccacgctccgccgcgcttctgccgcgccgcggcggcgtgctccaaccgctgcgcctccaggacgcgccgcgactgtccctgctccgcgtcagggccgcctccgacgacacctccacctcggccagcggcgacgagctcgtcgccgacctcaaggcaaagtgggaggcgatcgaggacaagccgacgttcctcctctacagcggcggcgccgtcgtcgccctctggctcaccaccgtc

SEQ ID NO: 1067 - DNA, 461 bp, Oryza sativa
  Clone ID: uC-osflcyp021e05b1
ttgaataacaactagaaaagcttcattagcagagtgatcgacaaggaaattaaatggcgtcgtcgttgttgtccatggcgatgttcgtcgtggtcctgatgtgcgcctcagcaatggccgcccaggcgcgcctcccgccggggtctagcccgctggtggcggcgtgcacggcggggccgttctccaagctgtgcgtcaaggacctgggccaccgcctgctggacatccagacggtgctgacgtcggtgtcgaaccacggcgccgccatcgccggcgcgccggggcaggtggacttcaggtccctggtcgccgtcgccatggaggccgccacggagtccggcgcggtggcggcgacggtgttcgaggggaagctccccgggttcaacaagtccgtgccggacttcaaggcctgcctcgacaactgcagcgtgacggtgtcgagcgccatgaaggagatccac

SEQ ID NO: 1068 - DNA, 439 bp, Oryza sativa
  Clone ID: uC-osflcyp021e07b1
tgaacaacgcactctgcagctagctatacaatctctgtttaattagctaggtagctagcgagtcataaatcaagaagccatggacttttacgggcggcgcgagcagtacggcgggtatggcgggtacggtggcggcggcgccctggcgacgccggggtacgcgccggcggcgccgtacgggatgtcgcaggtgaacatcgaggggaacgggtgtggcaggacgctgccgccgcagccgacggtgaaggtgtactgccgggcgaacccgaactacgcgatgacggcgcggaacggcgcggtggtgctggcgccggcgaaccccaaggacgagtaccagcattggatcaaggacatgaggtggagcaccagcatcaaggacgaggagggctaccctgccttcgcctcgtcaacaggccaccggccggccatcagcactccc

SEQ ID NO: 1069 - DNA, 484 bp, Oryza sativa
  Clone ID: uC-osflcyp021e10b1
ttaccaggttgaattagacctaagcagagaggggtcagagcttacttctgatgtgatcacccgctcggccttcggtagcagccacgaggagggcaaagaggtctaccaagcacagaaagagctccaagaactggccttctcatcatcattagatgtgccagctctggtttttctaaggaaattaccaatcataagggggaacacacgagctcatcagctcgtcaagaaatcgaggaccatgctcatggagataatcgaaggacggcttgccaaagtcgaagctgccgaagccggctatggcagtgatcttcttggactgatgctggaggcgcgagctctggagagggaagggaacggcctggttctcaccacccaggagatcatagacgagtgcaagaccttcttcttcgcggggcaagacactacctccaaccacctcgtttggacgatgttcctgctgagcaacaacgctcattggcaagac

SEQ ID NO: 1070 - DNA, 436 bp, Oryza sativa
  Clone ID: uC-osflcyp021e12b1
tcgttcaggagatcacccggaggactatattatctttcttaccttgaccgcgatatgctcctggggcgatcggttggtggtggaggagtttttattttcacaagagcacagcctcttttgtgatgatttcagaattaccaggagtataccatttgaaggcggcaattgaacccatgcaagaggtatatatagttagaaagttagcaacactttacaagtccctttttcatatgaaatctgattattgtcttatcatctcttcttcttttttttttgggaaaaaaaaagaacttgcatgccaaaacaatcgtcagttttagttcagttagttagcaccttctcactttatatcttgtgcattagcaaacatgtatacaacactgaatgtattttatctcatcagttatttgtatcaatgccacataactccagcact

SEQ ID NO: 1071 - DNA, 358 bp, Oryza sativa
  Clone ID: uC-osflcyp021f01b1
gttttgtggctgctatggatgggagcggattttgcgatgggcgttcccaggcaagatgccagcatgggagaagcgtcagaaacaggcaattgcaaatctggagaaaaaacacgaataggatcttgtttttttttccttcacttcaattttttgctccactggcatagtttcaatctaatatgtagggttggtttggtttgtggcctatataggccttaccaaattttgtcagtgtcaaattttggcaagttttggcatgactaattttggtaaggcaaagttgcgtttggattgaagccaaaataacctaagttcactattgaaatggcctattttcttagaaaaaaaaaaataaaaa

SEQ ID NO: 1072 - DNA, 514 bp, Oryza sativa
  Clone ID: uC-osflcyp021f04b1
atttgtttggttcactatcaactgcgcttccatcattgacacatctggacctgcaggatgcacctataatagaacctacaacatcatcagatctcaccaatgctggtcttcagcagattaatccaaatgatattattcttggatggaagtgatatcagtgatcaggcattgaagtatctgggccttggaacatgtccactagcttccttatctctgaggggttgccgaaagttaacaaatgattgcataccactcttgtttgctggttctgttaaacagagcttacaggtgttggatctctctagaataccaggtattactgatgatggtatcatgttattagcaaggagtcgaactcctattattgaactccgaatgagagagaacccgaaaataggagatgctgctgtgatggctcttgcgtctatgctagttgatggtggaacccatggcagcagcttgcacctgctggatctttatgattgtggtgcgattacaccacttgcaatccggt

SEQ ID NO: 1073 - DNA, 387 bp, Oryza sativa
  Clone ID: uC-osflcyp021f06b1
gggggaacaaatgagcaaaattccacgttttttagaatttagggactttacaaccatacccttaggcatgggggttttcaaattaaagaaatgatctcgctttgatagaatcacaaaattttttgttccccaaatttaacttccataactttcacatccaaaaaagggacaaaagggcaagagaagcaacaggccattttcacttaaatacaaagttttaattccaaagatcccttttttttgagccatgaaatttttgcattggccacgtcctgtaagcaggaagttttaaaatgatagaaaaggagggcctacccaaagtcttgggttgcattgacttgacagccaccagtttcgtaactttaacactggatagctcttttaggg

SEQ ID NO: 1074 - DNA, 128 bp, Oryza sativa
  Clone ID: uC-osflcyp021f07b1
ctgacgattagctatctagcttagctactcgatcatcagatcatcgatcatccgacgatcaaatcagtaatcttgaatatggcggctttgaacggtaaggtggtggtggcggtgatggtggtggcgat

SEQ ID NO: 1075 - DNA, 432 bp, Oryza sativa
  Clone ID: uC-osflcyp021f10b1
tcggccgccgcctcctcctcctctcgccttctcccgtcttctccttcgagttagctacctccttattcaaccatgggtaaggagaagacgcacatcaacatcgtggtcattggccacgtcgactccggcaagtcgaccaccacgggccatctgatttacaagcttggaggtatcgacaagcgtgtgatcgagaggttcgagaaggaagccgctgagatgaacaagaggtccttcaagtacgcgtgggtgctcgacaagctcaaggccgagcgtgagagaggtatcaccatcgatattgccctgtggaagttcgagaccaccaagtactactgcactgtcatcgatgcccctggtcaccgtgacttcatcaagaacatgatcacgggtacctcccaggctgactgtgccgtgctcatcattgactccaccact

SEQ ID NO: 1076 - DNA, 500 bp, Oryza sativa
  Clone ID: uC-osflcyp021f11b1
tcgctttgctggagacatcaagaaaagggtatcttgctgcagtttcagcatctagttactctttcatctctttactccaacacttccttcctataatgaatccagggggtgctactatatccttgacctacatagcttccgaaaggacaattcctggatacggtggcggcatgagctcagcaaaagcagcacttgagagtgatacaagagttctagcttacgaagcaggtcgaaaaggcaagatcagagtgaataccatatcagcaggtccattgggaagtcgagcagccaaagctattggtttcatcgagaagatgatagagtattcgtacgtgaacgcaccactgcagaaggagctcttggcagatgaagtggggaacacagcagcattcttagcatcgccgttggcatctgcaatcactggatcaactatctatgttgacaatgggctcaatacaatgggacttgcacttgacagccctacactatccacatagacg

SEQ ID NO: 1077 - DNA, 503 bp, Oryza sativa
  Clone ID: uC-osflcyp021f12b1
ttctttacgcgtgggtttctccccaatctcgcgaggctctcgtcgtcgaatcgaatcctttcgcgttctcaagatgcagatctttgtgaagacattgaccggcaagactatcaccctcgaggtggagtcctctgacaccatcgataatgtcaaggctaagatccaagataaggagggcatccccccggaccagcatcgtctcatcttcgctggcaagcaactggaggatggcaggacccttgctgactacaacatccataatgagtcgacccttcaccttgtcctccgcctccgtggtggcatgcatatctttgtcaagactctgaccggcaagactatcacccttgaggtggagtcttctgacaccatctacaacgttaaggccaagatccaggacaaatagggcatgcgcgcataccagcagcgtctcatcttcgcctgcaagcagctggaggatggcaggacccttgctgactaccgcatgcaggaggagtccacccttc

SEQ ID NO: 1078 - DNA, 499 bp, Oryza sativa
  Clone ID: uC-osflcyp021g01b1
gagaaggatgtgataacactatctttaggtcttacttatgatcaaactgaccttgcacaagttgcccttgaacgtggcatccctgcaacagttggcagtcttggatcaaaaaggttacccttccctagtggtgcatttgatgctatccactgtggtgattgcaacataccatggcattctaatggtggaaagcttctcctagagataaataggatccttcgtccaggaggatacttcattatatcaagcaaacatggtgaccttgagagcgaagaaggaatatcagcttcaatgactgctatatgttggaatgtaatagcttacaacagtgatgatgtcagtgaagctggagtgaagatattccaacgaccaccttccaatgatgaatatgatctgagagcaaaaaaagatccaccattttgtaaggaagaccagaccaaaactcctgcaggtatactctgatcagacattgcctgcataaagctcctgtggcattgaa

SEQ ID NO: 1079 - DNA, 437 bp, Oryza sativa
  Clone ID: uC-osflcyp021g02b1
ttatttttgagctcaatcagcaacaacatctatctgcttcttgcttagttaagtccttcgccctcccaagaagaagaagatgtcttgctgcggcggcaactgcggctgcggcagcggctgccagtgcggcggcggctgcggcggatgcaagatgttccctgatgtggaggccacagccaccaccaagaccttcgtcctcgctgctccatccaacaaggcgagctctggaggaatggagatggcggtggagagcggcgagaacggcggctgcggctgcaacacctgcaagtgtggcaccagctgcagcggctgctcctgctgctcctgcaactgaatctatcgtcgtcgtcgcccggctgcatgaggatttatcgtatggatgctgctactgtcgatcagagctttgatcgaggccttaatttgcttgcattagtacc

SEQ ID NO: 1080 - DNA, 453 bp, Oryza sativa
  Clone ID: uC-osflcyp021g03b1
gtcattgagcagaagtaactaatcaacttcttgggaagagaaaaatacaagatttggtttcacaggtagatcccctgggcaaggttgatccagaagtggaagatttgcttttggagattgctgatgacttcattgattcggtgactgcatttgcgtgtacccttgcgaagcataggaaatcatcagtcctggaagccaaggatgtattgctgcacctagaaaaaaattggcacttatctgttcctggtttcttaagggaggacaagaatccgcaaagacatcctgtaaaggtatcagtggaccctcaacaaccagaatgtgatgcttctggtattagaagcacaggacataaattggtattaacaattcagttgccaaccataaaacaagacctccggttactgagcctttaccaatgcccacaatggggcctttgtcaaaagtggcccgttt

SEQ ID NO: 1081 - DNA, 511 bp, Oryza sativa
  Clone ID: uC-osflcyp021g04b1
ctactactagccagtaagctagctaactaactacgtggctatggcccccaccgtgatggcctcctcggccacctccgtggctccattccaagggctcaagtccaccgccggcctccccgtcagccgccgctccaccaactcgggcttcggcaacgtcagcaatggcggaaggatcaagtgcatgcaggtgtggccaattgagggcatcaagaagttcgagaccctatcgtacctgccaccactcaccgtggaggatcttttgaagcagatcgagtacctgcttcgatccaagtgggtgccttgtctcgagttcagcaaggttgggttcgtctaccgtgagaaccacaggtctcccggatactacgatggcaggtattggaccatgtggaagctgcccatgttcggctgcaccgatgccacccaggtgctcaaggagctcgaggaggccaagaaggcctaccccgatgcctttgtccgtatcatcggcttcgacaacgtcaggcaggtgcag

SEQ ID NO: 1082 - DNA, 488 bp, Oryza sativa
  Clone ID: uC-osflcyp021g05b1
tttaatcacactcgcctcgcctcctttcgctcgtttggtccaacaccaccaccaccaccaccgatctcgatggcgcccaaggccgagaagaagcccgcggagaagaagccggcggaggagaaggccggcgagaaggcgcccgcggccgggaagaagcccaaggccgagaagcggctgccggcgtccaagggggagaagggcggcgagggcaagaaggagcgcggcaggaagaaggccaagaagagcgtcgagacctacaagatatacatcttcaaggtgctcaagcaggtgcacccggacatcgggatctcctccaaggccatgtcaatcatgaactcgttcatcaacgacatcttcgagaagctcgccggcgaggccgccaagctcgccaggtacaacaagaagcccaccatcaccttcagggagatccagaccttcgttcgccttgttcttcccggcgagcttgccagcacgccgtcttcgagggc

SEQ ID NO: 1083 - DNA, 507 bp, Oryza sativa
  Clone ID: uC-osflcyp021g06b1
tttcgtactcgcctctctccgcgccctcctccgccgccgctcgccgccgttcgtctccgccgccaccgccgccgccatgagggagtgcatctcgatccacatcgggcaggccggtatccaggtcgggaacgcgtgctgggagctctattgcctcgagcatggcatccagcctgatggacagatgcccggtgacaagaccgttgggggaggtgatgatgcttttaacaccttcttcagtgagactggtgctgggaagcatgtcccccgtgctgtcttcgtcgatcttgagcctaccgtgattgatgaggtgaggactggtgactaccgccagctcttccaccctgagcagctcatcagtggcaaggaggatgcagccaacaactttgcccgtggtcactacaccattggcaaggagattgttgatctgtgccttgaccgcatcaggaagcttgccgacaactgcactggtctccagggctttcttgtgttcaacgctgtggggaggaa

SEQ ID NO: 1084 - DNA, 417 bp, Oryza sativa
  Clone ID: uC-osflcyp021g09b1
cggaggcggaggcaagcaaagccttctcccctcgcctcacctcgcaatccaccttgggcgggccgtccggcgagctgagcgcggcggcgccctccttactcctccctccccacgtgcggccccgtcggagcacggcggcgacgaagaaccaggggggtgggggggcgaggaggagggcatcattccaccggctgattcattcttcttggctcgagtcgaattggagaggtaattgcttgccttctgaggaactgcgggagggagcgaggagtcgtggagcgactcttgaaggatggcggaaggtgccaaattccatgggatcgttggcgctgttggcgcgcatgatgttggcgggaacttctgtgacatggggtactaccagaagctaggggagggctccaacatgtcgatcgatag

SEQ ID NO: 1085 - DNA, 431 bp, Oryza sativa
  Clone ID: uC-osflcyp021g10b1
ttgcttacgcgtgggctttggcttggacaggacatgtagttcatgtcgctattccagcatccaggggagagtacgttcgatggaataatttcttagatgtattaccctatccacaggggttgggaccccttctgacgggtcagtggaatctttatgcccaaaaccccgattcgagtaatcatttatttggtaccactcaaggagcgggaactgctattctaactcttcttgggggattccatccacaaacacaaagtttgtggctgaccgatattgctcatcatcatttagctattgcatttatttttctcattgccgggcatatgtatcgaactaacttctgaattgggcacaggatcaaagatcttttataagcacatacttctcccggggggtcgattagggcgtgggccttagggccttttctacca

SEQ ID NO: 1086 - DNA, 473 bp, Oryza sativa
  Clone ID: uC-osflcyp021g11b1
tcggtctccacccatcaagattgcagtaataatccaagctcaataaacgagccaatccgtcgaagaaggaagcagcggcgatggcggcgaggtccggcgaggtgcgggcgacggtgctgggcatggcggtgctggcgctgcttctgctgctcggccaccacgcggcggccatcgaggccaacgtcggcgtcacccgccaggccagcttcagcctgaacggcggcgccggcgccggcgccggtgctcgcgctggcgctggtgctggcgctggcgctggcgtcggcgctggcatcggagctaacgtcggcgttggcgctcgcgccggcgtcggtgctggcgtcggcgctggcgtaggtgcgaaggtcggtgctggcgtcggtgcgaaagtcggtgctggcgccggcgttggagcacgcgctggcgttggtgcgaacgtcggtgctggcgtcggtgcgaaggtcggtgctggcgtc

SEQ ID NO: 1087 - DNA, 464 bp, Oryza sativa
  Clone ID: uC-osflcyp021g12b1
tcgttccatcttcgccaccatcgcgctgcccaacaactccacgacgcagaacaccgtgtggcaggccgggccagggagcaccgggaacgtcggccagcacgcgacgtccggccccaacgtgcagagcatgctgaggctcgacttcagctccggccagagcaccggtaccgcctccaactccaggctgcaccgccgtaacatccatggcatcctgaacgcggtgagctggggcatcctgatcccgatgggcgccatgatcgcgcgctacctccgcgtgttcgaggccgtcgacccggcatggttctaccttcacatcacctgccagctctccggctacatcctcggcgtcgccggctgggccctcggcctcaagctcggcagcgagttcaagggcatcacctacagtgcccaccgcaacatcggcttcgccatcttctgcctcgccacgctccaggtgttcgcgc

SEQ ID NO: 1088 - DNA, 444 bp, Oryza sativa
  Clone ID: uC-osflcyp021h01b1
ctagcctccagaagcatttgttagccgcgttaaaacagctcctagggctgatgatgaggagtttgctgatacagctgaaacaggatattcggagtcaccatctcagggtgttgatggggcatcaccttcctctagtgctggcacttcttctaatgttccagtgaagcagccagcagcaccagctgctcctgctccaatgccagacctccttggtgatttgatgggtatggataactccattgttcctgttgatgaaccaacagcaccttcaggccctccactacctgttttgttgccatcaaccactggccaaggactgcagatcagcgcacaactagtgcggcgtgatggccaaatattctatgatatatcttttgataatggcactcaaactgtgctagatggattcatgattcagtttaacaaaaataccttttggcttgc

SEQ ID NO: 1089 - DNA, 487 bp, Oryza sativa
  Clone ID: uC-osflcyp021h02b1
gaccggcccggactgcccgggtggatccacccacgcgttctgtttgccaaccaagggagtgaaccgatgggggacataattacctcaggcgtggaagcccgtggaacgagtcatatgaaatgctgtgtgaatggttgtgctatcattgatactcttgatggagccaatgctgagataagagaggaagtgggacaagaaaacctcttgcttttaggtgccaaggcagatcaagatgctgggctgaggaaggatagagagaatggcttgttcaaaccagacccacgttttgaagaagccaagcagcttataaggagtggtgcttttggcacctatgactatgctcccctcttggattctcttgaaggaaattctggatttggtcgtggtgattatttcctcgttggctatgatttcccaagctatattgatgcacaggccccggttgatgaagcctacaaggataagaaaaaatggatcaagatgtcta

SEQ ID NO: 1090 - DNA, 516 bp, Oryza sativa
  Clone ID: uC-osflcyp021h04b1
cctcgccgtcgccgccgccgtcgccgccgacgccgccgcgaccacctctcgcaaggggattttgtaggggtttctgatccgaggagcgggcgatgtcggactccgaggagcaccacttcgagtcgaaggccgacgccggcgcctccaagacctacccgcagcaggctgggaccatccgcaaaaatggctacatagtcatcaagaaccgcccctgcaaggttgttgaggtttcaacctctaaaactgggaagcacggtcacgccaagtgccactttgttgcaattgacatctttactgccaagaagctcgaagatattgtgccatcttctcacaactgtgatgtcccgcatgtgaaccgtacggagtaccagctcattgatatatctgaggatggatttgtgagtctgttaactgaaaatggcaacaccaaggatgacctcaggctccctactgatgataacctgcttagtcagatcaaggatggatttggagaagggaaggacctggtggtgactg

SEQ ID NO: 1091 - DNA, 445 bp, Oryza sativa
  Clone ID: uC-osflcyp021h05b1
gtggatgcgactgcgacttcgccatcatcatcgagctcctccctcgcgctccaagcccataacggcggacgacacaacgccgacgaggagcggcggaggctcacaatccaacaacaggaccaccggcaagcgcagctagaggggctcccaggtagagtactacatctaactgtcaccaataagcatggcacatggaacaccggggcgctctggcactgggctgcaccagctccagatactgaagccaccttttcttgccttatactatcccttggtgaacaagaaagcccatagatggaggatatctacaagcgtgtttatcctgggcaagatcactatcaacgttgggattaggcttctgatgatagcaagatacggcgtgcagatagaatagggtgcatttgagaagcgcacagatgaattgttgggacgatgatatttggtg

SEQ ID NO: 1092 - DNA, 504 bp, Oryza sativa
  Clone ID: uC-osflcyp021h06b1
gttattcagattttcagagtgagtgctcgtgtgttgtgcgatcagtgcccactgcccagttcgatcgatccgtgttgatctttgaaagaaagatgtcgtgctgcggaggaaactgcggctgcggatccggctgccagtgcggcagcggctgcggaggatgcaagatgtacccggagatggctgaggaggtgaccactacccagactgtcatcatgggtgttgcaccttccaagggtcatgccgaggggttggaggccggcgccgccgccggagcaggagcagagaacgggtgcaagtgcggcgacaactgcacctgcaacccctgcaactgcggcaagtgaagcaagcaacctcctgacgaaaccaaggagatggaagggcctagtactgctaagctagtagtttgatccagttacaagtgatgagttattgtcactgtaactttgtgtttcctctgagtttgtgatctaagacctgagactgaagaatgcatcctagttaaat

SEQ ID NO: 1093 - DNA, 440 bp, Oryza sativa
  Clone ID: uC-osflcyp021h07b1
accaaccaagaaacaagaaacattgcaccaaaaaactagctagctagccaatggcctccatgtcctccttccgacttgccgtggcggcggctgcactattggtcattggctcatgtgccacagagctcaccttcaaggttgctgagggctctagcgccactagtctggagctcgtcaccaacgtcgccatctctgaggtggaggtcaaggagaagggcggcaaggactgggtggggctcaaggagtcgggctctaacacctggacactcaaaagtgaagcaccactcaagggccccttctccgttcgcttccttgtcaagaacggtggctaccgtgtcgtcgatgatgtcatccctgaaagctttactgccggctctgaatataaaagtggcatccaactcttagtaacaggcatgcatactcttgtgttgggtcatatt

SEQ ID NO: 1094 - DNA, 507 bp, Oryza sativa
  Clone ID: uC-osflcyp021h08b1
ttgcgtggcgccgccgccgcagagctcgattcagaccatggcgtggccgtccatcccggcggctctccgccacccgcatgcccacgccggcggcctccgcctgctccgctcctcgggagacccctgcccgccctgcacccttccgtttaggttatgtggagtgccattaaaaaagggccatgtgtacgctggtgctgtatctgctaccaggagtcctggcttgggcaatgcagagaatctgcgtgagagtccaagcttgtcaaggagctggggtatgaatgggcagattggcgatgatcatgatattcttatagaatgtagggatgtgcacaaatccttcggtaacaagaaggtattgaatggcattagcttcaagattagacacggagaagccgttggaataattggtccttcgggacaggaaagtcaactgttttgagggtatggctgggctactggctccagacaagggcgatgttattatttgcgggagaaaaagacatgggc

SEQ ID NO: 1095 - DNA, 494 bp, Oryza sativa
  Clone ID: uC-osflcyp021h11b1
ttgcttcaatccgaatcagaattccatgaaacagaaaggaggtaattcatcatcgcacgaggcaatgagcaacgaatggctggaaaatgggcagtgcccacttgcccggtcttaccgagcaatgagtggcattctgccccttgttgccaaggctttacaaccaccagccggtgtgaagctgaagtgcccacctgctgtggtcgctgtgcgtgcagcccttgcacggactgaacttgtgaagtctctccgtccccagcctctgcctgcaaagatggtagccattgcgttgctcggaatggcagcaaacatccctcttggggtgtggcgtgagcacaccaagaaattctcccctcagtggtttgcagctgtccatgccgctgttccattcattggaatgctgaggaaatctgtcaacatgcccaagactgccatggcatttcaccatagcagcctccattgttggtcagacaatcgggtcgagggcggagcgcatt

SEQ ID NO: 1096 - DNA, 427 bp, Oryza sativa
  Clone ID: uC-osflcyp021h12b1
gttcatggctcgcgcgctcgttctcgtcgtgatcctcctcgccgctatcgcagtggcaccgttcgcggaagcctcgacagtcaccggtggctccagggtattgttggcctccgacgcgcccgctgagagcccggctgggcctgcggcggccccaggcccagcggaagagtccagcagtgaatctgctccatctccgagcgccgctgatgcctgatcgagtaataatgaagtccaagtgaataattcttcatcccaagaacattgatcaagcatatatgtcctacccttccttcataaaggctaacagagcctcatttttatttttatttttattttttattgctttcttctgttgattgatcgtgttaatcatgcaatatgatgagttaatataagttcgatgaagatatttgttttccattgttca

SEQ ID NO: 1097 - DNA, 452 bp, Oryza sativa
  Clone ID: uC-osflcyp022a02b1
gttctatccatccatcccatcctcgatccttcattcctgcccggcggcgagcgagagagaggcggaggagatccgagatggcggggagcgggtggaggaggatcccggcggcgaggaggccgcccatgtcgcgcccggcctcggtctgcctctggatcgtgctcgtcgccgccaccctggcgctcgcccaggcgaagaaatcgaaggcggatttgactgaggtcacccacaaggtctacttcgacgtcgagattgatggcaagcccgcaggacgggttgtcatgggacttttcgggaagactgttcctaaaacggcagagaacttccgagcactttgcacaggagagaaaggaactggaaagagtggcaaagcactccacttcaagggaagtgcattccacagaattatacccagctttatgatccaaggaggtgacttcacactcggtgat

SEQ ID NO: 1098 - DNA, 249 bp, Oryza sativa
  Clone ID: uC-osflcyp022a03b1
ttctatttgaccgcgcggccggctgccctcagctgcgggtagaaacggcaacacgagagcttcctttaacacgggcaggaccctcccgcgccggccattgctctgctcgccagaggctgctgcgcttccaacgattggaatcccgcacgacggaacgccgacattcagaagtgctgccatgcataccggacaggaagagtctgcgccactaccccaaagggatcttacctgacgctgcttaacaacctc

SEQ ID NO: 1099 - DNA, 429 bp, Oryza sativa
  Clone ID: uC-osflcyp022a04b1
aactcctctcctctccttcccactactctcgcgaggaggaaagcgaagccaagcgagagaggcttccgccgtcgccttccccttcgccttccgatcggtcgcgaggtttcaagatggcgacgtgcacacttgcaacttcatgtgtgtccttgagcaatgctagaactcaggcctccaaggtggcggcggtcaagagcccggcatctctaagcttcttcagccaaggcatgcagtttccaagcctgaaggcctcctccaagaagcttgacgtctcggcaatggctacctacaaggttaagctcatcacaccagaagggcaagagcacgagttcgaggctccggatgacacctacatccttgatgccggcgagaccgctggagtagagcttccctactcatgccgtgctggagcatgctctacctgtgccc

SEQ ID NO: 1100 - DNA, 393 bp, Oryza sativa
  Clone ID: uC-osflcyp022a05b1
gtaggaccccacccaaaatcacacgcgccaaccagatcaaacccacctcgcaggagaagagaagcgatctacctctcctcgaggtggtggtgaggatttggagttgaattgtggggagggggacctcgcgggtgttgccggtttggagcccaagatagggttatgagctgcttcgcggaccgccgctgctacgccgccagccgccgccaggacggcctcctcgtgttcatgttcttcatctcgattcccatacgtactagtagcagtagtagtaataattgtcattccagtagtagtattagtagtaatctcctgtaagcggggtaccttctggcggctgagtgtacggtgacgggaggacccttcttcctcttcgtgttaatctttttcttc

SEQ ID NO: 1101 - DNA, 411 bp, Oryza sativa
  Clone ID: uC-osflcyp022a06b1
tttcccccaaatcgctctctctctcctctcctctccaccgccgccgatctcctcctcctcaggcgccgccgccgcgtcgcctcccggagctccggtgctgccaccagcctacgcagcgccgcctccttctcctcctccggcatccgccaatcgccgccgcctggatcgtcggggagccccgcgccctaacgttttctagaggcgccgcggatccagcgcgaatcgatcgagaggtaaaggggaagctgatttgagtcggcggccgaagaaggaagccatgaactcgagaagcaactaccgcagcaccagaacttctctttttgatggcattggaggagggcagaatccgggcaacatcctattcttcacatgagatagatgagaatgagaatgatcaagctattgatggat

SEQ ID NO: 1102 - DNA, 455 bp, Oryza sativa
  Clone ID: uC-osflcyp022a07b1
tcggtcgaagcaaagcgcaccacgcacacggaaagagaggagaggtcacatcgcggcggccgcggcgaggatgttggcggtgtttgatccgacggtggccaagtgcccggagggcctccggagcccgccggtggccggcggcgccgtggcggccggcggcgcgggcgcgctgatgaagggctttgccggagcgcacgccgacgcggtcaccgtcagcctgggccccgccggcgccctcgcctactcggcggccaaccagagccccctcgtccccaggttgttcggtgctgtgaatgacatattctgcctgttccaaggacacattgagaacattgccagtctgaagcaacactatggtctgagcaagacagcaactgaggttaccatcctgattgaggcctacaggaccctcagggacaggagccctcttccagctagtcaggtcgtgagagatc

SEQ ID NO: 1103 - DNA, 456 bp, Oryza sativa
  Clone ID: uC-osflcyp022a09b1
tcgtttcgcgcaggacctcaagacgggctacctgacgctgacgtcgccgcgcgccgcgttcatcaccgaggcgatcggcacggcgctgggatgcgtcgtcaaccccaccgtgttctgggtgttctacagggtgtacaagatgggcagcggtgacatgggcgacatgccctacgccaagctttaccgcggcttcgccatgctcagcgtcggcgacggcgagcaaggcctgcccaggcacagcatgctcctcttcaaggtcttcttcctgctccccctgtctctcagcgtgttccgggaggtggcgagccggacggagtggcgcaattcggcgctacattccgagcaccattggcatggccatcaccttcttcatgccgccgcgcgtgcccgtcggcatgtgtctgggccgcctggaggcgtacctgcgggagaagatggaccccggccgctggcggt

SEQ ID NO: 1104 - DNA, 103 bp, Oryza sativa
  Clone ID: uC-osflcyp022b02b1
gaaagtgtggggtttcttctccgaggttatagttactctttggacatttaagttcattaaagtgagctggtgggattgccgttctttccgcctctttacctgt

SEQ ID NO: 1105 - DNA, 479 bp, Oryza sativa
  Clone ID: uC-osflcyp022b03b1
tttttctttccgcaaaattggcactttcctggctgaaaatgttaattctggaagacagtgctcatcacccatgcaaattaatagtgattcagtattcgattttatgtggaaactgggagaacagtttccagattatttctcttagtgatggaagaattgttcagagcatcaggcaacataaggatgttgttgcctgtgttgcaatttcatctcgtggaaatgtggttgcaactggaagttatgacacaactgttatgatctggcatgcatttttcggcataccaatttatcatgttgtaatggaaaggccggttcatatcttttgtggccatgatgacatcataacatgcttatttgttagcacagaactggatattgtcatcattggtttcaaaagacggaacttgcatatttcatacactgcgtgaaggaagatatgttcgatccattcggcatccttgggcattgccttgtaaaat

SEQ ID NO: 1106 - DNA, 468 bp, Oryza sativa
  Clone ID: uC-osflcyp022b04b1
ttactactctgttccccgagggcgcaccgaaggaaaccctagccgctgctccccgaagccatggcggaggcggcggggggccagccggagttcgtggaggtgcggtgcgcggggtgcggggagacgctggaggtggagccgggcctcaccgagttcgcctgcccggactgcgggacccaccaggcgctcccgcccgagctcatgcctccgccgccgccgcgcccgcggcgggctctgcccatccccggacgggggcctcctcccgccgcggtgttgcacgctcccgtgccggtccccgtgcaggttcccgcgcccgcgcgcatgccgtgcggtggctgctgcgctctgctgagtgtgccggcggggctcgtgcgcttcgcctgcccggtctgcgccgccgagctcgtcgtcgacggcgggcgccttcggctgtagcttggtttccctgccggccccacggtctccgtc

SEQ ID NO: 1107 - DNA, 288 bp, Oryza sativa
  Clone ID: uC-osflcyp022b05b1
ttctgtactactattttctctctctacaactcttgtcaatctctctctctagagcttagcttagcttaccctctctcatggctccaactgcagaggttgcggcggcgccggtgcaggagcaggagaaatgcaacggcggcggcggaggcgggtttaggggtgcggcggtgaggtgccacccggcgctgtcgacggagaagaaggcgtcgatcaggggcgtcgtcggggagctgctcggtgctgcggcggcggcggccggcgccggcgaggagaggaggaggagcctca

SEQ ID NO: 1108 - DNA, 469 bp, Oryza sativa
  Clone ID: uC-osflcyp022b07b1
gcaagaagcaattcttgagctcaatcagcaacaacatctatctccttcttgcttagttaagtccttcgccctcccaagaagaagaagatgtcttgctgcggcggcaactgcggctgcggcagcggctgccagtgcggcggcggctgcggcggatgcaagatgttccctgatgtggaggccacagccaccaccaagaccttcgtcctcgctgctccatccaacaaggcgagctctggaggaatggagatggcggtggagagcggcgagaacggcggctgcggctgcaacacctgcaagtgtggcaccagctgcagcggctgctcctgctgctcctgcaactgaatctatcgtcgtcgtcgcccggctgcatgaggatttatcgtatggatgctgctactgtcgatcagagctttgatcgaggccttaatttgcttgcattagtacccagcttatatgtaggcaggccttg

SEQ ID NO: 1109 - DNA, 462 bp, Oryza sativa
  Clone ID: uC-osflcyp022b09b1
tcggtctacgggtgggacaccgcggggctctccgccgacccggagacgttcgccaagaaccgggagctggaggtgatccactcccggtgggcgatgctgggcgcgctcggctgcgtcttcccggagctcctcgcccggaacggcgtcaagttcggcgaggccgtgtggttcaaggcgggctcgcagatcttcagcgagggcgggctcgactacctcggcaacccgagcctgatccacgcgcagagcatcctcgccatctgggcggtgcaggtggtgctcatgggcgccgtcgaggggtaccgcatcgccggcgggccgctcggcgaggtcgtcgacccgctctaccccggcggcgccttcgacccgctcggcctcgccgatgaccccgaggcgttcgcggagctcaaggtgaaggagatcaagaacggccgtctcgccatgttctccatgttcggcttcttc

SEQ ID NO: 1110 - DNA, 310 bp, Oryza sativa
  Clone ID: uC-osflcyp022b10b1
ttgcggttagcaagtgtccaaccagcatagtaatcagctttctttgattaagtcatggtgtaccgtatctgttaattttctacgtcgtttgtgatacataatatacgtcgtgtatgcgtcgtatatggttacagtttgtcacgctcgtcgaccttctgcagctactacataatcctttctagtcaggtatagactgcatctaaactctactattgtttgcattgtgtgagagttttttttttttttgggtctttgccagtcataataaatcatgatgtaacttaaactatgtattaatagtgttcaattt

SEQ ID NO: 1111 - DNA, 476 bp, Oryza sativa
  unsure (1)..(476): unsure at all n locations
  Clone ID: uC-osflcyp022b12b1
tttttgcgcgcgtgattcgggtttcttttccttcttgtcacctgtttcttggtcggtttcccgccttctcagaggtcggtctattggatttggagcccggggcccagccttgcctcaacgtctgtgttgtcgtgttcttattggattcttgaccggattggattttggcggttccaatttttgttggtttgctccgattcttggttgatttggtcggaagatgatcaagtggggcatcggtagcagcgggacgccggcggattcgtattatgaggtccgctcggattgcacggatgacgtgcccaagagcaagttcaagatcaaggcaggaaaaacattgagtgtccggaaatggcaggctgcatttagcactgatggttgtcttgatattgcctcagtcctaagccggatacanaaaggaggtgtgcatccaacaataaggggagaggcttgggagttttacttgatgttttgat

SEQ ID NO: 1112 - DNA, 476 bp, Oryza sativa
  Clone ID: uC-osflcyp022c01b1
gtccgtttcggtttcggtctgggattttgaaacggggaggcggaatgctcgaccgatccctcaggccgccgccgccgcagcaggcggcggcgcaggcggaggcgggccccggcggtggcgagggaggggggaacgtggatcgggtgctgttcaagaacctcgtcgagatggtgccgctcgtggagtcgctcatgggttctgatttgaagagtgtgaagtcgccgcaaagtgtgtcggtgaaaaaacggagggatcctggagagacgggcaagaagagcaccgccgactccaatggtgagaatggcgcggttgcgccagtcggtctgttggggggagaaaataaacccaaggataaggatgagatcgttttgctgcgtgagcagatcgaagagttgcaaaagacgctgcttgagaaagaggaagcactgaaatccgcggagagtttggtgggggagatgaatacattatattcgaca

SEQ ID NO: 1113 - DNA, 476 bp, Oryza sativa
  Clone ID: uC-osflcyp022c02b1
tgcaagtcatagcagaggttgactccacattactcccaaatggatcaaggggtggataagaatgttattgataattcgctagtttcaaactgtgacttccctgttgtaaaaaagttggacaagtgtgtaaatgaagaagcttctgtgcaatctccctttgaaaataaggacacaagatcccttggcatggtatgtgatcatgaaaataacaagagtggtgttgctgaggtgattacaccaccagagaatgaagcgattgaatcatatatctcaaaaagtgttgcagatgaagatccttcatatggatgtcagacaccgcgcgaaagcatctttgatccttttgctccaggaccagaggagttagcttgtgcaccaaagaagaaggtgaccaaggcaccagaacttccttcgcgaaggcagctaagttttgattcaagtgattaccctgttaaaaggttaagttttgaattcgatga

SEQ ID NO: 1114 - DNA, 305 bp, Oryza sativa
  Clone ID: uC-osflcyp022c04b1
gtgcaaacccccccccgaaaaaaaaaaaaaaaagggggaggggggggaaccaacaaccaggggtttaaacccccggaaaaatttccccggggaaaaaaaaaaaaaaagggggcccccgggggggcccccccggggaaacccccgggggggggggaccaccccccctaaaaaagcagggggccccccgggggggggaccccccccggggcccgcccccggggaacccgcccagaaaaaaaaaacccgggggggggggggaaccggccccccgggggggggaaaaccccccgccacgcccggaaaga

SEQ ID NO: 1115 - DNA, 461 bp, Oryza sativa
  Clone ID: uC-osflcyp022c06b1
cccaaccctagctagctccccctccttccccggcggcgacatcgacgatggcggcggctgcggcaggcggcggcgccccgcgggcgctctcccagcgggagcaggacatccagatgatgctcgcggcggacgtccacctcggcaccaagaactgcgacttccagatggagcgctacgtctacaagcgccgatccgacggcattttcatcattaaccttggcaaaacctgggagaagcttcagctggctgccagagtgattgttgccattgagaacccacaggacatcatcgtgcagtctgctaggccttatggtcagagggctgtcctcaagtttgcacagtacaccggagctcatgccattgctggcaggcacactcctggtacatttaccaaccaactgcaaacctcattcagtgagccacgtcttctcatccttactgaccccaggacagatcatcag

SEQ ID NO: 1116 - DNA, 473 bp, Oryza sativa
  Clone ID: uC-osflcyp022c08b1
cgaaaacaaaattctcccccgggttatcgactgcctcatctagagtttcttctttcttcgcgtgttcttggaggaggagcgaggactaggttagctgtattcggagcttcagattatccaaaaaaaaaaaaaaagaatggacggtgagcagctgatgagtggtgaattggacaattcgttcaacgcactcatggtttctggagagggtgagagtggacaggcacatcatgagggcacagggactaccttgctaggttggaaggaccttcccatggagctgctcctgcggatattatcgatggctggagacgacaggatggtaatcgtgggctctggtgtttgcaccggttggcgtgatacattagaatggggagtcacgaatctttctctttcgtggtgccaggctcacatgaatgacttagtgatgtcacttgctcagaaatttacgaagctgcaagttctttctttacggc

SEQ ID NO: 1117 - DNA, 468 bp, Oryza sativa
  Clone ID: uC-osflcyp022c09b1
tcggccggacagtatcttgaggcataccctgcacaccaactcgggcttagcatattcgcaactgagttgatgtcgggaaaaccagcaatctagttgctgctctctgttactctgtatgtgtaggtaacattggctaggtaaaccttacatcatggccagagttaggggcgcgagaagaagcagggaggaaggtggatggacagctaataagctgatgaggatgtcatccggctggtggtctggcggaggcggcagaagcggatgccgtcaacatattttgcatcaagatgtgctttgctgcagtccttgctgcggtgcacagcacggatgacccttatagcctctttggaggcctataatctgagagcccgttgtgtatagctcttatcgtgtcctgcgttttgtctggtggaagcgaaattaccatgtttccagaactccggaattgtctctaaattattgcgtgag

SEQ ID NO: 1118 - DNA, 432 bp, Oryza sativa
  Clone ID: uC-osflcyp022c10b1
tgcaaacaaagaaagaaaagcatcacaaatctcacgcactgtctctcgttcgcgcaaagcacgctgcttttctccgctttgcgagcaccatagcctagcccaccatgtgcggcggcgccatcctctccgacctcatcccgccgccgcggcgggtcaccgccggcgacctctggctggagaagaccaagaagcagcagcagcagaagaagaagaacaagggcgcgaggaggctgccactgcgccaagaggaggaggatgatttcgaggccgacttcgaggagttcgaggtggattccggcgagtgggagggtggagtccgacgccgacgaggccaagccgctcgccgcgccccggagcggcttcgctaaaggtggattgaaaaacactactgttgctggtgctgatgggcctgcagcaaggtctgctaaaagg

SEQ ID NO: 1119 - DNA, 411 bp, Oryza sativa
  unsure (1)..(411): unsure at all n locations
  Clone ID: uC-osflcyp022d01b1
tttcttcttcctcttccttctcttttcttttcttcttttcccctttccttccttcccgtcgaccgcagatgctgatggcgtgggaggcagcacgggaaagcagcaagcgacggctacatcggcttgggaggggcggcggcggagctcaggatggggaaggcgacatcggcatggggggcggcggagctcgcgatggggaaggcgacatcggcatggggggcggtggcggagcttgggatgaggatggcaacggcggcgggcgagtgaggcgacggcgactggcgcgtggagctgctcctcggcggcctcccttgctctccctcgtcgccgtcgagccctccctctcttgccgtcgacggcactcgaaggggaggcggcggccggcaggggcgacngccgctggagaggagg

SEQ ID NO: 1120 - DNA, 437 bp, Oryza sativa
  Clone ID: uC-osflcyp022d02b1
gtgaatcagcaaaaaaaatcaaacaaaaagaaaaaatattccccatctgtgaaattcgcaaaaccctagcgcggcggcgatgtcgaacacgagggtgttcttcgacatgaccgtcggcggagctccggcggggcggatcgtgatggagctgtacgcgaaggacgtgccgcggacggcggagaacttccgcgcgctctgcaccggcgagaagggcgtgggcaagagcggcaagccgctgcactacaaggggagcaccttccaccgcgtgatcccggagttcatgtgccagggcggcgacttcacccgcggcaacggcacgggaggggagtcgatctacggcgagaagttcgccgacgaggtgttcaagttcaagcacgatagccccggcttcctgtccatggcgaacgccgggcccaacactaacgggtcccagttct

SEQ ID NO: 1121 - DNA, 474 bp, Oryza sativa
  Clone ID: uC-osflcyp022d04b1
caacgattgcaactgctgcaacttgagcagcagcagcagcagcagctgttgttgcagcaacagcacctgctttctcaagttatacctcatgggcattccagtcagcaacctgatgatctttatgggtcacaacgtacttcattgccaactggtgattcttcgaatcttggccttcagaaaatgaaagaggttcttgaggcagaccgcgttttgactgcccatggtacacaggaggggcagcaacctagtgatccaagtattatgaataagaagggtatggagggtgtaggtccatctcaaagctctgtaccttctttattgccccatgaaatttttggtggtgtaccttcaaaagatcgctactctcacccccagaagttggaagataaggtcaatgtcaatacacaattgaaagccagtatagtgaacccgatgctaacaaagttgcaataggcgtgaagatgattctgatca

SEQ ID NO: 1122 - DNA, 412 bp, Oryza sativa
  Clone ID: uC-osflcyp022d05b1
ggaggtgctggagaagtggatggcggcgtacccgcagagccgcgtcctcgtcggcgtcgtcgcgtcgccggaggctgacagggacggctacgtgtcgcacaaggatctctactacgacgtgctgcagttcatcaacaagctgcccaactatgggggcatcatggtctggaacaggtactgggacaagaagaccggatggacggctggtaatgagcctggtctcctggatcaggttctgtgatggacggctggtaattaaccagaccttgatccattttcactttgatcactgatcacttcactggattcatgcacgagctactactagtacgtgcacaaataaagtaagtaatgtcatgtgacgtgcatgcacaaataaagatggaaatgatatgataaaagattggggtat

SEQ ID NO: 1123 - DNA, 474 bp, Oryza sativa
  Clone ID: uC-osflcyp022d06b1
tttcgttaagaccctgaccggcaagaccatcaccctcgaggtcgagtcctcggacacgatcgacaatgtgaaggccaagatccaggacaaggagggcatccccccggaccagcagcgtctcatcttcgctggcaagcagctggaggacggccgcacccttgccgactacaacatccagaaggagtccaccctccaccttgtgctcaggctcaggggtggtatgcagatcttcgtcaagaccctgaccggcaagaccatcacgcttgaggtcgagtcctcggacacgatcgacaacgtgaaggccaagatccaggacaaggagggtatccccccggaccagcagcgcctcatcttcgccggcaagcagctggaggatggccgcaccttggctgactacaacatccagaaggagtccacccttcacctggttcttaggctaagggtgggatgcacatcttcgtgaagaccctgact

SEQ ID NO: 1124 - DNA, 450 bp, Oryza sativa
  Clone ID: uC-osflcyp022d07b1
ttgcaatagtagccagcaaatcaatcgatcgatccgtacaatggcggccctgaagatgaacaggatggccgtggcggcgctgttcctcgccgccgtggtggtggcgggcggcgctggcgctagcgcccacgtcggggttggggctggggctggggccgacgccggcgtcggcgccgccgtcggggctggcgctgacgccgcccttcgggttggcagccgcgccgccggcgccgccggggctggagttggagctggaattggagccgccgccaacgtcgccgggtctctcaccggcgccgctgagggcgccgccggcgtggcacccaaggtgcatgtgtgagatcgatcgatcgatcgagcgcgccggggcttccatcttcacgactccatccgtccgcagcggctccggcgatccatatttttataaattcgcagtcgattgtttgttgt

SEQ ID NO: 1125 - DNA, 476 bp, Oryza sativa
  Clone ID: uC-osflcyp022d09b1
ttagaggaagaattcagatatttatgggccctggaagcggaaatgtcttgctgaatttgggattattacacaatgtgtggcccctactagggtcaatgatcagtatattacaaatgtactgttaaagataaatgcaaagcttggtggcttgaactccctgcttcaaattgaaacatccccttccattcctcttgtatccaaggtcccgacaataatattgggaatggatgtttcccatggatcacctggacagtctgatataccttcaattgctgcggtcgttagttctcgtgaatggcctcttgtatcaaaatacagggcttcagtccgttctcagtcacctaagttagaaatgattgatggactatttaagccacaaggagctcaggaagatgatggcctcattcgggagttattagttgacttctataccagtactggtaaacgtaagcctgatcaagtcattatctttaggg

SEQ ID NO: 1126 - DNA, 374 bp, Oryza sativa
  Clone ID: uC-osflcyp022d10b1
gtgaatccatccatggtgatggacgcagctagagcggtggcgatgccgtcgctgtcgccggccaccgtcgcggcgaggccgagcagccgccgccttcacaaggtcgccgccatggccacccagaagcccacctccggcacaagaagggggacgacggtgtacttcccggtgggggagccggggccgaggcagacgacgagcgggaaggcggcggcgccgccggtgaagctgctgacgaacgtggagaagctgcggctgctgaccaaggcggagaaggcggggctcctgtcggcggcggagcgcgccgggctgtcgctgtcggcggtggagcggctgggcctgttgtccaaggcggaggactggagggtgctgtt

SEQ ID NO: 1127 - DNA, 474 bp, Oryza sativa
  Clone ID: uC-osflcyp022d12b1
gtcactgcaagcatcttgctccgatttatgagaagctagcttctgtttataagcaagatgagggtgttgttattgccaatcttgatgctgacaaacacactgccttggcagagaagtatggagtttctggtttccccacattgaaattcttcccaaagggaaacaaagctggtgaagattatgatggcggtcgcgagttggatgacttcgtcaagtttattaatgagaaatgtggaaccagccgtgattcaaagggtcagcttacttcagaggctggcattgtcgaaagcttggctcctcttgtgaaggagttccttggtgcagcaaatgataagcggaaagaagccctctccaaaatggaagaggatgttgcgaagctcactggccctgctgccaagtacggaaagatctatgtgaactctgcaagaagacatggagaagggctctgatacactaagaaggatctgagaggct

SEQ ID NO: 1128 - DNA, 476 bp, Oryza sativa
  Clone ID: uC-osflcyp022e02b1
tccacttcaactagtggctggccgtctcctgtagtttcacctgtgccgagcgaggctggtcccttgacgtaggggcgcacctcgccatcgagaggatctgaggccggacctctgaatcttggatctgcccttgccgacaccaacatgaccgatctgcacctgaggtactcgatctgtaatcaccacccttacattggcacgctcaaaaactccgactgatcaacatcgcgaaccctatatacaaaaggaggtagtacttgatttgccctgaagcgctgcactagccaaaccgaggcactgggcttggcaatagacgcagcacaggattgagttagttagttttgcactgtagattattgttttttctttgcaggaaagtctagtgatatatactgattgctttattttatttagagctattaggttactgacctgaaagcatgcaggtttattgggccttgttagatccaaacttt

SEQ ID NO: 1129 - DNA, 473 bp, Oryza sativa
  Clone ID: uC-osflcyp022e03b1
attcgtatcacccccccgaaaccctagacccaccaccaccaccaccatccccgagctcgcggagaggcagcgagagcgagaggtagctgctagtaggcgtcgggcgaggagatgtacgcggaccagatctccaccggccggaagcgctccatccacgaccgcatcgacggcgaccagcccgccgcccgcgctggcgccggcgccggcggccggggggcccgtaacccgccgtccaagaggcaacggcaaactgatgaaaaatggaagcatgatctttaccgggaagacgatgaaccagcttcaaaatcaattgatccacgggatttgcgattgaagcttcagaagaaaagctctcagcaaagctttgctggccaaaggggttctggtgtacgtgatctacgtgagatgctttctggaacaatgccccacagcccgtcaatgcggaccctccaaaggcaaagccatcatcagag

SEQ ID NO: 1130 - DNA, 478 bp, Oryza sativa
  Clone ID: uC-osflcyp022e08b1
tggacgcgtgggcggcaactgcgatctccaaccgctcgatctctcgccggaggctccagatctgcgggaggtagtcgacctcgtcgccggcggtggggtttccgaatcgggggcgaagatgacggaggcgtgggtgcggcacaagcccgggatggcgagcgtcaaggacatgccggtgctgcaggacgggccgccgccgggcggcttcgcgcccgtgcgctacgcgcgccggatccccaccaaggggcccagcgccatcgccatcttcctcactaccttcggcgccttcgcctgggggatgtaccaggttggccaggggaacaaggtccgccgtgcactcaaagaggagaaaattgctgcccgcaccgctttagtgccagtgcttcaagctgaagaagatgaaagatttgtcaaagagtggacaaagtctcttatgtgggaggaaataattatgaaagatgtccctggatggaaggtc

SEQ ID NO: 1131 - DNA, 479 bp, Oryza sativa
  Clone ID: uC-osflcyp022e11b1
tttagtggtgctgcattctgccgttctgctgcacttatactaatggccttgttgctattgaggcatgctttgtctatctcagacaatgaaggagatgatgatgcttctaccatgttctcgctctttctacttcgagctgctggatttctgctgccatgctatatcatggcttggatattcagtattttgcatcgccggcgacaaagacaggaagcggctgcaattgctgcagcagaggtggcattcatcctgcaatcagcccaaggccatgcccttcagttcaccatcgctccagactcccccgccactccgcagcatgagccacggcagcagcagccgcagccgcagccgcaggaatagctagttacttcagtagcgtctctcaactactgactcgcacatgcagaagaagaggatacctcagctagtggccgctttgttgtttcctgctgcaactggcccagggacgctaagaacct

SEQ ID NO: 1132 - DNA, 478 bp, Oryza sativa
  Clone ID: uC-osflcyp022e12b1
gtcgccgccgccgccgccgccgacgccgccgcgaccacctctcgcaaggggattttgtaggggtttctgatccgaggagcgggcgatgtcggactccgaggagcaccacttcgagtcgaaggccgacgccggcgcctccaagacctacccgcagcaggctgggaccatccgcaaaaatggctacatagtcatcaagaaccgcccctgcaaggttgttgaggtttcaacctctaaaactgggaagcacggtcacgccaagtgccactttgttgcaattgacatctttactgccaagaagctcgaagatattgtgccatcttctcacaactgtgatgtcccgcatgtgaaccgtacggagtaccagctcattgatatatctgaggatggatttgtgagtctgctaactgaaaatggcaacaccaaggatgacctcaggctccctactgatgataacctgcttagtcagatcaaggatgga

SEQ ID NO: 1133 - DNA, 477 bp, Oryza sativa
  Clone ID: uC-osflcyp022f05b1
ctaaattccaacccaaccgccgccgcatcgccctcgttagaacgatggccgcgtcggcgctgcaccagaccaccagcttcctcggcaccgcccctcgccgggatgagctcgtccgccgcgtcggcgactccggtggccgcatcaccatgcgccgcaccgtcaagagcgcgccccagagcatctggtatggacctgaccgtcccaagtacctgggcccgttctcggagcagacgccatcgtacctgaccggagagttcccgggagactacgggtgggacacggcggggctatcggccgacccggagacgttcgcgaggaacagggagctggaggtgatccactcgcggtgggcgatgctgggggcgctgggctgcgtcttcccggagatcctgtccaagaacggggtgaagttcggggaggcggtggggttcaaggccggcgcgcagaatttttccgagggggggcctcgctacctgg

SEQ ID NO: 1134 - DNA, 487 bp, Oryza sativa
  Clone ID: uC-osflcyp022f08b1
gtgatattttggtggtttaaccggattataattatccccttataccatagaaatgacatagttacgcccatccacacgaccaagtaattggacttagcctagtacattgtcctactatatgaaagattgttgggtggcttattaggagcaggttttgtggtgaatcatgcgtaaggtgtttgggtggcatgaatcacaacagtgggcttcatgaaagtgtgacgatatagataccttgcctaggcctggcaagagtttgaccactatgatgaaccaagaccccactgtgcagtaactagtggtaaatgggactcgaacggctatggtgtttacaacctcgcgaattgttctcatcgtgtgggtaaagctgggcagacattgcagacgtattcgaatacaccatgctcccggtcaaggagatatgtcataagggttattcctactccaaaagtataagtagttttgaaaatctaaaatgttgagactt

SEQ ID NO: 1135 - DNA, 479 bp, Oryza sativa
  Clone ID: uC-osflcyp022f11b1
acgtttgacaagagtagaacaacaacaacatcatcatgatctatcacacacactatcagggcaggtgatcgaatagctaggaagcaagcaagcagagagtagtagatcgagtgatcggaggatggggtcgcggtacgaggcggaggtgacggtgtcgtcggcgcgggacctcaagaacgtcaactggcgcaacggcgacctcaagccctacgccgtgctctgggtcgacgacggcgccaagtgctccacccgcgtcgacctcgacaacgccgacaaccccaactgggacgacaagctcaccctccctctccccccctcctcccgcctcgacgacgccctcctctacctcgacgtcgtccacgccaacgccgccgagggcgtcaagccgctcgtcggctccgcccgcctcccgctccgtgacgtcctcgacgacgccggcgtaggcgcccgcgtctcccgctccctccgcctcaagcgcc

SEQ ID NO: 1136 - DNA, 478 bp, Oryza sativa
  Clone ID: uC-osflcyp022f12b1
gtgtcctgtcactaatatgtctactggaggaggggatttgtcaagatcttcaaatgctcccgttgcttctggttcaccatccaattcagtctccaaaagtactggtggcagcccaccggcttctggaagtgcaaagggtgttccaccagctgtccaattgccgtcacctcaacaacaatcagccaagaatccagcatcgacgtctggagccaagtcagctcccacaaatcactatagtagtatgcctatgccatcgatccttggtcaacagccaaatgtgccgcctggttctaattcaggcagtaagcagcagtcgcacatgatgaaacagcagccatttccacaggaggtcatttcttcatctccaatgcatacacaccacaagcccctggagctgctggaggtgttgctcttggcctttaccagaagcgctcagctgacaagacgcagcagcagcagcagccccatcagcagagcg

SEQ ID NO: 1137 - DNA, 433 bp, Oryza sativa
  Clone ID: uC-osflcyp022g02b1
gtaacttctacagaatcaattgtattatgcagactaaacataatactctgtcctgcgatatagaggaacatttttctcctctaagggctctatgtattcggtcttctattttgactaattggagatccttttgcatttcctttagggcacaatcaaatcacatgacataagcaccagagagatgatgacctttttggcacgggggtaccaaccaaaaagtgttgggttgattgtcgaagctgtccaatgcctctataccataggtgagaaagaaatatggacacatgccttttgcatggtttcgaaagatggaaaatttgggatgtccttgctagccatgtggctatgtaattaataatggaataactcgtgatgtcacccttttctttaatattgacagtgactcattttaacaagaaaaaaaaaaagggga

SEQ ID NO: 1138 - DNA, 464 bp, Oryza sativa
  Clone ID: uC-osflcyp022g05b1
ttctaccatccattctcctctactctcctctcctctcctctcctctcctctccggcttactccccccctcaccgcttaccgcgccgcctccgtctctgccgctgccaggctcgggagcggcggatctgccgccgacagcgccggcatccgtctccgcctcttcacggcggcgtctgagccggggcaggtatccctcccattccctcacctcccctctcacctctcctctctcggcgcggattccggccggagcagctgccggagggcggtggcggcggcggctccaggcggttcctgcgcggaaggcggaggcggcggccgtggcggctcccctccctcctcccagatccggtggaggcgggggcggctcccctcccgcccgggtcctgccgtgccagcccggcccgccgctagctctccggcttgacatcggctcgcgggtttttcttgttctttcacgcgcg

SEQ ID NO: 1139 - DNA, 493 bp, Oryza sativa
  Clone ID: uC-osflcyp022g07b1
tcgtttagttatgatgcctatcctagcaccaaagttgggtgagcagaagctactgattatagcacttttggggggctgcgtgcatgtaagaactaacattgcttgctttcatactcatgttaagtgctttttgttaattttctgcaagaataatttgatgtcatcttgtgcatgctgctgcaggcattcatatatagcatagcatggacgccatgggttccttatcttggtgcaagctttgtgattgtaagcattttggtcaacccttctataaggagcattgtatccaaacgagcagggccttttgagcagggaatggttcaagggtgtctcactggaataagctcaactgcaaatgtgaaatcgcctatagttttttcttctcttactgcttggttcctatcagaaactgcacctttcaccttcagaggtttcagccttgcttgtgctggattgcaatgccgatagcactcacggtgagcatttaatatga

SEQ ID NO: 1140 - DNA, 464 bp, Oryza sativa
  Clone ID: uC-osflcyp022g08b1
tggacgcgtgggcggacgcgtgggcggacgcgtgggcggacgcgtgggcgccgtcgcagatccgatccaggaagagctcgccgccgccgctgccatggcgctctccgtggagaagacctcgtcggggagggagtacaaggtgaaggacctctcccaggcggacttcggccgcctcgagatcgagctcgccgaggtcgagatgccggggctcatggcgtgccgcgccgagttcggcccctcccagccgttcaagggcgcccggatctccgggtccctccacatgaccatccagaccgccgtcctcatcgagaccctcaccgcccttggcgccgaggtccgctggtgctcctgcaacatcttctccacgcaggaccacgccgccgccgccatcgccagggactccgccgccgtgttcgcctggaagggggagaccttcgaggagtactggtggtgcaccgagcgct

SEQ ID NO: 1141 - DNA, 472 bp, Oryza sativa
  Clone ID: uC-osflcyp022g09b1
tcaaagcctcgccgccgtcgccgccgccgccgccgccgccgccgcggcgatcgccacgccatgtctccctccctcttgcttacctctaggggtacccactcgccggcgccacggccgcaaacccgtcgagcatcacaactgctcgtctctttcccctcgcgctgcagccgcttcgtcggcctccgcctcgcgcgcgcagccgccgattcgcaggggcccaacggcgctgcccctggatctggatctggtggggacggagagggcaaggcagccaatggtgccgacaccaaattgccaaagaaccggagggacatactcctggaatacgttaaaaatgtccagccagagtttatggagctcttcataaaaagagctccgccacaggttgctgttgccatgcgccaaacggtgactaatatgatttgggactttggcaccttaatttttcgctgaaactgtgacaacggccatg

SEQ ID NO: 1142 - DNA, 372 bp, Oryza sativa
  Clone ID: uC-osflcyp022h05b1
atcgccatcgccatggctctcatggtggttcaacctggccggcagatgactgcctttgctgctcggacgtcgccggcggcggcggcggaggcgttctggcgtgccgccatgcccggcgctcccatgccggacgccatcgtcgagctcctccaccatgagcacggcgttgctagcgccggcggcaaggccaacgcggcggcgacggtccaccgccgccgatgaacttcaactacgacgactacagggccctgcctcggagcgacgccccttccccggatgcattgaaccgcgtcgccgccgtacagaacgccgacgagaacggcgtgtcctcgtcgtcgtcgccgacgtcgccggtgctcttcctcgaggacg

SEQ ID NO: 1143 - DNA, 444 bp, Oryza sativa
  Clone ID: uC-osflcyp022h06b1
ttcacgctccacccagcgccgctgcttcccaggcagtgccgtcgctctcccctgcgcctgctgccacgccccactccggcgacccttctagccgccgccccgcaaccgtcgccggcctgaatcggtttcttggctcctcgcttctctgcccctaagctaatcccagccaccggtctcttgctgctgcagccgccgcggagatggccggtggaaacacagcgcacgcaactccggtggctgcatccctttcccccatagattaccttgtttgatggtcctactgcggctgcggaagactgatgatcatgtgactctctggttctacagcttcttctggaattggaagaatgcatgcttgaatcctgggcgtgcgtcccgtcgaagcgacagatgaggcactcttggtggatacctgcgaagaacctttacctgaatttgcaagtc

SEQ ID NO: 1144 - DNA, 474 bp, Oryza sativa
  Clone ID: uC-osflcyp022h09b1
ttggagtacctggctttgaccggtgcaaggttgaatgcaaaggaaatgattgctgccggtcttgctactcattttgttccttctgaaaaattggaagaacttgaaaaatgcctgctgaatttaaacacaggagatgagtctgctgttcgagctgctattgaagagttctcaactgatgttcaacctgatgaagatagtattttaaacaagctcccaactatcaacaaatgtttctctgctgagactatcgaggacatcataaaagcttttgaatcagaagggagcattgatggaaaccaatggatcgctacagtactgaagggcatgcgaagatcatctcctacttcactgaagatgactcttcgatcgatcagagaaggtcggaagcagagcctgccggaatgtttgaagaaggaattccgacttacaatgaacactctccgatcctgagttactggcgatgtctatgaggga

SEQ ID NO: 1145 - DNA, 447 bp, Oryza sativa
  Clone ID: uC-osflcyp022h10b1
ttagaggggatcgtgcggccgcctgcgctaagctgcttgcagaaacggcaagacgcagagcttgctttaacccgtgcaggaccctgccgcgccgtcgacggcactgctgggccgacgcggctgcggtttctacgattggattgccgcgcgacggcacgcccacattctgaagtgctgtcatgctaccggacaggaagagcctgcgcgattccgccaaagggatcgaatcgcaggctgcttgactactgccattggcttggaactagattagggctctacaggatcaacaggagtggctaccggaactgaacgaaatgagcgatggcagcgctctaacattccaatcaggcatcgactgcaccctcgccacagacataacggctagcaaagagcacatgccatctttgctgacgtcagcactgaacgacgccatgacatatgatgagg

SEQ ID NO: 1146 - DNA, 480 bp, Oryza sativa
  Clone ID: uC-osflcyp022h11b1
tcgttcgacccccaccccctctacgcctcgccatggcgtccgacaccaaggcagtagccgctctcttctccatgtacaacgacgacgaggaagaggatgacggcgacgagcccagacccccttcgccgcccgccgccgcaacctcctcgtcgccctcacctcagaccgaaggcgagggctcaaaccctaaccccaacgctgccgcttcttcggcgcccccatcccctcccctcgccgaggatccggccggccgcagaaccctagccagcccctacccctcgccggggctcccgccgctgccttcgcgccgctcgtcctcgcccttcgcgatttcgtccccctccccgctccgccccgccgcggccatgccgccggccgacctgccgcgcccccctcggcgtggcccgcttgctatcgtggactacgctcatgacgaaacggccatgtcgccggagcaggaagatggggagatcaatggca

SEQ ID NO: 1147 - DNA, 472 bp, Oryza sativa
  Clone ID: uC-osflcyp022h12b1
gtttcgggagaggattttagtgagggatttgaaggattttgaggtgggagaggagatggagttgccggcggatgggagcgcgctggcgaggcaggggtcgatctactcgctgacgttcgacgagttccagagcgcgctgggaagcgccgggaaggatttcgggtcgatgaacatggatgagctgctgcgcaacatctggacggcggaggagtcgcaggccatagcgccggcggcggcggctgcttcggcggcggcggtggttggggacgcgcagcagcagcagcagccgatccagaggcaagggtcgctgacgctgccacgcacgctgagccagaagacggtggacgaggtgtggcgcgacatcatgggcttgggcggcggcgacgacgaagaccccgcggcggcggcggctgcggcggcgcccgcgcagcggcagccgacgctggggggagatgacgctggaggagttcct

SEQ ID NO: 1148 - DNA, 486 bp, Oryza sativa
  Clone ID: uC-osflcyp023a02b1
ggagggtaaactatgggtattttcgtcttttacaggagtagcactcactccacgcacggcaaacacatctgcaacccaaggcacaaaacaaaacattggggtagactcttccttttgacaaccaaaggtattgtgagacgtcgagcgccccctgatctcgcattacacttgctatgatcaggggggcagacatcatcatcgatccgacacaaaacatacacacactcaacacactcagatgtctaataggagaccgagcgaacgacgaaatctcaatcagcaacgcttctcgcctgctgccattgacagtgttcacagttgggagcagggggaggttgaggaaatggtgaatcttcttggagagggtcatatataaccattgtcaaaagctgcaaaagacagagagagagagagagggagaaggggagagaacagaaaaggctgtaacccgcgatgttccggtagtagcttttagcttcttctata

SEQ ID NO: 1149 - DNA, 325 bp, Oryza sativa
  Clone ID: uC-osflcyp023a06b1
gtgcaggagaagcattcgttcatccaggagagagagaggcttcaagttcttggactcctgctctgccatgtccatggctgaagggtatggccctacctgggacagagacgacgagtgcgacaacttcatacgcaggatgaacccgtcaaggatcgagatcgattatgattcatgcaccgacgccactattggcaggggagacagcgcaaatgagtatgggatactccttgaagtaatacaagatgtgactgatctgcaccttgtgataagaaaggcgtacataacctcaaatggtggacggggcatggatgtatttaatataact

SEQ ID NO: 1150 - DNA, 471 bp, Oryza sativa
  unsure (1)..(471): unsure at all n locations
  Clone ID: uC-osflcyp023a08b1
tcggtcggcgactacttcccggcgctggcgtggggcgacgcgttcctctccggggtggccgcgagggcgtgcaggaacctccggcggtgggacgagctgctcgaggaggtgatcgcggagcacgaggcgaggctacacggcggagactatggcggcggcgaacagcacagggaggaggacttcgtcgacgtgctgctcgcgctgcaggaggagagccaacgccatgatgggagcttcaagctcacgagggacatcatcaagtcgttcttgcaggacatggtggcggcggggacggacacgtcgatcatcacgctggagtgggccatgtctgagctcgtcaagaacccgacggctatgcagaagctggaggacgaggtgcgcctnggagggggtgcgaccaccgccgacacgccctacctcaaggtcgtggtgaaggagacgctccngctccacccgccggtgccactgctc

SEQ ID NO: 1151 - DNA, 529 bp, Oryza sativa
  Clone ID: uC-osflcyp023a09b1
tttttgaggagggcaccgccatttagttaatgagtagttgttaattatcttcactaaccttaattaccctcacgcaaagcactctctaatcctcctcggcgctcgcataatcttgtatccctcatctcagattatcatcacctcgccgtgttagaaaaaagggagtaagttcgttttatcgtcggatttggtgagagttcgccggagtagaagaagatgacggtgacgccgcagatcacggtgagcgacgggaggctggcggtgcgggggcggacggtgctgaccggcgtgccggagaacgtgacggcggcgcacgcgtccggcgccgggctcgtcgacggcgccttcgtcggcgccgacgccggcgaggccaagagccaccacgtcttcaccttcggcacgctccgggaatgccggttcatgtgcctgttcaggttcaagctgtggtggatgacgcacaggatgggctcctccggccgcgacgtcccgctcgagacccagttcatgctcatcgaggtccccgccaccg

SEQ ID NO: 1152 - DNA, 360 bp, Oryza sativa
  Clone ID: uC-osflcyp023a12b1
ctggtacgcctggcgggaccgtaccggaccggacatgggccggaccaacccacgcgttcgtgatagccctgacctcaagccaggacgagagggggaagaatgccgctggggcgggacgtcaggatgggatggccgagaagctcttggaggacatggtgactgtcaccaggctccaacctgatggtaagaaggatgacagagtttctggtatcgaagctcgcagagaccagctcgatatgcacatgcagtaagatgtagccacagatgtatattctatgcatccaggtgacagatccaccatggacttggctcctacttgggactaagaagggaccccatatcgcgccttgttgacacagg

SEQ ID NO: 1153 - DNA, 547 bp, Oryza sativa
  Clone ID: uC-osflcyp023b01b1
gtgtgctcgtcaccggcgccgcaggacaaattggatatgctcttgaccccatgattgctaggggtgtgatgttgggtgctgaccagcctgttattctacacatgcttgacattccaccagctactgaatctcttaatggccttaagatggagctggttgatgctgcatttcctcttttgaagggaattgtcgcaacaactgatgttgtggaggcctgcactggtgtgaatgttgcggctatggttggtgggttccccaggaaggagggaatggaaaggaaggatgttatgtcaaaaaatgtctccatctacaaatcccaagcttctgctcttgaggctcatgcagcccctaactgcaaggttctggtagttgccaatccagcaaacaccaacgctctcatcttaaaagaattcgctccatccatccctgagaagaacattacttgcctcacccgtcttgaccacaacagggcacttggccagatctctgaaaaacttaatgtccaagttactgatgtgaagaatgcgatcatctgggcaaccactca

SEQ ID NO: 1154 - DNA, 438 bp, Oryza sativa
  Clone ID: uC-osflcyp023b05b1
ctcgatcaggtacgacagctaagctagccatctatcgttcatggctggtggtggtgtgggagcacaggcggcggcggcggcgacgataccagaggcggcgctgaggtccggcaagccgatgccgctcgtcggcatgggcaccgcgtcgttcccgttggacgcgccccagctgccggccaccgtcagggacgccgtcctgcgagcgatcgacgccggctaccgccacttcgacacggcggcggcgtacggcaccgaggcacccctgggggaggccgtgttggaggccgagcgcgcccgcatggtcgcgtcccgggacgacctctacatcacctctaagctctggatctccgacacccaccccggccgtgtcttgccggcgctcaggaggacgctccggaacctgcagatggtttacatcgacctatacctgattcactg

SEQ ID NO: 1155 - DNA, 540 bp, Oryza sativa
  Clone ID: uC-osflcyp023b06b1
gttcagtaatcagtaatgctggtttgaaatgtgttgcggacatgttctcagatgaggacaaagacactgaacaagatttggatagcccaactgagggcttctcgtttatttccgaggccatcaaagatattcaacagggaaaacttgtgattgctgttgacgatgaatcaagagaaaatgagggagatcttataatggctgcttctttggttaccccagaggccatggcgtttgttgtaagatatggcacaggaatagtgtgtgttagcatgaaagaagaggatcttgaaagatcgaaccttcctttgatggttgcaacaaaggaaaatgaggagaagctctgtactgcattcactgttacagtggatgctaaacagggaacaacaactggggtatctgcaaaggatagggcaaagacagttatgactcttgcatgccctgactctaagcctgaagactataatcggcctggtcatatttttcctctgaaatacagagaggggggtgttctgaaacgagctggacatactgaagcatctg

SEQ ID NO: 1156 - DNA, 523 bp, Oryza sativa
  Clone ID: uC-osflcyp023b09b1
tcgttcaggttattgctcctaaggctgaatacgatgacaattgcctggacctactgttggttggtggaagtgggaggttgaggttactgaaatttttggtgcttttgcagtttggaaagcatatttctcttcccaatgtggaatatctgaaggttaagtctgtgaggctcaaggctgggcccaacacacatgatggatgtggtattgatggtgaactattgcatgtcaaggggcaagttcgatgcaatttgctgcctcagcaatgtcgattaatcggtaggccagccaaaaatcctgtacagtagctgtaaatacatgactccaaagtctgcacagttctcaagtttgcccgatatcctgttcatgtacaatcggcaaaggtgtggattatttttgtccacgcccacagattcatagctacagtcagaggtcagaacagctgtgctggcaccctgcttagaggtgtacatcgtgtgcttgatcatagctaaagtcagaagttagaacagccttgttgacaccc

SEQ ID NO: 1157 - DNA, 370 bp, Oryza sativa
  Clone ID: uC-osflcyp023c03b1
tggactcgtggggttttgaggagggcgttggtgatgggggagcacggtgcaggagggaggccgtcaccaaccctgccgggttggtagtagggtgacgcacgggcggtgaggaggaggcggcgcccggactggcgcggcgtggcacgggttgcggtgtggctcggcgtgggagcgcgacgtggagcggcacggttcggtgcggtgtggcggtctggcgcaacggccttgcccggctcggcattgtgccgagcaggcggcgtgcataagaagccgaccctccgaggaaaggagggagggggatgtagacttgggctgcaagagagagagggagggctggaggggaccggaagacagacttgggctggagtga

SEQ ID NO: 1158 - DNA, 524 bp, Oryza sativa
  Clone ID: uC-osflcyp023c04b1
gttggtaaatgccatctagttgtaactaatatgttggacaggggaaagttacattgctaaggtctaaagtggaagaattaagggtttttcaactttttagtcatggtgaatcatcactgacttgataattgacttagttgtcttatgttgaaaccacaagttccagattgatggaattactcagtcccactgcaaaaatcaccaagttggaaaaaatagaatttgttttttgcggaattttctctgattgaaatgattgcttaggtgttatcatccattcatcctaatagtagactaggatagtacgacataactgttctctctacatgctttgttttgtcatcattttgttgtgctactgtgaccataattgttgttatatgtgaatgtttggtggcatgatcatcctgaaattataacttgtcaattgtatgcttgtggtgtccatatgctgttgaagttggtagataaatcagttattgattttgatggctcattttgtacgggtgccttgggaacttcat

SEQ ID NO: 1159 - DNA, 426 bp, Oryza sativa
  Clone ID: uC-osflcyp023c06b1
ttgggcggcctggagctcctcgggacgacggacgacaatgggctccgccgcgacgatcctgccatgactatcgctatcgtgctggttcatgctgctgtctgtagctgacccgatgtgttggttcaacgacgacgcatcagcatcggcaccagcggggtggttggtgtcgtggaccaatgggatgggttggtacaaggggatgccgcgggagttcgtggacggccacaaccagctgcgcgcgcgctacgggctgcagccgatgaggtgggataacaagctggcgaggcaggcgcggcggtggtccgacgccatgcgcggcgactgccagatccgccactccaccggcaacagcttcgccgagagcctctacatcgggaggaacggctggaacgccagggctttcgacgccgtacgatgctggggcga

SEQ ID NO: 1160 - DNA, 466 bp, Oryza sativa
  Clone ID: uC-osflcyp023c07b1
tcgttcaaggcaattggatcaggttctgagggagctgatagctcattacaggagcagtacaataaggaattgaccctccaggaggctgagaccatagccctgtctatcttgaagcaggttatggaggaaaaggttaccccaaacaacgtcgatatcgcaaaggtttctcccaactaccacctctacacccctgctgaggttgaagctgtcattgcccggttgtgagaagattgccatcgcgtgttatttttatcagccctaagacagtctctgtatgaacttcctaaatggatatcagtccattgtttgctatggctgccatgttatgttaacgagatagtggctgctagagtttattactgcctctaatagtctggtgtgcagcccagtcatttgcttgttttcagcagtattgagaccatgtacttactatcaaaaagtgaatgctcatcctttttcaagattt

SEQ ID NO: 1161 - DNA, 516 bp, Oryza sativa
  unsure (1)..(516): unsure at all n locations
  Clone ID: uC-osflcyp023c09b1
tcagaaccttctcgaagctcccgctcccccgggcttccgctccaatggcgaaggaaccgatgcgcgtgctcgtcaccggcgccgcaggacaaattggatatgctcttgtccccatgattgctaggggtgtgatgttgggtgctgaccagcctgttattctacacatgcttgacattccaccagctactgaatctcttaatggccttaagatggagctggttgatgctgcatttcctcttttgaagggaattgtcgcaacaactgatgttgtggaggcctgcactggtgtgaatgttgcggtctatggttggctgggttccccaggaaggagggaatggaaagganggatgtctatgtcaaaaaatgtctccatctacaaattccaagcttctgctcttgaggctcatgcagcccctaactgcaagggtttggtaggtgccaattcaggaaacaccaacgctgtcatattaaaagaatgcngtacatccatccctgagaagaacattacttggctca

SEQ ID NO: 1162 - DNA, 380 bp, Oryza sativa
  Clone ID: uC-osflcyp023c11b1
ttcacccaccctgtcgccgtcgcagatccggggcaggatgagctcgccgccgccgttgccatggcgctctccgtggagaagacctcgtccgggagggagtgcaaggtgaaggacctttcccaggcggtcttaggtcgcctcgagatcgagctcgccgaggtcgagatgccggggctcatggcgtgccgcgccgagttcggcccctcccagccgttcaagggcgcccggatctccgggtccctccacatgaccattcagaccggcgtcctcatcgagaccctcaccgcccttggcgccgaggtccgctggtgctcctgcaacattttcttcacgcaggaccacgccgccgccgtcatcgtcagggacttcgccgtcgtgtt

SEQ ID NO: 1163 - DNA, 527 bp, Oryza sativa
  Clone ID: uC-osflcyp023d02b1
accgttgttattgcggcaccagcaaaaaagcgaggctcatttttcagtgaagtggccacggaatcggcacacagatttgcattgtctgaaattgaagatgctactgacaaatttgacagaagaattggttcgggagggtttggcatagtatactatggaaagcttacagatgggagagaaatcgcagtcaaacttctcacaaatgactcctatcaaggcatccgagaattcctgaatgaggtaacattgctttcaagaattcatcatagaaacctggtgagcttccttggttacagccagcaagatggtaaaaatatacttgtgtatgaattcatgcataacgggacgttaaaagagcacctccgtggaggccctgatgatgtaaaaataaatagctgggtcaagcgtcttgagatagcagaagatgctgcaaaaggaatagagtatctccacacaggatgctccccaactatcatccacagagacctcaagagcagtaacattcttcttgacaagaacatgagagc

SEQ ID NO: 1164 - DNA, 498 bp, Oryza sativa
  Clone ID: uC-osflcyp023d05b1
ttagccagtaagctagctaactaactacgtggctatggcccccaccgtgatggcctcctcggccacctccgtggctccattccaagggctcaagtccaccgccggcctccccgtcagccgccgctccaccaactcgggcttcggcaacgtcagcaatggcggaaggatcaagtgcatgcaggtgtggccaattgagggcatcaagaagttcgagaccctatcgtacctgccaccactcaccgtggaggatcttttgaagcagatcgagtacctgcttcgatccaagtgggtgccttgtctcgagttcagcaaggttgggttcgtctaccgtgagaaccacaggtctcccggatactacgatggcaggtattggaccatgtggaagctgcccatgttcggctgcaccgatgccacccaggtgctcaaggagctcgaggaggccaagaaggcctaccccgatgcctttgtccgtatcatcggcttcgacaacgtcaggca

SEQ ID NO: 1165 - DNA, 556 bp, Oryza sativa
  Clone ID: uC-osflcyp023d09b1
ggtaaactctagccagatctcgctcgctcgccgctcgccgccgccgccgcgttccaccgagcggagagtagagggaatggcgtccgagggcgtgctcctggggatgggcaaccccctcctcgacatctccgccgtcgtcgacgacgccttcctcaccaagtatgacgtcaagctgaacaatgcaattctcgctgaggaaaagcacttgcctatgtatgatgagttggccagcaagggcaatgttgaatatattgccggaggagccacccagaactctatcagggttgctcaatggatgcttcaaactcctggtgcaacaagttacatgggttgcattggaaaggataagtttggtgaggagatgaagaagaatgcccaagctgctggtgttactgctcattactacgaggatgaggctgctcccacgggcacatgtgctgtctgtgctgttggtggtgaaagatcactggttgcaaacttatcagcagcatactgctacaaatctgagcatctgaagaaaccgagaactggcactagtggagaagcaaaatacatt

SEQ ID NO: 1166 - DNA, 453 bp, Oryza sativa
  Clone ID: uC-osflcyp023d10b1
ggttggcttctcctccccctctttacctttgcctcctcggttcggttccgtggttcgtctagggtttagtgggttgagatggcggcgccggatgtcgagtaccgctgcttcgtcggcggcctcgcctgggccaccgacgaccgctccctcgaggccgccttctccacctacggcgagatcctcgactccaagatcatcaacgacagggagacggggaggtcacgtgggtttggcttcgtcaccttctcctccgagcagtcgatgcgcgacgccatcgagggcatgaacggcaaggagctcgacggccgcaacatcaccgtcaatgaggcccagtcccgccgctccggcggcggaggcgggggctacggcggcggcggtggcggctacggcggcggtcgtggaggcggcggctactgaggaggtggcggcggcggctacgggcgccgtgagggc

SEQ ID NO: 1167 - DNA, 579 bp, Oryza sativa
  unsure (1)..(579): unsure at all n locations
  Clone ID: uC-osflcyp023d12b1
gtttctttcaccccaggttgctcatctgctggaagttgcccagaaatatcaaactgttgccactgaaagtggtccagctggggtctcaaacagtgatgcacagaacatttgcaacatgtttgtgacggcgtcacgacagctagcgaaaaatatagaccaccacaccttaaatgagcatggtctatctaaaagatatgttcgctgcttgcagatatcagaggtggtgaatcacatgaaagacctgattgaattcagccacaagaacaagcttggtcctatagagggtctgaagagctatcccaagcaaactgcagcaaaacttccagtacaaaacatgcacgagccaaagcaactaatggcagctgctggccttcctaatgaccagactaacctcaaangccatgggtgtcaaaacagaaatgaacacccatgcgaatgagacgcacggtattggaccaattggaaatggtccgcagaatgctgctgcacttaacaattaccagaatcccattggaaatggtctgcagaatgctgctgcacttaacaattaccagaatattcctagaagtcagtcgcaaa

SEQ ID NO: 1168 - DNA, 479 bp, Oryza sativa
  Clone ID: uC-osflcyp023e01b1
cgcgagcgccgccctttttttttttttttttggggagaacaagcagcagaaacatttgttcattactccaagtagacattagacacaattcacacaacagccttattacaacagtgagctacagctagcaggctcaaggaaggtataatccatggatgaaaaccaagtatagtcttcttctagagctccaggaccttgtctgtgtgagccagactaagctgagatacatgacgattttctcacacgatgacacaaactatttaacccaatactagttaattaattagccgaccgattcgatattcgatcgattcgcagtttatttcggtacaataataataataataatgctattgtacatggtgtcgggcctagcggttttacaggacgaacggcttgcggtagatgtcgaacatctcagagcaagacaggttaggctcctggatgccgctgaagttggcgaccttgcggatgggggc

SEQ ID NO: 1169 - DNA, 525 bp, Oryza sativa
  Clone ID: uC-osflcyp023e02b1
ttccgatcgacgcctccgcttgacggaaggaaacagaggggaagagagaggatcgtcgtcgactatgatgcggcggcggctgggctgaaagagaaacagcatctcttgaggatcgtcgtttcgttgcatgggcaactactactcgtgcggcgcctcgtccacgtccagcccgacctcaccgtccttggtcgactactactactgctatcatcggtatccaagcagttgcagtagtacaagcacagcaacaagtagcggggggaggatgccgatccgcagccaccagcagaggctgtcgtccccgacggcggtgctggggcacgagacgcctgcgctgcgggaggtgtacacggtggggcggaagctggggcaggggcagttcgggacgacgtacctgtgcacgcaggtgtcgacgggggcggagtacgcgtgcaagtcgatcgcgaagaggaagctgctgagccccgaggaccgtgaggacgtgccgcgggagatacagataatgcaccacctggcggggcacgg

SEQ ID NO: 1170 - DNA, 537 bp, Oryza sativa
  Clone ID: uC-osflcyp023e03b1
ttcttttttgcggcgctcaaggcccctcctcctccggatttggattcggtttgtgatcctgataggtgttcttgccaaccataagtgtttaatccaatatattttcatttgacttgatgcggaacttgctgatttattgcgtggactcgattcaactgattaccgtttttattatctgaatcgagcaatggctgcgctatgaatggggataacgaattgcaatcttttttacaacaacgcacatgttaagagtccccgggttcttgatcctgaatacccgggtgcctaaccttggtgtgcgagagctaaaccttcgccggctatccacgcttcctaccagtaggcgggcgctgtttagccctgttcgcttctcgtgtgatttgccgcacattatcgaattttttgtatttcacctccgatttttctttttgccttctttgtttatttcgtttcgagatccttctggcgtagtcgattcagcggcagctcttctttaaaattattattattattattatcattattattattattatt

SEQ ID NO: 1171 - DNA, 456 bp, Oryza sativa
  Clone ID: uC-osflcyp023e05b1
gttcctcggcgactacgggtgggacaccgcggggcgctccgccgacccggagacgtgcgccaagaaccgggagctggaggtgatccactccaggtgggcgatgctcggagcgctgggctgcgtgttcccggagctcctcgcccgcaacggcgtcaagttcggcgaggcggtgtggttcaaggcggggtcgcagatcttcagcgagggcgggctcgactacctcggcaacccgagcctgatccacgcgcagagcatcctcgccatctgggcggtccaggtggtgctcatgggcgccgtcgaggggtaccgcatcgtcggcgggccgctcggtgaggtcgtcgacccgctctaccccggtggcagcttcgacccgctcggcctcgccgacgacccggaggccttcgcggagctcatggtgaaggagatcaagaacggccgcctcgccatgttctccat

SEQ ID NO: 1172 - DNA, 429 bp, Oryza sativa
  Clone ID: uC-osflcyp023e06b1
ttctagacgagggagagaaggagaagagggggccggccgcgggcgtcgtcgtgttcctccccccctctctctcctctcctctcctctcgatctccatccttccttccatccattcctccccgcacccttcgcattgctctcgtcgtctcgattcggtcgaggatctccaggaaaagaggaggaagcgatatgggttgcttttcatgctgcggagcggatgatgtcggcaagaagaagaagcgcgacgatccttacgtcccgatccctgatccaggtggtaactatggacgtagcaagcccgggcccccagccccttcgcgttctccccccaccagcagaaatctgccaattgcagtaccggcaattccccttgatgaaataaagggaataaccaagaacttcagcagtgatgctctcatcggagaaggc

SEQ ID NO: 1173 - DNA, 264 bp, Oryza sativa
  Clone ID: uC-osflcyp023e07b1
ttagaaccttgtcgaagctcccgctcgaccccccttcctctacaatggcgaaggaaccgatgcgcgtgctcgtcaccggcgccgcaagacaaagtggatatgctcttgaccccatgattgctaggggtgtgatgatgggtgctgaccagactgttattctacacatgctggacattacaccagctactggatatattaatggtcttaagatggagctggatgatgctgcatttactcttttgaagggaattgttgcaacaactg

SEQ ID NO: 1174 - DNA, 475 bp, Oryza sativa
  unsure (1)..(475): unsure at all n locations
  Clone ID: uC-osflcyp023e08b1
ttcatcccagccgccgccgccgcagcttcctcctctcgccatctcccgtcctctccttcaagtcagctacctgcttaatcaaccatgggtaaggagaagacgcacatcaacattgtggtcattggccacgtcgactctggcaagtcgaccaccacgggccatctgatctacaagcttggaggtatcgacaagcgtgtgattgagaggttcgagaaggaagccgctgagatgaacaagaggtccttcaagtacgcgtgggtgctcgacaagctcaaggccgagcgtgagagaggtatcaccatcgatattgccctgtggaagttcgagaccaccaagtactactgcacggtcatcgatgcccctggtcaccgtgacttcatcaagaacatgatcacgggtacctcccaggctgactgtgccgngctcatcattgactccaccactggcggctatgaggctggtatcttcaaggatg

SEQ ID NO: 1175 - DNA, 430 bp, Oryza sativa
  Clone ID: uC-osflcyp023e09b1
tccgtcaagttcgaggagtacaagctcaaggagatcaagaacgggcgattggccatgctggcttttgtgggtttctgcgtccaacagtcggcgtacccgggcaccggcccactggagaacctggccagccacctctcggacccgtggcacaacaacatcggcgacatcatcatcccgagaaccatctacccttgagcttggcacgaaccggtgcgtgcgttcgggcgtacgtgaaggctatgggtggtttttatgtgcgtgcgtactgtgtgtgattggttgattattgcgcgcgcgtgcgcacgcagtggtcggccggcaggcagctgctggttggccttgtaatgtaaagcttaagtagagggtgctctcttgtgaatccgtccatcttaatttttgtatcaaacacgaaatcaaactggtcttagtt

SEQ ID NO: 1176 - DNA, 484 bp, Oryza sativa
  Clone ID: uC-osflcyp023e10b1
ggagagtcaaccagcgaatagttaagctgagagcagagcttatgaggaaccacgatagcccagaagcattggtgatccttgctagtgcttcagatcttcttcttcgagcaactgatggaatgcttgttgatggtgaagcttgtactttaccacaattagagctattggaagtaaccgccagagcagtccatctcatcgtcgaatggggagattcaggtgtatccgtcgctgatggcctctccaatctgctgaagtgccgtctatcaaccaccatccgctgtctttcgcaccccagcgcgcatgtccgtgcactcagcatgtccgtccttcgcgacatcttgaacagcggacaaataaactccagtaagctcatccaaggggaacaccggaatggcatccagagcccaacctaccagtgcttggcagcaagcatcatcaactggcaagccgatgtggagagatgcatagagtgggaagcccacag

SEQ ID NO: 1177 - DNA, 473 bp, Oryza sativa
  Clone ID: uC-osflcyp023e12b1
tcggaccaccacaaataaaggcatacattgagacatatggatatatatacgacatcacatcacagcacaataatggcagcctcctccgtcacggggagccgccgcctctgcactctcttctacctcctcactgtcgtcgccaccgtggtcaccgcggcgtcggcgcacacggcgcacaacgccaccgccgacgaggagtactgggagaagcgcgccgaggaggcccgctcgttcaaccgcgccgcctacgtgagcgaccccgtcgccaccctgaaccgcttcaacgccgacgtgctccgcgccaccacgcgccgctcgctggccaggtacaccggcccgtgcatggcgaccaaccccatcgaccgctgctggcgctgccgcgacgactgggccaccgaccggaagcggctggcgcggtgcgtccgtgggttcggccacaggaccgtcggcggcgccgctggcaagatctacgt

SEQ ID NO: 1178 - DNA, 518 bp, Oryza sativa
  Clone ID: uC-osflcyp023f02b1
gcaagatgctcatctcctcctcctctcgcatggcagccatggccaccaccgcgtccagcctcctcaagacctccttcgctggcgcgcgcctccccgccgccgcccgcaaccccaccgtctccgtcgcgccgcgcaccggcggcgccatctgcaactccatctcgtcgtcgtcgtccactcccccctacgacctcaacgccatcaggttcagccccatcaaggagtccatcgtgtcccgcgagatgacccggcggtacatgaccgacatgatcacctacgccgacaccgacgtcgtcgtcgtcggcgccggctccgcggggctctcctgcgcgtacgagctctccaaggacccctccgtcagcgtcgccgtcatcgagcagtcggtgtcccccggcggcggcgcgtggctcggcgggcagctgttctccgccatggtggtgcgcaagccggcgcacctgttcctcgacgagctcggcgtcgcgtacgacgagcaggaggactacgtcgtcatcaagcac

SEQ ID NO: 1179 - DNA, 540 bp, Oryza sativa
  Clone ID: uC-osflcyp023f05b1
gcagggctgtgacgcgtcggtttacttgagtggcgccaactcggagcaggggatgccgcccaacgccaactcgctgcagccgcgggcgctgcagctggtggaggacatccgcgccaaggtgcacgccgcatgcgggcccaccgtctcctgcaccgacatctccgcgctggccacccgcgcggccgtcgtcctctccggcgggcccacctaccccgttcccctcggccagctcgacagcctcgccccggccccgctgcgcctcgtcaaccagctcccgggcccgggcacctccagcgtccaggctctcatcgacctgttcgggagcaggggcatgggagacgccgccacctggtggcgctctccggcggccacaccgtggggaagtcaaagtgcgccttcgtgaggcccgtggacgacgccttctcccggaagatggccgccaactgcagcgccaaccccaacacgaagcaggacctggacgtcgtcacccccatctccttcgacaacggctactacatagcgctcaccaggaagcagggg

SEQ ID NO: 1180 - DNA, 467 bp, Oryza sativa
  unsure (1)..(467): unsure at all n locations
  Clone ID: uC-osflcyp023f08b1
cggacgcgtgggtgccaaaccagtctcccccaaatctcctttgcgtcctctcgattcctcagcaaccatgtcggcctactgcggcaagtacaaggacgagctcatcaagaacgctgcctacattggcactcctggcaagggtatccttgctgcagatgagtccactggcaccattggcaagcgctttgccagcatcaatgtcgagaacgttgaggagaaccgccgctctctccgcgagctgctcttcaccacccctggtgccctccagcacctaagtgctgtgatcctcttcgaggagaccctgtaccagaagaccaaggacggcaagcccttcgtcgatgtcctcaagagggtnggtgtcctccctggcatcaaggctgacaagggtaccgttgaggttgccggcaccaacaaagagaccaccacccagggccacgatgatcttggcagcgttgcgccaagtacta

SEQ ID NO: 1181 - DNA, 526 bp, Oryza sativa
  unsure (1)..(526): unsure at all n locations
  Clone ID: uC-osflcyp023f10b1
gttttggtattcccatacactttgtttctcttccccgtctcgtggtcgagagaaaccgagaggagagagagggagaggagcgctgccgattttccggagggggagatctttttcttctccctgaaggttcgagatcgatctgcgacgaggaggagcggggaatcgtaactttatttccgaggaaatttcaacaaattgatgcactaatggagtccaagggtggcaaaaagaagtctagcagtagtcgttcctccctgatgtacgaagctcccctcggctacagcattgaggacctccgacctgccggcggcatcaagaagttccgctctgctgcttactccaactgcgcgaggaagccctcttgatagcccccttggctaccttgatctagtagtttagttactcctctgaattctcgttntgggctttcttacatctctctggctagctgcttcccagtgaccgggaaggtcatcagtcctgcttcctttcttnctcatctctggcatcgtccttcgaaacaatg

SEQ ID NO: 1182 - DNA, 481 bp, Oryza sativa
  Clone ID: uC-osflcyp023f11b1
gtggaatattgaacggtggaacgcgtacttggccacatgttaggtgcatgccatggcaccattcatggcgtgcgcctcgccaccggtactcacgctggccctgctcgcgtcgtgcggtgcccttctcgccacctccatgctcccggcgcgtgcgacggcgggcagctgcttggacgtcggcgacatggtgatgatggacaggttccgcgcttggcagggagctcacaaccgatcgtacccgagcgcagaagaggcgctgcagcggttcgatgtgtaccgccgcaacgcggagttcatcgacgccgtcaacctgcgcggcgacctcacttaccagctcgccgagaacgagttcgcagacctcaccgaggaggagttcctggcctcgtacaccgagtactacgccggcgatggtcccgtggacgactccgttattacgacgggtgccggatacgtcgacgccagcttcttctaccgcgtggac

SEQ ID NO: 1183 - DNA, 497 bp, Oryza sativa
  Clone ID: uC-osflcyp023f12b1
gtcaggcgaaggtgtccgtcgtcccgggcggggcggcgctcgtcatgaagggcctcaaggagcccgagcgggacaggaagaaggtcaagaacatcaagcacaggggggacatcagcctcgacgacgtcatcgagatcgccaggatcatgaggaacaggtccatggccatggagatggccgggaccgtcaaggagatccttgggacctgcgtcagcgttgggtgcaccgtcgacggcaaggaccccaaggatctgcagcaggagatctccgatggcgaggtcgagatcccttcggcttaaaaggcttgatatttgaggacattaccatctcgtgctactgaagtgatcatttgttccaaaatgctgcttatgtaccttacgagacgatgtgattcgacctatttttgtcatgctctagtagtgatcttgttgagacctcaatgttactattgcaacttggtaccatttggtcctctggaatggagtttcaagtacttg

SEQ ID NO: 1184 - DNA, 483 bp, Oryza sativa
  Clone ID: uC-osflcyp023g01b1
attcttgaagaaggagaagaaggagaggagcagccatggcgtcgtcggtggcagcggcggcgagcacgttcctggggacgaggctggcggacccggcgccgcatagcgggaggatcgtggcgaggttcgggttcggcggcgggaagaaggcggcggctaataaggcggcgaggccgtcggcgccgacgacggacaggccgctgtggttccccggcgcggtggcgccggactacctggacgggtcgctcgtcggcgactacggcttcgacccgttcggcctcgggaagccggcggagtacctgcagttcgagctggactcgctggaccagaacctggccaagaacaacgctcgcgagatcatcggcacccggttcgagaccggcgaggtgaagtccaccccgttccagccctacaccgaggtgttcggcctccagcgcttccgcgagtgcgagctcatccacggccgctgggccatgctcgcca

SEQ ID NO: 1185 - DNA, 443 bp, Oryza sativa
  Clone ID: uC-osflcyp023g02b1
gcaagcattttgagtggcgcatatgggcttcgctggtcccaatagttgggggaatactcctaacttcaataacagagcttagtttcaacatgtttggtttctgtgctgccatggttggctgccttgctacatctaccaagaccattttggcagagtctctactccacggatacaaatttgacagcattaacacagtgtactacatggcaccctttgccaccatgatactggctctaccagcagtgttacttgaaggaggcggctgtggttacctggttctacacacatgactccattgcttctgcactagttatcatcataggctctggagtgcttgcattttgcctaaacttctccattttctacgtgatccattcaaccactgcagtgaccttcaatgttgctggcaacctgaaagttgctgctgctgtattggtgtcatg

SEQ ID NO: 1186 - DNA, 489 bp, Oryza sativa
  Clone ID: uC-osflcyp023g03b1
cttagtggtttgcagttccatggtttccatggagtgagacatgatgagaagactctgggccaaaagtttgttgtggatgttgatgcgtggatggatttgagtgctgctggggaaactgacagcatatctgatacagttagctacacagatatttacaggattgccaaggatgttgttgaaggcccatcgcggaaccttttggaggcagtagctcatcgcatcgcgagtgccacattgctgaaattccctcaaatctcagccgtcagagtgaaagttgggaaacctcatgttgcggtacaaggaatcgtcgattatttaggcgttgagatattgaggtacagaaaagacgtaggaggcgatcgtcaggagcttcattgagcctgctctgtgctgaggatggcgttaccttactactcaacaaatgcatttttgcagccgtttgtacctcaataatttcaatggaatggtgacctcatgagctgttccctt

SEQ ID NO: 1187 - DNA, 519 bp, Oryza sativa
  Clone ID: uC-osflcyp023g05b1
ttatctctcgtaagattaaggggggaggaatgggagggctgaggccgccatgggatcagtggaaataaaatccacgcattttatatatttaatttaacccccaattttaacttagcagcacactagctagctagctgctaagttaactatttgatcagggtacagttgctggcctgacagttaattaatctcttgctgggtgattagttgctatcagctacacgctctcgctagctgccactgtactaatacatactcccatctattcgcctgagaaaatatcgaaaagtagcagcaaagaggagcaggcaagatggtgatgaaccctgacgccgtccgcaatgtggttggaatcatcggtaacttgatatcgttcgggctgttcttgtcgccattgccgacgttcgtgacgatcgtgaagagaaggacgtggaggagttcgtgcccgatccgtacctggcgacgtttctcaactgcgcgcttggggtggtctacggcctacctttatccaccccaaca

SEQ ID NO: 1188 - DNA, 470 bp, Oryza sativa
  Clone ID: uC-osflcyp023g08b1
caacgcagccgccacaaaacccttctccccgggcgcgcgccctccgctccttgctccgcccggctgcccgccgctcgttcgccaccgccaccgccgccgccgccgctgcgtcgatcgaagatgtatctccagtactacatcaacgagaagggggacaaggtgtacaccaccaagaaggaatctcctctcggtgttcccacgcagtctgctcacccagctcgcttctctccagatgacaagtactcacgccagagatacctgttgaagaagagattcgggttgctgccaacccaaaagccagcaccaaagtactgaaggagaaacctcggaccaccatgttccatggatcccacgaagagaatcagtcttgcctacctcgctatttacctgtatcactcaaatgatctgatgtatcgcgatgctatctacgaatcgtacttcctctcgaccatattagtatgatcatgaaa

SEQ ID NO: 1189 - DNA, 508 bp, Oryza sativa
  Clone ID: uC-osflcyp023g10b1
cagaaaggtgatgaccattcagatttcactgcctctgggcaagcatcatggctggataaaattcagcaaactgtacagaatgttttacgaacattcaactttttcaagacccctgtggatttatctgaggcttctcgtgttcggaaggagtatgatgatgcaagctcaaagctgtccaagattcagtctaggatatccactctgacagataagctaaaacacgactttggtaaggagaaggagttctattacttttatgatcagtgctttgagagcaaggagggcaagtatgtttacaaggtatgtccattcaagaaagcttcgcaggttgaaggacatagtaccaccagcctggggcgctgggacaaatttgaagaatcctacagagtaatgcaattttcaaatggagacagatgctggaatggccctgacccgagtctaaaggttaggcttcgatgcgggctgaacaatgaacttaatggtgtcgatgagcctagtagatgcgagt

SEQ ID NO: 1190 - DNA, 538 bp, Oryza sativa
  Clone ID: uC-osflcyp023g11b1
tcggttggcggcgatggatcgggttcgcgggggcgcgttactgctcgggggggtgctcacaagatccctgtttgcattttctgttgcgaaggaggagaccaagaagctcggtaccgtgatcggtattgatcttggtacaacctactcgtgtgtcggtgtgtacaagaatggtcatgtcgagattatcgccaatgaccagggtaaccgtatcacaccctcatgggttgcattcaccgatagcgagaggctcatcggtgaggctgccaagaaccaggcagctgtgaacccagagaggaccatcttcgatgtcaaacgtctcattggaagaaagtttgaagacaaggaagttcagagggacatgaaacttgtcccctacaagattgcgaacaaggacggtaagccctacattcaggtcaagatcaaggatggagagaacacgggcttcagccctgaggaggtcagtgctatgatccttggaaagatgaaggagactgctgaggcataccttggcacagaagatcaacgatgctgtcgtgac

SEQ ID NO: 1191 - DNA, 497 bp, Oryza sativa
  Clone ID: uC-osflcyp023g12b1
tctttaaaaccctaaccccgccgccgccggggctctttgactcaagatcggggtgtctcaatcggtgttccggtcttttgagcgcggagatggcggaggagaccccagctgagactccagctgccctggttcttggggagcccatggatctgatgactgctctgcagcttgtgatgaagaagtcaagtgctcatgatgggcttgtgaagggtctccgtgaggctgccaaggccatcgagaagcatgctgctcagctttgtgtgcttgctgaggactgcgaccaacctgattatgtcaagttggttaaggctctgtgtgctgagcacaacgttcaccttgttaccgtgcctagtgctaagactcttggcgagtgggcagggctttgcaagattgactctgagggcaaggcaaggaaggctgtgggctgcttctgcgtcgttgtcaaggactatggtgaagagtctgagggccttaacatagtgcaggactatgccaaa

SEQ ID NO: 1192 - DNA, 518 bp, Oryza sativa
  unsure (1)..(518): unsure at all n locations
  Clone ID: uC-osflcyp023h02b1
gggctgttgacttgaagtttgtagccacccaattcgggagactccacagcaaacagcggcagcatacatttagattctattcacagcaatggagaacctgggcagcttgttttatacaggcagcttggcatagatactgcagaaagaaactggaggatactttgtttgagaaggagaagaggttgcaagcggcaattgtcagtgatggttcgagttcgctcagtcttggtgcggcgctatatgcttcacgttttgctggtaatatgatgcggatcttacggagaaatgccactcgaaaggcccgtttgcaggaaagagtgcctgcaaggttattacagaagcctgcagaaccgaactttttcgctgaagatcagtaatgtccatactttgctacatgcagaaattgatgcttcagctggtaaaagttctctctcccctgctgatataccatttttcagtatatgattgaattctgtacatagatagaccatttggttccaagccttttggnttatata

SEQ ID NO: 1193 - DNA, 506 bp, Oryza sativa
  unsure (1)..(506): unsure at all n locations
  Clone ID: uC-osflcyp023h03b1
gctagagctgtccctgccaaaggcaaataataccagaggaacacggcagcctctcgatctcgacaactcggggcggaataattctggtgttcttctcatcaccgatcgtttctgtacatgtaacaagttgaggatcgtggcgcctgcatgcatttggtggacgccacgtcaagaataaccgaggttacaggtgtctccccctgcatgcagcagggggcatctgcagcttgcggaactcggatggtttgagtttgaacgagttgcagcatgtcccccatggagtcccgtcctgatgatcttgttcctcccgcgatgcacaagccggcgatccaatgcgccgccgccgaggacgcgagcctgctgcgaagcccgacngtgtcgtcggaggagttcatgcagttcaagaggaaagccacgactatcttggaggagtacttctccacggacgaacgtccggcgactgctaacgagctgagggagctgcgcggccgtgctaccactactac

SEQ ID NO: 1194 - DNA, 471 bp, Oryza sativa
  Clone ID: uC-osflcyp023h04b1
tttattttgggggttggggggttgggcgaggagggggatgatgtgaacacgaaagaggggaaagattagtagtagatggccgcttattccctcgtcttcgtcttcgtcggcgtcgccgtcttcgtcctcgcgccaccagcctccgccgtgcccttcatcgtcctgcacgggatcggagaccagtgcgccaaccatggtgtcgccaagttcacccgccttctcgccgactggtccgcctcccatggctactgccttgaaatcggaagtggaacatgggactcttgggtaatgcctcttcagaaacaggctgatattgtttgcagtaaggtaaaagaaatgaaggaactctccaatggttacaatatagttggtctttcacaggggaacctgattggtcgagcagttgttgagttttgtgatgatgggccaccggtcaagaatttcatttcactcggtgggcctcatgctggt

SEQ ID NO: 1195 - DNA, 422 bp, Oryza sativa
  Clone ID: uC-osflcyp023h06b1
ttctgctccgcccccctaccccgcaacccgtggctttgtgccgcgcctcgctttggtcttcatccgcctcagatctgattcgttctaggttggtctggggaagatggcgatcacggtgaggcggtcgacgatggtgcggccggcgtgggagacgccgcgggtgcggctgtggaactcgaacctcgacctcgtggtgccgcggttccacaccccaagcgtctacttctaccgccggggccccgagggaggggggcgcgccgcaggggttcttcgacggggagcggatgcggcgcgcgctggcggaggcgctcgtgccgttctacccgatggccgggcggctcgcgcgcgacgaggacgggagggtcgagatcgactgcaacgcggaaggggtgctcttcgtcgaggccgacgcgcccgacgcc

SEQ ID NO: 1196 - DNA, 433 bp, Oryza sativa
  unsure (1)..(433): unsure at all n locations
  Clone ID: uC-osflcyp023h07b1
ttcaaaccaaacgccaattaatggcttgaccagccaccgcgcgcgccgccggctttcgccgacgccgaggaggccggccatggcggcgccgcccaggcccataccctccatccaccggcaaccgcccaagccaaccaccacccacgtcgcccgctgcttccgcgacccgcccaaagcccccgacaccaacagcaacaccaacccgctcctctccctcctctccgccgtgcccgactgggccgacgccgtctccgagcgccgcatccgcgaccgtcgcccgctctacacccacgccgactggcgggagcaccgcagctcccgccgccacctgcgccacctnctctcctccctcacctcccgcgtcatcctctccctcgcgccccccgtgtccgcttcaccgacttcgccggcgccattggcacctacaacaccc

SEQ ID NO: 1197 - DNA, 503 bp, Oryza sativa
  Clone ID: uC-osflcyp023h09b1
tcgtttttctccgggcttttaccagatgagggggggaatctttaaagcttgacatggttacagattgaccaaaaccatgtatccggcgcaatacctaaagcatttgccaacttaagaagtgagaagcatacttacatgaataataattgattgagcgggcaaaacccgtccgaattgtccagactgaatacactttggcactctcttgacgataacaacaatttgtctggacctcttcctgcagaactagctgcggcaaaaagcttgaaaatactttaggctgacaataataacttgagcgggagttccatccctactctgtattacaacatgtccggactatttaaactgagtttttataactgcactttgcaaggtgctatgcctgatctgagtgccatacctcagctggaccatggggatcttagttggaaccagctgactggatctatcccaactaagaaacttgcttcaaatattactacacattgatctgtcacata

SEQ ID NO: 1198 - DNA, 499 bp, Oryza sativa
  Clone ID: uC-osflcyp023h10b1
gtggagattcgctatgcgtgcaggctgaggaggttatattcttcgctgcaaagaagtctccagacgcaggacaccagcatgttccccagcagcagcagcctgcatatccaaacaaaaagaagaggatattctgttatcaggctcctgagagagatgctgatggtttgttcatccacgagaacaaagccgatgcttgttcacagcgacagcatcggagcccagaggacgggtacgccaccatcaaggagacgaatccatgctcgcggcaaatccagatcgtgccaagagcagatgtctcattgctggtgaagaatgcgtctcttgttagcttcctggagagccgcacgagaggttggcgagtgcagcttacatcgccgtgagaaatctcctgatgaaaaggacatttttcctacggctttcccacgaaataaaaccccactcggcaacacggaacggcatagtgctttcacgaacctgagaatattaacggaaatcatga

SEQ ID NO: 1199 - DNA, 515 bp, Oryza sativa
  Clone ID: uC-osflcyp023h11b1
tcgatggcctcctcgatcgatcgatcgatggaatggatcgattaatctcctcctgcaccaaccaataatataatccagttgtctctgttggccgctcgttgcgaccacgccactacagtcggggcaaccatgggtgcttgtgcaaccaagcccaagacgctcgagggaaaggctcccgaggaggccactcccattgaggcagcacccaaggttgcccttgagaccacaatgatctccaataaggaggttgcggctgatcaagcacctgagaaggtagtggaggaggccaccgcgatggcagagttaccaccaaatgatgatgccattgtcatgcaagacaaggaggaggaagttgaagaaaagatcgtcgaggaggagaagccttcagccccagctgcagaggtgaacaataccgaggtggtcgaggagaccatagaggtaaagaacaccgaggtggacaaggggaccacagaggtgaagacctccaggaggagaagccaattcagagctgataa

SEQ ID NO: 1200 - DNA, 424 bp, Oryza sativa
  Clone ID: uC-osflcyp023h12b1
tcgtctgattccgatacgcactacaaagaggacggggaagatgaacgatggaggctgtacccggcgaggcagacgctgcggctgatgacgcctgcgaggtgccgtcgcctccgacgtcagggatgacagaggaggtgaaggacgcggaggaagcacctgagccggggaggcgccaaaggctgatgcgggggaggagaagaatgcggagggtgacaaagagaaggaccagggctagcagacagcaactcccggttgatcgctgaagatacctgctctatcgctgtgccacggcctcctgtaacactatgagatgcagccttttgaactttatagcatgggctattcaacactaagttcggatacatcactcgtttctgcttaagacattatttataagctttcgcagcgtaccgggggcaaatat

SEQ ID NO: 1201 - DNA, 492 bp, Oryza sativa
  unsure (1)..(492): unsure at all n locations
  Clone ID: uC-osflcyp024a01b1
ctccttcccgtcgaaccctctccagtctccactccactgaatcctcccacctcggctcgaaggaatggcaagcggtagtgaagctgagaagtcacctgaggttgtgctggagtggcctaagaaggacaagaagaggcttctacatgctgtttaccgtgttggagatttggatcgcaccattaaatgttacacagaatgctttggaatgaaattactgaggaaaagagatgtgcctgaagagaaatatacgaatgcatttcttgggtttggacctgaggacaccaactttgcacttgaattgacatacaattatggtgttgataagtacgacattggagcaggatttgggcatttcgctattgcaactgaggacgtgtacaaattggctgagaaaattaaatccagttgttgctgcaagatcactcgtgaacctggtcctgtcaagggaggatccactgtgattgccttngcacaggatcctgacggttacat

SEQ ID NO: 1202 - DNA, 218 bp, Oryza sativa
  Clone ID: uC-osflcyp024a03b1
gcctgccgctcctcgtcttccggtggggcggaggagggggacgccgggcgggcgggcgctcgcattccggagcggggagcgcgagctcgatcgggcggggatatggcggtggggggagccgggagctacacatccgtggcgccgcgctgatgctgcgccgtgctgctcgcggcggagctgctattatcggcgccggacaccacagcggcttatgatgg

SEQ ID NO: 1203 - DNA, 483 bp, Oryza sativa
  Clone ID: uC-osflcyp024a04b1
gtcgcatcgcctcctcctcctctcgccgctcgcagcgaaaaagccagcgcctcccagcgcccacgcgatcccgacgaatcgaatcgagtccgagacgccgatctcggattcgagaccgttgatttcaaccaacacaagccctcctccggatcgatccgctcctcttcagccatggcaggaatggcacccgaaggctcccagtttgatgctaagcactatgacagcatgatgcaggaactactgcaccaaggtgacaatgaggaattcttcacttcatatgatgaagtttttgagagttttgatgacatgggcctccaagagaaccttctcagaggcatctatgcttatggttttgagaagccatcagctattcagcaaagggggattgttcccttctgcaaagggcttgatgtgattcacgaggctcaatctggcacaggaaaaactgctaccttctgttctgggatcctgcagcaacttgac

SEQ ID NO: 1204 - DNA, 471 bp, Oryza sativa
  Clone ID: uC-osflcyp024a05b1
atcttagagggggtgattacagtgaaatggctaaggcctacagaccttcacatgcagatgcaacttatgacttcaaatacggtgttagagcagtgcagggtggtggaagatcatcagcaagagagaccattggaagggtggatgcaggagctcttgcaaagaaaattcttaagctcacatctggagtagagatcttggcgtttgtgtccaaggtgcatcaaggtgtactaccagaagacgccgttgactatgacactgtaacaatggaacagatagaaagcgacattgttagatgtgctgatccagaatatgcacagaagatgattgatgcaatcgataaagtacgagctagaggtgattcgattgctgctgtggtcacatgcattgcaagatatgttcctcgtgggattgctgctcctgtttttgacaaacttgagggtgaattggccaaagctatgcttctttttctgc

SEQ ID NO: 1205 - DNA, 501 bp, Oryza sativa
  Clone ID: uC-osflcyp024a07b1
tcgttctggcatgggaaggagatcaggagaaggatgcagcggcggccggcagcaataggaggcggagcgatgaggaggggaggcggcggcgtttcgggatggcggataggcgggcgagaattttcagaatatgccatcgaatacgcaatgcttttaggatttaccatttaatttgtgctactttcagaatacgctatcggagtgcgaattttcttcgttcggtgccattccgtccccccaacgacaatcacaccgccatcgtccatctcccggcgccgacgacgacagttcgccacctcccgcgctcgcgggcgtcacgccgtcgtccgtccgccgccgcccgctctcatgtgcgccacgcagtcgtccgtccgcccggcgccgccgtcgtcagtccgccaccgcctgtacccgcgtcagccgcgccgttgtccgttcgccgacgacatcgtcgtcgtccttcgcagcttcagggcaagcatgcgcggtcaccgcgcgtgt

SEQ ID NO: 1206 - DNA, 482 bp, Oryza sativa
  Clone ID: uC-osflcyp024a08b1
gtagaagcccgaggaccggatgtcctgtttcctaaccaaggccctggcaaatgttggagctgaaatggctcatctagtccctggtcgggtgtcgactgaaatagatgctcggttggcttatgatacccaaggaattatccagagggtgcatgagcttttgaagctatacagtgatcatgatgtcttatctgaacgcctgctgttcaaaattccggctacatggcaaggtatagaggcctcgaggttgcttgaatctgaagggattcaaacacatttaacatttgtgtacagttttgcccaagcagcagctgcagcacaagccggtgcatctgttgtacagatctttgtgggacgtgttcgggattgggcaaggactcactctggcgacccagagattgatgaagctttgaagaaaggagaagatgctgggcttgctttggtgaagaaagtgtatgcctacattcacaaaaatgggtataaaa

SEQ ID NO: 1207 - DNA, 483 bp, Oryza sativa
  Clone ID: uC-osflcyp024a09b1
tcgtctagaacgagcagctggcgttcgggccggggctggtggtgccggggatctactactccgacgacaagatgctgcagtgcagggtgttcgcgtacgccgacacgcagcgctacaggctggggccaaactacctgatgctgccggtgaacgcgcccaagtgcgcccaccacaacaaccactacgacggcgccatgaacttcatgcaccgggacgaggaggtggactactacccgtcgcgccacgcgccgtttcgccacgcgccgccgacgcccatcacgccgcgccccgtggtggggaggaggcagaaggcgacgatacacaagcagaacgacttcaagcagcccggggagaggtacaggtcgtgggcgccggatagacaggagaggttcatccgctcgtttgccggcgagctcgcgcaccccaaggtctcccctgagctccgcgccatctgggtcaactacctatcccagtgtgatgagt

SEQ ID NO: 1208 - DNA, 473 bp, Oryza sativa
  Clone ID: uC-osflcyp024a11b1
agcggcgctgctgaggaaggccgacgcggccacggtcacgctctccgccgccggcaccgccaccgccaccgtctcgtagatgcatagttcgccggcctcccgtctctctcgaatctagagacgcacgccgagctcagagacccgatcctgctaaggtttggttggtagctcgagcagccgacggcgacgacgcacacccagttcccggcgatgtcggcggctgccaccgctgggacctactctccggcttctgccgcgggggaaaagcgtcgggagaggaaggaggagcctgcggcgccacctcgccgaggacgccgactggccccgcgccgacggacgcttcttccacgactgccgtcctgcatttatgcaaacaggaccaacaaccgctgcatcaggatctgcttatgcagaatttgggaagacaaaggtcattgtgtcagaggttggaccgagagaaagcaagaagcaat

SEQ ID NO: 1209 - DNA, 485 bp, Oryza sativa
  Clone ID: uC-osflcyp024a12b1
cttccccccacccctctcgccgccgcagccggggaggctacccctcccccgccgccgccaagatgcagatcttcgtgaagaccctgacggggaagaccatcacgctggaggtggagtcctcggacaccatcgacaacgtgaaggccaagatccaggacaaggaagggatccccccggaccagcagcgcctcatcttcgccggcaagcagctcgaggatggccgcaccctcgccgactacaacatccagaaggagtccaccctccacctcgtgctccgcctccgcggcggcgccaagaagcgcaagaagaagacgtacaccaagcccaagaagatcaagcacaagcacaagatggtgaagctcgccgtgctccagatctacaagggggacgacgccaccggcaaggtcaccaggcttacgaaggagtgccccaacaacgactgcggcgcgggcaccttcatggcccaccacttcgatcgccctact

SEQ ID NO: 1210 - DNA, 497 bp, Oryza sativa
  Clone ID: uC-osflcyp024b01b1
gtgctctgaggcccaggcccatctacaacaagaacaaagccctcttttccctacccccgaaaaaggaaaaacccgctccactcccccctccgctccgccgcaccacgccctacgacaccaaccaaaccctcctcctagccccccggcggcgatggccggcgtcggcggcagcagcagcggcggcggcgacgtggagatgggcgggtggtcggagctcctccactcctccactaagctcctcgagcaggccgcccccaccccgcacttccctcccctccagaggaacctggaccagctggaggtgctctccaccaagctcaaggccaagacggtgcgcgccgaggcgcccgtgcagtcgctctccgccaccaggttgttggcgcgcgaggggatcaatgcggagcagctcgccagggacctcaaatccttcgaacttaagaccacatttgaggatgtttttccatctgaagcaactactggcgaggagtacctgcagc

SEQ ID NO: 1211 - DNA, 452 bp, Oryza sativa
  Clone ID: uC-osflcyp024b03b1
gaagttcacagttcagttctaccacgtacaacagcagaagtgagagagggagaagaagacaagggaagaggaggagcttagctagccagccatggcgaggcgctctccttgcctcgccgtcgccatgctcctgcttggggcgttggcggtggcgagcgccttcattgatgaagcggcggctgctggccgggggctcggccatggcgcccgcttcatgagcaagcagggtcgtgtgacatacgagaagctgccggagccggagccgaagccaaagccaaagcctcatcctaaacccacgccaaaacctgagcccaagccagagccggagccaaaaccagtacctgagcctgagcctaaaccggaaccaaagcccgaaccaaaacctgagcctaagccttgaacctaaccatacccagagccaaaaccggagccgaagccagaaccaaaaccct

SEQ ID NO: 1212 - DNA, 512 bp, Oryza sativa
  Clone ID: uC-osflcyp024b06b1
aaagactcgcccaactgccttaaaatcaaggttggccaatcatccagatcctccatcaagaacaacccttccattgagagcaacatcatcaaacaacttgaactcagctgccacaacacgtaggccgtcatcttctggagggcacacatctaattcatcaaggccttcaacaccaactgggcgtcctgcactgaccaatacctccaaaggttcaagaccttcaacccccacgtctcgggcaactgtaccttctaagtctggacctcctgccccaagatcatcaactcccacttccaggtcaacacttacttcagcaaggtcaacaacaccttcaaggacatctggccctgctgctaggacatcaattccttcaggtagagcatcagcaccagctagcaggtcatccacacctacttcaagatcatcgatacctgctaccaggtcatccacgccatcatccaggccctccataccagcacaaagcaggccagtatcaaggtcatcaaccccaa

SEQ ID NO: 1213 - DNA, 536 bp, Oryza sativa
  Clone ID: uC-osflcyp024b07b1
gtcggccagccgccgccgacctcgccggtcgccgccaccggcgtcgccggcagagacaagagtaacgacgaagaaagattcttttgggggtgatgtgttccaaataccgaagactgattctgattgccgcttctgtttgttggaggaccagaaaacatctcacaaatattttgggttggcataattattatgcagtctcgtgaggtcttaatctccattgcacaagaagaatccagtaaatgatgcacagctgttatctcgtctcattaggtacaaggttgacaaattcttactgggaacaacacaattagacagcagtttataccggcaagcttgttctaaataatctttgtaccggcgagaaatttacttatcagatcagactccaggcaactactgaagggaagccccaggattcaatcagagctactttcgtgtcaagaatgagttgcacggtgctctattgtatcctacagttggcctgcctctttctgagcttggttcagcatgtctaaatgcaataacttcactaccac

SEQ ID NO: 1214 - DNA, 537 bp, Oryza sativa
  unsure (1)..(537): unsure at all n locations
  Clone ID: uC-osflcyp024b08b1
gtaaaaagagtccatgtcaccagagaaggcactgcctgctgaaccagaggagcaagaagagaatcaagtaaccaaagaacaagatgaagaagacaggcatgatgcagaacttggtgatgcacatgaagaagatcacaaagaagctgaacaagattatttgcctgtctctagtttcctgatgaacctaatattgggaaaagacaatgatgatccaaagaaagattcagaaaccgaggttgaaaaggagcaagaagaaacaacgaaggatggaagttgtttgatcgcttctcaacaagaagaaaatttggtggcatttcctatagaaaaatcggtggatgaaaaactcacctttgaacaagaaaaagaaaaggtagaaggctctgaagaaacaaaagaaccagtaaaagaacagagttatgatgtcgagatggacgtccaaaaatcattggaaactgatgaagagctcataaggaacactcgtgattnggaagcaccagtataccaagataatgcccaggatgaaatttctagcaaact

SEQ ID NO: 1215 - DNA, 415 bp, Oryza sativa
  Clone ID: uC-osflcyp024b10b1
agcgttttgtttttcagtggcagcgcgggagccgcatcactctcagcgtccacttccaccgaagtaccgaacaccccgtccccatcatcacctcaccatggcggcagagggagaggaggcgaggagcccgcacgtcgtgctcttccccttcctcgcgcacggccacatcccggccttcctccgcctcgccggccacctccagacgctccgcccgggcctcgccgtcacgctcgtctccaccccacgcctcctcggctccctctccctcccggccacctcccctccgatccggctccacgcgctccccttcgcgcccgccgaccacggtctgctcgacggcgccgagtccctcgccgccaacctctcccgcccgccacccctcgcgatctcctctcctggctgtgatggcggtggt

SEQ ID NO: 1216 - DNA, 420 bp, Oryza sativa
  Clone ID: uC-osflcyp024b12b1
ctccagccgaagccgctcaccctcctccgcctccctcctcctctccccgtcgctcgccatggcagccttcgccaccgcgaccccctcgccggcgatctccgtgtccccctggagcatgtcgtcgctccgcgccgggctcccctcccccacccgcgcctccccggcggggaagctccggtcgtcgttctcgcccgcggcggcggccacggcggcgtcggtcggctgcctcagctacttctgcggcctcacccccatttcgcctctcctctccctcggggaagagacttcaagctgtgagcatcgattgtttggtattgatgcccgtggaaggatagtggcaatgagacatgggaggcgtgctcctaaacttagcagaccgccagatcagcgaaaggcacttctgcgcggtctgaccacgca

SEQ ID NO: 1217 - DNA, 541 bp, Oryza sativa
  Clone ID: uC-osflcyp024c01b1
gtaattcctccccacgggcggcgactagggcggctagggttcgtcgggcgccgccgtgccggagatcgcctctcgccgccgacacccggatctccgccgccgccggtcgccccaggttatcccgctcccgcagtcaccatcccgtcttctccgccagtcgcctcacgcccggcctggacgccccggaatccattgtcggtctcgccccgccgactgccgttgacgccactggctgaaggtgtgaatatgtcggacagtgcgttgaaagatctgaatctagctcagtcagcagagctggagaaaaccaaggacagttctgccaagtcttgcatcaccaagcctgtcttgaatggcaacaaatgcaacaatacggaagaaaatgctccacctgtactccctgatgctgtgactaatgggtgtgaagctggaaatgcagatgttgagtatattgattctgagagtctgacagatcttgaagatgctggtgcaacccttagtactttagttgcaagggtggattcaaaagactgggttatgacat

SEQ ID NO: 1218 - DNA, 426 bp, Oryza sativa
  Clone ID: uC-osflcyp024c02b1
gtgatccggaaggtgctggtgtcgtacatgtacgcggcggtgtggatcttcctgtccttcacggccatcgcctacaacaagtacatcctcgaccccaagatgtacaactggcccttccccatctcgctcaccatggtgcacatggccttctgctcgtccctagccatcgcgctcgtccggctcctacgcgtcgacaagctcccgtcgagccccgccatgacgccgcagctctacacctcctcggtgctgcccatcggcgcgctctactcgctctccctctggttctccaactccgcgcacatttacctctccgtctccttcatccagatgctcaaggcgcttatgcccgtcgccgcgtactccatcggtgtgctcttcaagaaggagaacttgaagtactacgccatgcgtaacatgctctacatc

SEQ ID NO: 1219 - DNA, 54 bp, Oryza sativa
  Clone ID: uC-osflcyp024c04b1
gttgcaaatagggcgagtaaatgaagaatgctatgacaatctgattttagtttt

SEQ ID NO: 1220 - DNA, 512 bp, Oryza sativa
  unsure (1)..(512): unsure at all n locations
  Clone ID: uC-osflcyp024c05b1
tgtcatgcaagaagagacgagacgagggagagaaggagaagagggggccggccgcgggcgtcgtcgtgttcctccccccctctctctcctctcctctcctctcgatctccatccttccttccatccattcctccccgcacccttcgcattgctctcgtcgtctcgattcggtcgaggatctccaggaaaagaggaggaagcgatatgggttgcttttcatgctgcggagcggatgatgtcggcaagaagaagaagcgcgacgatccttacgtcccgatccctgatccaggtggtaactatggacgtagcaagcccgggcccccagccccttcgcgttctccccccaccagcagaaatctgccaattgcagtaccggcaattccccttgatgaaataaagggaataaccaagaacttcagcagtgatgctctcatcggagaaggctcgtacgccagagttntctttggtgtgctgagagatggcaggagatctgcggtgaagaagcttgactc

SEQ ID NO: 1221 - DNA, 474 bp, Oryza sativa
  Clone ID: uC-osflcyp024c06b1
ctcatgtgaaaatccagatattagacaggctgcagtttatggtattggcatttgcgctgagtttggtggctctgcatttaggcctcacactggtgaggccctgtccagactatacaatgtaatcaaacatcccaatgcgttggacttggataatgcgatggcatatgacaatgctgtttctgctcttgggaaaatatgtcagtttcatcgtgatggcattgatgcatctcaggttgttcctgcttggttaagttgtttgccaataaaaaatgacttaatcgaggccaagatagttcatgaacaactctgtacgatgcttgagaagtcagatagggagcttttgggtcataacaaccagtatcttccaaagattgtctctatctttgcggagatattatgtgcgggtaaggatctggcaacagaacaaacttttagtaagatggctaatgtgctaagacagcttcagactacatt

SEQ ID NO: 1222 - DNA, 538 bp, Oryza sativa
  Clone ID: uC-osflcyp024c07b1
tgttactttaaacgagggaagactagttggacttctttaggtggaattatgctcagcataacaggcacagaagcattgtttgctgacctttcgtattttcctgtacaagctattcagattgctttcactgtggttgtgttcccatgccttcttctgcaatatactggtcaggctgcgtttatagctgcaaacacaaaccaagtcagccatgccttctatatctcccttccagctcctatactttggccagcatttgccgttgcaacagcagctgcaatagttgctagtcaggccactatatctgcaacatattcgattatcaagcaagcacttgccctagggtgctttccccgagtgaagatcatccatacttccaagaagtatctcggccagatatacagccctgatattaactggatcctcatggttttctgcatagctgtcactgcagggttcaaaaaccaatcccagattgcaaatgcatatggtactgctgtgatcatggctatgcttgtgacaacatttctgatgatcccca

SEQ ID NO: 1223 - DNA, 523 bp, Oryza sativa
  Clone ID: uC-osflcyp024c08b1
gaagaaatacccctgcagcttgttgccacaccatctgttcacaaacctttgttccatgcggaatggaatgctgaaaactacaaaagtccatcccctactcgctactggttgcaagtttttgctcaggattctcagggtgggaagacatcaagcgagcgacgaccattttcagttgagggtaaagtgcaaattcaatcacgtccatgtctgaactacttgatttttgaagtccaatgggaagacatgtatcaagttcttctgtggagtaattttgccttcataattgtactattgtttgctcccaaattgctgtatcattttatgaagaaaagtttgacataccaaagatggaccgtgtcagttatgctatcccctatccagccgaggaaagcttacttttggttggtctggtttctaatggagggtgcaaggagtagacccatctggttttctttgctcatatatgttatttggcttattgaaatgccatggttttggggtcatgcgacatctgagaaaggag

SEQ ID NO: 1224 - DNA, 533 bp, Oryza sativa
  unsure (1)..(533): unsure at all n locations
  Clone ID: uC-osflcyp024c09b1
tcttctctcctcctctaatctcaagtctctgtctcgtcgtcctcgcatctccactcgccatgggcaagattaagatcggaatcaacggtttcggaaggatcgggaggctcgtggccagggtggccctccagagcgaggatgtcgagctcgtcgccgtcaacgaccccttcatcaccaccgactacatgacctacatgttcaagtacgataccgtgcacggccaatggaagcacagcgacatcaagatcaaggactccaagactctgctcttgggcgagaagccggtcaccgttttcggcatcaggaaccctgacgagattccgtgggctgaggctggtgctgagtatgtcgtggagtccaccggtgtcttcactgacaaggagaaggctgctgctcacttgaagggtggtgccaagaaggttgtcatctctgccccgagcaaagatgctccgatgtttgtctgcggtgtcaacgaggacangtacacttcagatattgatattgtctcaaatgctagctgcaccacaaactgg

SEQ ID NO: 1225 - DNA, 280 bp, Oryza sativa
  Clone ID: uC-osflcyp024c10b1
tcgtttagatagcgagcggctactgccgggggaggagatggccaagatctaccgggtgaagctctgggtcacctatgaggtccgcgcctagagcaaggtctggtactccctgtggaagctgatgaaggaggagaagagcaacgtgcaggtgctggccatctacgagatgttggagcgcaacgagagcacgatcatgaactatggcatgtggctgtgttaccagagcagacccggttaccacaacatgttcaaggtgtgccgcgacactacattgaatggt

SEQ ID NO: 1226 - DNA, 394 bp, Oryza sativa
  Clone ID: uC-osflcyp024c11b1
gccatcttgaggagcaatctcatctcggtttccttgtgtattggatatttggatgtatatcttcgtggttagtgaggtgtgaagtcttttgttggtgtgcctgtgccttcaggctttgaagccaaatcaaatgccttgaactttgtctcttcatactgcagggcctgaacacaaacttcagcaacatcagctcttggaattgacttcgtgtctgtctggagaagttcatcgtcattgccaacaatcaactccctcactcccccgtctttgtcttgcagaccaccaggccttattattgcataagggactccactgtctgccaaatactgttctgacttgcgcttccaaaccagtatattgccattgcctaggctgttcagtggatggttaggat

SEQ ID NO: 1227 - DNA, 507 bp, Oryza sativa
  Clone ID: uC-osflcyp024c12b1
tcgtttaaaattgttgatcaaggtggagtaccagcactctatgctggcttgatccccagcttgctacaggttctgccatcagcgtctatcagttatttcgtatatgagttaatgaagatagtcctgaaagtggaatgaatgcaaattaattcttgagcatgcacatcaagttcaagaagcccagctcacattaccttgacaaaattcaagtaaacagcgcatttagatctgtttttgtagcatttcttcacggaagcttcaaaggccgtgggagtaactttatcttggccaaagcctgaagcattgttcgctcgaagcttttcaccacaagattaccttatacacgatgaggtcttgttcgacatctgattcgatcaccgatctgttgcagattgatctgtcatagcaaaaacatatgggcttcttgcccttcagatttcaattaacaaattttcaacttttcatttttgatgtattgatgcatcgactggaaaggaaagtgggttt

SEQ ID NO: 1228 - DNA, 498 bp, Oryza sativa
  Clone ID: uC-osflcyp024d02b1
ctctcagctctcacagctcactgcatcaatggccgcggccaccatggcgctctcctccccggtgatggcccgcgcggcgccgtcgacctcctccgcgctcttcggcgaggcgcggatcaccatgcgcaagaccgccgcgaagcccaagccggcggcgtcgtcggggagcccgtggtacggcgccgaccgcgtcctctacctcggcccgctctccggcgagccgccgagctacctcaccggcgagttcccgggcgactacgggtgggacaccgcggggctctccgccgacccggagacgttcgccaagaaccgggagctggaggtgatccactcccggtgggcgatgctgggcgcgctcggctgcgtcttcccggagctcctcgcccggaacggcgtcaagttcggcgaggccgtgtggttcaaggcgggctcgcagatcttcagcgagggcgggctcgactacctcggcaacccgagcctgatccacgcgcagagcat

SEQ ID NO: 1229 - DNA, 404 bp, Oryza sativa
  unsure (1)..(404): unsure at all n locations
  Clone ID: uC-osflcyp024d03b1
atcgccggcgagagagagagagttagctagctaggatgggttctacagccgccgacatggccgcggcggccgacgaggaggcgtgcatgtacgcgctgcagctggcgtcgtcgtcgatcctgccgatgacgctcaagaacgccatcgagctgggcctgctcgagacgctgcagtccgccgccgtcgccggaggaggggggaaggcggcgctgctgacgccggcggaggtggccgacaagctgccgtccaaggcgaacccggcggcggccgacatggtggaccgcatgctccgcctgctcgcctcctacaacgtcgtcaggtgcgagatggagngagggcgccgacggcaagctctcccgccgcttcgccgtcgtgccggtgtgcaagtggctgacgcccaacga

SEQ ID NO: 1230 - DNA, 499 bp, Oryza sativa
  Clone ID: uC-osflcyp024d05b1
gaagcaattcttgagctcaatcagcaacaacatctatctccttcttgcttagttaagtccttcgccctcccaagaagaagaagatgtcttgctgcggcggcaactgcggctgcggcagcggctgccagtgcggcggcggctgcggcggatgcaagatgttccctgatgtggaggccacagccaccaccaagaccttcgtcctcgctgctccatccaacaaggcgagctctggaggaatggagatggcggtggagagcggcgagaacggcggctgcggctgcaacacctgcaagtgtggcaccagctgcagcggctgctcctgctgctcctgcaactgaatctatcgtcgtcgtcgcccggctgcatgaggatttatcgtatggatgctgctactgtcgatcagagctttgatcgaggccttaatttgcttgcattagtacccagcttatatgtaggcaggccttgccttttgctctgacgcctaaataaaaccgtcgtc

SEQ ID NO: 1231 - DNA, 492 bp, Oryza sativa
  Clone ID: uC-osflcyp024d06b1
gtgtgatgttagcattgcagtggatcttcattttcattaaaaatagccatcaaactcctttagtatcccaactaggtatgtcatgatcatgtaactgtgctgggaagatccatctattatgctcatgtttctgccctgccgttcagttttcaactgttgcactcagttttcaacagaaggatccatccatcttgttgctcatcaataaggatttctcagtttattgattatttgagtatcatccaagtgttggcctacttgattggaggtgttgaataacaaatttcataaccttataagaggcaaattttgatggctggctcgatggtcatgtttgtcaggcaatgtcaatggcatcagttcagtattttggaaatggtacggtgtagtcatcatttagatggcattaggttaactggaattgaaataatcgtttagattctttgcccagattcaattacataaagcaaaataggtttacttttttttttt

SEQ ID NO: 1232 - DNA, 460 bp, Oryza sativa
  Clone ID: uC-osflcyp024d10b1
ggagcgtggttactcattcaccacaacggccgagcgggaaattgtgagggacatgaaggagaagctttcctacatcgccctggactatgaccaggaaatggagactgccaagaccagctcctccgtggagaagagctacgagcttcctgatggacaggttatcaccattggtgctgagcgtttccgctgccctgaggtcctcttccagccttccttcataggaatggaagctgcgggtatccatgagactacatacaactgcatcatgaagtgcgacgtgcatattaggaaggagctatatggcaacatcgttctcagtggtggtaccactatgttccctggcattgctgacaggatgagcaaggagatcactgccttggctcctagcagcatgaagatcaaggtggacgctcctcctgaaaggaagtacagtgtctgcattggaggatccatcttggca

SEQ ID NO: 1233 - DNA, 474 bp, Oryza sativa
  Clone ID: uC-osflcyp024d11b1
tcatcgtgtagttttaggccatctgagggcctttgaatggctctcggcctccttcatttttcatagcatttgtgtagtgtgtgcaaatccatcatcgcatcttcatatctgaagaaatgaaggtgaccactcagctcaagcccatggcctcctcgtcgacgtcgccgtcgccgtcgcggctgccgcggagcgcgagcggcaaggcgcccacctcgccgccgtccagctccaacgcctcgcgccgccaccaccagcagccgccgcgggcctcggcgtcgacgcccgccaccccggcgccgtcgcgccaccacctcaggtcgctgtccatcagctgcatgacgatcaggaccgacgacgactcgccgccgtcggccgtcacccacaaggacaaggcggcgacggccaagccgctgtcctactactcgtcgatgctgtcgccgaggaagcttatgcagcgcgcgtaccgcgcgttcc

SEQ ID NO: 1234 - DNA, 521 bp, Oryza sativa
  Clone ID: uC-osflcyp024e01b1
gtcgcgtcgcgtctccctcccgcgcgacggatccgagagccctaaaccctagaactccctcgccctcgcgtcggcgccatggaggacgaggagatggagaagaaggtgcagcagtacctgcagcggaaggggttccgcctcaccgagctcgcgttgcaggaggagcgcaaccgcatctccacctcctccgtctccgacgtcgcgctcgccaggtcggaaaatgatccggcaagatactatgatggttatagtaaactaagaacatgggcatacagttctctcgatcagtacaagcatgaattactccgtgtcctttacccagtgtttatccattccttcatggatctagtggcagagggacatacacaggaagctcggtcctttttccacacgttccatgaagaccatgaactgatgcattctagggatctccagaaactggaaggcattctttcttcttcacaattggaggaaatggaactggccagatctttaaggaaaaatcaattcagaattaaagt

SEQ ID NO: 1235 - DNA, 532 bp, Oryza sativa
  Clone ID: uC-osflcyp024e03b1
tttggcctagaataacagaccaagagctacagcaaatttctggagattcaaattccaccattgtccccctgtttgagaaggttctaagcgccagtgatgcaggccgcatagggcgccttgttctaccaaaagcctgtgcggaggcatatttccctccaatttctcagccagaaggtcgtcctttgacaattcaagacgcaaaaggcaaagaatggcattttcagttcagattctggccaaataacaacagcagaatgtatgtcttggagggggttacaccatgcatacaatcattacaattacaggctggtgatacagtgacttttagtcggatagaacctggagggaaacttgttatgggcttccggaaggccacaaacactgtcagtttgccagactcacagatttcagctattgccaacggttccattcttggggatacattattttctagtacaaatgagaatttagcaatagtaagtggttatttagggattcttcagtcaataaagggggctgcagatcttcatac

SEQ ID NO: 1236 - DNA, 433 bp, Oryza sativa
  Clone ID: uC-osflcyp024e05b1
ggtgggttggcttctcctccccctctttaccttttcctcctcggttcggttccggggttcgcctagggtttagtgggttgagatggccgcgccggatgtcgagtaccgctgcttcgtcggcggtctctgctgggacaccgaccaccgctccctcgaggccgcacttctccacctgcgggaagatccttgactacaagatcatcaacgacagggggacagcagaggtgacgaggctaagggtatgacaccttgtgctacgagcagtgagaagcgcgaacacaattgagggcactgagactgaaggagcgtcgacggacgcaacatcaccgataatgaggtccagacccgtccatcctgtggcagaagcggtggctaccgtaccggtggtggcggatactgaggatgccgaggaggcggagcatactgaggaagt

SEQ ID NO: 1237 - DNA, 482 bp, Oryza sativa
  Clone ID: uC-osflcyp024e06b1
acgcacgttgccaccacaggctacgcaaaattctctcccttcctcctccaccacctccactccgacgatcctcctcctgatcctgtgccggccggcgatggcgtaccggttgctggagctcacgctggtctccgcgagcgacctcaagaaggtcactctcttctcgcgcatgcatgtctacgccgtcgcctccatctccgggagcaacgtccccatgcccatgcacggcacccacgccgaccgcaacggcggcagcaaccccgcgtggaacaccgtgctccacttccccgtccccgcccgcttcgacacccgcggcctcgccctccacgtccagctccgcgcccggcgctccttcggcggtcaccgcgacgtcggggacgtgttcgtgcccctcgacgacctcctcgccggcgcgcacgacggcggtgagccgaggccggctagctaccaggtgcgctcgcccatgtacgtccgcgcgcacg

SEQ ID NO: 1238 - DNA, 449 bp, Oryza sativa
  Clone ID: uC-osflcyp024e07b1
gtgcggcaactgcgactgtgctgacaagagccagtgcgtgaagaaaggtaccagctatggcgtcgtcatagttgaagccgagaagagccacttcgaggaggtcgccgccggcgaggagaacggcggctgcaagtgcggcaccagctgctcctgcaccgactgcaagtgcggcaagtgaagtcacgaagcaaccgaacactcgccgccggcgagtcacctaccttaattagtccacaataaaaaccacccatatgagtgtggtttgtgtgtgtgctgattattgctgaattaaacccgtgtgttatcgattaattaagcagctggtcgcttcggcgactatgcgtgtatcaacgtatgaatttgtgtgatgtgatgtacccgtgctattctcagcgaaattaatcaatcgtgtattcgtgtggcttgcctagtaaaaagggctatcatac

SEQ ID NO: 1239 - DNA, 514 bp, Oryza sativa
  Clone ID: uC-osflcyp024e11b1
ttcctctcctcctcccctgcacagaccactcgtttcctccacaaagagggagggaacaagggaagggtgtcgcccgccccccaccccgatctgcctccgccgctccgctcctccgcgcctgcgaaatctaccaacgctaactcagcaagatgggtgccggcggcaggatgacggagaaggagcgggaggagcagcagaagctgctcggccgcgccggcaatggcgcggccgtgcagcggtcgccgacggacaagccgccgttcacgctggggcagatcaagaaggccatcccgcctcactgcttccagcgctcggtgatcaagtccttctcctacgtggcccatgacctcgtgatcgttgccgcgctgctctacttcgcgctggtcatgatccccgtgctgtcgagcgggatggagttcgcggcatggccgctttactggatcgtgcagggctgcgtgctcaccggcttgtgtttatcgcgcacgagtgcgggcaccctgccttttccgactac

SEQ ID NO: 1240 - DNA, 474 bp, Oryza sativa
  Clone ID: uC-osflcyp024f01b1
tccattcgtccggcgagacggtggaggacacggagctgctgggctaccgcgtcccggcgcggacgcgggtgatcatcaacgtgtgggctatcggccgcgacgcggcggcgtggggcgaccgcgcggaggagttcgtgccggagcggtggctcgacagcggcggcggcgacggcggcgaggctggacatgggtgagctgtttgggctgtccatgcgaatgaagacgacgctgaatctagtcgcaaagccatggtcttccgatgtttgatgtgttcagtatgaaagctgctaggcaggctagctaccatctgtgcctattgcaacatataatttgtgtagcgagggtcatctatatttaaggggtaagtgcatgtgcacctacacgtgcttcaccgttagatttgctttgacattagtgtatactttttatattttagttaagcacaatatatattatgttctcggtataacatga

SEQ ID NO: 1241 - DNA, 449 bp, Oryza sativa
  Clone ID: uC-osflcyp024f03b1
ccatggcccgttacgatgaactggttaaggaggtatcatgctacctgaagaaggtgggctacaaccttgacaagattcccttggttcccatttttgggtttgagggtgacaacatgattgagaggtccaccaaccttgactggtacaagggccccaccttgcttgaggctcttgaccagatcaacgagcccaagaggccatcagacaagcccctgcgtcttccccttcaggacgtgtacaagatcggtggtattggcaccgtgcctgtgggtcgtgttgagactggagtcctcaagcctggtatggtggtgacctttggtcccagcggcctgaccactgaggccaagtcggttgagatgcaccacgaggctctccaggaggctcttcctggtgacaacgtcgggttcaacgtgaagaacgtcgcggtgaaggatctgaagcgtgggtac

SEQ ID NO: 1242 - DNA, 528 bp, Oryza sativa
  Clone ID: uC-osflcyp024f04b1
gactgatttagcaggcagccaggcaccttatgatgcctcggataaggaagatactgctgctgatttgattggtcctaagcaagccactctcgagatcgaaaaaatgcagattgatggtattcctgaaggtccttctagcgtgcctgctgttttgcagttaactgactcaaatcagccagcagaacaagagagattagagaatagtgactctaaatttgcatcaacaaaggaccagggcagagtggatggaacttccaatttgagtggaggtgataatgcaaagtgtagtcttaccaatgatgattctcaaactgtgaatctagtaggatattcaccatcagaagactcgaatgatgatgattctgtccaagcagctgatagtgatggcgttctgggaaataaagaaggtactgatgatgttatctctgctgcatgtaccgatgatgtatccatgctgaagactgaatcaatagatcgtcatggttctgacgaagttgatcattccactgccccgtctgctgccatcaa

SEQ ID NO: 1243 - DNA, 489 bp, Oryza sativa
  Clone ID: uC-osflcyp024f09b1
tcggtcagtttttcacttaactggctcccaggtcaacaagatctttgccgaaaatgcgtttgatgctgttatgcactttgctgctgttgcctatgtgggtgagagtacattggaaccccttaggtactatcacaatattacatcgaacaccttattgattttggaggctatggcgtctcatggagtcaagacccttatttactctagtacatgtgccacctatggagaaccagagaagatgcctattgtagaaaccacacgtcagttaccaattaatccctatggaaaagctaagaaaatggcggaggacatcatactagatttcacgaaggggagaaaggacatggctgtgatgattttaagatatttcaatgttatcggatcagacccagagggaagaataggtgaagctcctagacctgaactacgagagcatggaaggatatccggggcatgctatgatgctgcgttaggaatcattccagggct

SEQ ID NO: 1244 - DNA, 515 bp, Oryza sativa
  Clone ID: uC-osflcyp024f10b1
tcggagacacagagattgcattcactgaggatgtgagtgctcgctttgaggctcttgggtggcatacaatctgggttaagaatggaaacgatggctatgatgagattcgtgccgccattaaggaagcaaaggcggtaactgacaagccaacactaatcaaggtgaccaccacaatcggttttggatcacccaacaaggccaactcatacagcgtccacggaagtgctttgggtaccaaagaggttgaagcaaccagagagaaccttggatggccctatgagccattctttgtgcctgaggatgtgaagagccactggagccgccatgtgcctcaaggtgctgcttttgaggctgactggaatgctaagttcgccgagtatgagaagaagtacccagaagatgcagcgaccttgaagagcattgtctcagggagttgcctgctggctgggctgacgctctttctaaatacactccagagagccctgcagatgccaccaggaatctgtcacagcagt

SEQ ID NO: 1245 - DNA, 397 bp, Oryza sativa
  Clone ID: uC-osflcyp024g01b1
tccgtttcgattccccaccagcggcgaaaccctaaccctagagcggccaccgccatggagaagcgcgcgaccaccaccagggcggtggtgctccgcctcgacgacctctcccttccgccgcgccgcctcaccgtgccgtcccgcctcccggtctcccacctcctccgcgcgctgccgcagccgctgctcgagtcgtcgtcgttctacttcaccgccgatggccgcccgctcctgctgtccgcgcccgtggcgtcgcttccgccgtcgggttcggtccagctccgcctccgcgcgctccgcggtggtggcggcaccggcggcgccacgggcgccgagtcccgcgactgctacctctccatgtacctcgcgaagaagcccgacaaggccgaccccaacg

SEQ ID NO: 1246 - DNA, 511 bp, Oryza sativa
  unsure (1)..(511): unsure at all n locations
  Clone ID: uC-osflcyp024g02b1
gcggtcgttctggtactactttgacgacaccgtcgcacggcttgtgaaggccggctcgggggacaccgccctccttggggatggacgccgggcaacggacggtcatgttcgaggacgagtgtattttagtggacgaacaggacaacgtcattggccatgattccaagtataactgccatctcatggaaaagataaattctggtcatgtcctccacagagcgttcagtgtttttcttttcaactccaaatatgaattgttacttcagcaaaggtctgctacaaaagtgacatttccacttgtctggacaaacacttgctgtagccaccctctataccgtgagtccgagctcattgaagataaaagcctaggggtcagaaatgcagcacagcggaagctattcgatgaactgggaatacaagctgaagaactatcctgtgaccaattcattccttttgggaggatgctttacaaggctccatctgatggaaaatggngcgaacatgaactgga

SEQ ID NO: 1247 - DNA, 387 bp, Oryza sativa
  Clone ID: uC-osflcyp024g04b1
ttttgtactcctctacgcggtcacgggttccccagcggtggataaagcttgatagagagcgcatcgagcctttaaatctctctttcttcttctagacgtagtctgcaggcacctgcttctagcgttcagtggcgaacgtacaatctttcgtctgaggaaagctcccatccttgctgagtgctcgggctgtttctaccacagtggttccattcgcggagaattttgccttccatctcgttaatcggggacaaaggaggtgggaccttgctttctttactgcaagaaaagggaagcttcttcgttagaacgtctgcactttgcagggcaccgacgaaggcgatgctgcccttgctgatttcagccttattcttccgatggtccaggtga

SEQ ID NO: 1248 - DNA, 253 bp, Oryza sativa
  Clone ID: uC-osflcyp024g08b1
tcggtgtcggcaggaccttcaccagttgctggcacgccttctcgtccgtcgtcttggggcacacggcctccttgttgaagatgttggggtcagggacggcgcccgcggttgatccggccgttgcagaggtctccttgtcagacgccgcagtggtctccttgccagcggttgatcctgttggcgcataggccttcttatcggtggcgccggcattggctgccgcgacgaggacagtatggaggaggaggaggag

SEQ ID NO: 1249 - DNA, 441 bp, Oryza sativa
  Clone ID: uC-osflcyp024g09b1
tttacccagccgacgtcgctgccttcaacgatgacgatgacgacatgctggatgaggccgactatgaagactttgaatagcaatcaactgaaactctgatcaatcccggtccggaaggagcctgcgctggccctgaccgcgtcgggccgggacaagaccctgaaacatccaaaagatcggtgcaagaagattaaaatgaattggagaggatcccagaaatttgatgatgatgccatgggcatgataagtctgttcctcttcgctcaaagcttggaacttgaggatgttcttaagcaaccatggctcccttctgatgctcctatcagaagagcttaagtaataccatatccacatattattctctcattatctcatggtactacaaataatgagccacgttcagcgctggccactgggctgcagcatactctacttgaagag

SEQ ID NO: 1250 - DNA, 448 bp, Oryza sativa
  Clone ID: uC-osflcyp024g11b1
tcgtttcacgcgtgcgcgcgctgacgtcggcgacttgtctttgtgcaggacgcggcggatcaagaagaaggtggggtagatgatgcgccggagccgtgcgatcccggactggctccgactgcgcaccgacgacaccatcaggtacaacgcgaagcgcaggcactggcgccgcaccaagctcggtttctgagcttggcgaggagaggaggacgaggcgccaggcgccgatgacctgggacgccgaagaagaaggagcggctggggcttttaggtggggtagggttgacatccaggttttgtttgcgctggagcgacttttagtggatgctggtggatcggagcataatagttgtggtgactaaagtgcgagtttcttgaatggtaacatagatggtaaagataaatcaagtaaaaagaagtggttcaatttgaatcttaataggtctga

SEQ ID NO: 1251 - DNA, 358 bp, Oryza sativa
  Clone ID: uC-osflcyp024g12b1
ggctggattcattcgttcgcatacaggtgtacatgttgtattactgccggttaactcttgatctgttgctagatatgcatgtccgacgatcgagagtgataccatggaaggttgctatgcgggctcttagatctggaaggcagtatggtggattattgtcttgaaacatggggaggttcaggagaaacaccaccacttcgttggtataaccgactgaagaaacacctagcagttatggaatgaagaggaacgtcggttgaagcgagatactgcatatgagggtcatgacaatgagcggggcaacttgacagacggacaatgcattattgagggcatagactctatggactatggaata

SEQ ID NO: 1252 - DNA, 417 bp, Oryza sativa
  Clone ID: uC-osflcyp024h03b1
gtcagtggagaggagaggagaggagaggactcatccatcatcatcaatcaacgccatgacgagctcctcatctccttcccgaaaggcgctgagcaagatcgcttgcaatcggctgcagaaggagctcgccgagtggcaggtcacccctccctccgggttcaagtacagggtctccgataacctccaaaggtgggtaatcgaggtcaccggagcggcgggcacgctctacgccggcgagacataccagctgcaggtcgacttccctgagcattatcccatggaggcgcctcaggtcatttttctcaacccggcgccgatgcatccacacatttacagcaacgggcacatctgtttagatatactgtatgattcttggtcacctgcaatgactgtcagttcggtctgcatcagcatttt

SEQ ID NO: 1253 - DNA, 514 bp, Oryza sativa
  Clone ID: uC-osflcyp024h04b1
agccgtcgccgccgccgctcacccgcgccttggacgagctccagccggtggacctcgccggatctccccgatgggcgtgaccttcaccgacctacacaccggcgacggactcaaagccctcgagcagcacctttccggcaagacctacgtctccggaaacgcgatcagcaaggacgacatcaaggagtccgccgccgggccattaaagcctggagctgagatcccgaacgctgctcgctggtatgataccgtcgctgcggccctcgcttcaaggttccctggcaaggtagttggagtgaatctgcctggaggaggtgcggcattgtctgctgcagcggatgcgccagctgctaaggatgctgatgaagatgatgatgacctggatctttttggtgatgatgaccgtggaagacatgaaagcagtagatgagcgtgcagcttccaggcctctttaaagagaaagaaggcggaaatcatctgtcctgttggatgtaaaccatgtgacgaccagact

SEQ ID NO: 1254 - DNA, 473 bp, Oryza sativa
  Clone ID: uC-osflcyp024h06b1
gtgattgcttgttgcagaatacatgcccaatgacacactagcgaagcatcttttccattgggaggcgcaagcaatgaaatggcccatgagattaagagttgttctctatctggctgaggctttagaatattgcaccagcaaggggcgtgctctgtaccatgatcttaatgcctacagagttctctttgatgatgactgtaaccctaggctttcatgttttggcctcatgaagaacagtcgagatggtaaaagctacagtaccaatctggcgtttactcctccagagtacatgagaactggacgtatcacacctgagagtgtcatttacagctttggtaccttgcttttggatgttcttagtgggaagcatattcctcctagccatgcccttgacctgattcgagatcggaattttaacatgctgacagactcctgtttagagggtcaattttcaaatgaggaagggacagaac

SEQ ID NO: 1255 - DNA, 317 bp, Oryza sativa
  Clone ID: uC-osflcyp024h07b1
tcgttagttgcgagagagagagagagagatcagttagtttgttgagtggaagcagatcaggaagatgctggagaagctgtgggacgacgtggtggccggtcctcgaccggagaccggcctcgagaagctccgcaaggccgctacaacccgcccccttgtcatcaacaaagatggcgacggcgaggcgagcggagtggcgtacaagcggacgcagtcgatgccgacgaccccgacgacgccggtgacgccgtcgtcttcggccccgacgacggcgacgaccactacgccgcggagcagcaacgtgtggaggagcgtgc

SEQ ID NO: 1256 - DNA, 355 bp, Oryza sativa
  Clone ID: uC-osflcyp024h08b1
tcgttacctccggccggccgccgccgagcccgaaccctagccgccgcttcccgctccggttccgccctaatccgagcccaattcctccaggtttttgagggcttttgttcctctcgttctcctctttcttttcccccaagaatcaaagagaatcggtgaggattggatccgaatcgagttcgttttggttttatccctaaaaccgagttcgatttcttcccgagtcgattcctctcgtttggagctcgatctcttcgatccaatgccatataaagcttccccttggtctgctctttcggttgcccctgtaccgagttctaccgtgcctgctagcgccaccgagacgtgctttaag

SEQ ID NO: 1257 - DNA, 338 bp, Oryza sativa
  Clone ID: uC-osflcyp024h09b1
tcgtttgaaagctgattcggagtaaacgggcagcaggtttggaagatgatgtttgggaaaacaacgcaccagctgtggataaagtaaaggatttccttgctggcgctggaactgatgctcctgatgtggatgatgaggaatacatgaattctaggccatcagtcggttatgatgatatgtgggccaagacaattcttgaaacatatgaagcagaggatgatgatggaagatcatctgggggatcctctcctgagtcaactggttctgtagaaacatccatatcgtcccattgtagtggtatgaactatccgtcgttgttcagttcaaaaccatcagga

SEQ ID NO: 1258 - DNA, 526 bp, Oryza sativa
  Clone ID: uC-osflcyp024h10b1
ttgtaagtttccaatggatctgcatctgaatccaaacaaaaggaaattctcaaggttgttgtaactgaagtccttggtggtggaaagttctatgtccaaacagttggtgaccatagagtggcttccattcaacaacagcttgcatctttaaaacttaaagatgcacctgttattggtgcttttaatcctgtgaagggggaaatagttcttgctcagtttagtgctgacaactcctggaatagagcaatgattgtgaatggacctcgaggagctgtatcatctcaagacgacaagtttgaagtattctacattgactatggcaaccaagaagtcgttccttacagtcgcatacggcctgctgacccatcaatttcctcttcgcctgctcttgctcagttgtgcagccttgccttcataaaagtgcccaacctagaagatgattttggccatgaagcagcagtctatctgaatgattgcttgctcaacagccaaaaacaatacagggcaatgattgaagagcgtgata

SEQ ID NO: 1259 - DNA, 543 bp, Oryza sativa
  Clone ID: uC-osflcyp024h11b1
tttatctgatgatgcacctctgttcttcttcacagacagttgtctcattctaggggaagcaatgatcccttgcattttgcttgcagtggggggcaatcttgtcgatggtcctggtgaaggaagtaacaggcttggtgtgcggacaaccgttgctattatttttgcacggctcatcttggttcctcttgctggggttggcatcattgtgttggttgataaacttggtttcattcctaaagatgacaaaatgttcaagtttgtcttgctactgcagcattctatgcccacatctgtgctgtcaggtgctgttgcaaacctgaggggctgtggaaaagaatctgctgctatcttgttctgggtgcacatctttgctgtgttctccatggcaggatggattattttgtatttgagcttactcttctagtacgtcataccctgatgctatactgcacaggaacgtccataagatcaaaatatcaccagatataccagaaaaggatagtaccatgacatgtacattagccagtaaaccatggcgacagc

SEQ ID NO: 1260 - DNA, 466 bp, Oryza sativa
  Clone ID: uC-osflcyp025a01b1
ttgaagttcctgattgccttctcctatgagctttctaagaaggaaggtaaagtagggacaccggagcgccctctttctgatcttggtctgctcagttatagaggttattggactagagtgcttctagagattttaaagaaacataagagcaacatatccattaaggagcttagcgatatgacggcaataaaagcggacgacatcttgagcacgcttcagagtctggacctgatccagtaccggaaaggtcagcacgtcatctgcgctgaccccaaggttctcgaccgccacctcaaggccgccggccggggtggcctcgaggtcgatgttagcaagctgatctggacaccctacaaggaacaaggctaagctaagctctcgtgccaaacgaattagataaaaagaaaatctgaccagctcaatcctgtacatttcccacttaggatctccccctctctttctctct

SEQ ID NO: 1261 - DNA, 516 bp, Oryza sativa
  Clone ID: uC-osflcyp025a02b1
ttttctagatcgcgatctagaaccaacaatctggctatttggcaattttgcgcaatctttcctacaaagttctggtgcctttgaagtttactgcaatggagatttggttttctcaaaattagctgagcagaggttccctagtgagtttgaactgcgggatctcatcaacagcagattaccagattctctggttgggaaaaatgtgggaaaatccttgtcttagacaatgacattggaatatcacatgccaatgcgacatcttgctatcaaggtagtactatattgtttgctgtttgacgtcgagcagtttggaagctctgcagcttgtctgtgaacactactattcaattaaatggcttgtaaaggataacctagagcgagatagtgactcaattgtatgaacttattagttatgccacacaaaaaatcatcattttctgtttattttctgagaggttgataaaaaattgatgattcgccaccttggtgtgatcatactgtttatacttggtgcat

SEQ ID NO: 1262 - DNA, 546 bp, Oryza sativa
  Clone ID: uC-osflcyp025a03b1
ttaagaagctcgactccagcaaacagcctgatcaagaattccttgtgcaggtttcagccgtttcacgactgaagcatgagaatattatccaacttatcggatattgcgctggagggagcatccgtgttcttgcttatgagtatgcaccgaggggctccttgcatgacattctccatggtaaaaagggcgtgaagggagctcagccaggaccagctctatcatggatgcagcgagtgaagattgccttgagtgctgcaaaggggcttgagttcctgcacgagaaggcggagcctcgtgtcgtccaccgtgacatcaaatccagcaacattatgctctttgacaacgatgttgcgaaagtaggagacttcgatgtatccaatcagtccccggacatggcggctcgcctccactccactcgtgttcttggcaccttcggttatcatgctcctgagtacgcgatgacagggcagcttagcacgaagagcgatgtctatagcttccgagtcgtgttgctggagctcttaactgtcgcaaaccggtcgatca

SEQ ID NO: 1263 - DNA, 502 bp, Oryza sativa
  Clone ID: uC-osflcyp025a04b1
ttgccaccctctacgaccgcctctccgtcctccacatcgccgccgccaatggccgcatcgaggtgctctccatgttcttggatcgcggggcgccgccggacgcggtgaatcggcacaagcagacgccgctgatgctcgcggccatgcacggcaagatcgactgcgtgctcaagctcctccaggccgacgcaaatatcttgatgttcgactcggtgcacgcgaggacctgcctccaccacgcggcgtactacggccacgtcgactgcctgcaggccatcctcgccgccgcgcagaccacgccggtggccgactcatggggtttcgcccggttcgtcaacgtcagggacgaccacggcgccactccgctgcatctcgcggccaggcaggggcggccggggtgcgtgcaggtgttgctggagaacggcgccattgtgtcggctttgacaggatcatatggctttcctggaagcacgtcgcttcatttggctgctcgtagcgggaa

SEQ ID NO: 1264 - DNA, 475 bp, Oryza sativa
  Clone ID: uC-osflcyp025a05b1
tgtcccttccgccgtgccggccatcgactgggtctcgggtggacagagcgaggtggaggcgacgcttaacctgaacgccatgaacaagctcagcgccaagaagccgggggcgctgtccttctcctttggccgtgccctgcagcagagcacgctcaaggcctgggctgacaagaccgagaacgtagagaaggccagggcggccttcctcgccaggtgcaaggccaactccgaggctaccctgggtactgacaagggagatgctgacctcggcgagggcgctgctgaaagcctgcacgtcaaggactacaagtactgatctgcatcaggcgctggcctgctatggcttggctacctgatcgattgcccattctggggccgacactcaattcgggtgtgatacctagaggctctaacaggattcacaatttcggatcggaatttcagaattttttccctatccgatagaacgaaccct

SEQ ID NO: 1265 - DNA, 524 bp, Oryza sativa
  Clone ID: uC-osflcyp025a08b1
ttcgtccttgttgcctcccttgccatgtcatgctcatcgggtggtttgatttgggcatcgctccgggcgtggaggaccgattagagcactgctgctgcgcggctgcccactgtgcagtcatgcctcgccgtacccattacccatcactctgtctctaccgcctgttgtcatgctcctccactgcaacctgattttccttatgtgatggataacaatgcagatcgtgctccatatcagcagcttcgtcaaagaacatgtacttgtgagcatcagttccaggacatgcttaccatgtgtttgtgaaaatgccttcaaacaatttgttccatctgttattttaatcattgagcatattttggtaggaacacccattatatgcaacacataatattttcttcataggtcagatgttgatcgtggctaattatatgcaatcaaaatattttctggataggtcagatgttgatttggagagcaagcttatataattggctaggagtcagtaattttgttatagtgcttat

SEQ ID NO: 1266 - DNA, 474 bp, Oryza sativa
  Clone ID: uC-osflcyp025a10b1
ttcgtcctttgatgaaggtttagctcaagttagccgttcgtttgcttgtgccatcagaccagattggatgcattattggaaaaggtgggcatattatacagggaatccgcagtgacactggtgctcatatacgtgttcttagcaatgaaaatctccctgcgtgtgccatcagtggtgatgaacttcttcagatatctggggactcaacagttgtcagaaaagctcttcttcaagtgtcatctcgtctccatgacaacccatctaggtcacagcatcttcttgcatccagcatgacacagccttatccagtgggctcccaccttggtagttcctcaactgcaccggttgtggggattacgcctttaattagttcttatggaggatacaaaggtgatgtggctggagattggccttctatatatcaaccacggagggaggagagctctgcaaaggaatttagcttgcgccttcttt

SEQ ID NO: 1267 - DNA, 228 bp, Oryza sativa
  Clone ID: uC-osflcyp025a12b1
ttcgtcctattgagtcttgctcgctggcacagcttgtggttatcattaaactgggttttggtttgtattaccggaggcatatatattctttctgattattaatttacacgatggctgtcttcttgactatcaaagttgtctactgtatgaacatatatcagaaagaaaaattacatattgttgacatcaaccaattcacagtccatattgtagactacaaaaagggat

SEQ ID NO: 1268 - DNA, 488 bp, Oryza sativa
  Clone ID: uC-osflcyp025b01b1
tgcgcctctcctcttcaattctcacgcactctccgctccagtgacacacacacacacgaccgctcgctcgtttgccttgctgctgccttagcgagaaaccgggagttagcgagcgagccgtcgtcgccggcgatgaggcaacaacaagcgggaggagttggcgacggggtgagcccgggcaatgtccccgtgtgctactacgggcccgggggccgcgtgccgtcgtcgctggagcggcgggcgcgcgccgccgaggtgctcctgcgctgcgccgcctgcggcctcgccgtgctcgccgccgcgctgctcggcgccgaccgtcagacccgcgtcttcttctccatccagaaggtcgcccggtacaccgacatgcagtccctcgtgctcttggtgatagcaaatgggatggctgcgtgttatagcctaatccagtgtgcaagatgcttggtgagcatagtgagaggtggtgtcctttctaagaggccctt

SEQ ID NO: 1269 - DNA, 550 bp, Oryza sativa
  Clone ID: uC-osflcyp025b02b1
tggggatgtggagttgacgagctgtggaaaaaaagcctatcgcaatggagtccatcgccgccgccacgttcacgccctcgcgcctcgccgcccgccccgccactccggcggcggcggcggccccggttagagcgagggcggcggtagcggcaggagggaggaggaggacgagtaggcgcggcggcgtgaggtgctccgcggggaagccagaggcaagcgcggtgatcaacgggagcgcggcggcgcgggcggcggaggaggacaggaggcgcttcttcgaggcggcggagcgtgggagcgggaagggcaacctggtgcccatgtgggagtgcatcgtctccgaccacctcacccccgtgctcgcctaccgctgcctcgtccccgaggacaacatggagacgcccagcttcctcttcgagtccgtcgagcaggggcccgagggcaccaccaacgtcggtcgctatagcatggggggagcccacccagtgatggaggtcgtggcaaaggagcacaaggtcacaatcatggaccacgagaagggcaaggtgac

SEQ ID NO: 1270 - DNA, 546 bp, Oryza sativa
  Clone ID: uC-osflcyp025b03b1
tatttgttcaaaacagttgctgcaagctcaccatatgctacagcacaagatgcacggcagctgcttccccctgttgttcaattgctcaagaaatatatgcctgggaagaaggtggaagatatcaaccataattatgttgagtgcctgatgtacatttttcaccatttagcccataagacaccaaacaccacaaacagcctatgtggttacaagattgttactggacaaccatcggatagacttggagaggatttctcagaacattacaaagactttacggagaggttaactggaacagaagagacagttcgagcagtctcaaagagactaactcaggggatggcagattttaacaaggcaatatcttcagcaaagactgaagaagagaaaactaaaattaaatctgatcagcagaaatcaacaatgacaatgagggcctacaacaacatactagcaatggcgcagccgttgcgtgcgaaatcccctttatttattggtgacaagaaaatcactctctcatggatggagcagccaaagaaaccagca

SEQ ID NO: 1271 - DNA, 516 bp, Oryza sativa
  Clone ID: uC-osflcyp025b04b1
ttttaggttctccgatgaactttcgagatgtggttctgtatagccaggcacttgatggtattacgttgtccatgattcttcaagctcctaacgaagaagaggttcccctgcttttggaaattttcggcctatgtcttacaggagggaaagaaatcaataatgcgatcatgagcagtatacaggacttggcaaaatcattctcaaattaccatgatgaagtcctggtacattttgggttgtctcttgcacttttattctatgctgagtattgaatcagtggatggataaatataacatgtaactctttgcaaaaattcattcctgattattcaatgattgttatgtaactagggtatgcagctgtagtatatgtttcttgatgccttctttccaggtgaaacgtgaagagttgcttcagttacccaaagtgccatttcttgactaaagaggaattctgacattatgagaatagatgctgaagcttgagagctgtggcagaaactaaatgagaaggag

SEQ ID NO: 1272 - DNA, 515 bp, Oryza sativa
  Clone ID: uC-osflcyp025b05b1
ttggacgcgtggggtacccctacacgagaggagattaagtgcatgaacccaaattacaccgagtttaaatttccgcaaatcaaagctcacccatggcacaagatctttcataaaagaatgcctgctgaagcagtcgatctcgtctccaggcttttgcagtattcaccatacctccggtccactgcttcggaagcattgatccatcccttcttcgacgaactccgtgatccaaacacccgcttaccgaacggccgtttccttcctcctctcttcaacttcaagccccatgaactgaagggtatgccaatggaattcctggtgaagcttatcccagaacatgctcgaaaacaatgcgctttcgtaggatggtgatttgtgaggtcagcatgaaaactagttcagaatttcttcaccgtcctccattagaaaacagagatgaaccctgcctgcagccatttgggaaagctggtgcatatggaagtggaactacattctttttgtccgggattctgacg

SEQ ID NO: 1273 - DNA, 560 bp, Oryza sativa
  unsure (1)..(560): unsure at all n locations
  Clone ID: uC-osflcyp025b06b1
tgtttgtgttcatcagcccatcactcttttctgtctatgtaggtcatggcggttgcaggtgcaatggtgatgtcaggtggcgtgctccttctcctcttggctttcacctgcgccgcctacaatgacgccggcgagctgccgccgatcagccggagaagcttccccaaggggttcatctttgggacgtcctcgtcgtcatatcagtttgagggtgccgcggcgaagggtggcagaggaccaagcatctgggacaccttcacacatcagtatccagacaaaatcaccgacaagagcaacggggatggtgcttgcaatagctaccatctctacaaggaagatgtgcgcattatgaaggagatgggaatggatgcatacaggttttccatctcgtggtcaagaattcttccaatggaagtctcagcggtggagtcaacagagaaggcatcaactactaccacattttgatcaatgaactattatcaaaagaggtccaaccatttgctaccctattccattttgatacacctcaggcactgcangataaatataaggatttctta

SEQ ID NO: 1274 - DNA, 534 bp, Oryza sativa
  Clone ID: uC-osflcyp025b07b1
tttaatgatggggtatggccctgaagacaagaatgctgtgctggagctgacatacaactatggtgtcactgaatatgacaaggggaatgcatatgcccagatcgcgatcggaaccgacgacgtctacaagactgcggaggtggcgaagctgttcggagggcaggtggtgcgggagccagggccattgccggggatcaacaccaagatcacgtccatcctggacactgatggctggaaatcggtgtttgtcgacaacatcgactttgcaaaggaactggagtaaacctgttcagaaaccggctgccagctctgtctgttgaatgactagtgaccagagataaatcttgcttggttgcaatcactgtaaatgagctcgaactccatgacccaagaaaattggtgctgaataaataacagaccatgaggtctcgtccccgtgacgaccgggaagagcacaaaacatatcttagatgaatagataacaggacctagctacctgatctgttcaactttgaaggctaatctggaataaac

SEQ ID NO: 1275 - DNA, 528 bp, Oryza sativa
  unsure (1)..(528): unsure at all n locations
  Clone ID: uC-osflcyp025b08b1
tcaacgagaaaaggcggaggcggcggcgcaaccgacaaggaaaagcaaagcgagagcaggaaaacctcgccggcggcgacaccaccaccaccagcaggcagggatggcccggtacgaccgcgcgatcaccgtcttctcccccgacggccacctcttccaggtggagtacgccctcgaggccgtccgcaagggcaacgccgccgtcggcgtccgcggcaccgacaccgtcgtcctcggcgtcgagaagaaatccacccccaagctccaggactccaggtccatgcgcaagatcgccagcctcgacacccacatcgcgcttgcctgcgcggggctcaaggcggacgcccgcgtgctcatcaaccgggcgcgcgtcgagtgccagagccaccgcctcaccgtcgaggaccccgtcaccgtcgagtacatcacgcgctacatcgccggactgcagcagaagtacacccagagcggcggngtgcgccccttcggcctctccaccctcatcgtcggcttcgacccctacaccga

SEQ ID NO: 1276 - DNA, 488 bp, Oryza sativa
  Clone ID: uC-osflcyp025b09b1
ttcgtcctgaaaaactcggtgcaagtttcaagaaagccaaatcagtcctaattgcgaaggttgactgtgatgagcacaagagtgtgtgcagcaagtatggagtttctgggtaccccacaatccaatggttccccaaaggttccttggagcccaagaagtatgaaggtcaacgtaccgcggaagcccttgcagaatatgttaactctgaagcagccaccaatgtaaagatagctgcagttccttctagtgtcgtggttcttaccccagagaccttcgactctgttgtccttgatgaaaccaaagatgtccttgtagagttctatgccccatggtgtggtcactgcaagcatcttgctccgatttatgagaagctagcttctgtttataagcaagatgagggtgttgttattgccaatcttgatgctgacaaacacactgccttggcagagaagtatggagtttctggttttcccacattgaaattcttc

SEQ ID NO: 1277 - DNA, 461 bp, Oryza sativa
  Clone ID: uC-osflcyp025b11b1
ttgacgtctctgctgctcttcttcttcctcgcgtcgttgttcgccgccgacgtcgtcgtcgcgggcggcggcggcggcggcggctgttacgacggcggcggcgacggcgaaggcggctgcggccgccacggtgacggcggccacggcggcagcgtagccaagatgccgcacgtgaaccacggcaggtacaagtgcgggccgtgggtggacgggcacgcgacgttctacgggggccgcgacgcgtcgggcacgacggagggcggcgcgtgcgggtacaaggacgccgacggttacggcgcgatgaccgcggcggtgagccccgccctgtctgacaacggtgccgggtgcggtgcgtgctacgagctcaagggggattccgggaagaccgtcgtggtgacggccaccaaacaggcgccgccgccgtggacgggatgaagggcgagcacttcgccctcaccatg

SEQ ID NO: 1278 - DNA, 503 bp, Oryza sativa
  Clone ID: uC-osflcyp025b12b1
tgcagaacgacccgccggccctcgtcccgcaggaggacctcgtggcgcagcacgtggtcgacgcgctcctcccggtgtccatggagaccgggggcggcccgctcgtcgtgcggaaggtgagctacgccgagggccggagcaacgtcatcgtcgagtaccccggcaccgtccccggccgcgccatctccttcgtcggcatgcacatggacgtcgtccccgccaaccccgacgaatgggatttcgatcccttctcactaacgtttgacagtgaagacaaggacaaacttaggggccgtgggacaaccgactgccttggccatgtggcgctggttgctcagctcatgaggagacttggtgaggtcaagccggtgctgaaacattcggtcattgcggtgttcattgccaatgaggaaaactcacttatcactggcattggtgtcgatggccttgtgaaggatgggttgctggataagctcaagaatggacccttgttttggatagat

SEQ ID NO: 1279 - DNA, 512 bp, Oryza sativa
  Clone ID: uC-osflcyp025c01b1
ttgtacttcgattgcgagatgttccctgcaaacgatgaccacccctcgcacgacgtagcgagggggcagaggttcgtcaaggaggtgtatgagacgctgcgagcgagtccgcagtggaacgagactgctctgatcatcacctatgatgagcatggtggattctatgaccatgtgcctacgccggttgtcggggttccacagcctgatggaattgttggccctgatccttactacttcaagtttgatcggcttggagtgcgcgtgccttctttccttatctcaccatggatcgagaagcgcactgtgatccatgaaccaaatgggccgcaggactcctcacaatatgagcactcatccatccctgcaacagtaaagaagctatttaatttacattctaacttcctgacaaagagggatgcatgggctgggacctttgagaactacttcataatccggaaaacacccagaactgattgtccagagaaactcccagaggtcacaaagtctctgca

SEQ ID NO: 1280 - DNA, 535 bp, Oryza sativa
  Clone ID: uC-osflcyp025c02b1
tcccattcccctcccccatcttctcccccgggttcggattcggtcggtcggttggttgatccgcaaccgatcgatcgagggggggtggcactcgcggatcctctcgtgttcttcctccagtgcgctgatctggacacggcgcgatttatagtctatcggccagatcacaaagtttttcctcgccgtacattcaaaagctttctctgaagactttctacattctgaagattatattgggaataacattttaacatgaaggccgatcggttaatgttgtccaatctcgaccatgatttgggatacctacacaagtttccctcagattttccaatgtctcatgatcttgggttgagcttgtttacgcatgccggtacaatggtgggaagttctttgcgacagcacaggcagatctgttcttcaggaaatttgattggtcaggaagcatttgatcgcctcaacaagtttgccagagctttctgctactggctttctagagtgtctaatcccaagaatttacgtaggctattgagtatgg

SEQ ID NO: 1281 - DNA, 431 bp, Oryza sativa
  Clone ID: uC-osflcyp025c03b1
tctgattggctcctgctatggtcgttgtccgcgttcacgcaggtgccacttgcccacaacgtggagaggaacatcatatcatacgtgctacctcctcccctgctgcgcattttctttcctccccggaatctgcatctccgacgacgccgaccggcagaggagcaggacggcagtagcctaatgtctgagcatgtcctacagcagatgctgctccacatggccaccgacgccggcaaggacatctgccaagaaggtcggcctcgtctaccagctcaacataccccccaagaataccggagctgacgaggagacacttcgtcgctacctcaaaggggctaggccaccacaagtgccgccgaggtgaagccagatgcgacctactccttaacggattgtgacttactctcgatcgccacggctaagatgaaccc

SEQ ID NO: 1282 - DNA, 491 bp, Oryza sativa
  Clone ID: uC-osflcyp025c04b1
tctcggtttatcgtcctcggccggtggcgggcacggatctgctatcccatctttatcttctcatggcagcacacctcagtactcctcatatggtggataccagggtacaagcaaaacaattgaaatcccaaatggaagggttggtgttatcattggaaaggcgggagaaactataaagaatctccaacttcagtcaggagctaagatccaagtgacacgagaccttgatgctctacctggctcacagacaagacctgttgaactttcaggcactcctgatcagataagcagagctgagcaattgatcaatgaggtcctggccgaggctgatgctgcttcatctggtaatctatctagccgaaagtacaatgctcctcaaccaggtgctgatcaattccaaatgaaaatagctcacaataaggttggtctggttattggaaagggtggtgagactatagaatgcatgcaagccacatctggagctcgtatac

SEQ ID NO: 1283 - DNA, 552 bp, Oryza sativa
  Clone ID: uC-osflcyp025c06b1
taaaagtgagaaggattgggttcttctgggaagaattcaggaggacagaaagatcgtgatgagtgcagaacaagccaaccttttaggagtcagtccaatgcccagaagaataagcagcagaagaaaccgtcatcatcaggtacttcctcccctgtccttaggcaaaacaaccagaaacaaaattctatggtaagcagaggaaagtcagcaccaaacaaatcagtctcaagccagcaaggtagaaagatggctggagattcctcaactgggaagctgaagaatgcaagcaaaatatctaaaggtggcagcagaaaggatattgtagaaagcataagttgtgataaggaaggttcatcgtcaaacaacaaggactttccacaaaagaagcgtttgatagagaggaactccaccaatgagaagggtatgttcgtgcctgaaaaatcagcagctagacttcagaagcaagttcaacctaatgctgtcatggatgagcacattaagtggaacaacgatagtaaagattctacagatgtagtatcatttacctttacc

SEQ ID NO: 1284 - DNA, 275 bp, Oryza sativa
  Clone ID: uC-osflcyp025c07b1
tttcaacaccagcagctgcagctgcaacacagagaaacagcaggctaaggctaagaatgttcagcggcgagggcctctcaaagacctgttgaaaccactgcaaaggtgatgtaaacaccgcacggcagattttagacagtgatatgtatgtaatacgttgtagcagtattcgaagataatatgtttagatgatacatttcattttttgagctcatatcctactgtaagacggaaaaattgatgccatgaagtgtctgtttgcgtgtgttcgaggt

SEQ ID NO: 1285 - DNA, 512 bp, Oryza sativa
  Clone ID: uC-osflcyp025c08b1
ctcgagcaaagaaggagagagcttggtgagctgcagagatggccccctccgtgatggcgtcgtcggccaccaccgtcgctcccttccaggggctcaagtccaccgccggcatgcccgtcgcccgccgctccggcaactccagcttcggcaacgtcagcaatggcggcaggatcaggtgcatgcaggtgtggccgattgagggcatcaagaagttcgagaccctctcctacctgccaccgctcaccgtggaggacctcctgaagcagatcgagtacctgctccgttccaagtgggtgccctgcctcgagttcagcaaggtcggattcgtctaccgtgagaaccacagatcccccggatactacgatggcaggtactggaccatgtggaagctgcccatgttcgggtgcactgacgccacccaggtgctcaaggagctcgaggaggccaagaaggcgtaccctgatgcattcgtccgtatcatcggcttcgacaacgtcaggcaggtgcagctc

SEQ ID NO: 1286 - DNA, 279 bp, Oryza sativa
  Clone ID: uC-osflcyp025c09b1
ttcgtccttcccttcctcatgccatcctgcgtctggaccttgctgggcgtgacctcactgacagctcgatgaagattcttactgagagaggttactccttcactaccactgctgaacgggaaatcgtaagggtcattaaggagaagcttgcatatgtggcccttgactattatcaggagctgtaggctgtatagagcatttcatcttttgagaagagctattagctgtcttatggacaggctttcttccattttttatagattggttttttttctccca

SEQ ID NO: 1287 - DNA, 534 bp, Oryza sativa
  unsure (1)..(534): unsure at all n locations
  Clone ID: uC-osflcyp025c10b1
tattaatttacctcctccacctcctcctcctccccccgatcggatcggcccggctcctcctcctccgccgccgccaccgccgccgcagataggagaagatggccgcacttgataccttcctctttacctcggagtctgtgaacgagggccaccctgacaagctctgcgaccaagtctcagatgctgtgcttgatgcctgcctcgccgaggaccctgacagcaaggtcgcttgtgagacctgcaccaagacaaacatggtcatggtctttggcgagatcaccaccaaggctaacgttgactatgagaagattgtcagggagacatgccgtaacatcggttttgtgtcagctgatgtcggtctcgatgctgaccactgcaaggtgcttgtgaacatcgagcagcagtcccctgacattgcacagggtgtgcacggccacttcaccaagcgccctgaggagattggtgctggtgaccagngacacatgtctggatatgcaactgatgagacccctgagttgatgcccctcagccatg

SEQ ID NO: 1288 - DNA, 534 bp, Oryza sativa
  Clone ID: uC-osflcyp025c12b1
tgctatcacttggatcattcaaaactggtgctattctcttgagcggactctttttctatgatattttctgggtcttcttcactccagttatggtcagtgttgccaagtcatttgatgctccaataaagcttctatttcctacaggtgatgctgcacgcccgttctctatgcttggccttggtgacattgtaatacctggtatatttgtggcacttgcgctgcgttttgatgtctcaagaggaattaagaaccgctattttaatagtgcatttttgggttataccgtgggtctgactgtgacaataatagtgatgaactggttccaagctgcacagcctgctctgttgtacattgctcctggcgtgattggttctgctgctgctcactgtttgtggaatggtgaagtaaagccgctccttgagtacaacgagtccaaagcggaagaggaggcaagcttgtgaagatgatacagatagccagcaaaacaaaaagaaagagtagggctctaacaagtcacaatcataccttgaggac

SEQ ID NO: 1289 - DNA, 539 bp, Oryza sativa
  Clone ID: uC-osflcyp025d02b1
tcgaaccccaaatctctctctcctctctctctctctctagcagcggcggcggcggcggccaggcgaggaagatgctgtgggtggacaagtacaggccgaaaaccctagacaaggtcaccgtccatgaccaggtcgcgcaaaacctcaagaagctggtggcggagcaggattgcccgcacctgctcttctatgggccgtcggggtccgggaagaaaaccctagtcatggccctcatcaagcagatgttcggcgcaggcgcggataaggtgaagatggagaacaagacatggaagatcgatactgggtcgaggaatattgagatagaactggcaatgttgtcgagcgcccaccatgtggagatgaaccccagcgatgctgggtttcaggacaggtatgttgctcaggaagtcattaaagagatggcgaagaaaggccaattgatgccaagggcacgagagcatttaaagtccttgtccttaatgaagtcgacaagctctcacgagaagcccagcatttcctttgtaggacaatggagaagt

SEQ ID NO: 1290 - DNA, 466 bp, Oryza sativa
  Clone ID: uC-osflcyp025d04b1
cgaagagcgaagctgcagcctgcagctacgcttgttcgcttgagacctagggtacgagcaacaataatagagagtgactgagtgagcgagcactgagtagcaagggcccggcacaaacaggacgcagccggcaacgtgtacgtcgaaccaaacagagaacagctagctaatcgatcggtcgccatgaccaaggacgacgccgtcccggtggccgtggcgccggcgaagcgcccgcccatcaacaagtacgccttcggctgcgctctcctcgcctccatgaactccgtcctcctcggctatgatatctcggtgatgagcggcgcgcagatattcatgaaggaggatttgaagatcaccgacacgcagatcgagatcctcgccggcgtcatcaacatctactcgctgttcggctcgctggcggcgggcatgacgtccgactggctgggccggcggtacaccatggtgc

SEQ ID NO: 1291 - DNA, 473 bp, Oryza sativa
  Clone ID: uC-osflcyp025d05b1
tgtgaattcggaggcggacatacagctcgcgatcaagtcgctccgggcatcgagcatgtcgcatgagatggtcgaggtctcaactgtcactgacaggagggatgaaggtgcatcctccaggaagttcacaagaactgctagccagcagaggagtgtgatcatagaggactcgccgccgtctcccgccagcaatggcgacaaggagaaggaagatgaggttgcggagaagagatggagggtgtttgtgtggaagactgctgtttatctcatcactcttggcatgctcattgcacttctcatggggcttaacatgtcatggacagccatcactgcggctcttgttcttctggcgctcgattttactgatgcacaggcttgtctggagaaggtgtcatactcattgctgatcttcttctgcgggatgtttattacggtcgatggcttcaacaaaactggcataccgaacacacttt

SEQ ID NO: 1292 - DNA, 549 bp, Oryza sativa
  Clone ID: uC-osflcyp025d06b1
ggacctcatggtgatgctggtctcactggccggaagatcatcattgacacttatggtggctggggagctcacggtggtggtgccttctctggcaaggacccaaccaaggttgaccgcagtggagcatacgtcgcaaggcaagctgccaagagcattgttgctagtggccttgctcgccgctgcattgtccaagtatcatacgccatcggtgtcccagagccactgtccgtattcgtcgacacatacggcactggcaggatccctgacaaggagatcctcaagattgtgaaggagaacttcgacttcaggcctggcatgatcatcatcaaccttgacctcaagaaaggcggcaacggacgctacctcaagacggcggcttacggtcacttcggaagggacgacccagacttcacctgggaggttggtgaagcccctcaagtgggagaagccttctgcctaaaagctccctttcggaggcttttgctctgtcccattatggtgttttgtttcctcgctgctcagcattgggatttttaaccctgcccccgc

SEQ ID NO: 1293 - DNA, 527 bp, Oryza sativa
  Clone ID: uC-osflcyp025d07b1
ttgaccccttcctcctccgcctcgacccgatccgatctgagccagagccaaccatggcggcgactagggtttggctctccgccctcctcctcgccttcctcctcgccgccgcccccgtcgtccaagttgccagagctcagtccgaggaagaagctgctacagctgaagttgttgatggggctgatctaggaatcgtcagtgatgatacacaagtttccagcgatgggcctctaagtccggctcctggtgtggagacagtatgtgtttttcccaaaaacgctggcaaaattgtgctagcaggtgaagaaactgaactactggttggcctgcaaaacgagggcgaatcaactttgaatgttgttgctatccattcaactctccatcttccttttgaccataagatgtatggacaaaaccttactgttcagaacttcttcaatgcatcagttcctgtctctgtacaagcaacctttccgtatacattcgccgtgagcaagttcttgcagcctggagcatatgatctagtt

SEQ ID NO: 1294 - DNA, 544 bp, Oryza sativa
  Clone ID: uC-osflcyp025d08b1
ctcaagcggcgtgcaaccatggcggccacggcctcctccttcctcgcccgccgcctcctcctcacccgccgcgtcctttcctcccccctccgccccttctccaccactgactcctcctcatcctcctcctcctcctcttcctccgacgactcccgtgcgggatctgatgcgggacccgaccccgagcagcagcaaccgccaccagcgggccaggatcagcaggccgccgcccggccgcgcgccggcgacacccgtcccctcgagaacggccttgaccccggaatctacaaggcgataatggtgcggaaggtggggcaggagccgatacagaagcggctgaggagcgggagaacggtcgtgctgttctcgctcggcaccggcggcatccgcaacaaccgccgcccgctggaccgcgaggagccgcaccagtacgctgaacgatgctccgtgcagtggcaccgcgtctgcatctacccggaacggctcggcagcctcgcgctcagcacgtcaagaccggtcttgtcttatctggagggaatcttga

SEQ ID NO: 1295 - DNA, 528 bp, Oryza sativa
  Clone ID: uC-osflcyp025d10b1
tcaatgacgcaacaggctactcgacacgcgagacgtgtttatgttggtggacttcctccaactgctaatgaacagtcagttgcaatatactttaatcaagtcatggctgctattggaggaaatactgctggtccaggtgacgctgttcttaatgtctacataaaccatgacaagaaatttgcttttgtggaaatgaggtctgtggaggaagcaagcaatgcaatggcactggatggcattttgtttgaaggggctccagtgaaggttaggagaccaacagactataacccttctctggcagctgccttgggccccagccagccaagccccaatctgaatcttgctgcagttggcttaacacctggttcagctggagggctagaaggcccagatcgtattttcgtgggtggccttccatattacttcactgaggctcaagtccggagttgctcgaatcctttgggcctcttcgaggatttgaccttgtgacggatagggaaactggtaactcaaagggctatgcattct

SEQ ID NO: 1296 - DNA, 156 bp, Oryza sativa
  Clone ID: uC-osflcyp025d11b1
tgaaagagagagagagagatggcgtcaccgtcttcgatcttttctctgtcctctacatttttcataacattcgtggtctttctgcaactccatcatctcttcttcatatctaaaaaagtaaatgcaatcactcaattaatgaccattgacttcttc

SEQ ID NO: 1297 - DNA, 535 bp, Oryza sativa
  Clone ID: uC-osflcyp025d12b1
tctagccgccccctccccgcttctccctcctgctcctcctcctcccctccgccgcacgacgggaagatcgcacgcgtgcttgtcctcgtgccagtccacggctccgcgcgcgccgtctttctcatggtgaacgttcccaagaccaagaagacctactgcaagaacaaggagtgcaggaatcacacccttcacaaggtcactcagtacaagaagggtcaggacagcctgtctgcccagggaaagcgccgttatgaccgaaagcagtcaggatatggtggtcagaccaagcctgttttccacaagaaggcaaaaaccaccaagaagatcgtgctgaagctgcaatgccaaagctgcaagcattactcccagcaccccatcaagaggtgcaagcatttcgagattggtggagacacgaagggcaagggaacatctcttttctaaattgcttgctacctactggatactatagttgttggtctactgtgcctcaatatttcaatgttattaggagctcatttaagcagaccatatcaat

SEQ ID NO: 1298 - DNA, 270 bp, Oryza sativa
  Clone ID: uC-osflcyp025e01b1
ttgtgtttgctagctcttcctgtccccttcctagcagaacagatggcggtgctgtacgtcaccttcttgaggttgattgactaaaaaccttgaaaatactccctccgtttcacaatataagtcattctagcatttcccatattcatattgatgttaatgaatctatacatatatatatatctagattcattaacatcaatatgaatatgaaaaatgctagaatgacttacattatgaaacggaggaagtagttggcaagggaggtggatg

SEQ ID NO: 1299 - DNA, 552 bp, Oryza sativa
  Clone ID: uC-osflcyp025e02b1
taccatttgctcctcccctcaagagtgcagggagttcttctccaaggcgctgttcgtgttcggcgagttcggaggcaacgactacagcttcgcgtggaaggcggagtggagcctggagacggagaagacgatggtgcccagcgtggcggcctccatggtggggggcatcaagcggctgctcgactagggcgcgcgccacgtagtcgtgccggagaacctccccgtcggctgcatcccgatcacgctcaccatgtacgccaccgaggaccgcagcgagtacgacccccccaccggctgcctcaagaagtacaacagccgtagcgctctaccacaacggcatgctccgcatcgccctagaccagctccagcgccgacgtcccgactcccgcatcgtctacgccgactactacaccccctacatccagttttgcccgcacccctcacctctatggatacaagaggggcgcgctgagggcgtgctgcggcggtgctgcccgaacaactcaacatgagtgcgtcgtgcgggctccccgtgcgacgacgtgcgaggat

SEQ ID NO: 1300 - DNA, 533 bp, Oryza sativa
  Clone ID: uC-osflcyp025e06b1
tggcgtcacccctgcgaattaactaactagctaggccggccatggagacggtggccgcggccagctacacccgcggggcggcgacgcgctcgccagcgtgctgcgccgccatgtccttctcgcagtcctacaggcccaaggccgctagaccgccgagcacgttctacggcgagtcgctgcgggttaacacggcgaggtcgctgccgtctgggaggcagtccaaggcggcgagccgggcggcgctcagcacccggtgcgagatcggggacagcctggaggagttcctgaccaaggcgacgccggacaagaacctcatcaggctgctcatctgcatgggggaggcgatgaggacgatctcgttcaaggttaggacggcgtcgtgcggcggcaccgcctgcgtcaactccttcggtgacgagcagctcgccgtcgatatgctcgccgacaagctcctcttcgaggctctggaatactctcatgtctgcaagtatgcgtgctccgaggaagtcccggagctgcaagacatgggtgga

SEQ ID NO: 1301 - DNA, 511 bp, Oryza sativa
  Clone ID: uC-osflcyp025e07b1
tataccaacccaaccgccgccgcatcgccctggttagaacgatggccgcgtcggcgctgcaccagaccaccagcttcctcggcaccgcccctcgccgggatgagctcgtccgccgcgtcggcgactccggtggccgcatcaccatgcgccgcaccgtcaagagcgcgccccagagcatctggtatggacctgaccgtcccaagtacctgggcccgttctcggagcagacgccatcgtacctgaccggagagttcccgggagactacgggtgggacacggcggggctatcggccgacccggagacgttcgcgaggaacagggagctggaggtgatccactcgcggtgggcgatgctgggggcgctgggctgcgtcttcccggagatcctgtccaagaacggggtgaagttcggggaggcgctgtggttcaaggccggcgcgcaaatcttcttcgagggggggctcgactacctggggaaccccaacctggtgcacgcgcagagcatcctcgc

SEQ ID NO: 1302 - DNA, 549 bp, Oryza sativa
  unsure (1)..(549): unsure at all n locations
  Clone ID: uC-osflcyp025e08b1
ggaatattgaacggtggaacgcgtacttacccacaagttaggtgcatgccatggcaccattcatggcgtgcgcctcgccaccggtactcacgctggccctgctcgcgtcgtgcggtgcccttctcgccacctccatgctcccggcgcgtgcgacggcgggcagctgcttggacgtcggcgacatggtgatgatggacaggttccgcgcttggcagggagctcacaaccgatcgtacccgagcgcagaagaggcgctgcagcggttcgatgtgtaccgccgcaacgcggagttcatcgacgccgtcaacctgcgcggcgacctcacttaccagctcgccgagaacgagttcgcagacctcaccgaggaggagttcctggccacgtacaccgggtactacgccggcgatggccccgtggacgactccgttatcacgacgggtgccggagacgtcgacgccagcttttcctaccgggtggacgttccggccagtgtcgactggagggcccaggcgccgntgtgccttccaagcccaaacgcaacatgcagta

SEQ ID NO: 1303 - DNA, 167 bp, Oryza sativa
  Clone ID: uC-osflcyp025e10b1
ggagaaggcggcctcacgttgcggagcgagataggcgggcggggagggggagctaatggggaacgtgacgtcgtcggtggcggcgaggctggccttcttcccgccggagccacccacgtacgagctggtggcggaggagggcggcggcggaggaggggtggtgagga

SEQ ID NO: 1304 - DNA, 531 bp, Oryza sativa
  Clone ID: uC-osflcyp025e11b1
taagaaattgatggtaacatctggcgactggcaagtccgtattcttgatgggcttcacgtaatttccaactacaaaggactgcgaagttcaagtcaagttgctgcatcattcacaccagatggagatcacattatatctgctagtgatgattccagtatctacatgtggaactatgcaaaccaaatagctcccgtcacaaaccatgtgaagactgtatggtcaaatgagcacttttcctgccatgatgtggccattgcgataccatggaatgcctctcagacaaggaattctatttcactggcttgcagtatcacttcttcacagcaagaagtcttggatgagttccacaatgaacatgatagctcatcatgttctcatactgaggattcccctgatggtgatagtctgtaccaattaccatctggaaatttcactcttagcagtgccttctttgcggaatctgctccaggggatcagcgacatggccagaggagcagttgccatcaattcgacaacacagtctaccttga

SEQ ID NO: 1305 - DNA, 167 bp, Oryza sativa
  Clone ID: uC-osflcyp025f05b1
tctcggtctacgcctcttcctctctctccgtccgcaggaggccgcagccgcttcgggatcgggaagcggaggagaggggaaggaagggagagaggcaggctacccggccgcgcagcttcccccctccctctctctctctctctccgccgcccccactcccacctacc

SEQ ID NO: 1306 - DNA, 546 bp, Oryza sativa
  Clone ID: uC-osflcyp025f06b1
tcagaaatctcaccacagataatcttgttagtttcttgagaaagatggaagctgcagatgtagccaaggaacatcacaaggaggagaaaaaggacaaggaacacgccaaagaggcgaaaccggagaaggagaagaaggagaagaaagagaagaacggcgaagaggcggcgaaaccggccaaggagaagaaggagaagaaagagaagaaggagaaggtggaggagacgacggacgtggccaagctgcgagccaagctggagaagctggacgccaagatcgacgacctcaaggccaagaagcaggagatcgtggcccgactcgtccagctcgaggagggtgcgacggcaaatgctgctgctgcagatgcggcaccacctgccagcggctgaggaggaggtgatctgggattcttaggcagttcttgcaattggacatgaggagaaattacaaacattttcagacatttgcaggatttgcagctagtgacgatctgtttctgaatggaagctttggtacagaaatttttgccttcttacgatgatgatg

SEQ ID NO: 1307 - DNA, 472 bp, Oryza sativa
  unsure (1)..(472): unsure at all n locations
  Clone ID: uC-osflcyp025f08b1
ccttctcctccggctcttcttcagtatcgaatcctctcttctcctcgtgcccaccaccaccaccgtagcaatggcgggcaacgggccgatcaacaaggaggacccgctcaactggggcgcggcggcggccgagatggccggcagccacctcgacgaggtgaagcgcatggtggcgcagttccgcgagccgctggtcaagatccagggcgccaccctccgcgtcggccaggtggccgccgtcgcccaggccaaggacgccgccggcgtcgccgtcgagctcgacgaggaggcccgcccccgcgtcaaggccagcagcgagtggatcctcaactgcatcgcccacggcggcgacatctacggcgtcaccaccggcttcggcggcacctcccaccgccgcaccaaggacggncccgccctccaagtcgagctccttaggcatctcaacgccggaatcttcggcactggctccgat

SEQ ID NO: 1308 - DNA, 544 bp, Oryza sativa
  unsure (1)..(544): unsure at all n locations
  Clone ID: uC-osflcyp025f10b1
gccgcgaacgagctcctcgccgcctcgcaggatatggcagatatgaggagctgttatgacaatctgctttctgttgcagcagcgattgcaaatagtgcatatgagttctcagaagcactgcaggaaatggggacttgtttacttaaaagagtcacaccaaacaaggacgggattaatgataaagttttgctgttgcttggaaaggcccagtttgaactgcggaagcttgtagatagttatcgtgtgcatgttcttaataccatcaccactccatcacagtcccttctcaatgaacttcaaactgtagaggaaatgaagcaccagtgtgatgaaaaaagagagttgctcgaatttctgctgaatgcacagaaagaaaagggaagatctaagaatgccaaaagtgacattggtgcgtcagagcaattgaaacaagctcaggacgattatcaagaagaagcaactctntntctattccggttaaagtcattgaagcaaggacagttcagaagtcttttcacacaagctgctcggcaccatgctgctc

SEQ ID NO: 1309 - DNA, 479 bp, Oryza sativa
  Clone ID: uC-osflcyp025f12b1
ttaaagaccacacaagtagtagaggaagcatctcgttctcatatccatgggttcgcgtctcgctacctgtgtccttgtactacttctcgtcctttcttgcgatgcacatactgccgcggcgccggctggagtcgcaggcaacctgactgcagccctggtgcatctgcacgaggagctgcaggcacaagacccgctgggctgcgacgacacctgccaagggtgccttgcgaggggtgagcagctgtgtttcggcgagtacttcctgcaccccctcggcctcgccgagtgcttcatcgagcacattgtcgtcgaccggtgcttcgggaacatgtgacgtgattgtcaccactgccatgtgtgtaccggcttcagagtgagcgtgtgcttttttttcttttcttttttttttacatttgtttgtgcgtggtttgtttgcgcgtgtgccttttttttttggtttgttgtgcgtgtgctttttt

SEQ ID NO: 1310 - DNA, 407 bp, Oryza sativa
  unsure (1)..(407): unsure at all n locations
  Clone ID: uC-osflcyp025g01b1
ttcatcttgcgcggaggccaagcgcctccggcgccggcgccgcttcctcccggcggtgctgcctccaggcgccaccgacgcttcctccccacggcgctgccccaggtgccgcctcttcctccccacgctgcgccgaccttcttcgtgccaccgccgccgcctctccgcttcgcagcgccggcgccgactccacctcaatacgccatcaccagtcgccctagcccccacgttcaccttaacagccgacctagccccttcctccgccacccgcaccagccaccctagcccccagtcccccacctccgccacccccaccttcacctacaccaccccacacctncgatgcttgctcgagctcaagacagccccaaccccttcacccccaatcccttcctaaaaaatcaggg

SEQ ID NO: 1311 - DNA, 55 bp, Oryza sativa
  Clone ID: uC-osflcyp025g02b1
tgggggtggagcggccccacgaggagcagggccgcggttaattttgagaccgttt

SEQ ID NO: 1312 - DNA, 97 bp, Oryza sativa
  Clone ID: uC-osflcyp025g03b1
tattgatgtatggttatggccggcggcgtggtgatggtgatggtggtggccactgcgattgccacccctgctcatgtgagcctcgacccctatttta

SEQ ID NO: 1313 - DNA, 538 bp, Oryza sativa
  Clone ID: uC-osflcyp025g04b1
tcagtctcccccaaatctcctttgcgtcctctcgattcctcagcaaccatgtcggcctactgcggcaagtacaaggacgagctcatcaagaacgctgcctacattggcactcctggcaagggtatccttgctgcagatgagtccactggcaccattggcaagcgctttgccagcatcaatgtcgagaacgttgaggagaaccgccgctctctccgcgagctgctcttcaccacccctggtgccctccagcacctaagtggtgtgatcctcttcgaggagaccctgtaccagaagaccaaggacggcaagcccttcgtcgatgtcctcaaggaggccggcgtcctccctggcatcaaggctgacaagggtaccgctgaggttgccggcaccaacaaagagaccaccacccagggccacgatgatcttggcaagcgttgcgccaagtactacgaggccggtgcccgcttcgccaagtggcgtgccgtcctcaagattggccccaacgagccatcgcagctttccattgacctgaatgctc

SEQ ID NO: 1314 - DNA, 497 bp, Oryza sativa
  Clone ID: uC-osflcyp025g05b1
cggttagcgagttcgcaaagaggtgcggggttttgacggtggaaattgagcatgtcgacgctgtaacactcgagaagcttgagaaacagggcatcgattgtgagcccaaagcctccaccatcatgattattcaagacaagtacaggcagaaaactcatttctcaaaatttggaattccgttacctgactttgtggaagtagatactttaagtagcatagagaaagctggggaaatgtttggttatcctctaatggtcaaaagcaagagattagcatatgatggccgtggaaatgctgttgctcacgacaaaaaagagctatcttctgttgttgcttctcttggtgggtttgagcatggcttgtatgttgagaggtggacatcttttgtaaaggagctttctgtcattgtggcaaggagcagagacggttctacggtgtgctatcctgttgttgaaaccatccacaaggataacatctgccatgttgctgaggctcct

SEQ ID NO: 1315 - DNA, 465 bp, Oryza sativa
  Clone ID: uC-osflcyp025g07b1
ttcgtccttcaaccatggccgcgcgcgtgctccccctgctcctcgtcgtcgtcgtcgccgcggccatggcgagagcccccacggcccacgcgtggggcaaggagggccactacatggtgtgcaagatcgccgagggtttcctgacgaaggaggcggcgacggcggtgaaggagctcctccccgggtgggccggcggcgagctcgcggaaacgtgctcgtgggcggacaccgagcggttccggtaccggtggtcgagccccctccacttcgccgacacccccggcgactgccagttcaactacgcccgggattgccacaacacaaacggtgagaaggacatgtgtgtggtcggagcgatcaacaactacaccaacgcgctcgaggactcattaagtccatatgatccaaccgagagcttgatgttcttggcacacttcgtcggcgacgttcaccagcctctccact

SEQ ID NO: 1316 - DNA, 466 bp, Oryza sativa
  Clone ID: uC-osflcyp025g08b1
ttcgtcctatttgctcaaaacagttgctgcaagctcaccatatgctacagcacaagatgcacggcagctgcttccccctgttgttcaattgctcaagaaatatatgcctgggaagaaggtggaagatatcaaccataattatgttgagtgcctgatgtacatttttcaccatttagcccataagacaccaaacaccacaaacagcctatgtggttacaagattgttactggacaaccatcggatagacttggagaggatttctcagaacattacaaagactttacggagaggttaactggaacagaagagacagttcgagcagtctcaaagagactaactcaggggatggcagattttaacaaggcaatatcttcagcaaagactgaagaagagaaaactaaaattaaatctgatcagcagaaatcaacaatgacaatgagggcctacaacaacatactagcaatg

SEQ ID NO: 1317 - DNA, 431 bp, Oryza sativa
  Clone ID: uC-osflcyp025g09b1
attgctgaccctccctctccaatccaagctccaacaatggctaaaccatccttgctcctccttcttcctctgctcatcttctccatcggcgcggctctcgcccgcgccgatctcatgctggacaggttcgagcagtggatgatcaggcatggccgcgcctacaccgacgccggtgagaagcagaggaggctcgaggtgtacaggaggaacgtcgagctcgttgagacgttcaactccatgagcaatggctacaagctggctgacaacaagttcgccgacctgacgaacgaggagttcagagccaagatgctggggttcagacctcatgtcacgattcctcagatttcaaatacctgctccgctgacatagcaatgcctggagagagcagcgatgatattctgccgaagagcgtagattggaggaagaaagg

SEQ ID NO: 1318 - DNA, 529 bp, Oryza sativa
  Clone ID: uC-osflcyp025g11b1
tcaggaactaatagactgtgatagatcctacaatagtggttgtggtggtgggctcatggattatgcttataagtttgtggttaaaaatggtggaattgacacggaagcggattacccatatcgtgaaacagatggaacatgtaacaagaacaagctcaaaaggcgagtggtaacaattgatggctacaaagatgtgcctgccaacaatgaagatatgttacttcaggctgttgctcagcaacctgttagtgtaggaatatgcggtagcgctagagcatttcagttgtactccaagggtatcttcgatggtccatgtcctacatctcttgatcatgctatattaattgtgggatatggttctgaaggtggcaaggattactggattgtgaaaaattcttggggtgaaagttggggtatgaaaggctatatgtatatgcatcgaaacactggtaactccaatggtgtctgtggcataaaccagatgccgtcattccctacgaaatcaagcccgaatcctcctccttcacca

SEQ ID NO: 1319 - DNA, 446 bp, Oryza sativa
  Clone ID: uC-osflcyp025g12b1
aaaaaaaaaggaaaaaaaaaacaaaacacaccaagccaaataaaagcgacaatgggatcgctcaccaccaacatcgtcctcgccgtcgccgtggtggcagcgctggtcggcggcgggtcgtgcggcccgcccaaggtgccacccggcccgaacatcacgaccaactacaacgccccgtggctccccgccagggccacctggtacggccagccctacggctccggctccaccgacaatggtggcgcgtgcgggatcaagaacgtcaacctgcctccctacaacggcatgatctcctgcggcaacgtcccaatcttcaaggacggcaggggatgcggctcatgctacgaggtgaagtgtgagcagccggcggcgtgctcgaagcagccggtgacggtgttcatcacggacatgaactacgagcccatctcggcgtaccacttcgactt

SEQ ID NO: 1320 - DNA, 485 bp, Oryza sativa
  Clone ID: uC-osflcyp025h02b1
ttgaagtttaagaagaactcactcgcaggagcaccaatggcgaattctgcgtcagggctggcggtgaacgaccagcgcaagttcaagctccaggagctgaagacgaggagggggttcaggttcatcgtgttcaagatcgacgacaaggccatggagatcaaggcggagaggctcgggcagactgccgagggctactaggacttcagcgtcaccctccccgccgacgagtgccgatacgccgtctacgacctagacttcgtgaccgacgagaactgccagaagagcaagatcttcttcttctcctggtcggctgacacggcgaggacaaggagcaagatgctgtacgctagctccaaggacaggttcaggagggagctggacggaatccaatgcgagatttaagccacagaccccagcgagatgagcctcgacatcatcagagccagagctcactgctgatcatatcatttcattatccaacacca

SEQ ID NO: 1321 - DNA, 509 bp, Oryza sativa
  Clone ID: uC-osflcyp025h03b1
tgaagtttaactcctgattctcaagataagtggtcccttgagaaggatgaaggcatggagctgctcttctcggcaggttttgagcctgatacccgtgtacactttggctgcaacacaataaccgcagtactgcgtggtggcttctgcctcttcttcttttcagcaataatgctcttggtgagctacgaggtgggcatgtgcatctatggcaagtaggcctgctggtattggagacgttaagaacatgacgttaggtaatcctatctgtatttgaggcaaactagggacctcctgctgctggcttaatgtattgcactgcatgacattacatgacctccatgtgttgaacaagggctgaggctgtttaactatagcactagcagtaccgctttgcagctcgagagagctagcagtgtatgtatgaattcctcaggtgctattcgtagtagtaagcgcgaattgattattatcagttcatgatggcgctactattcatattcatgtttctg

SEQ ID NO: 1322 - DNA, 486 bp, Oryza sativa
  Clone ID: uC-osflcyp025h04b1
tcgccggagttgagagagacgacgctgcagggatcgagatcgagatcagagaggttggcaatggcggcgcgcgtggcggttgtcctcctgctactgttcggcctcgccgccgtggcggtgacggcggcgaggatcatgcccgacgacgactgcggcgacacggcgaacgccgccggcgccgccggcgtgggggaagccaagacggcgttcggcgggagcgacggccgcggggggctcttcggcgggtacaccggcccgctcggcggcggcgccgccgggttcggccccttcggcgggttcggcgccggcggcgggccgttcggcgggttcggcggcggagttggcctcggcggcggcggcggaggattccggccgtaagacgatgactcgtaggacgacgtgtgcgcatgcgtatagtagtatagtgcaattaatgtgattccacgtgtataacgttgtggggtaaatgtgccacgtcagatatat

SEQ ID NO: 1323 - DNA, 376 bp, Oryza sativa
  Clone ID: uC-osflcyp025h05b1
ggcgtttacacgggcccgtgcggcacgcgcctagcgcacgccgtcaccgtcgtcgggtacggcaccgacgcgtcttccggcgccaagtactggaccatcaagaactcatggggccagtcatggggcgagcgcggctacatccggattctccgcgacgtcggtggccccggcctgtgtggcgtcacactcgatatcgcctacccgaccctgaccctgtgaacgaagtcaacgaacggcatgaaaagacgcgcagatatgactatatcactgtacacacaactaccctactataccgtgagtgtctgccaacgagacgtatccactatacatgtatgaattgtggaccgtgcctaaataaaatgcatgctgcgcgcgt

SEQ ID NO: 1324 - DNA, 561 bp, Oryza sativa
  Clone ID: uC-osflcyp025h07b1
ttccaactggggctttgccaggatcaagggcattggctggggctgggctggcgttatctggctttacagcattgtgttctacttccctcttgacatcttcaagttcttcatccgctttgtgctgagtggaagggcctgggacaacctccttgagaacaagattgcattcaccaccaagaaggattacggtagggaggagagggaggcacaatgggccaccgcacaaagaacacttcacggccttcagccaccggaggtcgcctccaacacgctcttcaacgacaagagcagctaccgcgagctctctgagatcgctgagcaagccaagagacgagctgagatcgcgaggctgagagagctgaacactctcaagggccacgtcgaatcggtggtgaagctgaaggggctggacatcgacacgatccagcagaactacacagtgtgaggaaccccctcggcattcaacgagagatcgccatcagcgctggagcgggaattgcaaacggcgctctggttaaggaaatttcgatgaatgattggagaacaaaaacaaaaaacatg

SEQ ID NO: 1325 - DNA, 494 bp, Oryza sativa
  Clone ID: uC-osflcyp025h09b1
gaggaccagctcctcaagagcttcctcgccgaggtcagcgaggccgaacgcgacaacgaagtgctcaggattcttggttgcttcaagttaaaccctttcgagcatcttaagttgtcatttgattcatcagcagatgaggtgaagaagcaatataggaagttgtccttgttggttcatcctgataaatgcaagcatccgaaagcacaagaagctttcgcagctctggcaaaagcacagcagctcctacttgatccacaggagagaggatatattcttgatcaagttactgctgcaaaagaagagctgagggcaaagaggaaaaaggagctgaagaaagacagcgcgtcaaagataaagtcccaagtagatgagggaaaatatgaagagcagtatgaacgatcagaagaatttcagaagcagctaataattaaagttcgtgaaattctgacagacaaagagtggcgtcgcaggaaaatgcagatgaggatatcaga

SEQ ID NO: 1326 - DNA, 538 bp, Oryza sativa
  Clone ID: uC-osflcyp025h12b1
tccagaaatttgagaagctgaatgctgctcttcgtattagttgcctcaagggttaccctgtcagggttgtgcggtcccacaaagagaagcgttcttcatatgctcctgaagctggtgtgaggtatgatggagtttacaggattgaaaaatgttggaggaagattagtgttcagggtaaattcaaggtttgcaggtatctctttgtacgttgtgacaatgaaccagctccttggactagtgatatttatggtgaccgtccgaggccactccccaaagttgatgagctgaaaggtgcaacagacatatcagagaggaaaggaactccttcatgggactttgatgagaaagaaggctggaagtgggtgaagcctccaccaatcagcagaaagcctaacctatcaggggatcctgcaactgacaaggaaatccggagggttgcaaggcgtgcccagatgtctgtgactgaaaggctgctgaaagagtctggatgttccatttgcaagcaagtgatgaaggaaccactcactactccatgtgc

SEQ ID NO: 1327 - DNA, 509 bp, Oryza sativa
  Clone ID: uC-osflcyp026a01b1
cttctaagctgttgcatgaggctggactcccagatggtgttgttaacgtggtatctggttttggacctactgctggtgctgctcttgctagtcacatggatgtcgataagattgcattcactggatcgaccgatactggaaaagtcgtccttgagttggctgcaaggagcaaccttaagtcagtgacactggagctaggaggcaagtctcctttcatcatcatggatgatgctgatgttgaccatgctgttgagcttgcgcattttgcactgttctttaaccagggacaatgttgctgtgctgggtctcgtacatttgtgcatgagcgtatctatgatgagttcgtggagaaggccaaggctcgtgctctcaagcgtgtggttggtgatccattcaagaatggtgttgaacagggccctcagattgatgacgagcaatttaacaagatcttgcgctacatcaagtatggtgttgacagtggagccaaccttgtgactggtggcgacaga

SEQ ID NO: 1328 - DNA, 474 bp, Oryza sativa
  Clone ID: uC-osflcyp026a02b1
ttgtatgctgcgcggattcagtggtaacttcacctacaacggcaagcagtacgacgcaacggccgcaccacacggtgcagactaccacaagtgcagagaagaagtagtgaagttactgaaggtgaatgcgccctgcgaaaccaagaactgcagcttcaatggcgtctggaacggtggtggcggtgcagggcaggatgacctctacgttgcgtccgccttctactacatagcctcccatgttgggttcatcaacagcgatggacccagtgcgaagcgaaccaatggaacgattaaggctgatgatcaaaaggattgtgaaatccgtgttataaaggcgaggatccatgtccgcgtggtgcatgtgcatgcatacatatgcactgaggtgatctacgaatactacttgctcgatgacgggttcagggtacatgcaaagaaggagataacgctggtagacacggtgaagcatgggga

SEQ ID NO: 1329 - DNA, 465 bp, Oryza sativa
  Clone ID: uC-osflcyp026a05b1
tttgtgcatggcatgcagcaccgacgccgaagggatcggagggctggaagaagctgcgccgtggggcggcgaggatggccgacggcgtggacgccagcgccggcggtcagccgagaagccccaccgtatacgactgggtggtgatcagctcactcgacaggtgaaggcgtgatctatctaatcgagcagctaagctctgcatccggcgagaaactgcacctgcacaatatgaagcagctagaaactgaaggcgagcaaagaagaaaaaaaacactaaattctgctctttttcagttaagtttcagctcgtcgatccagagcatgaaatgttcagtgttcagctatctgcactactacagactgccgattctgtagccaaggatgtataaacgtatgcatgcttgtactaccaccgtataatatacgtacgtgtacgtagtagatcgatgcagacaaaagtcttag

SEQ ID NO: 1330 - DNA, 473 bp, Oryza sativa
  Clone ID: uC-osflcyp026a06b1
ttccgtccgttcccttcgctagccccggcgccatgggcgtgccacccacccctccgccgggggccgccgccgccgccgtcgacgcacggccgacgtgctcggcgcagaaccaagcagacggcgagccaaacttttcttgcccttttgctcttgcagagtggagcagaggacacttgcatcttgacgaattttctcaagtcgatgggttgctgtggcagcagcactgtagacgccgaggagcacctggactacagtggcggaaatgtgactttggtaactgatcaaaagaattgggacaatacaatggaagaagtagctgagcatggcaaaacagttgtgctaaaattcagtgcaatttggtgcactccgtgtaggaatgctgcccctctattcgctgaactttcactgaagtatcctgacattggtttcgtgtccgtggatgtagacgaaatgccggagctggtgacgcaata

SEQ ID NO: 1331 - DNA, 518 bp, Oryza sativa
  Clone ID: uC-osflcyp026a07b1
ttgctcaccccacctcttgacccgccgccgccgccgccgccgcgcgaagggaagcaggaggaggagccgccaggatgccggcgggccacgggctgcgtgcgcggacgcgcgacctgttcgcgcggccgttcaggaagaaggggtacatcccgctcaccacctacctccgcacctacaagatcggcgagcacgtcgacgtcaaggtgaacggcgccgtgcacaaggggatgccgcacaagttctaccacggccgcaccggccgcgtctggaacgtcaccaagcgcgccatcggcgtcgagatcaacaagcaggttgggaaccgcattatcaggaagaggatccatgtccgtgtggagcatgtgcagccatccaggtgcactgaggagttccgcctgaggaagatcaagaacgaccagctcaaggcagatgccaaggctcgtggtgaggtcatcagcacgaagaggcagccgcagggtcctaagcccggcttcatggctgagggtgcaacactggagact

SEQ ID NO: 1332 - DNA, 317 bp, Oryza sativa
  Clone ID: uC-osflcyp026a08b1
ttgcaaccacaacgagcatctggagctccgcctctgcgtgggagggaaacaccaattaatctacgacgacctgaacctgcagtacaccgactgagaggtgacggcgcacctttccgcttcccaggcttcccttgacgatgcaagtaatacgggtgctgctggtggtggacctcggcgaggggtgtcgcgcgaacctggcgccaccagtctccccgccggccgtggacccgaggctcatacgaactggaggggctgtcgcactggcgcggaggctgttgcgcgtgttgatgatgatgactcatcggggacttcagcga

SEQ ID NO: 1333 - DNA, 479 bp, Oryza sativa
  Clone ID: uC-osflcyp026a09b1
tcttttcttgcaccagcgccagcagcagcaccagcaggttcacctgtagaggagaagaaggtagctgaaccaactccagtaccagtaacggtaggagcagcagtggcatcatcgccagcggatgacaacaacggtgcagcaccgcaaccagagcccttcgtcgctgcgaaatactcctacggaaagaaggagctgtcggactcgatgaagcagaagatcagggcggagtacgagggattcggaggcagcccggacaagcctctgcagtccaactactttctcaacatcatgctcttgatcggagggctggccttcttgacgtctctgctcgggagctgagagcgatggtctgatgacctcctctgacgagtgttttgagttgttctgcctgtgctaagatttgcgtgtttctttttccatgttttgagtcgttatttcgtaaataaattgaggtaaaaggatgggcatgtgaatggatt

SEQ ID NO: 1334 - DNA, 393 bp, Oryza sativa
  Clone ID: uC-osflcyp026a10b1
ttttcctatcgcccaaaatccgaggttggagcttttgctcgggcgattgattttggaatcggcggaggggatgtcaggaccactcgatcgatttgccaggccatgttttgaaggttttacgcataatgatgaaaagaaagagatcagatctgacgcagacaactccgaaggagagaagaagactaaaattggttctttcaagaaaaaggcgattaatgccgggaacaaattcaggcattccctgaggagaagaagcaaaaagaaaaatgaacctcggggttccattgaggacataagggatgttcaagatcttcaagctgttgatgcatttcgacaatgtttagttgatgaggaccctgtgccgcaacagcatgatgattatcacacaatgct

SEQ ID NO: 1335 - DNA, 216 bp, Oryza sativa
  Clone ID: uC-osflcyp026b01b1
tcgtttacacagatgcgtaggcgcgccgggggaggttttgagacaccaccggtcgcctggtcctgctgatattgggctgcatccattgcatagcacgacggctggggtgatcacggaaagaaaatcgtcaggattagtgcgtcgagccaacagcatgttcggttagggcaataactccctggccacgttactgggaggaccatctgctattgattc

SEQ ID NO: 1336 - DNA, 282 bp, Oryza sativa
  Clone ID: uC-osflcyp026b02b1
actttttgtgtatgacatcctgaatatccgcttgggagggtttcttccaggatgccttggaacacccaccaaaggcattcaagggaaccttgaacgacaagcagcctggctcctacagaagtgtgcaccaactcaaaggggagcagaagaacatgtcggtaacccaaggcgggacacacgggacgcaaggccctgatgaccttgacgggataagcccactctcaagggtatatcaaaaaaagctctaaaagtcccgtccgagaccgatgcatcgacaaacat

SEQ ID NO: 1337 - DNA, 393 bp, Oryza sativa
  Clone ID: uC-osflcyp026b04b1
ttggtctcgtgggtttgaagcctcctcctccagggtgctgcattagcacaggatgcagcgtgatggaaggcaagagccggcgaccggagataaccgtcgtgccggctgcaggtggaggggccgccgccgtcgttgatgcggtgaaggcggagaacaaggatcccttcatcccgggctcgccgtccctggcgagcggcgccggcatggagagcctgagccgccatgagggcgtcgtcatgttcctggccgcgtggaagctcgacgcgctctgtcaggagtccggctcgttgccggcggtgatgagggcacgcttaccctacttctgaatttctgaatttctgatgaagccatgagctttctgacatctttatacgtgtgtgtgtgtgtgcgtgt

SEQ ID NO: 1338 - DNA, 441 bp, Oryza sativa
  Clone ID: uC-osflcyp026b05b1
tgttttgggttcttgacagaagtcatgtttcatgggggcaggcctttgtccctcaggggctctctcaaggcgcttgaagctgatatccaccatgccaacaccctggcgcatgctatacacagggcctatgggggtgcctgtgtgcagatgaggctgccttacagctccatggctccaatcatccttaacctcatgcagtggatggattgcagctgctccctttcatataccctccctagttacctaggtctccttgaggttcttgcgtacaaggtatatgttgatgaggatgcctctatatccaccaacattgaaaggagagcatgcctcatggaattctatgctgtaatatatccattctggcaacaactcgaggggaatttgatggagaaagactgcaaccagaaaggatggtgcaaggaggcggtctccggtggcggc

SEQ ID NO: 1339 - DNA, 539 bp, Oryza sativa
  unsure (1)..(539): unsure at all n locations
  Clone ID: uC-osflcyp026b06b1
tgttcacccaccaactgagagctgagcaggcgagcgagcggacatggcagcatcgctccaagccgcggccaccctgatgcagccggccaagctcggcggccgggcctcctccgccgcgctgccatcgcgcccgtcttcgcacgtcgccagggcgttcggcgtcgacaccggtgccgccggcaggatcacgtgctccctgcagtccgacatccgggaggtcgccaacaagtgcgccgatgccgccaagctcgccggcttcgccctcgccacctcagctctgctcgtctcgggcgccagcgcggagggcgtgccgaggaggcttaccttcgacgagattcagagtaagacgtacatggaggtgaagggaaccggcacggcgaaccagtgcccgacggtggagggcggngtcgactccttcgccttcaaggccggcaagtacaacatgaagaagttctgcctggagccgacgtccttcaccgttaaggcggagggcgtggccaagaacgcgccacccgagttccagaagaccaagctcatga

SEQ ID NO: 1340 - DNA, 488 bp, Oryza sativa
  Clone ID: uC-osflcyp026b10b1
tttttcgttcatgatgagggaagcccttccaacaactaatatcagtaactaccctgcagcagctggcgaaaggatagaggatgtagcagcagggcagccacagcatgttcgcattgggctgccaccatggatgctgagccacatcaacggctaaggaggcttcagatccataccagtaatcacaagttgcaacctgacccggtccggtcgcctgctgctctggtttactactagtactattgtcatcttgcggttgcgagacgaggaaagcattttagccctaaattcagcattagtagcaagctgcaatgtgtatattttggcttcgtccagcaccgtcttcctcccaccagtaatttacccatgtaatatatgcgagtagcatgaacaaattttcccgtttccaaccatctccattggtgtcatgtgtgacttaaatagcgaaatttcagcattgtgcatagtgtgattactggtagataataaac

SEQ ID NO: 1341 - DNA, 528 bp, Oryza sativa
  Clone ID: uC-osflcyp026b11b1
tttccgtttaacccgtcacctagggcctcttcgagttaagcgcgcagaggccaagggagaaaaggaaaaaaaaacgaaaaaaaaagagaaaaaaaaaaggacgcgccaccgcggcgggagaggcgtacggcgcaccggccggccgtcggatctgcgccggcgacgcgcgcccccgccggatccccgctgccggaggtggacgaggcggcgctccggccatttccccgcccgcgagcgcccagatccgtcccgccggatatttgctgctcaattatgcgataaagtgcttccagttgacgcggagttggtggagacgccttgctctataatctattctccattgctcagcagtgatcagttggaagattctgcctttcttcctcttgctgcctgtttgtttgcttccttggtggagtagacgagaggaggagggcatgaagaaaaggtagcttttttcagccactctatgtccagggacttggattgtactgttcagacacagatggccgttgcagtactggatcggag

SEQ ID NO: 1342 - DNA, 92 bp, Oryza sativa
  Clone ID: uC-osflcyp026b12b1
tactctttgacagcaaaccctctggccacgaagccggggtgagtttctcggcggggcgtgtaatcaacgcgcacgtcacccagttcatggat

SEQ ID NO: 1343 - DNA, 517 bp, Oryza sativa
  Clone ID: uC-osflcyp026c02b1
tcattaagcgagagagatctctcccgagctcgatccggtccaccgcgacacgaagacgaccatggcgatggctcgctcccagcttgccgccgtgttcctcgccgtcctcgtctcggtggcgccgctcgccggcgcggcggacaacctccaggacgcgtgcaaccggacgctgttccccaaggtgtgcatccaggcgctgacgacgaacccggagagccggacggcgaacgcgcggcggctggcggagctgtcggtgtacgtggcggcggaggtgggcacggcggtggcggcgttcgcgcaccacgagctgaacggcgtgaaggaggacgccctgttcaagtgcgtggacagctgctccgacgacatcgaggaggcggtggcgcacctcagcgcgctcacccgcgagctcaccgacgccaagttcctcgaggtcaaggcctggctctccgtcacgctcgggggctcctccacctgcgaggacacctgcaaggacgccctcatcagcgagatcaagacg

SEQ ID NO: 1344 - DNA, 307 bp, Oryza sativa
  Clone ID: uC-osflcyp026c03b1
tgctctaggtcgtctctctactacgtgaacgtgacggggctcagcgtggggcacgcgtgggtgaaggtccccgcgggatcgttcgcgttcgacgccgccaccggcgccggcacggtggtggactccggcacggtgatcacgcggtggacggcgccggtgtacgcggcgctgcgggaggagttccggcggcaggtggcggtgcctagcgggttacacgttgctgggcgcgttcgacacgtgcttcaacaccgacgaggtggcctgcggcggtgcccccgcggtgttctgtgcacatggtcggctgtgt

SEQ ID NO: 1345 - DNA, 458 bp, Oryza sativa
  Clone ID: uC-osflcyp026c04b1
tttccccacacacaaagcgagcgactcggcggcggcggcgatggccacggtggcgatggacatctccaagccccctcccgcggcgggcggcgacgaggctgcggcggcgaaggggaggggcggcgccggaggaggaggtggggaggggctgcggcagtactacctgcagcacatccacgacctgcagctccagatccggcagaagacgcacaacctcaaccgcctcgaggcccagcgcaacgacctcaactcccgagttagaatgctcagggaagagctgcagttgcttcaagaacctggctcatatgttggtgaggtggcgaaggtcatgggcaaatcaaaggttctagtgaaggtacatccagaaggcaaatatgtggtggatatcgataaaagcattgatattacaaagatcacaccttcaacaagagttgctcttcgaaatgatagctatatgc

SEQ ID NO: 1346 - DNA, 461 bp, Oryza sativa
  Clone ID: uC-osflcyp026c05b1
tctagtgtctgaaggaatcagatgacccaaacaatagattggaatggacatttactaacactactgagggatctatatgcggattcaatggcgtggagtgctggcatcctaatgaaaacaagattctttctcttcatcttggcagcatgggtcttaagggccatttccctgatgggcttgagaattgcagcagcatgacttcactggatctctcgagcaacagccttttcggaccaatcccagctgacatctcaaaacagctgccattcattacaaaccttgatctatcttataatagtttttcaggggagatttcagaatccctagctaattgtacttatctaaatattgccaatttgcaaaataacaaattaactggagcaattcccgggcagcttggtattctatctcgcctaagccagtttaatgttgccaacaattaactgtcagggccgatacct

SEQ ID NO: 1347 - DNA, 459 bp, Oryza sativa
  Clone ID: uC-osflcyp026c09b1
tgtcctggtccccaaggacgtgaacgccgcggggggcactcatcaagacgaagcgcaccatccagttcgtggactggtgccccacggggttcaagtgcggcatcaactaccagccgcccagcgtcgtcccggggggagacctggccaaggtgcagagggccgtgtgcatgatctccaactccaccagcgtcgtcgaggtgttctcccgcatcgacatcaagttcgacctcatgtactccaagcgcgccttcgtccactggtacgtcggcgagggcatggaggaggtggagttctccgaggcccgcgaggacctcgccgtgctggagaaggactacgaggaggtcggctccgagttcgacgatggtgacgagggtgatgagggtgaccagtactagagaggttcagggttcttgcctggcgccttggcaatgctcgattactgctgctttcctatgatct

SEQ ID NO: 1348 - DNA, 417 bp, Oryza sativa
  Clone ID: uC-osflcyp026c11b1
ccctcccccaaattccccaactccgggcgtgcggcaagccaagaaacccccaacccaactccggcgatggcgtcgcagctggtggaggagcaccggtcgggcgcggaggtccacacggggcacgagctctgcgagcggaaggcccgggagctgctggtggagctcggcctccccgacgggctcctcccgctgccgtccctggaggaggtcgggtacaaccgcgccgccgggttcgtgtggctccggcagacccaggcgggcggcgccacccacacgttcgacaccatcgggaagcaggtgtggtacgcgggcgaggtgacggcgttcgtggagcaggggcggatgcacggcgtcgccggggtgaagagcaaggagctcctcatctgggtctccatctccgagatcgttctcagcccc

SEQ ID NO: 1349 - DNA, 391 bp, Oryza sativa
  Clone ID: uC-osflcyp026c12b1
ttttctttttttgtagagacactatagagtgatcttgctcagctttgtgacaagggcattgatgcacggattgcatctggcggtggcaggatgtatgttaccatggaccgctatgagaatgactgggatgtggacaaacgtgggtgggatgcccaggtgcttggcgaagcaccctacaaagtccaaaatgcagtcgaagcagcgaaaactctaagagcagagaccatggctagtgatcagtatttgcctccatttgagatcgtggatgagagtggcaaatctgttgggcctgttgtagatggtgatgcagttgtgactatcaatttccgagcagatcgtatggctatgcttgtcaaagcactagaggatgcagactgtgacaaatttgatc

SEQ ID NO: 1350 - DNA, 409 bp, Oryza sativa
  Clone ID: uC-osflcyp026d02b1
ttgtttaggagcttgagcttggagagagacaacagtggcggttcaggctcttctctctgggaggcagctgctggggaggccattgcaatcttcagtctccaggtcttcttcctccaggaaggcacccttcatggtcagggcagaggccactccccctgccaagcaaggtgctgacaggcagctgtggttcgcatccaagcagtccctgagctacctggatggcacgcttccgggagacttcgggttcgacccgctggggctatcggacccggaggggaccggtgggttcatcgagccacggtggctggcctacggcgaggtgttcaacggccggacggcgatgatgggcgtcgtcggcatggtcgccccggagctcctcggcaagctgggcctcgtccccgccgagacg

SEQ ID NO: 1351 - DNA, 523 bp, Oryza sativa
  Clone ID: uC-osflcyp026d03b1
tgttccccggcctgatccaccaccaccgcctcctggacgccgatgtcggcggcggcggcggggggagcagcgccggcctggtactgacggccgaccccaagccccgcctgcggtggacggccgacctccacgaccgcttcgtcgacgccgtcgcccagctcggcgggcccgacaaagcaacacccaaaactattatgaggacaatgggtgtgaagggtctcaccctttttcacttgaaaagccaccttcagaaatacagattaggaaagcaatctggcaaagagatggcagagcaatcaaaagacgcttcttatattttgggagctcaaagtggaacaaatctatctcctacagttccaactccagatttgaaagagagtcaagaactaaaagaagcactcagagcacagatggaagtgcaacgaaaattgcatgaacatgtggaggtccagaggcatgtacagatccgaatggaagcgtaccaagactacatcgacacgctactgaagaggcatgcacatag

SEQ ID NO: 1352 - DNA, 505 bp, Oryza sativa
  Clone ID: uC-osflcyp026d05b1
tcactgttggatcctacttgggcttctcaagacaatacatctacagccataggtaacatcgttgcccttcttcactcgtttttcagcaatcttccacatgaatggcttgaatctacccataccgtcatcaagcatcttcggccagtcaactcagttgccatgttaagaattgctttccgcatattgggtcccttgttgcctcgtctagcctttgctcgacctctgttcatgaagaccttggctttgctgttcaatgtgttgggggatgtattgggaagaattctcaggcttcacctcctgtggaggcatcggaaattgctgacataattgacttcttgcaccatgcagtcatgtatgagggtcaaggaggtcccgttcagagcactagcaagcccaaactagagatattgacgttatgtgggaaagtaatggaaattctgaggccagatgtgcaacatcttctatcccacctgaagactgatccaaactcttcagtttacgcagc

SEQ ID NO: 1353 - DNA, 505 bp, Oryza sativa
  Clone ID: uC-osflcyp026d07b1
ttaaaaaaggaaaaaaaaacaaaacacaccaagccaaataaaagcgacattgggatcgctcaccaccaacatcgtcctcgccgtcgccgtggtggcagcgctggtcggcggcgggtcgtgcggcccgcccaaggtgccacccggcccgaacatcacgaccaactacaacgccccgtggctccccgccagggccacctggtacggccagccctacggttccggctccaccgacaatggtggcgcgtgcgggatcaagaacgtcaacctgcctccctacaacggcatgatctcctgcggcaacgtcccaatcttcaaggacggcaggggatgcggctcatgctacgaggtgaagtgtgagcagccggcggcgtgctcgaagcagccggtgacggtgttcatcacggacatgaactacgagcccatctcggcgtaccacttcgacttctccggcaaggcgttcggcgccatggcttgcccggtgaaggagaccgagcttcgaaggccg

SEQ ID NO: 1354 - DNA, 462 bp, Oryza sativa
  Clone ID: uC-osflcyp026d08b1
tgtcttgccggttaatattcgatcgatcgatcatgtggtgtacgtgggcgttggggcgggtggtgttggcggtggtgttcctggttgcgttggctgccggcgatgcagcgccgcccaaggttcaccggaaccacggcaagttcacggcggggccatggaagcaggcgcacgcgacgttctacggcgggcgcgacgggtccggcacgctggacggcgcgtgcgggtacaaggacacgtccaaggaaggctacggcgtgcagacggtggcggtgagcacgccgctgttcggcgccggcgccggctgcggcgcctgctacgaggtcaagtgcgtggacagcccctacggttgcaaggtcggcgccgcccccttggtcgtcaccgtcaccaacctctgcccccccaatcccggccagtccaacgacaacggcggctggtgcaacccgccgcgcgagcactttgacc

SEQ ID NO: 1355 - DNA, 520 bp, Oryza sativa
  Clone ID: uC-osflcyp026d09b1
ttccaatagaaaaaagattcttagcgtaatactggccaaagaagatttggctgatgatgtagatctggaagctctggctaacttgaccgatggttattcaggcagtgatatgaagaatctgtgtgtaactgctgcacattgccccataagggagatccttgaaagagagaagaaggagagagcatcagcagaagcagaaaataaaccattacctccccctcgttctagcagtgatgttcgttccctaagaatgaacgatttcaaacatgcacatgagcaggtatgtgcaagtataacatctgattcgagaaatatgactgagcttattcagtggaacgatctatatggagaaggcgggtccaggaagaagacttctctaagctacttcatgtagcctatcgctagcctatgtacatacaacataagcattagcgtaaagcggtccgggagatagacaagacatagctcttctgctgttgctcatgtataggtgatacccagtcaaattagtcgttgatct

SEQ ID NO: 1356 - DNA, 447 bp, Oryza sativa
  Clone ID: uC-osflcyp026d11b1
ttgagcttaaaaccctagagccgctcctcctgctcctcctcgcctaccccgaaacccaaatcccccccaaggcggacgcgcccgcaaagggtcgagcgcgctcatggctcgcgtgtacgtggggaacctggatccgcgcgtgacggcgcgggagatcgaggacgagttccgcgtgtttggggttctgaggagtgtatgggttgctagaaaaccaccaggttttgcctttattgactttgatgaccgcagggatgcagaagatgcaattcgtgatttagatggcaagaatggatggagggttgagctgtcaaccaaagctggtagtggtcgtggccgagatcgttccggtggttctgacatgaagtgctatgaatgtggcgaacctggtcattttgcacgtgaatgccgcttacggattggttctggaggccttggcagtggaagacg

SEQ ID NO: 1357 - DNA, 313 bp, Oryza sativa
  Clone ID: uC-osflcyp026d12b1
ttgcgaaggcgagcttcgacttgcggcaaccagtcaaggatttgcggaagaaggtgcgcaggggttttctgaaggggaggcttcagtcatcgcagcagccgcagcagcagcaacatcagaagcagcagaaggcggcgcagctggtgctatagcaaacaagattagtgagcgagatcagatgggggcattggggagcctagattaatccttattttctgcttcagatttgtacaggaaaaaaaactatttattcggagcaataataagagagtaattgggggtggcctaattagcaaaatcccatttgccaatc

SEQ ID NO: 1358 - DNA, 523 bp, Oryza sativa
  Clone ID: uC-osflcyp026e01b1
ttttatttccgttgcctttgatgagaccacaacctgggttgatgtcgacaagctgttcaaggtgttcaatggtggcaagccagtgaaattcactgctgaatccctcgcaccagaggtctcaagctcaattccgagtagccttgtgcgcaagagcccctacttaacccacccgatctttaacatgtaccatacagagcatgagcttctccgctacctgtacaagttgcaatccaaggtcctttcactgtgccacagtatgatccctcttggttcttgcactatgaaactaaatgctacagtggagatgatgcctgtcacctaccccaactttgcaaacatgcacccatttgcacctactgaccaagccgcaggatattatgaaatgtttgatgacttgggccatctgctgtgcaagatcactggctttgattctttctctttgcaaccaaatgctggtgcttcaggggagtatgccggattgatggttatccgtgctaccacagggtaagaggagacttccacc

SEQ ID NO: 1359 - DNA, 513 bp, Oryza sativa
  Clone ID: uC-osflcyp026e05b1
tttctttgtcgccgacgacctcgccaccgaccccgccgtcgtatcgcgaggaagagactgggggagccccggtggcaggagcggtgggaggggatggcgatgcatacggggttcgccacctccaaggtcctcatcctcgtcggcgcagggttgacgagctcgatcgtgctgcggaatggccggctatctgacgtgttggcggagcttcaggagcttatgaaaggtgtaaaccaaggagaaggttcgagtgcctatgacatcgcccttcttcaatctcagattcgaaatttagcacaagaagttagagatttgactatatcaaggcctattaccatattgagtggcaacttcgactctggaggcagtttatccttctacatactgcctgcagctgcagttggagcaatgggttactgctatatgtggtggatgggattgtccttatcggatgtcatgtttgttaccaaacgcaacatgaccaaagctgttgagagtatgtcgaagcaattggat

SEQ ID NO: 1360 - DNA, 521 bp, Oryza sativa
  Clone ID: uC-osflcyp026e06b1
ttagtaatgttcatagcttggagctgtttgatgaggtgcataaggtccagtggatgggtgcggtgtctgtgggtatactcgcacatactggaacagcagaccagccacgacttagtgaagaggacaagcagaatatgcctcttccagttcaaggccctgcctgcaactcttctgggcacctagccgggtggcacacatttaactcattgccttttgccgggaaaactgccactgttgttggagaggcagcaccggttctaccaaggggtttggagtgggctggttttgtgttgaactctaggattctttggaaagaggcggagggaaaacctgattgggtgaaggatctggatgctgtgggtgagaacggcgaggaaatcgagaacccccttattttgttgaatgatccatcctccgttgagccattggggaactgtgggaagaagatcctcttgtggtggctccgtgttgaagcgcgagctgacagcaaatttcctcaggggtgggtaattgagccacct

SEQ ID NO: 1361 - DNA, 519 bp, Oryza sativa
  Clone ID: uC-osflcyp026e07b1
tgctcagcaagcaacaccatgcaggtgacctgcaggagaagaacagactttctcgaatgttggagcataagaacattttccaggaaagaattgtccaacgtcgtgaagctgagtttagtcgtcttaagaaagagagggatgaaaggactagtcaattgatatcatcaaggaagcgtgaaagggatacagtgcggaagttaatgtactatcttaacttagaagagcagcgcctccaaaggctccgtgaggaagaggaagctagaaaacgtgaagaggaagagaggagaaagagggaagagactgagaggaaggctaagctggatgcaattgcagccaagcagctgcagagagagagggaactagaagagaagaaggaaaaacagagaatggaagctctcatgggaagaggagctggagctgctgagcctgcacgcactcctgatgctgcttccgttgcacagccagctcagccggtagctgcacccgctgctgctgctgcccgtgctgcaccagctgctg

SEQ ID NO: 1362 - DNA, 416 bp, Oryza sativa
  Clone ID: uC-osflcyp026e08b1
tgccttttgcctctctttctactctctttgttggccgtctctcttatatccctcaatttaaccatcgagggcggccaaaaaaaagagagaaaggaagagcaaaataacacattacaccatggcgcgattcgtcatcatctccgtcgtcgtcgtcgccgccttcgccgctgccgctgtcgttgaggcccgggttggacctatcgacgtcgctccgaccaacctgatcaccaacccactcggtgccatcatcgacaatggccgcaagatcaccggcgccgtcgtcgacgagtgcgcctggacctgcgatcatgtcgcggcgggtaacaagaagatgtgcaacacgctgaggaagctgccgggggtgagctcgccgaaggagctcctgacggcggcggtgaagctgtcgatgaggaagg

SEQ ID NO: 1363 - DNA, 486 bp, Oryza sativa
  Clone ID: uC-osflcyp026e11b1
tgcttttgcagatcgagcgaaccttcaacacaaaccggccagcttgttcctctcctctctctctctctctctctctctctcggtcgcagccagctaacttcgagtgtgaagaacactcacgctagctagctttctcaaggccacatacgctagctccgcctccacgcgcggcgtacgtctagtttgattgaggctgaagagagtgcgtgtttggtagaagaggctagctgttgacgatgtcgagcagaaggtcgtcgcgtggctccatctcggaggaggaaatcaacgagctcatctccaagctccagtcgctgctccccaactcacgccgacgcggctccagccaggcgtcgacgacgaagctgctgaaggagacgtgcaactacatcaagagccttcaccgtgaggtggatgacctcagcgaccggctgtccgacctcatggccaccatggatcacaacaccccggcgcggagatcatccgcag

SEQ ID NO: 1364 - DNA, 521 bp, Oryza sativa
  unsure (1)..(521): unsure at all n locations
  Clone ID: uC-osflcyp026e12b1
ttgtcttgcagaatccgcgtcctctcgccgccgccggcgtccgtcgcggcgcgcgtgcgtgcatgttccgatccatggggacggggacggggacgaagccgccggcgatgacgacggagcggtacgagttcgggccgctcgtcggcgagggcaacttcgccaaggtgtacctcggccggcacagggccaccggcgaggaggtcgccatcaaggtgatggacaaggagaagctcgtcaggctcggcgccacggagctgatcaagcgggagatcgccgtcatgcagcggctgcgccacccgaacgtcgttcgcattcacgaggtcatggccaacaagcgccgcatctgcgtcgtcatggagtacgttcgcggcggcgcgctctaccgttacttacgcaggggccccagcggcggcgccgccggcctccgggagcacgaggcgcgccggttctttcagcagctcgtcttcgccgtcgtctactgccactcccgcggngtgttccaccgtgacatcaagctggac

SEQ ID NO: 1365 - DNA, 562 bp, Oryza sativa
  Clone ID: uC-osflcyp026f01b1
gccgggccgcgggccgggaccggaacggacaggccgacccacgcacgcttacttttggacctgcgagagatggaggtggggggggctaacgacggcatcctccccctactcctccgtcaccacgcgtccctgcggggctgcctctccctctcctgcggcggcagcccgccggagctgggcggcggcggcggccaccgcggcaggaggaggaggagaggagggtcgcggctacgagagggtgcccatggacacccccggcgcctaccgcctcgtcgaccgggccaccggccgcagcgtcatcgtgtggggcggtaccgacgacgtcagcatgccctcccccgcggtgctctccacgaccacgcgcgtccccgaccgcccaaaagaaaatgggagaagtacaagtattggaaattttggcagactcaaggcacagaaagttaaagttttagcaaggagatcagctcaccttaagagagaggattctgggcgcataagcaccagccggttcagtgaatctccgtctgatgagtctgacgaagatggcactcattttgaagagata

SEQ ID NO: 1366 - DNA, 417 bp, Oryza sativa
  Clone ID: uC-osflcyp026f10b1
tgtcggcgagaatggattccaggatctcccgggtctgcttcctcgtcctcgcttcctccttgctgcattgcgccagatctgatggaagtgattcacagcttcttaagggcatcaacagctacagagcttccctcaaagtccctgcgctatccgagaacaagaatgctgcctgcttggctgagcagctagcacagcaattcaaagaccaaccttgcaccaacaccaccggagcaaacactgtccctggcaccgagcagcagttccccgactacccaaagtacctcgaccattgccatctcaacgcgtcggtgaccggagacggtcaggtgatgccggcctgcgttcctggacttgtacctgatgtggttctgaccatctaccccaagtcacagttcaacctgtatttgaatgacacca

SEQ ID NO: 1367 - DNA, 522 bp, Oryza sativa
  Clone ID: uC-osflcyp026g05b1
tatcgttggtcatgcgatgcatattgtgttgccaagtatggtcagaaatgggtgcggacacgtactattgttgacaacttgaaccctagattcaatgaacagtacacatgggatgtcttcgaccatggaacagtgctcaccattggtttatttgacaactgccacatatctgcagacagcaaccacagtagttcccccggccatatggacaagcccatcgggaaagtgcgaattcggctttcaactcttgagactgggagggtgtacacacacacgtatccattacttgtcctccacccatcaggagttaagaaaatgggagaactccacctggccatcaggttcacagccacatcccttctcaatgtgctcttcacatattctcgggccctcttgaccaagatgcattacgcgcaaccactgtcaatagtgcagcaggaaatgctccgccaccaagctgtgcaacttgtcgcacagcgtctagggcgcatggagccaccagttcgcagggaagttgttgag

SEQ ID NO: 1368 - DNA, 254 bp, Oryza sativa
  Clone ID: uC-osflcyp026g06b1
tctcctactcgcttactcaatcgctcgaggattctgggattggattattgggttggatttcgagccgctcaatggcggcagcggcgcaggctccggcggcggcgaaggtggtggtggcgacgtcgccgagggcaggcggaggcggaggctgcggcggggacaggaaggtggcgcctcctgtggtggcggcgctggccgtccacaaggcccagagcgagatgcacgtcctggcggtggacgacagcttcgtggac

SEQ ID NO: 1369 - DNA, 420 bp, Oryza sativa
  unsure (1)..(420): unsure at all n locations
  Clone ID: uC-osflcyp026g07b1
tgttcttcccctactccgagagtccgaggtcgatcgccgatgtcgatcgggcgctcgctcgcctgcctgatccggatccggcaggccggactgcgtaggtgtgccgcggcgagacgtgcgcgcggcggcgccgatcgacgacccgatcgatggacttcacctggtcctacttgcacgccttcggcaaccccgacttcgccgcggtcttctccggcggcggcagcgcgcaagccatccggccgggcaccaccaccagcagcagcggcggcgcgaaggcggtgaacgttggcaggggcggcgcggcgaggcaaggcgccccgtccgtgttctgcgtccaagacgcngaagtggaggaggcgcaccacttcctcgacgagtgcaccctgtgtcgcaagggcctcgccggcgacatcttcatgt

SEQ ID NO: 1370 - DNA, 524 bp, Oryza sativa
  Clone ID: uC-osflcyp026g09b1
accggtccggaacggcaggcccggcccaacccaccttttcttctatgcagtgcccacagtttgctggctgggtacatttagtccccagttcgattggatccaacgatgaaagaagctattcaaagagactgtacacgctatgctcctggcattgagataatcagtgttcgcgttacaaagccgaacatacctgatagcattaggagaaattccgaacttatggaggaggagcgtacaaaggcattgattgccattgagaagcaaaaggtagcagagaaggaagcagaaacgcagaagaaaattgcactatctgaagcagagaagaatgcacaggtgagcaagatcctcatggagcagaagcttatggaaaaggacagctccaagaggcagcaacagattgataatgaaatgttccttgcccgagagaaagctcttacagatgcgaactattacaggataacgaaggaagcagaggccaacaggcttaaacttacaccggagtaccttgagctgaggttcaatga

SEQ ID NO: 1371 - DNA, 329 bp, Oryza sativa
  Clone ID: uC-osflcyp026g10b1
gtggctgcccgccgccgtctcgctcctccgctcgtcgtcgctgcatgtcgccggtgacgccggcggcggcgtcgcctccctctccgtccggcgctacgacgccatcttcagcttcggcgactccttggccgacaccggcaacaaccccgtcgtcttcgactggtactccatcttcgaccccgtcacccgccctccctacggctccaccttcttcggccggcccaccggccggaactgcgacggtcggcctcgtcttgacttcgtcgccgaacgcctgggcctgccgttggtgccgccggtcttggcttacaacgggagcttccggcacg

SEQ ID NO: 1372 - DNA, 517 bp, Oryza sativa
  Clone ID: uC-osflcyp026g11b1
ttttcctcgcagagatggcgcacgccttcgccggcgggacctccgccatctgccgttgcccccacgaccccggccgagccgccctcgtatcccgccctcgccaccgcctctgtgtcctcgcgtcgtccctacccacgccggccatcgagggccagggcgtcgagttgtcggtgacgactcggcgggggcgggtgctgccggtgctcaaggactgctccctccgcgtccctccgggtcagctctggatgctcctcggccccaacggctgcggcaagtccacccttctcaaggttttggcaggatttttaaatccttcttctggtacagtgtatattaacaggccatgcagctatgtcttccaaaatcccgatcaccaggttgtgatgccgacagtggaatcagatgttgcatttggtcttggtaagctcaacctttcgttagatgaggttaggtcaagagtatcacaatcactggatgctgtgggaatgttaagctactctcaaaggccaatccaaac

SEQ ID NO: 1373 - DNA, 413 bp, Oryza sativa
  Clone ID: uC-osflcyp026h01b1
ttgtttccgtgctgctcctgtctctcgcagggagcgttggatgaggaggacgactgcttggtgcgcttgatggggctcgccggagaggccgctggctcgcctggcagtggcggcgggttcagtgcaaatggtaaatttagctatggttatgcgagctctcctggaaaaagatcctccatggaggacttctatgacaccagaattgatggtgtcgatggagagaccgttggactgtttggtgtctttgatggtcatggtggagctcgagcagcagaattcgtcaagcagaacctcttcaccaatttaatcaagcacccaaagttattcagtgatacccagtctgcaattgctgaaacttacactagcacggactttgaacttctgaaagctgaaaccagccacaatcgagatgc

SEQ ID NO: 1374 - DNA, 485 bp, Oryza sativa
  Clone ID: uC-osflcyp026h02b1
tgttcctctctctcctctccccttcgtggcgggggcggttgctttggctgcgtgactaggaggagcaatggcgatggcctcctgcgcctacgccccagcgggcggcgttggcacccactccgcgccgggcaggatcaggccgccgcgcggcctcggcttctccaccaccaccaccaagtcgaggcccctcgtgctcaccaggcgtgggggaggcggcggcaacatctccgtggctcggctgaggtgcgcggcgtcgtcgtcgtcggcggcggcgaggccgatgtcgcagccgcggttcatccagcacaagaaggaggcgttctggttctaccgctttctctccatcgtctacgaccacgtcatcaacccgggccactggacggaggacatgcgggacgacgccctcgagcccgccgacctctacagtcgcaagctcagggtcgtcgacgtcggcggcgggacggggttcaccacgctcgggatcg

SEQ ID NO: 1375 - DNA, 466 bp, Oryza sativa
  Clone ID: uC-osflcyp026h04b1
tgtccgtatcgggagggagggtgagagtacgtgcgggcgtccggaggtctcagcgcacgcccgcggccgggccgtcgcgccgatcgcgatggggtcgtggcggcgcaaggcctacggcgccctcaaggactccaccaaggtcggcctcgccaaggtcaacagcgacttcaaggagttggatattgcaattgtgaaggccaccaaccatgtagaatgccctcccaaggacaggcacgttagaaaaatattcgtggcgacctccattaaccgccctcgagcggacgttcaatactgcatctatgccttgtcaaggagattgtccaagacaaagaattggacagttgcattgaagacattgatagtggtacataggctcttgagagaaggtgatcctacattcaaagaagagttcctggcctactcatacaagggaagcgttttgcagagagcaaacttcaaggacgat

SEQ ID NO: 1376 - DNA, 523 bp, Oryza sativa
  Clone ID: uC-osflcyp026h05b1
ttttcttttccactcgacaggctgcacctaccagcggactgtttactgtagctctgtggggactgcgcgtctcacccacgccaagatgctaggcgagccggggtcaactgaggaggagtgcctgctgttgcgaaagcgtgcgacaggccacgggagagcaaaagatcgtctccctgttcagcaagaagcccgccctgaagcccaagcccgtcggcgtcacctcctcgagccccgacatcggcgatgagctcgccaagtggtacggccctgacaggaggatcttcttgccggagggtctcctggaccgctcagaggtgcccgactaccttaacggagaggttcacggagactacgggtacgacccttttggcctcagcaagaagccagaggacttctccaagtaccaagcctatgagctgatccatgccaggtgggcgatgctcggcgccgctgggttcatcatacccgaggcctgcaacaagtttggcgcatactgcggccccgaggccgtctggttaaagac

SEQ ID NO: 1377 - DNA, 491 bp, Oryza sativa
  Clone ID: uC-osflcyp026h07b1
ttcgtgctttccattgttgaggaagaggcatggggtatgtttgcttatgcactattgatatctgagcaacaaggaatatattcggaagctgcaattgtaaaggatgaagttattgctggtagaaaaattgataaagtaacaccaatcaactcgatcggagatactcctgtgccatctgcaattttatctccaaatgattctttagaacaagatcataacctatcaagaaatgtgtcatcgttatcatccgaggaatcaacatctggattttatgattcttttctatctgccttaaaagatctgcatcctgaattttggttgaataatgaaaagctaactttgaagagcaaatacactgttctgtgtatatatgcaaaacaattctacgatcttcggaagattttgtgtacatcagagattgcctatattttatctataagccgttgtaaagaatggaatgcacaagggtgaaagagcaaggcttttttttt

SEQ ID NO: 1378 - DNA, 484 bp, Oryza sativa
  Clone ID: uC-osflcyp026h10b1
ttttctctttcctatagtgatgttgaccggaagcggtttttcttcaacaagaaaatgtattatacacgacaaaggacacaaaggagcacattcaagcggaggaagatgtttgatcgtcattcagcccaagtttctgaagaatatgcaaaggcaaacacaaagtttgctgcaagagactcgcacgcggtttctttggaagcaaacaaggggaccaattcaacagcattccagaaatcacaagagtcaagtgactgccacgtaaaacttaggatcaagtctttcaaggtgcctgaacttctaattgagatcccagaaactgcgactgttggttcactgaagaaaactgttctggaggcagtaaatgccatacttggtggtggtctgcgtgtcggtttgctccatcatgggaagaaagtcagagatgattataaaaccttaatgcatgctgggaattttcatgatgaggcactggacaacctgggtt

SEQ ID NO: 1379 - DNA, 376 bp, Oryza sativa
  Clone ID: uC-osflcyp026h11b1
tttcctgtgaaaattcctggcaggcactaagtgtctcatggccattgggagatcttggctactgagatatcattgacatttccgaatgccaaaacatatattgtgcgaaatggatcatgtcaaccattggggctgtaaatactgtgcaaaaaatgaatcatgtcaagcacgttttgatgtggaggttgtgaccagcaaagggttcatcaggttagtcaatgtctgtaggaaaggaaaatgatgttaaaatgttgttgccgaaatgtattgggagcatgatcagtaaagcttgggatgacataatcaaatagtacaaacgataggaccatgtttgcctgtgcttttgcaacaaatcaatcacaaatactgtttctca

SEQ ID NO: 1380 - DNA, 526 bp, Oryza sativa
  Clone ID: uC-osflcyp026h12b1
tctgtccgggttaggcgactcggcggcggcgggcgctgcttccggttccggcggccgttccggccggctccggcggcctttccctcctggtcttcctcgctcgtgctcccaagatgtctaggttgttgagcctagacacccatccccgccatcgtcgctttcgttcgtctccagatcctcctcttctcccttcccccccagatctgcctgcttccctagcctctcccacccttgagttcttcccccccactagatctgcacagtcacctccctcctctttgccttccagctcttcggctgtaccctctgtggcattctctctgggggagctggtgacagatcgagcagctgtcaacggtgcgttcgtcactcgcgctgcccaagatcttggcccgttccctcaatgcctcggtgcgccgaaagctctctctcacagttccaagcgtctttactcccaggtggttggcggcgtcgtctcaatctccagctgcttgtcttaatgccttcatccctcgcagcccttctc

SEQ ID NO: 1381 - DNA, 518 bp, Oryza sativa
  unsure (1)..(518): unsure at all n locations
  Clone ID: uC-osflcyp027a02b1
tcgtctctaatatgcgctcgaaagatcacacaaccaaaaaccaaaaacagcggatctatagagaggaatgaaggcactcagcgtgcccgagatatcgtcgtcaaaaaaattgagcgatgaagtcactcaatcttctgaagccagagaggaagagagcgacgaggacatgaaagagccaattacaagattgttcgtgcatggtttcctgtcgctagtgatatcagcggtcggcaactatataattcctcttctaacaagtcacagcgagcccgagcaaacggctaaacggtccgcgatgccaatagctgttttctgtctcggcatgatcactcctgtgattggaaatggcatgcgtttccggatacttcaacccaaacagcaatatggctccggggttgcgttgcacatcaccactgcccgcatagtgctgatttcttacgtgttcctgctcctgattaacacanggtatatcagcctcgccgtgttcccagctatcatgattgtgttcatcggcgctc

SEQ ID NO: 1382 - DNA, 543 bp, Oryza sativa
  unsure (1)..(543): unsure at all n locations
  Clone ID: uC-osflcyp027a05b1
ttgtaggcgctgtgcggcaagacggaccacgccgacctgtgcgagtcctccatcgggcagctgccgcagcagccgccggcgcagctggacgacatcggcgtcctcaggctctccatgaacgcgctgcgcgccaaggtgcaggaggcgatcagcgtggcgacgaacaggatgggggcggcctccggggacgaggtgtccaaggacgccatgggcgactgcctccagatgtacgacgacatgaaatccaacctggactcggcggacgcggcgctcaagaagggggacaaggacacggcgcacaccatgctcgactccgcgcgcaccgacgtcgacacctgcgaggacggcttcagcgagcgcgaggggctcaagccgatcatgggcgacctcgacaagatcctcgccgagctctccagcaacaccatcgccattgcctncgccataattgagtgactcatctcattntctctgtctttctccctctgaccggcctggacaaacaactgaagtgtatgtagtatgtaccgagtgttcaaaagctga

SEQ ID NO: 1383 - DNA, 388 bp, Oryza sativa
  unsure (1)..(388): unsure at all n locations
  Clone ID: uC-osflcyp027a06b1
tgatcgattctttccacggtttccatactacacgaatggatcgacacgtcttgcagggcggcagcgccaacaacntcaccaaagcacttggttgttcatagtatatcaaccaataaaaattggatgcaaacggatattattaacaagatatttactatccacgctattatgagcatggtgcacatcgaatagcacttctacctatgcttatgaacaaggaatgtaagcatgaagtgaaagcagctcttaaatgacagtataaacatgaggcacaaatttatctaccatccggaagaaaaaacgtatcctctaaatatacaaggcaactagattgcggaccaacactcctgcttataaaacacgacgatttgccataatccaattattt

SEQ ID NO: 1384 - DNA, 519 bp, Oryza sativa
  Clone ID: uC-osflcyp027a07b1
tcgcgttcctgctcggcgtcctgctcgcaggatccctgtttgcattttctgttgcgaaggaggagaccaagaagctcggtaccgtgatcggtattgatcttggtacaacctactcgtgtgtcggtgtgtacaagaatggtcatgtcgagattatcgccaatgaccagggtaaccgtatcacaccctcatgggttgcattcaccgatagcgagaggctcatcggtgaggctgccaagaaccaggcagctgtgaacccagagaggaccatcttcgatgtcaaacgtctcattggaagaaagtttgaagacaaggaagttcagagggacatgaaacttgtcccctacaagattgtgaacaaggacggtaagccctacattcaggtcaagatcaaggatggagagaacaaggtcttcagccctgaggaggtcagtgctatgatccttggaaagatgaaggagactgctgaggcataccttggcaagaagatcaacgatgctgtcgtgactgttcctgcgtact

SEQ ID NO: 1385 - DNA, 509 bp, Oryza sativa
  Clone ID: uC-osflcyp027a09b1
ttgatgactactggcatcactggcaggaggcatttgcaggctctctgataggtcttacagacgcatcattttgttatctgcaattcttcccatatccttatgacgcagacgctttctggcctcatgcatacaccttccagctagcggaggcctcgcgcaacaataacaccgcaaactcctacagcgtgagaccgaccgggttcgagactgtcaatgtcccagaagggcatggcgggattgctctgagagacaccaacctagaggccggcaggagaccgtgaaatctgagacctggactggagaaaatctaccaaataccatgacaatatcctgactttacgagttcgaattttgtccactcgacagacgatatggtaggctgtgttcatatatgtattacagttgtatctagatctgctggttcatcacttctgaattggtctcttggcttccatggcttttgctctctgctaatgggatggctagccccagaagcattggctgtaaac

SEQ ID NO: 1386 - DNA, 507 bp, Oryza sativa
  Clone ID: uC-osflcyp027a10b1
tttcttatctgccttcctacctcctgtgggcttttgtttggcgtgcgctccaccacccaaaaaaaggacaggttccacataaagaccaacgagtaaaagcttgatctgtccggtgccaaccaatcaacaaacaagtttcatgtctgatctcgacgttcagattccatctgccttcgatccgtttgacgaggcaaatgctgaggactccggcgctggccctggagaagacgactacgtgcatgtgcgcatgcagcagcgcaacggcagaatgagtataactactgttgacgcctgaaagaaggagtacagttacaacaagatcctcaaggatctgattaaggacctctgctgcaatggcactgggcccaagatccagagcttggccaggtcattgagcttcaaggagatctgcagaagaatgttgccacgttcctaagttaagctgtgattgctaagaggacaacatcaagattacgggtttaagctgcctaagatgctcgatgcata

SEQ ID NO: 1387 - DNA, 386 bp, Oryza sativa
  Clone ID: uC-osflcyp027a11b1
tcggtcggatctaattaatttacctcgtgggccttcttctcctccccccgatcggatcggcccggctcctcctcctccgccgccgtcaccgccgccgcagataggagaagatggccgcacttgataccttcctctttacctcggagtctgtgaacgagggccaccctgacaagctctgcgaccaagtctcagatgctgtgcttgatgcctgcctcgccgaggaccctgacagcaaggtcgcttgtgagacctgcaccaagacaaacatggtcatggtctttggtgagatcaccaccaaggctaacgttgactatgagaagattgtcagggagacatgccgtaacatcggttttgtgtcagctgatgtcggtctcgatgctgaccac

SEQ ID NO: 1388 - DNA, 381 bp, Oryza sativa
  Clone ID: uC-osflcyp027a12b1
tatggagaccccttcaaatctcaccaacagggtatcttcagttcacctgtgaaaaatcaatggatattcagtaaccagagcacttggttgttcagagtatatctcgacgaggagattggctgcaggtggatatgattgggaagttctttactatccacgctattatgagcatggtgtgtattggatagcacttcgacttatgcttatgagcaaggaatgtaagcatgaggggaaggcagctcttaaatgtcagttagtacatgaggcacaaatttatctgccatccggaagtaaaagtgtatcctctaaatatacagggcaacgagattgcgggccagcgctcctgcttgtaaaacaagatgatttgccaggatccaatta

SEQ ID NO: 1389 - DNA, 505 bp, Oryza sativa
  Clone ID: uC-osflcyp027b02b1
gccgggcgacaccaccttcaccaccatcgcggcggcgctcgagaaggtccccgaggggaacaccaagcgcgtcatcctcgacctcaagcccggcgccgagttccgggagaagctcctcctcaacatcactaagccctacatcaccttcaagtccgaccctgccaacccggcggtgatcgcctggaacgacatggctgccaccaggggcaaggacggcaagcccgtcggcaccgtcgggagcaccaccgtcgccgtcgagtccgactacttcatggcctacggcgtcgtcttcaagaacgacgcgccgctggccaagccgggtgccgagggtggcaggcggtggcgctccgcctgttcggcaccaaggcagccatctacaactgcaccatcgacggcgggcaggacaccctatacgatcacatgggactccactacatcaaggatagcctcatcatgggcagcgtcgacttcatctttggattcgggagatcactctacgagggct

SEQ ID NO: 1390 - DNA, 498 bp, Oryza sativa
  Clone ID: uC-osflcyp027b03b1
ttttttcgcgtgggagaaaaccttggccctggaatagttgtgttcttctctgaaacctttttagagaggtgagtgcttgttcatcagaagcagagagacaagatgtataacgctccaatggcacaggacatgtcctactatgaacatgtgcagaggcgccatgaggagaagggttgcctctatgcatgcatcttcactgcactgtgctgcttctgctgctacgagacctgcgagtgctgcctcgactgcctctgctgctgctgcaactaggctgccatatcaagccatagcaagaacatgatcaagatgaggatggagatcgcctccatctctcttacccctgagatttcataatttatcagcccgttgtcatcatgtaaaattaataaacatgtagtagatggaaactttgtcagaatcgagcatttgtgttctgaaaaagaggactattgtaagaaacccagaatacttgtatctgaagtgctttctatgcgtgtg

SEQ ID NO: 1391 - DNA, 527 bp, Oryza sativa
  Clone ID: uC-osflcyp027b05b1
tatagctgctgatcttggatgccacctagttcaaggatggcgccgccgccgctcgccggcgtggtggtggtcgccgccgcgctcctgctcctcctgccggaggccgccgagccccgcactctcctctcgctcgacgacttcggcgccgtcggcgacggcgtcgccaacgacacgcaggccttggtggacgcctggagcgccgcctgcgccaccggcgaccacaccttcctccacgtccccgccgccaagtcctacctcgtctggccggtcaccctcgccggaccttgcagggaggagatcaagctcttcatctccggcaacatcgtcgcgccggagagccccgacgagtggccggagggcggcggcggcggcggcgaatggctccacttcgtcggcgtcagcgacctgacgctgagcggcggtggcgtcatcgacggccgtggccaccggtggtgggcccggtcgtgcaaggcatagcacaacgcgaccgagaattgcactacccaggctgctccaaaggcgctgca

SEQ ID NO: 1392 - DNA, 521 bp, Oryza sativa
  unsure (1)..(521): unsure at all n locations
  Clone ID: uC-osflcyp027b07b1
tgatttttgcttattgctctgatctggaaatacgacttctcacccttcatggtccttatcattgccatcctgaatgacggtactatcatgacgatctcgaaggacagagttaagccttctcccttgccagacagctggaagctgaaggaaatcttcgctaccggtattgtgcttggaagctaccttgctctgatgaccgttattttcttctgggccatgcacaagacagactttttcacggacaaattcggtgtcagatcaatcaggaacagtgaacatgagatgatgtctgcactgtacctccaagtcagtattgtgagtcaggccctcatcttcgtcacccgttctcgcagctggtccttcatcgaacgccctggtcttctcttggtcactgcattcatgcttgcacaactggttgcgacattcctcgctgtctatgccaactggggctctgccaggatcaagggcattggctggngctgggctggcgttatctggctttacagcattgtgttctactt

SEQ ID NO: 1393 - DNA, 517 bp, Oryza sativa
  Clone ID: uC-osflcyp027b08b1
ttagccctagccctcgccctcgcctcccggtcccgcctccccgccgcgccgccctcgtcaccgccgcgcaggaccctcggtggcggcgggccatggcgtcgctggccgtctcggcgtccgcgtcggcgtcgggggaggaggtgacgcacctcgcgcagcgggaggcggcggagatcgacgagcagctcatgggcccgctcggcttcagcgtcgaccagctcatggagcttgcggggcttagcgttgcggcggcggttgcggaggtttacaagttgggtgaacatacaagggtgctagtaatctgtggtccaggaaataatggtggcgatggtctggtagctgctcgtcatcttcatcactttgggtacaagccttctgtatgttatccaaaacgcacgcccaagcctctgtattctggcctttgtactcagcttgaatcactaacaatccctttcgttcctgttgaagacctacctgcaatttatcggaggagtttgacatcattattgatgcaatg

SEQ ID NO: 1394 - DNA, 508 bp, Oryza sativa
  unsure (1)..(508): unsure at all n locations
  Clone ID: uC-osflcyp027b09b1
ttccaaagattcttatcgattgaagaaaaaaaaaagccggagaaaaggatagagagggaaagcaaccagccatggagtcgctgactctccgggcatcgccgtcaacggccgcgccgttgcgccgcgtccccgggcggcggcacgcggcggtgtccgtccgcgcctccgccggcgccggcgagccggacctctccgtgcgcgtgaacgggctgaagatgcccaacccgttcgtgatcgggtcggggcccccgggcaccaactacaccgtcatgaagcgcgcgttcgacgaggggtggggcggcgtcatcgccaaaaccgtatccttggatgctgagaaagttatcaacgtaacccctcgctatgcccggctcagggcggaccccaatggatctactaagagtcctatcatcggatggcagaacattgaacttatcagtgatcggcctctagaaactatgctgaatgaattcaagcaactgaagaaagagtatnctgacaggatactcat

SEQ ID NO: 1395 - DNA, 501 bp, Oryza sativa
  Clone ID: uC-osflcyp027b10b1
tcgacggggcaaggtccgaaaccttgcctgctttctctcgtccgatgctgtcgccactgcgcttgcattgcggggattgcattttgtccagcttcaatgccggagagactgtgcattgtcacagagggctttggtgcaatgtggctggtgtgagcttcgtggtgccaaggattctgaaccattgttgtctgtcaatttcttggcagtcccttcttacttccagattttgcacttgttaatagcactcgagtcaatgtatcttccagctgtgattcgtacgagaatgcatttggttggtggagctgaagaaatttatcctcgcaccctattggaggaggattctgaatctctgagcactggggatactgatcctgctgttgacctgtgtagcaacaaactttgcagtgtggctcaagattatgtgccccttgaagagattgcaagagtggtggtccatggtctgaggctaaagaagcatcaaaggaagagaagctctatgcg

SEQ ID NO: 1396 - DNA, 519 bp, Oryza sativa
  Clone ID: uC-osflcyp027b11b1
ttctcttctcgccttctccctcggcgccgtccggggccgcgttctcctcctcctcgccgccgaggtcgccttcgtcgccgccgtcgccgccctcgtcctcaacctcgcccacacccacgagcgacgctccatgatcgtcggtatcctctgcgtcctcttcggcaccggcatgtacgccgcccccctctccgtcatgaaaatggtgatccagactaagagcgtggagtacatgccccttttcttgtccctggcgtcactggtcaacggcatctgctggactgcctacgccctcatccgcttcgacctctacatcacgatccccaacgggctgggagtgatgttcgcggtggcgcagctgatcctgtacgccatctactacaagtcgacgcagcagatcatcgaggcgcgcaagcgcaaggaggccgaccatgtcgccatgaccgatgtcggcgcgacttcgccagaacaacccctgctccgtgccgccggcgcgcggcaacgggcgttctagctacgccg

SEQ ID NO: 1397 - DNA, 450 bp, Oryza sativa
  Clone ID: uC-osflcyp027b12b1
tcgcgttcctgctcggcgtcctgctcgcaggatccctgtttgcattttctgttgcgaaggaggagaccaagaagctcggtaccgtgatcggtattgatcttggtacaacctactcgtgtgtcggtgtgtacaagaatggtcatgtcgagattatcgccaatgaccagggtaaccgtatcacaccctcatgggttgcattcaccgatagcgagaggctcatcggtgaggctgccaagaaccaggcagctgtgaacccagagaggaccatcttcgatgtcaaacgtctcattggaagaaagtttgaagacaaggaagttcagagggacatgaaacttgtcccctacaagattgtgaacaaggacggtaagccctacattcaggtcaagatcaaggatggagagaacaaggtcttcagccctgaggaggtcagtgctatgatccctggaaaga

SEQ ID NO: 1398 - DNA, 344 bp, Oryza sativa
  Clone ID: uC-osflcyp027c02b1
gctggcgctacgaaaagctgagcttgttcaccaaaggcctcaagaccatcgtgaagcatggcctcgacaccggcggcaaaaagggcggcatggacctgaacaagaaatagatcaaatcatgatgatgatgatgcatacatacataggttttatcatcaatagccagcatgtgctgaatataccagagctagtatgtgagacagtattaaaggcatgcatgtcgatgatggagtttattgctaagaactacagtatgcatacataggcggcggtggacggcttcgtttccttaaatttccttgtatacaacggtggttatggaagtgcggatcgaattgttcgct

SEQ ID NO: 1399 - DNA, 535 bp, Oryza sativa
  Clone ID: uC-osflcyp027c05b1
tcatatcgacaaatatgaagtgtctaacaccacggtaagttacaatgaaactattcttccacattaacaggcagttagggttatttcttctttgatatactgcatttgtctccatgggtacagccttgtacatacacaactgttaattggaaagtcgcccacttttctcttatgcatgtgccagataaactagagtaatggtgtgcacttgcgctgtacattaagcatataaggctggtcaacttgggccaagagtagcttctgcattatttcctagttacttaataaagatataccaggtgctttggtttatatactacaatggggtggttgtggacctgttttgctattgagaactgggcgtagggtctcacaaactagacacgtgatttagtttccatcctaccaaaccaacattgcacgtgtaataaatcaaataggctgaatctatttttaatcattttattagcagctattcttttgagacacctttataggatatcagaaactagaacaacccaaatggtcaaaatat

SEQ ID NO: 1400 - DNA, 499 bp, Oryza sativa
  Clone ID: uC-osflcyp027c07b1
tgagcaaccctagccgctttccccatgtggtcctcccagaactagtatttggccaccccgaatcccttccatggtaggacttccgtttgattccgggtcgaatccgtcgcctacgatgccggaacggtgaggttttgcctccctttatatggacaacacgcgtttgttttttctgttgcgcaggtttcagatcttggatggacttgctcatccttcggcggccatggatctatcggcggaagctgatgctgctgctcgtcctcgcgttcggggagtcagatctggagccgatctgacctcttagaggtccggatggggcatgctccgtacgagctggcgtggatgaagcggcggtgcgagggaggaggctggctcgcacctggatcctctccatcggggccttgcgcgatgatgtctctttgtatcgataattattcgatgaacttgtcgtaattatgagatctaagagatgttggtcgagggagccgtgtgctgagat

SEQ ID NO: 1401 - DNA, 517 bp, Oryza sativa
  unsure (1)..(517): unsure at all n locations
  Clone ID: uC-osflcyp027c09b1
tgacctgctcgatccgatccaatccgctcctctccagtccagatcggaaggaagccaggaatggggcacccccacccccacccttacgcgccggcggagcttcacctcccgggcttcgtgcctctccaactgtcccaggcccaaatcctcgtgccctacctcgccacctccctcttcctcctcctcgccgtctggctcatctccgggagatgcagtcgtaggctttccgacaccgaccgctggctcatgtgctggtgggccttcaccggcctcacccacattatcatcgagggaacctttgtctttgctcctaatttcttctccaaccaaaacccttcttacttcgatgaagtttggaaagagtacagcaaaggtgactccagatatgtcgccagagaccctgctactgttacagttgaaggaattacagctgtcttggaaggccctgcttcactccttgctgtctatgccatcgcatcgggcaagtcctacagccatatcctncagttcactgtct

SEQ ID NO: 1402 - DNA, 476 bp, Oryza sativa
  Clone ID: uC-osflcyp027c10b1
tgcaaagctcccagccatggatgatctgtctgctcgccctctgcttgattctgttgtaatctctgccactggtgaaattgagagaaacagagagcgcttctctgctcgttccctcgtggcctggcaagtgggggctcaggccggaaaggtggagctcaacacgtttgcggatgatgtccgttcggctttcagcatcaggcgtgctgacatccagttcaccaagttccatccagaagatttcttcatcacctgctccaaccagagtgaccgagatggcatccttcgtcagccaaggctcgccactgtttcgggtagagtgtacctctttcgtccatgggatgagagcctccatggtactgaggcacgcttcaggttccgcgctcgtgtctgcattgagggcctccccatgcatggccgcacagatgaagcagctgccaaggtgatcggccgcatgtgctctattcattatattgaag

SEQ ID NO: 1403 - DNA, 507 bp, Oryza sativa
  Clone ID: uC-osflcyp027c11b1
tattcaatgccattgagtgccctattagcatgattcccctgcctgcgagattccaggttctacgtgtgttagcgctggaaggttgtgatgtcacaggaggctgtaaactgaagcatcttgggaagctgcttcagttgaggtaccttgggctgagaaatacacgtgttgttgagctcccaagcaaaacactgcgggatctcgttcacctgcaggtactggacgttagggacactgacttggtggcactgccagcgacagttagcgaactaagccaattgatggccctgcgctccaacggcagcacaagaatgctggccagtgttgggaagctgacgttcctgcagcaactgcagctgagcctatctgccgagagcttgcgaagtttcgctctggagctgtgcaaactgaccgacctaaggatgctcgagctcgacattgatgtgtttgggatcgagatggttgagcgcacggcctccctcggcgctctggtggagtctatccacaccc

SEQ ID NO: 1404 - DNA, 391 bp, Oryza sativa
  Clone ID: uC-osflcyp027c12b1
ttgctgatcacgcttggatagttggggctgacttccattatgctggagattttgaacctcctgaggctgttgatatatctcctaatcctggacgaacagacccgatgtatgttgtccagtccagaaagagaatagcttgattaacatcataggttctatacagattttgtgtaatgcacaacgtgatggcaatttttctactggtcactttcgaaacgtaaatatgtagacagatctggcagagtctccgcttgtctgcttgtgtgtctgcttgccttgcaataaaccacattaatacatagcagctttgtgatagttttatcaaagtatttgtagttttatgaaatttatttatttgttcagtaccgtcgtagttgaatcaagatcacct

SEQ ID NO: 1405 - DNA, 513 bp, Oryza sativa
  Clone ID: uC-osflcyp027d03b1
tgctaagttgaatacagtatctgctgtgttttttaggacaagttgatactgtggaggagatgaagaggttacttgttcgtgggctgttttcttctccatccaggggtttgttgggcaaatctcctgtcaggcctgcactttgcaacgatgctcttctctccaggttcctctcaacggggaaagatgagaacacagtgaccgaaatcggagagaaggcaagatcaacagcggaacaattcctcaaggtggccaaggagaagactgacgaggtaagcgagaaaacaaaggaaacgatgcacgaaacaaaggaagcagtggtcggggagtcagatgacgagaaggagaagttcaagcagagggttgaggaggggaggtaccatcagaattaagtggctagtgctcaattatactccatcttgtagcttcagacttcagtgatggcctctgtcaaaagtcctagaacctgcagattgtccagtactactaggcttggcatgtactaggtagtatatg

SEQ ID NO: 1406 - DNA, 477 bp, Oryza sativa
  Clone ID: uC-osflcyp027d05b1
tgtttcacacatttatgtgcatatgtatagggggatttttttatgtatctattcaggctatcccagcacttaatgtggtgtcagaaacttatgctacaaatcatggtctgaatcaagtaaatgcaaatcattttggagctctgaagcatcaaggagatcagactcaatctcttttggcgcctgatgtagattctcaatcagatcaattcataagttcttcggtgaaatctccaatggatggtaacacatctattcctaatgaggtgcctgctaggcagaacagtcttggactgtggaagtactcggatgatgacagtcctggtttaggagatcatccaagttcaggcccacagagcttctgtccagtgaccaatgaaagactattagaaatcaatgagatctccccagaatgggcttactctacagagactaccaaggtcgcggcgattgggaatttctatgagcaatacaagcatt

SEQ ID NO: 1407 - DNA, 488 bp, Oryza sativa
  Clone ID: uC-osflcyp027d07b1
tgtccaggaacgcaagagagtgatggagcggactggtgagatccggtgcgccatggaccacatcctcgaggccgagaggaagggcgagatcaaccacgacaacgtcctctacatcgtcgagaacatcaacgttgctgctatcgagacgacgctgtggtcgatcgaatggggaatcgcggagctggtgaaccacccgagcatccagtcgaaggtgcgggaggagatggcgtcggtgctgggcggcgcggcggtgacggagccggacctggagcggctgccgtacctgcaggcggtggtgaaggagacgctgcggttgcgcatggcgatcccgctgctggtgccgcacatgaacctcgccgacggcaagctcgccggctacgacatccccgtcgagtccaagatcctggtgaacgcgtggttcctcgccaacgaccccaagcggtgggtgcgccccgacgagtttaggccggagaggttccctgaggagg

SEQ ID NO: 1408 - DNA, 508 bp, Oryza sativa
  Clone ID: uC-osflcyp027d08b1
tgtcctctcatctggctatggtgagcctcccaaggatccagtagcattgatggaattctacatgaagaaagctgcacaggaagaacggaaaaggccaccgaaacaatcaaaagatgaaatgccaccacctccttctcttcaagctccttcttccaagaagggacatcacatgggcgacttcattcctcaagaagaacttgaaaagtttatggcacgttgtaacgatgctgctgcacaaaaagctaccaaagaagctgcagagaaggctaagattcaggctgacaatatcggacacaaacttctgtctaagatgggatggagggaagctgagggtcttggcagtgagagaagtggacgtgcagatcccattatggctggagacgtgaagaaagaccatcttggtgttggcgctgtccaacctggtgaggtcacatatgaagatgatatctatgagcaatacaagaagcgaatgatgcttgcctaccgttataggccaaacccactgaac

SEQ ID NO: 1409 - DNA, 512 bp, Oryza sativa
  Clone ID: uC-osflcyp027d10b1
tgccgagcggggaggtggtggcgtcatacgaggtgctggagcggcggctgcgggagctcgggtgggagaggtacctcaccgacccgtgcctcctgcagttccaccagcgctccaccgtgcacctcatctctgtcccccgcgacttctccaagttcaagctcgtccacatgtacgacatcgtcgtcaagacccgcaacgtcttcgaggtccgcgacgccgctgcccccgccgtctcaccggcgacctagctgctgatccgagatccatccatccatcgatcagacgacagcttatagctacagcagtccacatgagcttgcctgcctgctattataagagtgtaagtatgtatatatatactggtatgcgtgtgatcgatcaaggatcgatgtacacacaaatgatcagcatgcacagatcactagatcgagatctatagctcgatcgatttggggtttctcctgccggcgttgcagcttttggattagatgttgcgccggtgaggacattgc

SEQ ID NO: 1410 - DNA, 524 bp, Oryza sativa
  unsure (1)..(524): unsure at all n locations
  Clone ID: uC-osflcyp027d11b1
tgcacgaccaacgcagcttgctccggccagccagccaccgtcgtcatcaccgacgagtgccccgggggcatctgcctcgccggcgccgcgcacttcgacatgagcggcacttccatgggcgccatggccaagcccggcatggccgacaagctccgcgccgccggtatcctccaggtccagtacagaagggtgccatgcaagtacagcggcgtgaacatcgcgttcagggttgaccagggggcaaacccgttctacttcgaggtgctcatcgagttcgaggacggcgacggcgacctcaacgccgtcgacctgatggaggccggctgcggctggacgccgatggtgcagaactggggcgcgctctggcggtacaactccaacaccggcaaggccctgaaggcgccattctcgctccgcctcacctncgactccggcaaggtgctcgtcgcaaacaacgtcatccccgcgagctggaaagccggcgtgacgtaccgctccctgtgaactatctctaaataattaca

SEQ ID NO: 1411 - DNA, 502 bp, Oryza sativa
  Clone ID: uC-osflcyp027d12b1
tctggtgggagaaacatcagggtcactgaggaaacataacatgagtatgtcgatcttgtggctgaacatatattgaccacagcaattcgccctcaaattaatgctttccttgaaggattcacagaattagttccaagggagctcatttccctatttcatgataaagaacttgaactcttgatcagtggacttcctgaaatcgactttgatgacctgaaagcaaatgcggagtatattgggtattcgcctgcatctccggtcatcctgtggttctgggaagtagttaatggtttcagcaaggaggacatggcaagatttctacaatttgtgacaggaacatcaaaagtaccattagaaggtttcaaagcgctacaaggtatttctggtcctcagagattccagattcacaaggcttatggagctccagagaggcttccatcttgccatacttgctttaatcaactggatttaccagagtattcctcaaaggagcaactagaag

SEQ ID NO: 1412 - DNA, 433 bp, Oryza sativa
  Clone ID: uC-osflcyp027e01b1
tcttgaacatacctcccctttctaaatctcggtgccacgattcttccttccgtgttgggacacactggcgctcactgcagagtacacatactcttatacatactaagagccttactggccattagagaagctgcggatgtccattacgggtgctggtagatacatagcatcccacatagcgaggcgcctgacgagcgagggccactacatcattgcttatgactggaagaaaaatgaacacatgactgaggatatgttctgccatgagttgcatcttgttgatctgagggtgatggacaactgcctcaaggtgaccaccggggttgaccatgttctcaaccttgcgctgatatgggaggagatgggattcattcaatccaatcactttgttatcaatggctacaacaccatgatcagctctaacatgcttgag

SEQ ID NO: 1413 - DNA, 317 bp, Oryza sativa
  Clone ID: uC-osflcyp027e02b1
gtcattcgcgaagaatcatcatcatcaagggggagttttgaaactaactatccttgcgccccggtcttggctagtaaataccggcgttttatgatctaagttcatgcaaaggggacgattgcagacgatgaatatgctattctggggtcagcaaacattaaccaaaggtctttggctggttccagagataccgcaattgccatggtcgcataccagtctcaccacacatggactacaaaggggggttatccttgccgtcagggatactggtatagaacttccctttgggcagagcatcttgggatggttgatgacct

SEQ ID NO: 1414 - DNA, 516 bp, Oryza sativa
  Clone ID: uC-osflcyp027e03b1
taacttttggtcgatggaccgtatggtgcaccggcacaagattaccgtgaatacgatgtgctacttctcatcgggctgggcatcggagccacccctttgattagcattgtgaaggacgtgcttaaccacattcaaggtgagggatcagttggaaccacggagccggagagcagcagcaaggcgaagaagaaacctttcatgacgaagagagcctacttctactgggtgacgagagaggagggctcgtttgagtggttcagaggcgtcatgaacgaggtgtctgagaaggacaaggatggagtcattgagctccataaccactgctcaagcgtgtaccaggaaggcgatgctcgttctgctctcattgtcatgctccaagaacttcagcatgcgaagaagggcgtcgatatcttgtcgggaactagtgtgaagacccatttcgcacgacctaattggcgaagcgtcttcaagagggtgcggtcaaccatgagaaccagcgcgtcggtgtgttctact

SEQ ID NO: 1415 - DNA, 515 bp, Oryza sativa
  Clone ID: uC-osflcyp027e04b1
tgtggccattactcagctcacctactccagatctcgccatggcggcggcgtcgtctcggcggcagcggatggccgcggcgtgcttcgtcctcgccgcgcttgcgatgtgggcggcgcccgcggcgtgcggcgcgcgcgcggttcctcgtggggcgggggcgggggtggcggcgcagcaggcgaacgcgtcgtcgtcgtcgtcggcggcggcggacgagttcctggcgccgcacaaccaggcgcgggcggcggtcggggtggcgccgctgcggtgaagcggcgacctggcggcggcggcggcgaggacgacgtcgcagcagcagggcgggcaggggcggcggtgcgggttcgcggacatgagcgggagcccctacggcgcgaaccaggggtgggcgagctacccggcgcgccccgcggaggtggtggcgtcgtgggtggcgcatgggaggtactacgcccacgccaacaacagcttgcgcgccgtgcagcagtgctgcacctacacccaggtgtgt

SEQ ID NO: 1416 - DNA, 323 bp, Oryza sativa
  Clone ID: uC-osflcyp027e06b1
tgttttctgtagctattggacctcaagaggtggggatactttgggggtttcgggtgtcgctccctttattagacaggctgttatatctcaagtttaggcgctgaaaatgtcaggtcttagtttaggtgctgctagacacctagtgttcagagaaaccagcttgaaaggaaaagctgaaaaaaaaataagttggcttcaatgcacccctggatgtcactgtggctaagttaccatgtccaaatgtgtggtgccgtttaaagcacacctgtttttattactcttttgttagtgagggaatgctgcctgattgactatgcacacgt

SEQ ID NO: 1417 - DNA, 503 bp, Oryza sativa
  Clone ID: uC-osflcyp027e07b1
tgtacattcctccctcttctttgccgcggggccgacatcgatccatccctaacaaataacacgatgtcgcgcgccacggtcgccatcctcttctacatcctcacagccgccgccgccatcagcgcggcggcgcaggccccagcggagtcgccatcgaagagcacggcagctgccacccctgcaaaggcacccaccgtcgcatcggcaccgaggaaggccggaccagctgccgcgccgacgaccaccgtggctacctccgcgcctgctggtggcgacgaggtgtccatcccccctacgccgttcgccaccgtggtgtctcccgtcgccgatggacctgccgatgcggctgacgccgatttctccggtgccggtgctctcaagaggtgcgctgccgttgccggtgtcgcggctgccattgccaccgttaccttctactaagatgccggatgcagagatgtggagtgtcatggtgagctgttagggtggacagcaggaggaaggcg

SEQ ID NO: 1418 - DNA, 505 bp, Oryza sativa
  Clone ID: uC-osflcyp027e08b1
tgtgaaatttcaacaaattgatgcactaatggagtccaagggtggcaaaaagaagtctagcagtagtcgttcctccctgatgtacgaagctcccctcggctacagcattgaggacctccgacctgccggcggcatcaagaagttccgctctgctgcttactccaactgcgcgaggaagccctcttgatagcccccttggctaccttgatctagtagtttagttactcctctgaattctcgttttgggctttcttacatctctctggctagctgcttcccagtgaccgggaaggtcatcagtcctgcttcctttcttcctcatctctggcatcgtccttcgaaacaatggcagtcctgtcagttgctgactctccaccggtctcggcgatcgggtttgagggatatgagaaacgcctcgagatcactttcttcgaggcgcctgtctttgctgaccccaatggcagggggttgcgtgcactgtcacgtgctcagattgactctgttc

SEQ ID NO: 1419 - DNA, 503 bp, Oryza sativa
  Clone ID: uC-osflcyp027e09b1
tcaaacggccacctcactctccctctgtctatctctctcttcacatttccattccaactcaatttcctcctctcttctcctctcctcttctcacacgaagccaagaaagccaagaaatccatccatccatagcaagggagctagctcgccggcggcgatgggcaaggactgcggcaaccacggcgacgacgacatccggcaggcgtgccggcggctgctgacgatcctcttcggcctcgccctgatcgtggccatcatcgcgctcatcgtctacctcgtgctccgccccacccaccctcgcttcttcctccaggacgccacgctccgccagctcgacctctccaattcctccacctccggcgtcctctccaccgccctccaggtcaccgtcgcctcccgcaaccccaatgaccgcgtcggcgtctactacgaccgcctcgacgtctacgcctcctacaagtaccagcagatcacgctcgccgcctcgctcccgccggtgtacc

SEQ ID NO: 1420 - DNA, 527 bp, Oryza sativa
  Clone ID: uC-osflcyp027e11b1
tgaactgcccaccgtttcttgcatttgaggcctgcagggagcacttgggtgtgcatccctgtgataaaaggaggagcattacagaataccgcgctctctttcctgccattgatttttcgctgatagagaatgatgaagatgtactttgggaaccaaatgtcagagaagcaaattcatctgtcgcagctaggggcatgaagttcattgactggttatggacaagggaagagaaagagatagctattgtaagccatagtggattcttatatcacaccttaagcatgtacagcagggagtgtcatccaaccataagagaagaagtgggcaagcactttgccaactgtgagctccggtcgatggtgttggtcgatacaagcatgcttgggtctgattcccccagttacaactaccctggaagtattccagctggacttgatcttcctagtgatgctgcaccttgagcaaattcaagacctgtgttagagattgttaccgtgcattggtgccttgattatttttcccagccc

SEQ ID NO: 1421 - DNA, 525 bp, Oryza sativa
  Clone ID: uC-osflcyp027e12b1
ggatggacttgctcatccttcggcggccatggatctatcggcggaagctgctgctgctgctcgtcctcgcgttcggcgagtcagatctggagccgatctgacctcttagaggtccggttggggcatgctccgtacgagctggcgtggatgaagcggcggggcgagggaggaggctggtcgtcgcctggatcctctccatcggggcctcgcgcgatgatgtctctttgtattgataattattcgatgaactttcgataattattagatctaagagatgttgttcgagggagccgtgtgctgagatgaaggcggcaaggtaagagaacatgtaacaagcgaggtgcttgtgtctgagggtcaaaagaaaaagagacgaaaaaaaaacgagagatgtgacatcgcaagattggcctttgccatgttgggtgcgctcgcatggcaggccaccgtaataaagatgatctttttgtgtcctggggggagttcgcacgggggttattttggttagccccgggttctcccccc

SEQ ID NO: 1422 - DNA, 373 bp, Oryza sativa
  Clone ID: uC-osflcyp027f01b1
tggtctaccatatggcgagaaggcccccagggtggcggagtcgaaggatcaggatttactccgccctcgacgacctggtggtcgggcgccgaatcaccaccgacacctacgcccatcgacgacggcgagaggtgggtgggggagcgagcgtggccgctaggggactcggaggggcggaagcggctgagatagatcgcggaatgagcaggttcggcggaaccagatccagcggctacggtggtgggaagaggctcgagtacaggcggacgcatggacggaggcccaagggggcgcacaaggccaccagtcgagaggctccactggctcggggacagcggggccaggtggtatcaactactggaaacccttgccc

SEQ ID NO: 1423 - DNA, 437 bp, Oryza sativa
  Clone ID: uC-osflcyp027f02b1
tttcttcccttcctctacccctctctttggtctactctagctcatccccatacccaaacctccatcagatcacaacttaggtagctaactagagagcaaaggccgggcagtgcaagggggaaaaaaggaagagagccaaatgggcaacatgctgccgtgcttggtccaaggcaggacgaccctaccggccgccatgaaccccaagcagaggctctactgcctcaagctcctcgacaaggccctccacaagctgaagaagaagatcatgatgaagcctaacaagggcaacaagatcggtagcagctaaccgtcatcgccggcggggcccgcagaagcagcttcagccacagcggctgcgggtgcaggaggaggcatagaggcggcgatcggcagcagtaagcccaaggtgagcccgcgaagagcggctcagggtgggc

SEQ ID NO: 1424 - DNA, 511 bp, Oryza sativa
  Clone ID: uC-osflcyp027f03b1
tattgatccggcctacagcttgcctgataatgttgcattgcttactcttcaggaacttgaagacggaactgttcttcttcggttggctcacctatacgaggctggagagcacaaggatctttcagctctagctagcgtcgacctgaagagagtatttccagacaagaagattgtcaagattgttgagacaagcctatcagcgaaccaagaacgttcagccatggagaaaaagaggctgaagtggaaggtggaaggccctcctgctgatgaaaagatcgtccggggaggccccgtagatccttccaagctcgtcgttgatctgggccccatggagatacgcacattcctcatcaatttcgccccgcagtccggcaaacagttgatgtgaggggtgacatggccttggcaccaatgttttatttttagcttgagttcttctcatggtgatgagcaataagaaataatgtggccatggtgattggtgacccgatgcagagatgcactggtagca

SEQ ID NO: 1425 - DNA, 495 bp, Oryza sativa
  Clone ID: uC-osflcyp027f05b1
tgaattggatgactgccatcgaggagatggctggcatggatgttctgtgcagtgacaagaccggaaccctcacccttaacaagttgagcgtcgacaagaacctcgttgaagtgttcactaaaggtgttgacaaggaccatgttttgttgctggctgcaagggcatctaggacagaaaaccaagatgccatcgatgctgccatggttggtatgcttgctgatcccaaggaggcaagagccggtatcagggaagtgcacttcttgcccttcaacccagttgacaagaggactgctctaacatacatcgatgccgatggtaactggcaccgtgccagcaagggtgctcctgagcagatcctgaccctgtgcaactgcaaggaggatgtaaagaggaaggtgcatgctgtgattgacaagtttgctgagcgtgggcttcgttcttttgctgttgcagacaggaagtacctgagaagtcgaggagtctgctggtgaccat

SEQ ID NO: 1426 - DNA, 280 bp, Oryza sativa
  Clone ID: uC-osflcyp027f06b1
tttctgcggctaaagaagagagccctgtatgtgggatcatatgtggatcagggtttgcagccgctccaaacgatattaccatctaacaacagatctaccgaggagaccgagtatccagtggacgctcctctgctggtacgcgccgctgctatacagttacacaatcttgaccccaagatggcttgcgagattgtcatccgtgaccaccacgatgtacgctacctccgctgtatgagtattaggctactgaactttacctgaagcatgccatctaaccaca

SEQ ID NO: 1427 - DNA, 459 bp, Oryza sativa
  Clone ID: uC-osflcyp027f08b1
tttaggaatcggaggtagctggacggcgggggggcgtctacgagccggggtggtgcatcaagaacggcgcggcgagcggcggggaggagagattggatcgacgccgggtagttaggaagggagcttggagagatggcggcttccgcgaggcccgtctgcgtctgcggggagagggcgaccagcttcgccatggcgtgcagcctgctcagccgctacgttcgccagaacggcgccgtcgccgtcgagctcggtctcggcatcagaggtgagggtgaggctccgagggcggcgccggcgacgatgagcttgctgcccggtgaggcggagaggaagatggagaccatggtgctcttcccgcagagcgccggctttggccagcaggatgccatcaccgccgattctgctgctgatgctagggaacaagagcctgagaagcgttagttgaccatcttctatggt

SEQ ID NO: 1428 - DNA, 519 bp, Oryza sativa
  Clone ID: uC-osflcyp027f10b1
tgtgaccgagcgcgccggacgccgtcgtcgttaattaatcagccatggatccctacaagcaccgcccgtcgagctcgttcaacggcccgctgtggagcaccaactccggcgcccccgtatggaacaacaacaactcgctcaccgtcggctcccgaggcccgatccttctggaggactaccacctggttgagaagctggccaacttcgacagggagcgtatcccggagcgcgtggtgcacgcccgcggcgccagcgccaagggcttcttcgaggtcacccacgacatcacccacctcacctgcgccgacttcctccgcgccccgggcgtccagaccccggtcatcgtccgcttctccaccgtcatccacgagcgcggcagcccggagaccctccgcgacccgcgtggcttcgccatcaagttctacacccgggagggcaactgggacctcgtcggcaacaacttccccgtcttcttcatccgcgacggcatgaagttcccggacatggtgcactcgctca

SEQ ID NO: 1429 - DNA, 522 bp, Oryza sativa
  Clone ID: uC-osflcyp027f11b1
tgtctagagctcttgatggctccaattatgtacctggaatggttggtctaaacaacatcaaggagacagattttgtgaatgtcacaatacagtcattaatgagaattactcctttaagaaatttctttctcatccctgaaaattatcagcatagcaaatccccattggttcatcgatttggagaactaactcgcaaaatctggcatgcgaggaacttcaagggccaggttagtccacatgagtttctgcaagcagttatgaaggccagtgataagaggttccagattggtgttcagtctgatccagtggaatttatgtcatggctcttgaacacaatgcactcgaaactaaaaagtaggaagagaaacagaagcatcatacatgattgctttcagggagaacttgaagtagttaaggaatttcacaagatgcatattgtggaaaagaaagaggatggcgatgaacagaatggtgatgcaggttcagatattgttactgaaacatctagggtcccatttttga

SEQ ID NO: 1430 - DNA, 524 bp, Oryza sativa
  Clone ID: uC-osflcyp027f12b1
tctttcccacatcctcctccgccgccggctgcttcccaccggctcccgatctccgaggcaagcagcgccgcacccggccgccgccgccgccgccatggcgttcgagaagatcaaggtcgccaaccccatcgtcgagatggacggtgatgagatgaccaggatattctggcagtctatcaaggacaagcttatctttccatttttggatctggacattaagtactatgacttgggagttctccaccgtgatgcaactgatgacaaggtcaccgtggaggctgcagaggctactctcaagtacaatgtggctattaagtgtgcgacgattactccagatgaggctcgggttaaggagttcaacctaaagcaaatgtggaagagccccaatggcacaattaggaatattatcaatggcactgtattcagagagccaattatatgcataaatgtcccaaggcttgttccaggatggactaagcccatttgcattggaaggcatgcttttggtgatcagtaccgagcaa

SEQ ID NO: 1431 - DNA, 160 bp, Oryza sativa
  Clone ID: uC-osflcyp027g01b1
tttccataatactttgacgagaagcaggggagtgcttttaaaatacaagggcgcttaaaacaacaactggttcagtagtaaggggcgtacccccccaccgcaacctgtctgcttctgggaaaacgaatatccctggtgagaaaacaccgggttcggcgaa

SEQ ID NO: 1432 - DNA, 481 bp, Oryza sativa
  unsure (1)..(481): unsure at all n locations
  Clone ID: uC-osflcyp027g02b1
ttgtaaaaaaagataattaacttaatactacgaagggttttctcttttcattatgtttctaacaatttttttccctgttcttaaaaaaatgggagaacgaatttcttatatgagccataattgcaggctatacataatgcagagaagggagagccagctgccttgctactttcacctaggatagcatcagcaatgcctggtgtggaatccacgagtaatggaagccaatttacgtacttcctcacagctccaatgcaagccttctgccaattagctgggataacttctgacatagacagcgatacatatgctaacgcggaaatcatacttttctccgctttggaacaatatgaaggaatcctctgcacatctgttggattgaacaacgtctggggacaaattttaccagatccttttctcaggcgcctgatcgtcaggtacctttttccatatatctncacattcaatgttttgactatct

SEQ ID NO: 1433 - DNA, 444 bp, Oryza sativa
  Clone ID: uC-osflcyp027g03b1
ttctagctccgccctccaatcccccgccacccaccgatgataccccgtctacaccgtgccattgcccgccgatcactgctaacctccaccgccctcctccccgccgtcgcccgccaccgcgatgcgccgctgccctccgcccccggcctcccccgtctgctccaccacgcgccgggggcgtccgatcaagcccggaaatcaggtcctcttacgctctacagggatctggtgagccaagggaaactccaacatgacatctaccaggaaaatgtagcaactcagctggacaacttacttagacgacttgagcaatacgagatggaaatggaggattaccatgcaagactctctatgtgggaaaatacccgggagaaacaaaggcgaaggcttcttgttcaagaagctgaggatacacagcgtgatggggtgctggtagatgagaaa

SEQ ID NO: 1434 - DNA, 478 bp, Oryza sativa
  Clone ID: uC-osflcyp027g04b1
tgttttgtgtgccttcctctctgtaactctgtggatctgtcggagttaaaagacttaatgagtttatgtggtaggattgggtattaattttgatggtgctagctggcgttcttgatgattgcaggaagatgaagcggaccatcatcgtcaaagtggacttggaatgcgagcgctgctatgccaagatcgacagggtgctcaccaggatcagagacaagggtgagttcgtcatcgacgacatcgagttcgacgtgaagcacaacatggtgatcgtgtcggggcccttcgacccggacaagctcgcagacaagctctgctgcaaggcgtgcaagatcatcaaggagatcgagatcgtcgacctcccgtcgtcgtcttcgccgacggcgccggagccggagccggagccacccaagaatgaagagccccagccaccgcctcctaaggaggaggagaagcccgagccgtcgccggcggtgat

SEQ ID NO: 1435 - DNA, 525 bp, Oryza sativa
  Clone ID: uC-osflcyp027g05b1
tattggcaggccaataagtggagtcccagcaggagtacctgccaagcaggaccctaggatggccatggataggcagcccaaacaagataactcgagatcacagcatgacaagagacagcaggctactaaggtagtataccgtgtcaaaggtcaaggtcccaatggcctgagtgagtgaaaagtatccatgaaatcatcctcaaatcgcagtataaccaggaatcgcctttaagttcgtttgtacgatgttccatgtgagtgggcatgctgctactgggagaagcgacactggaagtctgcaagctcctagtgaaagcagccataggatttactttattttaccaccccatccatttacattccatcattgagttgttgtataacgtccaaaggagttggttttggttaagttatgatttaggacagggattcagacagaaactatcgtagttaggacaaaccttgagcaacaggcaaagcaccgccattgtaaatctgatagctagagcaactcttatgaacgct

SEQ ID NO: 1436 - DNA, 367 bp, Oryza sativa
  Clone ID: uC-osflcyp027g06b1
tagctgcggcaaagcaagtgatctctttagctcggatcatctctgcatttgcatttgcagctgctcgtcacggcaatggcatccaccaacagctggacccacgagatcgagtcgccggtggccgcgccgcgcctgttccgcgccgccgtcatggactggcacacccttgcccccaagatcgcctcccacatcgtcgccagcgcccaccccgtcgacggcgacggcagcgtcggcagcgtcaggcagttcaactttacctcagtcatgccattcagccacatgaaggagaggctggagttcctggacgtggacaagtgcgagtgcatgtcgacgctggtggagggcggcggcattggcaaggcgatcg

SEQ ID NO: 1437 - DNA, 249 bp, Oryza sativa
  Clone ID: uC-osflcyp027g08b1
tgtgcaggtaaggacgactggtgagtgcaatgcacgttatgtgatgcatgtgggtgaacatggatggataatttgaagagagctcagattcggtcgactgagctagaagagtgcgtaccgatcatgactgctagcgaacctagaaacgcagagtggggactccttatcgagctatacatgaataggttgaccagtctattaatgctgcttaccaccacgcgtgtgataaacgtggtaggtacagatgcg

SEQ ID NO: 1438 - DNA, 457 bp, Oryza sativa
  Clone ID: uC-osflcyp027g11b1
tcacaaaatcaagcagctttattgtgcatttctctagctagctgtcgatgatggctaaggctgaagggggcaaaatggtatgtgtgacaggagcaggaggcttcattgggtcgtgggtggtgaaggagctcctgatccgtggctatgccgtgagaggaactgcaagagatccatctagtcaaaagaactcccatttgcaaaaacttgaaggagccaaagagaggctcagtctgaactatgcagatgtgatggactttgatagtctttctgttgcatttaatggatgtgaaggtgtattccatgttgcctcacctgtatccgttgatccgcgacttgtgcccgttgctgttgaaggaactaagaacgtgatcaacgctgcagcagacatgggcgtacgacgcgtggtgttcacatcaaccttcggtgctgtacacatggacccaaataggagccatga

SEQ ID NO: 1439 - DNA, 233 bp, Oryza sativa
  Clone ID: uC-osflcyp027h04b1
tgcggccgctacttcaccgggatgctgtgtgggccaggaggatcggcggcgccggcgctgaagcacaaggccctgcaggcagaggcgttgggaacggacaacgccatggctgacgtggccgtcgtcgggaacgccagccagctcgaccacccctgcttcccatactgcaaggaagtttacgtcgtgaacagggagagcaccaagaccgcgcggctgccgcgggacaggtaccc

SEQ ID NO: 1440 - DNA, 440 bp, Oryza sativa
  Clone ID: uC-osflcyp027h05b1
ttattcagaaaagaagtcgatgatgccattgcgaaagcaaaggagagtcctatgcctgatacttctgagctctttacgaatgtatatgtcaagggttttggtgtggagtcatttggggcagacaggaaggaattgagagctactcttccataggctgacaacgagaagatggcggcattatttcttctaatatgatatgatagcctggagaaataagcattggtgaagaagtcctcaggcatttctgccattctttgttgcaaaaatgaacctgtatagagatgcgtcaggaagaatcgcaccatatttgtttttgcttcttttccttttctgcaattcatctaaccgctgttgtcaggcttcaaattcaagctcgagactctgcctgcgtgattgctccttttccgaagaaaatgttcaagattatacatctagagtat

SEQ ID NO: 1441 - DNA, 116 bp, Oryza sativa
  Clone ID: uC-osflcyp027h08b1
ccggaaaaaccgggaagacccacgccctccttctcaaaaccaaaaaacaaaaaaaaaagggaggggcaattagaaaaagaggcccgctaaaccccaggaaacaaaaaaaggggaca

SEQ ID NO: 1442 - DNA, 375 bp, Oryza sativa
  Clone ID: uC-osflcyp027h10b1
tttcaactactattaggtatgtagtaggcataaccctgacagatcttttggctactgctggttataatgcacatttttttttttgttactgcaacaacatccctgaattttgtttgtaagcgtttcgttatctacgaggaacacgatagcttgagactataatcaattagtaccttttacacttgcgaaattatatcagactataaatgaatttgagaaaaactatatattcttgaaaaatggcaaatatctagtccaagggcagaagcgatctgcatcccgtgcttgtgatgaaacggaaatgttcttctgaagcatctgcatcctgcaatattatggtctatgctttttgtctgatttcttttttgtggaaca

SEQ ID NO: 1443 - DNA, 523 bp, Oryza sativa
  unsure (1)..(523): unsure at all n locations
  Clone ID: uC-osflcyp027h11b1
tgagctcagtgtcgatgcactccctgtcatgacgtctttccactagtgaaccattgtattctagagaacgccccagtttcccatcttatagtccaattcctcgactatcagtatcagagatttcagatgatcatggtggaggtgtggtgtcacctcaaaggaagctaaatcatttgctgtcagatcatcatccatcaaatggacagatgttttctctagatcctgaccgctcaaatgatgatgctggaccacctctcacaccaaaatatgttgaaccagctggatcagaaggctttatgagaggaagatcgtacaacataagaatagatgaccaagtgttgcttcgcttctcaccaaagaattctgactcaacttattactttggtgatatgattggtggagcactcaccttctttcatggatctggaacacgaagatgcctagaggtatctgttaccttggaaacatcagaaacggttaatcctcgtgtaatacatncttcgagaaggagctcaccctcaat

SEQ ID NO: 1444 - DNA, 513 bp, Oryza sativa
  Clone ID: uC-osflcyp027h12b1
tgattttggtagtgcattttcgggtatattgacggatgagcaaggaagagttcaagcattatgggcaagcttttccacccagctgaaatatggttgtagcagttcggaggatcatcaatttgttagaggtataccaatatatgcaataagtcaagtccttgagaaggtaatctctggtactcctggaccatttcgtattatcaatggagttaggaggccaataccattcatcagacttctggaggtggaactctatccaactttgctttcaaaggcaagaagttatggattgagtgatagctgggtgcaggctctagctaagaaggaccctgtgcgaagacaagttttgcgggtcaaaggttgtttggctggatccaaagcagaaaatctccttgaacagggagacatgatccttgctatcaataaggagccaattacatgcttcctagatatcgagaatgcttgccagaaattggaccaatctgttgattcagatggagtccttaacatgac

SEQ ID NO: 1445 - DNA, 514 bp, Oryza sativa
  Clone ID: uC-osflcyp028a03b1
tagcagttacggggttctttgtcataggtcatgattgtgcccacaaatcattttcgaggaataagctggtggaagatattgttggaactctagctttcttgccattgatatacccctatgaaccttggagatttaagcatgacagacatcatgccaagacaaacatgttgatagaagatactgcatggcaacccgttttttcaaaggagttcagaacaaattccttactgaggaaagcaatgatatttgcttatggtcctatcaggccatggatgtctattgctcactggtatttctttttcgaacaccttttcatataacatggacatcttctttaggaattattttccttcaacttgttcaagcaatatcattgctgttcactacgattgcttgtcaggttaatttggcactttgatctaaaaaattcagaccaaatgagcttcccagggtgaaaataagcttagcatcttgtgtagcgttcatggcaattggatggccactgattattctc

SEQ ID NO: 1446 - DNA, 406 bp, Oryza sativa
  Clone ID: uC-osflcyp028a05b1
cgagcgagcagctagctagctgcggcgatggcctccagagcggcggcggtcgccgtcctcctcctcgccgtggcggcggcgccgctcttcgccgcggtgagcgcgcatggccgaggctaccttggtgccaagtcctggcctcctgacggcagcctgagctcatcaagctccggcgaggctgcagcggcggacgtcgacgacggccacacggactggaagtgctactcctcctgcatgagcaagtgctgtcaccgccacgacgacgacgacgacgacaaggccaatgccaaggccaacgccaccgccggggccgacgccgtcgggctcgacgatgactacaagtgcaagaagcagtgcctcggcaactgcttaaggacgtgccggccgttgctaccacaagtgcgtc

SEQ ID NO: 1447 - DNA, 448 bp, Oryza sativa
  Clone ID: uC-osflcyp028a08b1
gcttgcagcggcatcagtctccggctgacgctgtcgctagggttcagccaccgccgccgccgccgccgcgaccgccggagatgagcgccgcggcgaaggccgccgcgctcgaggtagtgctcgccgccaagtcgtcccgtatcgcctccctcgaggccagggtctccttcctcgaagccgagaacgcgcgcttgaggagggccatggcggatcgtagtacaggtaagggaggcccaaatctccgtcgatcggaggagatggcgggagggcgtgtggcgcgtgatgtcattgaggttagtgatggcgaggagggaggggatggctgttgacgtcaggaaggggagaggcgcggaggagtgatggatgcctgttgcgactcctcggaagcgtgctgctttgcgggtggtgatcggcgagagcggggatgaatacgagattgatgaccccc

SEQ ID NO: 1448 - DNA, 365 bp, Oryza sativa
  Clone ID: uC-osflcyp028a09b1
ttaaaatcgcagagaaaaaaaaaatctcccctcgaagcgaagcgtcgaatcgccttctcaagatgcagatctttgtgaagaccctcaccggcaagaccatcaccctcgaggttgagtcctcggacaccattgacaatgtcaaggccaagatccaggacaaggagggcatccccccggaccagcagcgtgtcatctttgctggcaagcagcttgaggatggccgcaccctgtgcgactacaacatccagaaggagtccaccctccaccttgtgctcaggctcaggggaggcatgcagatcttcgtcaagaccttgactggcaagaccatcacccttgagggcgagtcgtctgacacccttgacaat

SEQ ID NO: 1449 - DNA, 385 bp, Oryza sativa
  Clone ID: uC-osflcyp028a10b1
tctgctgctgctcatcagtagttcatcagtagtagtggtaggggagataattcgtcgttcgttttgtgcatccatccagaattcgttccagatccagccagccagccatctcaagcttctctcttctcttgttattaagagcaagcaaacagtagtctagcgaagcgagactgcgagagcagagcattgttcttcttctctagctattagtggtggggaataatggctcccgccaccaccgcagcaatggccctcgcgccgccttcttcccatgaccatgaccatcaccatgtcaagcagctgcagctccctccgtctgtctccgtcttcgtgccccttcgctccggtttccttggccgcgcactgtctgctgctgcccacccac

SEQ ID NO: 1450 - DNA, 503 bp, Oryza sativa
  Clone ID: uC-osflcyp028a11b1
taaaccccactttattagcaccaaccccgtctccttcctccattcctccgccgctagaaccttctagaagctctcctcctcctcccatggcggcgacgatcgtgtccgtcaaggcgcgccagatcttcgacagcaggggcaaccccaccgtcgaggtcgatgtgtgctgctcagatggaacctttgcaagggctgcagttcccagtggtgcatcaactggtgtctatgaagctctcgaattgagggacggtggatctgattacttgggaaagggtgtttccaaggctgtcgacaatgtgaactcggttattgccccagctctgattggcaaggaccctacgtcacaggctgagcttgataacttcatggttcagcagcttgatggaaccaaaaatgagtgggggtggtgcaagcagaagcttggtgctaatggcatcctggctgtgtcactggccatttgcaagctggagctatcatcaagaagattcctctgtaccagcaca

SEQ ID NO: 1451 - DNA, 470 bp, Oryza sativa
  Clone ID: uC-osflcyp028a12b1
ttatggttgcagttgctaagctcatgaatgcaacactagtaatccctactctggatcacaaatcattttggactgatccaagtgatttcaaagatatatttgatgtggaacacttcaagaaaactttagagggtgacatttcgattgtggattccttgccactagcttataaaggattgaaactttatatgagagcacccacttcttgggccaaggcttcttactacagagctttctcaaggacactgaagaaggccaaagttgtgaaattcacacatacagattcacgaattgttaacaatggtcttgccccatccatccaacgactccgttgtcgggcaaattatgaggcactaagattccacaaagaaattgaagagctgagtactgctctagtagatagactgaggaatggatccaatcattatatcgcactttacttaagtatgagaggacatgctctcatttac

SEQ ID NO: 1452 - DNA, 477 bp, Oryza sativa
  Clone ID: uC-osflcyp028b01b1
ggaagcggatcatggagctcgccatggattttgcgctccgcctccgcgacgccgccaaccaccacctctcccgctacgagcctctcgtgctcctcgccgcgcccctcctggccctcctcgctgcccgcaccctccacgccgccgctgccgccgtcgccgaccgcggtctccgcaccgtcctcctcgctctagccatgacagccatcaagtaagctttaatcgacttcaatctcctcctcttttcttacttgttgctgctattactattattatccgttcatacatacacacgcaggttgcttccgggagttagcgcctacatcaacgctgagaagaggaaggttgttgaccagctgcagtcaggtggcacgtccacaaaagtactctgcggaccgagttgccaactgttgggctttccaaccaagtgataaacgatctcgaaacactgaaagctagagatgttaacctgcagggaaa

SEQ ID NO: 1453 - DNA, 500 bp, Oryza sativa
  Clone ID: uC-osflcyp028b04b1
ccgccattgaggaagttattcagggaatgcccggtgaaaaagttattcagggaatctttcggactttcatggacattgatgactgcaagattcagattcagacagatgtatcagctctgggtatcatactacttcagctagttacagggcattcagatgcaaagggtctgagagattttgtggcacagaaactgggagatgatagtgaattccaaaggaagagcattctgcagaagagagaaatcctgaaagggattgtggatcctgagctgaaaaagtgtcaaacaccagtggaaggtgcagctaggatgctgttcttgggcttgagattcagtgatccagcagggaaacagtgtcctccattagccagtgaagtgctgcctcagattcaatcgatgcatagtacgacttactctcagatggtttgggttcatcgttccttcttttgaccggataagttggtggatggtttgcctgtcatgaaagaaaaacctcaattt

SEQ ID NO: 1454 - DNA, 386 bp, Oryza sativa
  Clone ID: uC-osflcyp028b05b1
cttgacatcgacgtgcggcgtaagcgggtgttatccatcacccagcaccacattgaaagtatgggtgatcttataccagatctcatcgcctgtgagttcactgcatactcggagctctcaaaaggcatgcaggcaatggtggaaggaaatgagggtgaggaaagcacaaagcggatgaaggttaaatgatctctgcatcatgtggaacttcgatggtttttgcaacatatcaagtaggattaacattgaagattggtgtttgattagcacccatctatgtggaaggatgaatgtgatgtaatcattctctagaagttatgatgttattatcagatggtagtaaaactgaattgctagtgtgttttgttaacgctgatggttttaac

SEQ ID NO: 1455 - DNA, 457 bp, Oryza sativa
  Clone ID: uC-osflcyp028b06b1
tcctcctccaccaagaatcacccacccgcgagatccaatccaatcctctcgcttgcattttctgctgctgcgtgcgcgtgctgagatttcattcggatttgttgggggttcgctgagatcggagatgacgtcgccggcgacgacgtacgcctcgccgttcgtgctgtcggtgctcctcctcgtctccatcccggtcatcttcctcctcgcgccgcgcctcctcccgcccaagacgcttccggccatcccggacgccgacgagtccgacgacctcgcgctcttccgccgcgccatactctgctgctcctgcccctgctgcgccacgcccacgccctcctgcgccgcgtcctacttcttccgccgccgccccgcccccaaggtcgccttgctcttgctcaccaactccgacctcgtcttctccccgctctgggagaagttctttcggggcaccaccacc

SEQ ID NO: 1456 - DNA, 495 bp, Oryza sativa
  Clone ID: uC-osflcyp028b07b1
aataaataacgaaggctaaccgccgccgccctcgcgtatctcccccctttccctcggcgtaaaagaaaatctcccggtctctcgtctcctccgctccttgcgccatctcgccgccgatctccatcgggcgagcagagcagagcaggggatcctgatctggaagaagctccttctcttaatttcagagccttaaaaccttaatacgagtaacagcttgttgtttgttcatccaaaagtttggggttgaactgaatccccatgccctcacctggtactaatagcagcagcagcttctgtttaggaggaggctaggaaaaaaaaaaggaggattttttttttgcttttttgcgggggctcagctgaacaacccccatgcatcacgttaggtcccggctgggaagcccagatgcttccagcaattctagtaagcggaagaggggctcctgcttcgcggagcggaatatggaagggaggaattcgatcccgataaagccc

SEQ ID NO: 1457 - DNA, 380 bp, Oryza sativa
  Clone ID: uC-osflcyp028b09b1
tgccatgtacctgttctctgtccttctatttggagccttggccacaagagaagagcttctaactgataggcttcttactgctacagtggcatggcctgctccagcagtgatttatattggtattattttgtctactttaggcgcagcactgcagagtttgacaggggctccaagattactggcagcaatagcaaatgatgacattcttccagttcttaattacttcaaggtttctgaaggggctgagcctcactcagccactttattcacagctttcatttgtatctgctgtgtggttattggcaacttggatttgattacccccaccatcacaatgttttttcttctgggctatgctgggtgtgaccctgtcatgcttt

SEQ ID NO: 1458 - DNA, 369 bp, Oryza sativa
  Clone ID: uC-osflcyp028b10b1
tgtgagttgttgtaaagttgcgagagagagagagagagatcagttagtttgttgagtggaagcagatcaggaagatgctggagaagctgtgggacgacgtggtggccggatcttgaccggagaccggcctcgagaagctccgcaaggccgctacaacccgcccccttgtcatcaacaaagatggcgacggcgaggcgagcggagtggcgtacaagcggacgcagtcgatgccgacgaccccgacgacgccggtgacgccgtcgtcttcgtccccgacgactgcgacgacgacgacgccgcggggcagcaacgtgtggaggagcgtgttccacccggggaggctgctagggaggtgcctgttcaggaggt

SEQ ID NO: 1459 - DNA, 516 bp, Oryza sativa
  Clone ID: uC-osflcyp028b11b1
tgaatttcttcaccgaaggcaatggcggcggcggcggatgcggtggaggaggttcggctggatgttggaggcgtcctttcccttgcttttctttttctctcattttcttgcttttccttgagtctctttcttgcttcttctgctccgtcgttcccctcgttttttccttctttctgttttccttcttgtcttcatccctgtcatctttctcctcgtgccgctccttctcccgcccatgacgtcttccggcccttccctgacgcccactatgtcctactacctcccgctctttccatctgccatactcttcttcttctccccctccttcgcacgcccacgccttttttcttctgtttctactttttccgtctcttcccgcccccaggttttcttccttttctccccactccaccttttttttttcccttttttttttatttttttcccgtcctttcttcttttttctttttttctccttatctcttttttccccttctttcctccatcttttttctc

SEQ ID NO: 1460 - DNA, 240 bp, Oryza sativa
  Clone ID: uC-osflcyp028b12b1
tctcaatggagagagatcccggagaagaagtttgcgtgcaaggcgatcgatccatgagcctgaggcacatgagccgagtgggcgcgcgcgcggtgcaggccgtgcgggagggcgcggggaggtctttgaaggacaaggcgcagtcggcgtcgacatcctcgtcgtgcgcgtggatcaggtgcagcggcaggggcagaacttctcccgcactcggtgtcggtggagaaggatacactgagc

SEQ ID NO: 1461 - DNA, 467 bp, Oryza sativa
  Clone ID: uC-osflcyp028c02b1
tgtcctcaaggcgaacggcctccatcttctccttccagctcctcccatggcgtccctcgtcgccatcgccatcgccatggctctcatggtggttcaacctggccggcagatgactgcctttgctgctcggacgtcgccggcggcggcggcggaggcgttctggcgtgccgccatgcccggcgctcccatgccggacgccatcgtcgagctcctccaccatgagcacggcgttgctagcgccggcggcaaggccaacggcggcggcgacggtccaccgccgccgatgaacttcaactacgacgactacagggccctgcctcggagcgacgccccttccccggatgcattgaaccgcgtcgccgccgtacagaacgccgacgagaacggcgtggtctcgtcgtccgccgtcgtcgccgacggtgttctgtctcgaggacgccgtgcgcgtcggcgagagcctgccccta

SEQ ID NO: 1462 - DNA, 507 bp, Oryza sativa
  Clone ID: uC-osflcyp028c08b1
tttctgtccggagttggaagcgatcgatggcggctactacgacgggacgagttgttgcactcggcgcggtggccgtggtggtggcgctgacattcctcgccggcggcgcggacgccgactgctacgacttctgcttcaaggactgcatggccagggagaacaacatggtcgactactgcagctacgcctgcgacaagacgtgccagccggacaagcccacgctgtactcgtcgtcgtcgtcgtcccgcctcgccggcgacatggagtgccaactctcctgcgccttgggctcctgccaccgtcttcttgcggacggtaagggcgccgtggaggcctgcttctggcagtgctaccaccgctgcaagaccacggagggggtcagactggcgaggccttttcccgcccggcactacgtgctttttagaccccctgaagacgaggaccatgatcctgaccacccgtacgtgttttttagcccccatgatgaccgataccatgatccggacc

SEQ ID NO: 1463 - DNA, 223 bp, Oryza sativa
  Clone ID: uC-osflcyp028c09b1
ttgttggtgttcttttgagacacacatagtgtgggtgtacctccagctttaccgcttacacacaccagttccggcctatacgagagctaccttgatcttgggccttgtgcctgttagcttgctttgtggtggcggtttatcttcttccgatctgtaaaagccccgatcaagaaaggatccaacccacctaggaggactaacctgaaccttctaatgaatttaa

SEQ ID NO: 1464 - DNA, 320 bp, Oryza sativa
  Clone ID: uC-osflcyp028c10b1
ggcgaagtgatcaactgcaattcccaagtgatcagattagacaacaggatggtgttctttggtactttccaggtgattttttcctgggaccgcatcaaggaaaacaaaataacaactggcatacttgtgaagcaccgaagtgcccccaaagactgcgattttgtggaagctctgcccaaggcaccttttgaaacaagtttcacatgatcgtggaggattcttctttgcgcccttgcacttgcacggcctagttgaccaccccctgtaaattggtttgctgaccgctaggttgctatttgcagaggcaagtgaagacacac

SEQ ID NO: 1465 - DNA, 548 bp, Oryza sativa
  Clone ID: uC-osflcyp028c12b1
tgctcggcccattccaaatatagcacttagagcagaattcattaagatttctacttcacctttattatcagagttccttggctggatgcttcaaaggtgccaagaagcagagggattaacagctctggcagatgataatgctcttctcaaggtatcacagtccattaatgcagctcgataccttgagtccacattgacagaatggtgcaatgatgtattctttcttgagatggaaaatatagatggccgtagcgaatgtatcttccaagtggagataaatcaactgaaagattttagagtacaatggactgaaaagatttctaccgtcattttaagggattttgatgcccggtcaagggattatctgaaaaataaaaggcagtggcaggagaaatcagaagggttaacattatccagggcattcggagaatgtttagactacatgcaaggacggatagctaagctggaagatggtctaaatgtcctggatttgtgactgtgtgagaactgtggcatgtgagtaaccagctgctttttcttgaattttc

SEQ ID NO: 1466 - DNA, 416 bp, Oryza sativa
  Clone ID: uC-osflcyp028d01b1
agctgtccgacggcgagcattctggtgaaaagagaagggcgcaggcgaataaatcggcagctactaaagacaaagcaggaagtagcagcaagaacgcaggcattggagacggtttcgagacacagctactggggggtgcacacatgtccaaagatcaagaccaagccatggatctgggagaggtggtgaaagaagctgtagatcccaaaggtaaggcatcgatgcagcagcagcagcagcaagcacatcatgggattcatcagcagagccaccagcagcatggcttccctttcccttcgtcgtctggctcgtgcttattcccttagagccaaggagctgtctcgagcactgacacatcaaatataggtcaagtgccagaaccaagcttagcctttcatcaggagcatcaccaacac

SEQ ID NO: 1467 - DNA, 440 bp, Oryza sativa
  Clone ID: uC-osflcyp028d03b1
ccggcgctccggcatgccgctcgacgcgctggtgtgcaacgccgccatctaccggccgacggcgcggcagccgacgttcaccgccgacgggtacgagatgagcgtcggggtgaaccacctgggccacttcctcctcgcccgcctcatgctcgacgacctcaagaaatccgactacccgtcgcggcggctcatcatcctcggctccatcaccggcaacaccaacaccctcgccggcaacgtccctcccaaggccgggctaggcgacctccgggggctcgccggcgggctccgcgggcagaacgggtcggcgatgatcgacggcgcggagagcttcgacggcgccaaggcgtacaaggacagcaagatctgtaacatgctgacgatgcaggagttccaccggagatttcacgaggagaccgggatcacgttcgcgttgctgt

SEQ ID NO: 1468 - DNA, 394 bp, Oryza sativa
  Clone ID: uC-osflcyp028d04b1
gctccttcccctccacgccttatcgcttccgagctcccatggccgcacgccccgcgcgctagctgaagcagccagcctcgggccccacccacgcagccgccggcgccggcgccgccgctccccatgaggcagccgcacctcctctcgccgcagcagctctccccgtccccggtcctctcctcccacttctcgccgccggcgcccgggggctcgccggcgtggcggcggggccgacaccaccaccaccggcgggcgttccacccgccgctctcgtcgctgcgtgacccccacaaggccacgctgccgaaggcctctgccaacgtccccttccgcctcggcgggggcggcggtggcggcggcggtcaaggcggcggcagaggaaggaccggggacc

SEQ ID NO: 1469 - DNA, 537 bp, Oryza sativa
  Clone ID: uC-osflcyp028d05b1
ttccatccgttcctccgatcagttccaacttccaacctccgatcccaacgagaaaaccaatactgacacctctgcctcgcaacgcggcgcgcggccgtgcagcgatcgatcgaccggccggagtccggcatgcaaatgggagctgcctggcgcgggcggcggcggcggtgatgggcgcggcgagctctaggctggagaaggcgctgggcgagcagttccccgagggcgagcgctacttcggcctcgagaacttcggcaacacctgctactgcaacagcgtcctgcaggcactttacttttgtgttcctttccgtgagcaattactggagtactatgcaaataataaaagcaccggagatgtcgaagacaatatgttaacgtgcttagctgacctgttctctcagatcagcaaccagaagaagaaaacaggtgttatcgctcctaagcgtttcatacaacgactggagaaacaaaatgagatttttcgcagctatatgcaccaagatgcacatgaatttctgaattttttgttaatga

SEQ ID NO: 1470 - DNA, 500 bp, Oryza sativa
  Clone ID: uC-osflcyp028d06b1
tctcctcgcagcttcctcttgtttttcttggccgaaccccccctcgacacgccgtcgccgccgaggggagagagagagaggccgccggccgccgctaccactgacccccccccctcgccggagcgccccgtcgccggtcgggtttgatcgatggcgtccaagaggatcctgaaggagttgaaggacctgcagaaggaccctcccacctcatgcagcgcaggtcctgtgggtgaggacatgttccattggcaagctactattatgggaccctcagacagcccatttgctggtggggtattcttggtgaacattcatttcccaccggattatccttttaaaccaccgaaggtctctttccgcaccaaggttttccacccgaacattaatagcaatggcagcatttgcctcgacatcctcaaggaacagtggagtcctgcacttaccatatcaaaggtcctcctgtcaatttgttcactgctgacggacccgaacccgatgat

SEQ ID NO: 1471 - DNA, 408 bp, Oryza sativa
  Clone ID: uC-osflcyp028d07b1
tgattgatgaagcaggttcacgtgtaaggcttcgacatgcccaggttcctgaagaagctagagagcttgacaaggagctcaagcaaatcacaaaagataagaatgaagctgtccgtagccaggacttcgaaaaggctggagagttacgtgatcgtgaaatggaattgaaggcccagataacagctctcattgacaagagcaaggagatgagcaaagcagagactgaatcaggggagacagggccactggtcaatgaagcagatatccagcacattgtatcctcgtggactggtattccagtagagaaggtatcaagtgacgagtccgataagcttcttaagatggaagagactttgcatcagcgtgtcattggtcaagatgaggctgtgaaagccataagtcgctcca

SEQ ID NO: 1472 - DNA, 430 bp, Oryza sativa
  Clone ID: uC-osflcyp028d09b1
tcctttctgaacacagcaccaccccttctgctgcatctcccacctccctctgaattgtgggcctgaggcgatggcggcgctcgccccgtccaagatgctcggcacccggctcaacttcgccggctcctcccgctacgccaccgcggcaccgaccaccggagcgcagaagatcgtctccctcttcagcaagaagcccgccccgaagcccaagcccgccgccgacacctcctcgagccccgacatcggcgatgagctcgccaagtggtacggccctgacaggaggatcttcttgccggagggactcctggaccgctcagaggtgccggactacctcaacggagaggtccccggagactactgctacgacccttttggcctcagcaagaagccagaggacttctccaagtaccaggcctatgagctgatccat

SEQ ID NO: 1473 - DNA, 488 bp, Oryza sativa
  Clone ID: uC-osflcyp028d10b1
taaggatttctatacctctggagaaaaatggtgagatcccagtgccttacagaccagacgttaatgtgagtaagatcaagtttgagcagttctcctttgaggaagcaaccgcaacactccatttgaatcttgacaacaaaaatgactttgacctgggactgaattctatggattatgaagtgtggctctctaatgtgagcattgcttctgctgagatgaaagaaactacaaatattaagaagcaggaggtaacaaccatgaatttaccaatcagcttcaggcccaaggattttggctctgctatgtgggatatgataaggggaaagggaactggttacaccataaaggggcacattgatgtcaatactccttttggacacatgaaaatacctatatgcaaagagggtggaactaccccgctttaagagggagacgatgatgacgacgacgattaccaggagtaaaaggtgatagggattgagaatttt

SEQ ID NO: 1474 - DNA, 479 bp, Oryza sativa
  Clone ID: uC-osflcyp028d12b1
ttgtctttgtccaagcgcccttcaaacccatctcctctcccctctccctcccaattcgatgcagccgcggtagcaattcgcatcgccccgccctgctcgccgcgcggattcgctcgccgcccccgccaccgcacccccatggacgcctgcgccggatccggcaatgcctccggtggcgccggcgccggcgcgtacgcgtgctgctactactccctgctcggcatccggaagaacgcgtccgccaccgacgtgcgcgccgactaccggaggctcgccatgaagtggcacccggaccggtgcgtgagcgaccccggcgaggccaatcgggggttccagcggatccaagaggcgtactccgttctgtccgacatggggaagcgagccatgtacgacgcaggcttgttgatcccctcgacgaccaccaccaggaattctccgatttctgcaagagatgctggtgatgatggattaccggaaaa

SEQ ID NO: 1475 - DNA, 367 bp, Oryza sativa
  Clone ID: uC-osflcyp028e01b1
gcttacctaggctggtggatttatgtacaggatcttttgtacgaggcaatattgttggtgcatatgctgggctattcaatagttttcaacattgcagtttgctgaagagtttatctgggttttgggatgctacaagcttgtttattccagtgattgctcctgtttgcaagaatctaacgtgcttgaaccttagctctgctccaatggtcaggagtgcttatcttattgaatttatttgtcaatgcaagaaactccaacaattgtgggtgttagaacacattggtgatgaaagattgaaaattatagcctcatcctgtatacagctccaagagttgagagtatttcctgcgaatgcaaatgccagagc

SEQ ID NO: 1476 - DNA, 339 bp, Oryza sativa
  Clone ID: uC-osflcyp028e03b1
taaatatcctactgggtatcttcctggtcggatggcacctcttaagaactttttttggaattatgtcattcgcttttgttgtacttgggatttattggttctatcagtacatgaagttttggcgtgaagttctgccactgcaaaactgtattactcttgtcattacattgggcatgcttgagatgtcattgtggtattttgagtatgctgagttcaacgagactggtgttcgaccaaagggcatcacattttgggctgtaacatttgggactgttaaaagaacagtagcccgggttattattcttattgtctcaatgggatatggagttgtcaggccta

SEQ ID NO: 1477 - DNA, 504 bp, Oryza sativa
  Clone ID: uC-osflcyp028e05b1
tacaccccagcagcagcagcagcagcagctgagcttgaagcagcagagcgaggtagacatggccgccgccaccatggccctctcgtccccggcgctggccggcaaggccgccgtgaaggtgttcggcgaggggcgcatcaccatgcgcaagtcggcggcgaagcccaagcccgccgcgtcggggagcccgtggtacggcgccgaccgcgtgctctacctcggcccgctctccggcgagccgccgagctacctgaccggcgagttccccggcgactacgggtgggacaccgcggggctctccgccgacccggagacgttcgccaagaaccgggagctggaggtgatccactccaggtgggcgatgctcggcgcgctgggctgcgtgttcccggagctcctcgcccgcaacggcgtcaagttcggcgaggcggtgtggttcaaggccgggtcgcagatcttcagcgagggcgggctcgactacctcggcaacccgagcctgatcca

SEQ ID NO: 1478 - DNA, 406 bp, Oryza sativa
  Clone ID: uC-osflcyp028e08b1
tcaaccgccgccgcatcgccctcgttagaacgatggccgcgtcggcgctgcaccagaccaccagcttcctcggcaccgcccctcgccgggatgagctcgtccgccgcgtcggcgactccggtggccgcatcaccatgcgccgcaccgtcaagagcgcgccccagagcatctggtatggacctgaccgtcccaagtacctgggcccgttctcggagcagacgccatcgtacctgaccggagagttcccgggagactacgggtgggacacggcggggctattggccgacccggagacgttcgcgaggaacagggagctggaggtgatccactcgcggtgggcgatgctgggggcgctgggctgcgtcttcccggagatcctgtccaagaacggggtgaagttcgggga

SEQ ID NO: 1479 - DNA, 304 bp, Oryza sativa
  Clone ID: uC-osflcyp028e09b1
taaaagaatttcaaagcttagccgaagatgccaatggagaggtcggtgtcgtgcgccgagaggccaccggcggcgttcggcggcggcgcagccgcggacctgcggtgctacagcgcgtcgtacgccacgtcgtacaagccgggcgctggcgcggcggcggcggcgggggcggggacgaacacgacgacgaaggtgatgaagcgcgccacgagcgccaacgcgtggtcgcggccgggcggcggcggcggcgtgcagcggagcgggagcaccaagactgtggtgtcctccgtcgtcgggtggagcc

SEQ ID NO: 1480 - DNA, 418 bp, Oryza sativa
  Clone ID: uC-osflcyp028e10b1
tcgcctccgtacgccacacgggagaagacggcggcggggagcccgcggcggctagggttttgattgatttgtcgccggctgacgcgccgcccgtcatggagagggagctgctggagacgttcgaggccgccaagaaggcggtcgacacggcggccggggcggacgactccccggaggccgaccgctgccttgacgcgatgcggtggctgtgcggtcttcgcgtcaccaccgacgttcctcgttttcacgcatggttggaaaatcgtcttctttaccttactatagtaccctcacttaaacatacaattcatggctacagattttttggggatccggaaaaaggttggtatccccataatggatagaaaaatgctctcacattataatgttgtatccacctattctttctccaaaaact

SEQ ID NO: 1481 - DNA, 475 bp, Oryza sativa
  Clone ID: uC-osflcyp028e12b1
taggttgtggatgcgctttgtgacgttgtttcagcctgaccgaccaaggcttcagctgctatcgttctgcaggccgagaaggacttgcagccctggattgctcgagatgatgagcaaggtcagaagatgtggagagtcaaccagcgaatagttaagctgatagcagagcttatgaggaaccacgatagcccagaagcattggtgatccttgctagtgcttcagatcttcttcttcgagcaactgatggaatgcttgttgatggtgaagcttgtactttaccacaattagagctattggaagtaaccgccagagcagtccatctcatcgtcgaatggggagattcaggtgtatccgtcgctgatggcctctccaatctgctgaagtgccgtctatcaaccaccatccgctgtctttcgcaccccagcgcgcatgtccctgcactcagcatgtccgtccttcgcgacatcttgaaca

SEQ ID NO: 1482 - DNA, 52 bp, Oryza sativa
  Clone ID: uC-osflcyp028f01b1
tgggcaatgcacctgtataaatttgtcacgtgcataagaaatttcacgatcc

SEQ ID NO: 1483 - DNA, 413 bp, Oryza sativa
  Clone ID: uC-osflcyp028f02b1
tcaaaggtggagactgcgattcacttccactcccttccccactgccttcctcctctcactctcactccccctgcgaccgccgccgagaggccatggcggagcaagctccactggcgccgatgcctcgagtcaagctcggcacccggggcctagaggtgtccaagctggggttcgggtgcatggggctcacgggcgcgtacaactcgccgctcgacgacgacgccggcgccgccgtcatcgcgcacgccttccgccgtggcgtcaccttcttcgacacctccgacgtctaccgccccctcgccaacgagatcctcctcggcaaggcgctgaagcagctgccgcgggagcaggtgcaggtggccaccaagttcgggattcggcggggcgcccaccgcgtgcgcgccgtgtgcggc

SEQ ID NO: 1484 - DNA, 491 bp, Oryza sativa
  Clone ID: uC-osflcyp028f03b1
tgggaaagtctggacagcaaggcgctgcgaaacccaaaggacctcttgaggcacttaggccaaagttgcagccaacacgacaacagcagcagcgttccaggcgcttgattaacacctcatcagaaaacgaggatggagacggtgctggtgctgaggatatgaacatcaactgacctgctcagggagtgttctgttgggaacctcatgattcaaagcagctcattgttcgtggatcgcagggaaggatatgatgtctttgatgtttccatagatatgaaaagaaatgttgtatttttcaaagaccgatgttaattcatcgcacagcttacctatatctgtgccaaatttcagcatagactaaaccattgtttgcatactgggttgcactccagtcgtgctacggcctattttgcaatggatattttaaacaagtttgtattggacaaaacagtggcaaatctacagtgttctagatgggatcatcctatgct

SEQ ID NO: 1485 - DNA, 468 bp, Oryza sativa
  Clone ID: uC-osflcyp028f04b1
taacaaccttgcactgatccacacacagccgcgaggagagagaaagagagaggagagagagatggcggcggagctgacggcggcgcagctgcgggcgtacgacgggagcgacccatcgaagccgatctacgtctccgtacgcgggaaggtctacgacgtcacctccggccgcggattttacggccccggcggcgcctacgccgtcttcgccggccgcgaggccagccgcgcgctcggcaagatgtccaaggacgacgccgacgtctgcggcgacctctccggcctctgcgacaaggagctcggcgtcctcgccgactgggagaccaagtttcagggcaagtaccccgtcgtggcccgccttaccgaatgaaaaaaaaaaatccccccaaatcaacccttagattattgtatcctcttgtgctctacagcttaattccatccgtaattccatgtgtgacttattattac

SEQ ID NO: 1486 - DNA, 385 bp, Oryza sativa
  Clone ID: uC-osflcyp028f06b1
ttggacgcgtggggccgacatacactgctattacccaacatgcaaagaatggtaaacctgccctggtgtttgtgcctacacggaagcatgcaaggttgactgcattggacttgtgtgcatactcgagtgctgagggtggcggaacacctttccttcttggttcagaagatgagatggatgctttcactggtggtatcagtgatgaaacacttaaatatactctgaaatgtggtgtaggctacttgcatgaaggtttaagtgatctggaacaggaagttgtaacgcagctgtttctcggtgggaggatccaagtgtgtgttgcgagtagcaactgtgtgctggggaagatcattgcctgcccatttggtggttgtgaagggaaccc

SEQ ID NO: 1487 - DNA, 261 bp, Oryza sativa
  Clone ID: uC-osflcyp028f07b1
tgactaatatatgccacagtctccttgctgccatgccttgcgtcacatggtgcaaggtactaggcccttgatcggagatgcgcacagcgtgcctaatccgttctgcccaaacccggatccagcggtcatcctgctaagcaccgtttcctgccacatcacgtgcgctcaccttcaggtgtttgaccaccttcgaggcactctggactccttgcatattattcattcttgattggcagtcctttgaattttgttgatgtttgt

SEQ ID NO: 1488 - DNA, 384 bp, Oryza sativa
  Clone ID: uC-osflcyp028f08b1
tgcctctgctggccacagccaccttcctgccgtgcgttgtgttgcgcgtgccagattggtagtagtaggctggtagtagcgcaccggttgcctccttcgttatccccaaaccccgcgccgacgggcgtcctgctcaccgacatttcctcccacccccgcgcgcgccccgtcgtctttctcgaacctcccgcgcattcttgtcaccttgttgattcttcattcttgatttgctctccttttttttttggtgattttggtgtttcttggcctgctactgttggctgcggcgagcggcggtcacctgccgtgcgttccctgttttttgctcagtccttgggttctccggtcgtctgacaccgccagctagctgagttgttgggggtt

SEQ ID NO: 1489 - DNA, 511 bp, Oryza sativa
  Clone ID: uC-osflcyp028f09b1
tcgcaagcaaccagcgaaccctagctacagagagattcgcatcaaggaagaagacgagagaggctcatttgaattagagatagagatgaagcccaggcccttcaaggaggagttcaccttggaggagagggccaaggagtcggccgccatgatcgcctcctaccccgacaggatccctgtcattgttgagaaattttcgaggagtaatcttccagaaatggagaagcgcaagtacctggttccatgtaacatgccagttgggcagtttattttcatacttcgttccaggctacatttgtctccagggacagcgttgtttgtgtttgtcaacaacactttgccccagactgctcagctgatgggcagtgtgtatgagtcatacaaagatgagggcgatggcttcctctacttgtgctacagcagcgagaagacatttcggtgaccaacttcttcctggagatctgcttttacctcgggcatcaataatatatgcatgtatatatattactat

SEQ ID NO: 1490 - DNA, 134 bp, Oryza sativa
  Clone ID: uC-osflcyp028g01b1
acacagttgaccgtgcccgccgcctgcaggggttcttgccaattccgcctcacgaccggagagcacacataggccttacagcaggcacgagccgccgctcgccctagccatcgcgctcctgctgttgttggccg

SEQ ID NO: 1491 - DNA, 426 bp, Oryza sativa
  Clone ID: uC-osflcyp028g03b1
tgttttctccgccaccgagcgcatctcggcgtcggcggcttggggggagagtcagagatgcatctgagcgagaacgaggggatcgagggcgtgcggttcgcggtgacgggcggccagggcttcgtcggctccgcactgtgcctcgagctgctccgccgcggcgcccgggaggtccggtccctcgacctccgggccttcttcccctggtccgaccagctgctcggcgccggcgtccgcttcttccaaggggatgttagaaagaaggaagatgtggggaaggctttgcgcggtgtggactgtgttttccatctcgctttgtatggcatgtcagggaaggaaatggtacaggctgggcgagccgacccaggtcaatataaatggtacatgcaatgtgctggacgcttgccaccagcattgcgttagaag

SEQ ID NO: 1492 - DNA, 307 bp, Oryza sativa
  Clone ID: uC-osflcyp028g04b1
ttggtggtgaaggaggtgctgccggaggagaagaggaagcctgagccggccgcttcatcggctgggtttgatgatttgatcccagggtttggcgggaggatcccgatgcgtgccagggagactgttggaactaaagataagaatgtgtccatgtcaacgtctaagccagctagcatggcaagtgacccatttgatgttcttggtacaacttcaacctcaaagcatacatgttcagggatattcacggatcccttggatgaaccggtcaggcctgcaaaatctcaagggaaaaaaacatgataatact

SEQ ID NO: 1493 - DNA, 448 bp, Oryza sativa
  Clone ID: uC-osflcyp028g09b1
tggccggtacaacttcgacggctacatggagctcatggagatggcccgcaagaccggcctcaaggtccaggccgtcatgtccttccaccagtgcggcggcaacgtcggcgactccgtcaacatcccgctcccgaggtgggtggtggaggagatggagaaggacaacgacctcgcctacaccgaccaatggggacgccgcaacttcgagtacatctccctcggctgcgacgccatgcccgtcttcaagggccgcacgcccgtcgagtgctacaccgacttcatgcgcgccttgcgcgaccacttcgcctgcttgctgggcgacaccatcgtcgaaatccaagtcggcatgggccccgccggcgagcttcggtacccgtcctacccggagagcaacggcacctggaggttccccggcattggcgcctttcaatgcaacgacaggtacatg

SEQ ID NO: 1494 - DNA, 498 bp, Oryza sativa
  unsure (1)..(498): unsure at all n locations
  Clone ID: uC-osflcyp028g10b1
tgttcgcttttctagattcagtctgtcagcggcgacggcgagggagctgcgagatccggccgtgagatggtggtgatccgaaggagtcatcgtcatcgtcgtcgggttggagcctcttcgtccaagaacctgccttgatcttgcagccttgttcaagcttccgagtcttttgctgatccagggtgcagtttcttagcatgtgagtaatggcagctgctgaaacaagggctgcttggcagcgtgctgctaaccgctgccgggttcaagaggacgcaaagagagctccgaaactcggttgctgcccgccatctgggcaacagcatgagaccaacaatggaaatcaaacaaatccgcaagactgccatatccncaactttatgcctttaaactggaatgcaatgaactccaatctgccaaaagatacccaatggtggcttcagttgcagcccaattttgggtgccagaatgtgcttgctagcgaggacctgaattatatgt

SEQ ID NO: 1495 - DNA, 531 bp, Oryza sativa
  Clone ID: uC-osflcyp028g11b1
ggactcttggttttctgttatgtatattctttggtcttgcacttgcactggtgtcaagtggcattctccctgcattcacggaggatattgctcggtctgtaaatgttgtgcatgttgttgacactacaacggtgaatagtggtaatacagaaccatcatcatatgttactctgttctccaatacacctggaaagttgacaaaggaattagtagaccttagagatgaagaattttcttgtgggaggaatagggctattgattttgttacatttaccatgaaatatggctgtttgagttacgaagggaccaatactggatggagcaaatcagaagtgccagtgctcagtttgaaaagtgattctgttaccaatgatgctcgacaaacaataatatcagttgatactaagtcatctacgcgttggtcactggcaatcaataaacaagaaattgatgacttcacagttcatgtggattcggagaacttggttccactgggtaataagaacgagatcgatgggtgcatacaatcca

SEQ ID NO: 1496 - DNA, 527 bp, Oryza sativa
  Clone ID: uC-osflcyp028g12b1
ttgaggagagagagagagagaggaggaggaggaggagagcggcggcggcgatggcggggaaggggttgaacgcgacgggggagttcttccggcggcgggacgactggaggaggcacccgatggtggggaaccagctgcgccacgccacgccggggctcggcatcgccatcgtcgccttcgggatctacctcgtcggcgaggccgcctacaaccgcctctaccgcccctccggcgaccaccaccaccactagatcgcgtcggcggccacgcgcggagacccgcgccgcctccccgaggtgaagtggttggagcaatctttaccaagcaccaatgttgttgatcttttccagtttgagttcataaggtctgccatgaggcccatgaccatcatgtaatttgcaaccagggagacatgaatcatgtacttttatatcaatgttctgggcttataatccagcatttgaaaatggaagtgacactaataattctgaagtttaaaaacttaattttcttctctcttttatatt

SEQ ID NO: 1497 - DNA, 326 bp, Oryza sativa
  Clone ID: uC-osflcyp028h01b1
tggagaaggaggcggccaagactgctgacatgaaggagaaaggcgccgacccctacgatctcaagcaacaggagaatgttttagccgagtcaaggatgatggtcccagactgccataagcgacttgaaactgcactggcagacttgaaagcaactctggctgaattgaaggaatcaaatgaacaaggtgctgagattggagaggctgagagtacaatcacagaagttgaagctgtcgtcaagccaacagaagattgaattcgttttttatgaaatccctgcaaacctctgttctgttgggggcatagtagctcaactagtattatg

SEQ ID NO: 1498 - DNA, 369 bp, Oryza sativa
  Clone ID: uC-osflcyp028h02b1
tattgtcacttccatctcattctcctaattgtcatcactagcttctagctagcttaattaattaattagccatggcggaggagaagcaccaccaccacctgttccaccacaagaaggacgacgagccggccaccggagtagactcctacggcgagggcgtctacacgtcggagacggtgaccaccgaggtggtcgccggcggccaggacgagtaccagaggtacaagaaggaggagaagcagcacaagcacaagcagcacctctgggaggccggggccctcgccgccggcgccttcgccctgtatgagaagcacgaggcgaagaaggacccggagaacgcgcacaggcacaagatcacggaggagatcg

SEQ ID NO: 1499 - DNA, 460 bp, Oryza sativa
  Clone ID: uC-osflcyp028h04b1
tgcaagtcttactgtcctttttgcgtccgtgtgaagaagttgttcgagcagcttggagcaactttcaaggccattgagttggatggggagagtgatggatctgagctgcagtcggcacttgctgaatggactggacaaaggactgttccaaatgtcttcatcaatgggaagcatattggtggctgtgatgatactttggcattgaacaatgaagggaagctggtgcctctgctgaccgaggctggagcaattgccagttctgcaaagacgacaatcaccgcatagttcttcgtgggacactgggactagccttcgttgacctctttatactgcatccattctattagataataaaggtggatgtttgtttggcaagaccattacttgttgccgtctagtatcgtgtgatagctatcctgtgccccggtgaaactccttggacatcaataatatcgtcttt

SEQ ID NO: 1500 - DNA, 524 bp, Oryza sativa
  Clone ID: uC-osflcyp028h05b1
ttcaggaagctgtccctcaccagggccctcttctacatggtgatgcagtgcctcggcgccatctgtggcgccggcgtcgtcaagggcttccagaagggcctgtacgagaccaccggcggcggcgccaacgtcgtcgcgcccggctacaccaagggcgacggcctcggcgccgagatcgtcggcacctttatcctcgtctacaccgtcttctccgccaccgacgccaagaggaacgccagggactcccacgttccgatccttgccccactgccaatcgggtttgcggtgttcttggttcacctggccaccatccccatcaccggcaccggcatcaacccagcgaggagccttggcgctgccatcatctacaacaggggccatgcctgggatgaccattggatcttctgggttggccccttcattggcgctgcccttgctgccatctaccaccaggtggtcatcagggcaattccattcaagagcaggtcggaacctgcatcaactattatcactgtcaagatgcc

SEQ ID NO: 1501 - DNA, 478 bp, Oryza sativa
  Clone ID: uC-osflcyp028h06b1
tctttatcgcagaatgagctgttatatgctgaagttgagtacatgcagaaaagggaagttgagctgcagaatgacaacatgtacctgaggagcaaggttgttgagaatgagaggggacagcagccactgaacatgatgggggcagcatcaacaagtgaatacgatcatatggttaataacccatatgattccaggaactttcttcaagtgaacatcatgcagcagcctcagcattacgcccatcagctgcagccaactacccttcaactcgggcagcagccggccttcaattagttttggtgtagacaccgtacgtacacacgtacgttagatgaaatctgaaggcgtcgatacccgcggctacgtaacagcgtgatcaacctgaagaaatcgatgcagtaattctatgtgttcgtcagatcatcataaccagtattgtcattaggcgttgtgaaaaaaaaatgtgttagcatgcatt

SEQ ID NO: 1502 - DNA, 74 bp, Oryza sativa
  Clone ID: uC-osflcyp028h08b1
tcttcctctcatttgtctcgctaaatccggcccgcgcctcccgtcgcgtcacggtaggtggatagggggaggac

SEQ ID NO: 1503 - DNA, 412 bp, Oryza sativa
  Clone ID: uC-osflcyp028h10b1
tgccgcctcccccacttggaagttgcaaagcgaagcccaccaacctcaaaaacccaaaccctagctgtcctcgccgccatcccatggcgcgcctccacctcgtggtcgtggccatggccgcgctcttcgccgccgcggcggtggcgcagggcccgagcgcctccccgacgccggctccgaaggcgcagccaccggtggcgaccccgccgactcggccgccggccgtggcgccggtgtctcctcccgcctgccagccgccagtgacgacgcctcccccggtttccgcgcccgcgcccgtgcccgccccgagcgccgccgtgacaccgtgaccccaggcctgggggccgaccgcggagccccccgtcctcttgcccgccgcgccggcttcggtgtcgatctcccagtccccgac

SEQ ID NO: 1504 - DNA, 536 bp, Oryza sativa
  unsure (1)..(536): unsure at all n locations
  Clone ID: uC-osflcyp028h12b1
tcggacgcgtggggctattcattcggtctttacttaacatccctgaacttcaatttgcaggtttgacagctggtttcatattttaagataccactcagtcaaattcttgtggtaaatattgtcaatttgtcattgctcccatcatctactactgctactactacatcattagcttcttgtatctgaaattgaaacacatttttcaccttccacattgggatatctagaaaccaataggattttttattcataataatgtgttcttgaggggtgcatatctagagatgcaagtgaggactggagttccttagttttgagatgcatgaatattttctcgagaagtacagtaattttgcttttgcatttgtattttcttcatcattgagttctcccaggagctttttctacttgagatttagctcttgttctgaaactttgggatcaacagagcaatttaagtggaattgttctcgtgattttgatgccagnctaatctaaatacattttgttttctgagcagtcagatgcatgagcag

SEQ ID NO: 1505 - DNA, 449 bp, Oryza sativa
  Clone ID: uC-osflcyp029a02b1
ctcacttctagatggggtgacctcgatgtcaatcagcatgtgaacaatgttaaatatattgggtggatccttgagagtgctccaatttcagtactggagaagcatgagcttgcaagcatgaccctggattacaggaaggagtgtggccgagacagcgtgctgcaatcacttaccaccgtgtcaggggaatgcaccagcattggcgccgacaagcaggcttctgccatccagtgcgaccatcttgtgaaggctgacattgtgaaggcacacacagagtggcgaccaaagcgatcgcatgcagcagctgagaacgcgtaaacaaacaaaccgacgaaaatctgtggtagggagaatatcaaacttcccttgcctctgttgccctgaagctgatcttgaagtgtgagttgtattctgtaaaaaattagtagtttccatagtgtgaggttgga

SEQ ID NO: 1506 - DNA, 491 bp, Oryza sativa
  unsure (1)..(491): unsure at all n locations
  Clone ID: uC-osflcyp029a03b1
gtagcactcgtctggaaactctgatctagagctagctatagcacttcaacaacaggagtttgagcggcaacaacctcaacgacaccagtcgtcaacacagcagcaggagccggtgccccagcagcaacagcagacacccaatcaatcacatggcacaggtcggccaggattagttgttggtccaacaacggcaaggaggccacctgctccacagccgacgacgcctaagaaagagaagtgcatcgtgatgtaaagatacaacatatcggagacgggacaggagaaaggaaaagggagggggacaaggagcatcacatagtatactgtaaagaatcttcttgtctactcttcttctttagtgccgcggcatagcagcagcctgttgtttttttagccacttttcccaatcttgagcgctcttcatttgcgtgatttttcttccctggtgtaaataaccttcaaagagtcantaatacgtaacagatgctgtc

SEQ ID NO: 1507 - DNA, 467 bp, Oryza sativa
  Clone ID: uC-osflcyp029a04b1
gtcaaaccctagccaaatccacgatcggggctagctcgtcggcggcggcgatggggaacccggagaagctgatgacccagatcttcgacctcaagttcacctccaagtcgctgcagcggcaggcgcgcaagtgcgagaaggaggagaaggagcagaagctcaaggtgaagaaggcgatcgagaaggggaacatggacggcgcgcggatctacgccgagaacgccatccgcaagcgcaccgagcacatgaactacctccgcctcgcctcccgcctcgacgccgtcgtcgcgcgcctcgacacccaggcgaagatgcaggtcatcggcaagtccatggccaacatcgtcaagtcgctcgactccgcgctcgccacggggaacctgcagaagatgtccgagaccatggacaacttcgagcgccagttcgtcaacatggaggtccaggccgagttcatggagggcgccatg

SEQ ID NO: 1508 - DNA, 460 bp, Oryza sativa
  Clone ID: uC-osflcyp029a05b1
ggagaaaattgcatagtgcgagctaagcgcaattgggcgaacgccgcgagccgccaccaagccaaaccagagcactccgccgccgcgccatggcttccccgtccccgtcctcctcacctctccacccgcagcatcaacaccagcacccgcttcccccgcacccgcagccccagtaccaatccctctcccgccccacctctccccgcacgatccgtcgctgctcctctccctcgatgtcttccactccaagccctccgattcgcccaagccgctcgtcggctccgcccgctcccctctccgtgacctcctcttctcaaccaaccctaaccctagccccgattcccccgcctccgcgctgatcaccctaccgctcctccgcccctccggccgcccacaggggaagctccgcatccgcctcgcccttcgcgagcgctccccgtctcctcccgagccgcagtat

SEQ ID NO: 1509 - DNA, 477 bp, Oryza sativa
  Clone ID: uC-osflcyp029a07b1
gtgggttggcttctcctccccctctttaccttttcctcctcggttcggttccgtggttcgtctagggtttagtgggttgagatggcggcgccggatgtcgagtaccgctgcttcgtcggcggcctcgcctgggccaccgacgaccgctccctcgaggccgccttctccacctacggcgagatcctcgactccaagatcatcaacgacagggagacggggaggtcacgtgggtttggcttcgtcaccttctcctccgagcagtcgatgcgcgacgccatcgagggcatgaacggcaaggagctcgacggccgcaacatcaccgtcaatgaggcccagtcccgccgctccggcggcggaggcgggggctacggcggcggcggtggcggctacggcggcggtcgtggaggcggcggctactgaggaggtggcggcggcggctactggcgccgtgagggcggctaccgtggcggcggcggc

SEQ ID NO: 1510 - DNA, 332 bp, Oryza sativa
  Clone ID: uC-osflcyp029a08b1
gctccgcagctagctgtgatggcagttgtcttggggcctgatcaagttgccacggaggcacggcggatagtcgacatggattgtcggccatgggtgaagaagtatcatcgcaccaccggagactgactgtcgaactgactacaaggttgacctgatcaccacactcacaaagtcgtgctctgttgcgcagaatatcaactatcaagggctacacgtactcctaagcaaaagatggactcggttaaagcgataccgagatggataggtggctgaccaacattgatgctctgtgacgctgagacaggagacactgagcttgattagggtgtcta

SEQ ID NO: 1511 - DNA, 567 bp, Oryza sativa
  unsure (1)..(567): unsure at all n locations
  Clone ID: uC-osflcyp029a12b1
gcagatgtgtaactactcttcgatggatggtgtcctgtactgcaagacgcactttgagcagctcttcaaagagacggggagcttctcaaagaaattctcgcaaggtggtaaatcttcagagaagagcgaccagggaagagctcctagcaagctatcttcagcattctctggaactcaagataaatgtgcagcctgccaaaaaactgtgtacccattggagaagctaactctggagggtgagtcttaccacaagagttgcttcaagtgctcgcatgggggctgcatcctgacgacgtcttcctacgcggcgctcaacgggatcctctactgcaagatccatttctcgcagctgttcaaggagaagggcagctacaaccacttgatccagaccgcacaatcgaagcagaaagagtccgaggaggctgcaccggtggcggccacagaggccagcgagaaagacaggatgtgccctcacangacgcgacatagagcatagattanggggataaccagacccggtatatatatatatatatatatatatatatatatatatatatatatata

SEQ ID NO: 1512 - DNA, 353 bp, Oryza sativa
  Clone ID: uC-osflcyp029b01b1
tttatttacagccaaaagggtcatgaggaaattgggtttgtgctctccccaaaatcctccatatatagtgcacaggaggcatcattctgttctatacatatctctcccttgcttgctttgctcctggatatatagctagcttctttctttcttcctctctccctgtgtggcacgcgcctccaatcgatctcttcggcgagtagacgcattgagatcggggggaaatgttggtccagttttacatcggagcatgtttgctatgtcaactgcaactattgcaacactattcttgtggtgaatgtgccaaacaattgttcctacaacattgcgtctgttagatgtgggcattgcac

SEQ ID NO: 1513 - DNA, 567 bp, Oryza sativa
  Clone ID: uC-osflcyp029b02b1
gctcgtgccgccgccgccgtcgccgtcactctcctcaggtaaggaggaggaagatgtcgcacaggaagttcgagcacccgaggcatggatccctcggcttcctcccgaggaagcgctcctcccgccaccgcggcaaggtgaagtccttccccaaggatgacgtatcaaagccctgccacctttccttcgttggctacaaggctggaatgacacacattgtgcgtgaggtcgagaagcctggctccaagctccacaagaaggaaacctgcgaggctgttaccatcatcgagacccctccgcttgtcattgttggactcgtggcctatgtcaagacacctcgtggacttcgctctctcaactctgtctgggcccagcaccttagcgaggaggtgcggagaaggttctacaagaactggtgcaaaagcaagaagaaggctttcactaagtatgcccttaagtatgacagtgatgctggcaagaaagaaatccagatgcaacttgagaagatgaagaagtacgcatctattggtcgtgttattgcccacactcagatcagaaagatgaagg

SEQ ID NO: 1514 - DNA, 485 bp, Oryza sativa
  Clone ID: uC-osflcyp029b04b1
tgcatccccaccagttgaaaccaaaccaaccaaccaccaccaccacccgccgccgccgccgccgaccgcctcgacccccatccccatggcgtcggcgtcgcggctgctgccgcccacgccacctccccactccgccgcatcccctcctgcccgccaccgccaccccaccctcgccgccccgctctcccgccgcccgatcaatccgccgcgcctccggtgccgcgccgcctccgccgccgccgccgcgggggcggcagccaccaccaccaccggcggcggcggaggcgcgctggtgctggaggggaagcggcgcgggcgcggtggccgtgcgggagttcgtgacgctcgacgagctccgcgccgccgtgcgcctccgcatccgcactttctacgagtacgccaccgactcctacggggccgaggatctcagaaaatctctggcagaccgggagtatgacgcattacaggatcgaatttctggggag

SEQ ID NO: 1515 - DNA, 552 bp, Oryza sativa
  Clone ID: uC-osflcyp029b06b1
ttcttcttctccaaaaaaatactagtgtaatgtgtgatttgtgagagatgatggagctgtgtaggattcgaaccttccagaagagcctactgaggcccctcctcctcctccagcatgccccttgtagaaccctccaaaccctagggcggtccccttcgccctcggtgttccggcccccccgccgccgccccccgctcctcctcctcctcctccgctcctccttcgcctccgtctctccgggtccggcccccgggagcgggacaggcgaatgccccccgcccccgcccgcgcccttgccgcccgacgagctcgcctgcgacgacgactcctactaccacgagcacattctcgaggccacgcaggaggaccaaagtcgcctcgttccagtcaaggcctacttcccctgcaccagcatcaacctcaagagtctccagtcccagaattccttcaatgttatccctcccacttcgcgtgctaccaactacgtcggcctcaggtactacgatgtcatgggagacccagagggttttaaggctggcatcatagatgaaa

SEQ ID NO: 1516 - DNA, 425 bp, Oryza sativa
  Clone ID: uC-osflcyp029b07b1
ctacgaagagagctcagctgctgcctctagcttacttggtgataaggaggaggaggaggaggagggcaccgacatggccgcagccacggcgtacaccgtggcgctcctcggcgccaccggcgcgcgcgtccccgccgctccacgctccgccgcgcttctgccgcgccgcggcggcgtgctccaaccgctgcgcctccaggacgcgccgcgactgtccctgctccgcgtcagggccgcctccgacgacacctccacctcggccagcggtgacgagctcgtcgccgacctcaaggcaaagtgggaggcgatcgaggacaagccgacgttcctcctctacagcggcggcgctgtcgtcgtcctctggcttaccaccgtccttgtcggcgccatcaactccgtgccgcctgctccccagatcctggagc

SEQ ID NO: 1517 - DNA, 289 bp, Oryza sativa
  Clone ID: uC-osflcyp029b09b1
actagacagtatggtaggtaactaactacgggactctggaccgcacggggatggactactacaccacctaccaggatacagtcgaagggctaatgttcaccgacaagcagaccgagaggcgggagtggccaactacggctatcctaacggcagcaagggcggcaggatcaagggcatgcacgagtggctcaatcgagggggtcaagacagtcgagaccataaggtacctgccaccacatcaccgtggtacgatctgacgacgcagatcgagaacctgcttcgagccaag

SEQ ID NO: 1518 - DNA, 488 bp, Oryza sativa
  unsure (1)..(488): unsure at all n locations
  Clone ID: uC-osflcyp029b10b1
aatggatcacatggataccgatgaaccaaatgcagtacgtggaacaattgggcatatcgcaccagaatatctttcaactggaattatctctgagaaaactgatgtatttggttatgggattatgcttttggagcttattacaggacaacgtgcctttgaccttgctcgtctagccaatgatgatgacgtcatgctactggactgggtaaaaggattactcaaggagaaacggctggagatgttggttgatccagatctacagagcaactacattgatgttgaggtagaatcactaatccaggttgctcttctttgcacacaaggctcccccacagaacgccctaagatggcggaggtggtgaggatgcttgaaggtgatggccttgccgagagatgggaggagtggcagagatagaagtagtaccgcaggaggtagagcttgttgggaatagtcacacatngtttatttagagagagtctgacctaac

SEQ ID NO: 1519 - DNA, 228 bp, Oryza sativa
  Clone ID: uC-osflcyp029c01b1
ttttgtttagttgcgagagagagtgtgtagagatcagcttgtttgttgagtgcctgcaggtcatgaagatgctggtgaagctgtgggaccacttggcggccggtcctaggccggagaccggcctcgagaagttgacgggggccgctacaacccgacctcttgtcatcaacaaagatggcgacggccaggcgagctgcgttgcgttctagcgctcgcaggctatgccga

SEQ ID NO: 1520 - DNA, 561 bp, Oryza sativa
  unsure (1)..(561): unsure at all n locations
  Clone ID: uC-osflcyp029c02b1
attctcttccacccccgaaaccactccaaaaccaaaccaaatctcgcggcgcatggcggcggcggcggtggcggcgaacggcggcggcgacggcgcgcaggcgtccaacgcgcccgcccccaccaggctcgcgtcggtctacagcgaggtgcagaccagccgcctcaagcacgcgctccccctcccctccgtcctccgctcccccttcgccctcgccgacggccccgccagctccgccgccggcaaccccggtgagatcgcgaagctgttccccaacctgttcggccagccgtccgtgtcgctggtgccgtcgccggagccggcgtccaccaggccgctcaaggtcggcgtcgtgctctccggcggtcaggcgcccggcggccacaatgtcatctgcggcatcttcgattacctgcaggaatatgcaaaggatccgtcatgtatggattcaagggaggtccagctggagtcatgaagtgcangtacgttgagctcactgcggattatgtgtacccctacagaacccgggtggatttgatatgatctgcagtggtagggaca

SEQ ID NO: 1521 - DNA, 499 bp, Oryza sativa
  Clone ID: uC-osflcyp029c03b1
ggagaggtgtatgcttgggggagaggagagcatgggaggcttggatttggagatgataaaagtagtcacatggttccccaaaaggttgagcttcttgctggagaggatattattcaggtatcatgtggaggaacccattcagttgcgctaactcgtgatggacgaatgttttcttacggtagaggtgaccatggccgtctgggctacggcaggaaggtcacgacgggccacccgatggaagtccccatcgacctgccgccgccgggaaccagcggcggcgactccggcgggcaatggcaggcgaggtacgtcgcctgcggcgggaggcacacgctggccatcgcgacatggacggaggcagacgagtaatcgatcgcctcttggttttttaaagccaaatcccggagctggtacagataatactaccgagtacttttcgtgcaataagaacaggctaatgttaaaatgatctctgagatgtatgagctgagtgatgaat

SEQ ID NO: 1522 - DNA, 498 bp, Oryza sativa
  Clone ID: uC-osflcyp029c04b1
aacagcaaccccagaaaaagatcaacaggacagcaaggtgcttgatcatagtaggaaagaatgttttgtcattcggataaggcagagggatttggcggagaggtgctgaaactcccatagcagtgaaatgggaggacagaatcattgagattagagagggttcatggtcatacattgcaaatgcaagctccgtcggttatgctcctggtggtgggaacagcaaccccagaaaaagatcaacaggacagcaaggtggtttggcgcttttcaactggagatgtactgacggtaaagttgggagatgacttaaactttcatattcgaaatgaaagctcaggagaagaggcaaggcttcttgtgggaggagattgaactacagaataaacaaggaaagcacattaaatgaccgcaatgatgaggaggaataccttaccctagttcgtacatcacctgatcatctaggtgacagagcaactatgctcctcaactggaaactac

SEQ ID NO: 1523 - DNA, 536 bp, Oryza sativa
  unsure (1)..(536): unsure at all n locations
  Clone ID: uC-osflcyp029c05b1
cgcgaatatcgccaccttcttcgagcagtggaaaggggacgaggcgataacgacaaaaacacctccaggcaagtgcctcttgagctgcaacaagaccatcggcgaagttaacgccatcctaacctgcggacacacctacatggaagacaggccccccatcatccaccagaacctcaccgtcttgttccatggcggccacccgccgtcactctgcaagagtggatgccttgacggctcgtcgtcagagggtgaggtcctcctcgccaccaagttcaactatatatggagcttgttggatctcatggaagctgtcctaccggaatatctttctgagactgggactgcgacgacgacggtaccatctcccgacgtcgctgcggcggcggccccggccccatgagcaactacatatgcatgcagtcccttcgattcgatcgaccacaccacaacagtgcagtgcatacacgcatatacttactatgtatctaagaaataataagattncacagagagcatttaagaatcaagtttcacta

SEQ ID NO: 1524 - DNA, 482 bp, Oryza sativa
  Clone ID: uC-osflcyp029c07b1
gcgcttaggcgcacgcacgcacgcacatctctcgagcccctcaccctccccttcttcctcctccttccgccgcattgctcgtcgccggcggcgaccaaccctacccctctctctccctctcgagcggcggcggaggcggtttccggtagtggcggcggcggcggggacaggaagaagccatgtgcgatttggtggcgagaacggggcggcaccagcagcgctacgagcatgggcgtcgactcgtggccgggtgcataccttttagatataaagataacaatgatgaaacttctgatgatggacacaagaaacttgtggaagttctcatgatcaactcccagagtggatctggtctcctatttcctaagggaggatgggagaatgatgaaactgttgaagaggcagctgctcgtgaagctattgaagacgctggagttcgaggagatttagtgcaattattgggcttctacgacttcaagagc

SEQ ID NO: 1525 - DNA, 414 bp, Oryza sativa
  Clone ID: uC-osflcyp029c08b1
aaccccctactcttcctcctacacctacctctgctgcttcccagccagatccgcctcctgctcctcccctgctccctcccagatctcacactgcatctcgcgagcgcgccgacgcgggacagctcgccaccccgcccagatccaccgtgtcgccggagccggagagaccgagcggcggtcggcggggaggaggatggccgtggggaaggagggcggcggcggcgctggcggtgaggggggcatgtcggattcggtgatccggaaggtgctggagccgctacatgcacgcggcggtgtggatcttactctcctttacggccatcggacacaacaagtacatcctggaccgcaagatgtacaactggaccttgaccatctcgatcaccatggtgcacacggccgtctgctcggccc

SEQ ID NO: 1526 - DNA, 513 bp, Oryza sativa
  Clone ID: uC-osflcyp029c09b1
gtacctgctccggcggctgaccatcatctcgatcccgttcgtgttcatcgccatcccgtcgatcgtgatcatcgtcgggatgctgtcgccgcacgcggcggagccccgcgaccagtcgtcgccggcggcgccggggcggaaccactcggtgtccatgctgagcaccatgaccggcggccagatgatcctcagctgccgcaccgccttctccggcaactgggagtacttccactacttcatcctcgacccctacaagccccagcgcgccttcttccagccaccgccgccgccgccgaactccgccgccgccgtgccgtacgccatcctctgcaagtgggggtacatgggcaacttcctcaggacgtcgtcgtcttaacagcagcgccgcctacgcgccgcggtgccgcgtcgaggaaggcgggtgccactacctgttcgaggacgggacgatgtttctcgtcaccgggcggcgcgccaccagggccgcgccggcgcggcggaaggagaagaggc

SEQ ID NO: 1527 - DNA, 395 bp, Oryza sativa
  Clone ID: uC-osflcyp029c11b1
tgaacggctataattaggcggttccaaaacgcgcccccacgcttttgcgcccacgaccccccgcgactcccccgctaattacacaactcgccaccaccgtaacgggcaacgcccagaagcgtccgcctccccctccctccgagggcgagatcggaacaaggcccccacccaaccaccgccgccgtcgccaccggcgatcgccggcgacccccgggccacgggaggcgccccgccctcctcgccattggagaggaccttctctcctgctcggattcgtttgctctggtggtggtggtggggcttttgctggcgcgaggccgcgcctgccatgccggagaccgggccctacggccacaagaagaccgacggcatctgcgacggcgtgtgcggcgagc

SEQ ID NO: 1528 - DNA, 472 bp, Oryza sativa
  Clone ID: uC-osflcyp029c12b1
ggaaatagtacacccgaaaaaggtaatttagaagacagtgaaacagattcgcttgctgaatcacctcagggtggaaaaggattctctagaagagcaccagttaggtaccataataatgaacatactccacagaatgtaaggcccggtggttcagtaagcgaccagcaaactgaagtactttgctccaatagcaatggtagcacagccaaaaacagacattttggtcctgcaattaatcagaaactgaaggcacatttcaaggaagatccataccctagtcgtgcaacaaaagaaaatctggcacaagagttaggccttacatttaatcaggtcactaaatggttttccagtactcgtcattacgcaagagtggcagtcacaaaaaaggagaacaacattgaaaatcatacggctgaggataataacaatacccacacctgtgatagcatacaactgaaaagatccaatgata

SEQ ID NO: 1529 - DNA, 323 bp, Oryza sativa
  Clone ID: uC-osflcyp029d02b1
tccacgtgaaagaattgagatggcgcagggccattcactttaccggccatctcttcttggtcaacctaaaggagatgccaaagcttaggcagttcttcctttttttttggtgctagatatcctgtaagctctgtgtgctattatgcttgctgctgctgctgttgttgtaacactagtgagttccagcaagggaccaagatctcagttgattgcttcaagacttgttgagcttgttatgtagtttgatttgttaaacgcctgaaatgtgtacatagacgttgttttgtgtgatccaataataaaatatgcaaaaggtaatgttc

SEQ ID NO: 1530 - DNA, 513 bp, Oryza sativa
  unsure (1)..(513): unsure at all n locations
  Clone ID: uC-osflcyp029d03b1
ttcgtactcgcctctctccgcgccctcctccgccgccgctcgccgccgttcgtctccgccgccaccgccgccgccatgagggagtgcatctcgatccacatcgggcaggccggtatccaggtcgggaacgcgtgctgggagctctattgcctcgagcatggcatccagcctgatggacagatgcccggtgacaagaccgttgggggaggtgatgatgcttttaacaccttcttcagtgagactggtgctgggaagcatgtcccccgtgctgtcttcgtcgatcttgagcctaccgtgattgatgaggtgaggactggtgactaccgccagctcttccaccctgagcagctcatcagtggcaaggaggatgcagccaacaactntgcccgtggtcactacaccattggcaaggagattgttgatctgtgccttgaccgcatcaggaagcttgccgacaactgcactggtcttcagggctttcttgtgttcaacgctgttggaggaggaacgggc

SEQ ID NO: 1531 - DNA, 516 bp, Oryza sativa
  Clone ID: uC-osflcyp029d05b1
ttcctcgtcgtcgtcttcctcctctttcctcctcctccccgtctctccctctccgcttctctctcccaccaaccccccgcccccacccatggcgctcgcatccggcacgtcctgcgccctccccggcgccgcgcgcccccacctcgccgtgtccccctctccgcccgcctcctcgatccgtttctgcagaggcggctcccgcggaggcagggccgtcgtctccctccgcgcctccgtgcctccagcagcagcggcagcaacaacatctggtagcattgcacctgcaatttcattgactgaaaaggctttgaagcatctgaataaaatgagggctgaacggaatgaagatctctgtttgagaattggagttaggcaaggtggatgttctggcatgtcttacaccatggagtttgaagatcgatccaatgccagccctgatgattcagttgtagaatatgatggctttgcaatagtctgcgacccgaagagccttcttttcatgtttggaatggagct

SEQ ID NO: 1532 - DNA, 495 bp, Oryza sativa
  Clone ID: uC-osflcyp029d06b1
ttcgagtgggatcgtgaggcccacttatcggtagcacccggtggcggcaactcgccggagaccgaaccgctcgccggagacccccccccccccctgggcgccgtgaagccacggcgccgccagagctcgcttctaggagtcactgggttctacaccactcagtccaatcaaaccaaggcgaggggagtgccgctccgcggtggaaactcagagatcgagggaggaggaagatggccggttggtcgtcgccgccgtcgcatatcacgcgccggcggtcacgtggacaggccatggcggcgccgcccattctgctgtttgctcggctgcctggtcactgaccacctgaaactgcacctgatggtcattcaggcagtagcttcttatgatctccatgctcttcaccagcgtagaaatcgccggcttgttgtcgtggaacatattcccaccaagaaggatggaaataacctgcatattaacagtgcatcttcaccatat

SEQ ID NO: 1533 - DNA, 534 bp, Oryza sativa
  unsure (1)..(534): unsure at all n locations
  Clone ID: uC-osflcyp029d07b1
ttttcaaatgttagaaacttgaatgcttccttgcaaaaccctatggatggaataataaatactacactctacataagctatctttccaactacattgtggagattagcaacgaaaatgtgctaggcccagtcagtatacttgcaagtattggtggcctttatgccttcagtgtggcaatatttctttgccttatggctcaatgtgaagctaggataaaaaagcttcgagacgaggattccagaatgctaaaaatactgaggaaaagacgtgctcaacagaattgggataagggagngacagtttgtcatgtatacctggggccctagcaacttggatccaagtgatagaagtggcaaatggcctgaaagttcagtgatggattctctcatggatccttccaccgaaaagaaaaccgattagacgagcaacctcgaatggtaacaaacctaagagaaatcctgctgacgcgggagttattgacatcgaaagagttggngaaatgcaggagtcgagtagttctagacaggcttaat

SEQ ID NO: 1534 - DNA, 447 bp, Oryza sativa
  Clone ID: uC-osflcyp029d08b1
agacaatgtactgtaggaccatgtcatgaatttgacagctcttcaccttgccgttgctgttgttgttgataggctttaccaaattcctgccaatgagttcattgaggctgtcttctgcaacttcatcggcagtcttcccatgctcttcagtaatgaatccttcagcaatccatcttcttatcaaatgcttcctgctaatattgcggccctttggaaatgtgctcaagtacagcaagcatgtcttaagatcagatggcagatttttgtaacagtggttaattatttgcgccactccttcagtgtttactagcaatcagccctgctactactacaatggccaagggcagacccccacataccctcatgataatgctaccattaatgggtctaatgggacacagatcatttgcagatattatctgaagaaacaaattgtaggagctctct

SEQ ID NO: 1535 - DNA, 501 bp, Oryza sativa
  Clone ID: uC-osflcyp029d09b1
gcagcagcagcagcagctgagcttgaagcagcagagcgaggtagacatggccgccgccaccatggccctctcgtccccggcgctggccggcaaggccgccgcgaaggtgttcggcgaggggcgcatcaccatgcgcaagtcggcggcgaagcccaagcccgccgcgtcggggagcccgtggtacggcgccgaccgcgtgctctacctcggcccgctctccggcgagccgccgagctacctgaccggcgagttccccggcgactacgggtgggacaccgcggggctctccgccgacccggagacgttcgccaagaaccgggagctggagggtgatccactccaggtgggcgatgctcggcgcgctgggctgcgtgttcccggagctcctcgcccgcaacggcgtcaagttcggcgaggcggtgtggttcaaggcggggtcgcagatcttcagcgagggcgggcttgactacctcggcaacccgagcctggatcacgcgcaga

SEQ ID NO: 1536 - DNA, 519 bp, Oryza sativa
  Clone ID: uC-osflcyp029d10b1
ctccgctcccggtgcgccgccggcgagccgcagccgccgcccccctctccgcgccggcggcctcctccgccctctctgccgccagtccccggccgatcccatcgccagtcggcgggcggtctccccgcgggtggggtgggggcgggacggacgatgaagccggtggtggggatcgtggtgtcgaacaagatgcagaagtcggtggtggtggccgtcgaccgcctcttccaccacaagatgtacaaccgctacgtcaagcgcacctccaagttcatggcgcacgatgagaccgaggactgcaacatcggcgaccgggataagcttgatccttctaggcccttgagcaaaaggaagcactgggttgttgccgagattcttcgtagagctaaggtgtattcttcatcagctgctgcagcagcagtttctgctcaacctggtgccacagttcaacaggcagaagctgctagcaaatcataaacatagactcctcttctggaataaatggacactatttcggga

SEQ ID NO: 1537 - DNA, 534 bp, Oryza sativa
  Clone ID: uC-osflcyp029d11b1
cggatcgtggccgtggctgaagaaagcaactcaaccagctgccctcccaaatttctctcctcttgccgacgactcggaaaaaaaccgcggacaccgcgtccgctcgacggagggaaggggatgagctcctcgtcggcgtcggctgtgccgccggaggacgacgtctgctcggtctgccacgaccgcttccggatcccctgccaggccaactgctcccattggttctgcggagagtgcattatccgtgtttggaatcatggaccttctgtacagccttgcaagtgtcccatttgccgtcgccttattaatcttctggtaccagcaaatgtatcaatagataatgatgatgatccgcaaattcagcatgttctaggagaggttcagcattacaaccgcatatttggtggaacaccccgcaacctgactcagaggttgcaagacctaccctttttcatcagaagactgttcagggaactactggatcctcagaggaccctcccacttgtcttcagggcgaggatggtcatgatggta

SEQ ID NO: 1538 - DNA, 385 bp, Oryza sativa
  Clone ID: uC-osflcyp029e01b1
ttgctttgccttcgacccgctcggcctcgccgatgaccccgaggcgttcgcggagctcaaggtgaaggagatcaataacggccgtcttgccatgtgctccatgttggggttcttcgtccaggccatcgtcaccggcaagggccccctcgagaacctcgccgaccacctcgccgaccccgccaacaacaacgcctgggcgtacgccaccaacttcgtccccggcaagtgaagtgggggaccgtagcttagcagtggttaattgtggttggatggatttgtggccagcgagttcgttgtctttgggttggggaagatgggtctagtgcgacgagatgatgatcgagttggtgtttgcgtacacctagaagatgtacatcatgatgat

SEQ ID NO: 1539 - DNA, 468 bp, Oryza sativa
  Clone ID: uC-osflcyp029e02b1
gtcccatatcccccgccccaagatgaaggtctgcatgcttggtgatgcccagcatgtcgaggaggctgagaagattgggcttgactacatggatgttgaggctcttaagaaaatgaacaagaacaagaagctggttaagaagcttgccaagaagtaccatgctttcttagcatcagaggccatcatcaagcagattcctcgtctccttggtcctggtctcaacaaggcaggcaagttccctacattggttactcaccaggagtctcttgaatccaaggtcaacgagacgaaagctacagtcaagttccagctgaagaaggttctgtgcatgggtgttgctgtgggtaacttgtcaatggaggagaagcagattcagcaaaacattcaaatgagcgtcaactttctcgtgtcccttttgaaaaagaactggcagaatgtgaggtgcctttacattaagagcaccatggg

SEQ ID NO: 1540 - DNA, 553 bp, Oryza sativa
  Clone ID: uC-osflcyp029e05b1
tcagttttcattttgacaaatcctgggcaattgaatttttatgatggtggtgctctattttctgttccaaaatcagaagagggaaaagctcagattgaagcacaaaaatttccagtcacagttccaacaactgatcccaacataacagtcactaatctttattcactaaatggaagggaatctcaaagtattccacttaagaaatttgttgttaagcaaaatgccgcacctttcatgcaacggaacatgaaatggcctttgactggtggagttcctagtgaaatgtcaatgaacgagaattacaccgtggaaagaatatacattgcagggtatcaagatagttctgtgagaatatgggatgcaacctttccagttctgacgccaatgtttgtcttggatggaaaggtggttggtgtaaatatggatggagaaaattccgctgtatcatcacttgctttttgctcattaaacatgacattggcctgtggcacaacaagtggcctgtatctctaatgttattggaggttcgcatctataagcttcgtgacacact

SEQ ID NO: 1541 - DNA, 489 bp, Oryza sativa
  Clone ID: uC-osflcyp029e06b1
gttcgacgagggcaacgccgacgacaaccccttctgcaatgggggaggtggtggtggcggcggcggcagcaggcagcagtacgggttccgccccacggagcccgccggcttcggcgccggcaggggggacgccaccgtcgatgtcccgctcgacaccatgggcgactccaagagcaaggcaagggagctctcatcgtgggaaacagatctgaagcggcgggaggcggatatcaaaaggagggaggaagcgctgaggaatgctggagtgccaatggaggataagaactggccaccattcttcccgatcattcaccatgacattgccaatgagataccggctaatttgcagaaattgcagtatctcgcgttcgcaagctggcttggtatcgtgctttgcctctcatggaacttcatcgctgtcatagtctggtggatcacggagggagatctcaagctgtttttccttgcactatctatgccttgcttgga

SEQ ID NO: 1542 - DNA, 433 bp, Oryza sativa
  Clone ID: uC-osflcyp029e07b1
gcgggcggcctcgtcctcgtcgggacgacggcagacaatggccgccgccgcgatgatcctcccattactattgctattgtgttggtttctgctgctgtctgtgggcgacgcgatgtgttggttcaacgacgacgcatcagcatcggcaccagcggggtggttggtgtcgtggaccaatgggatgggttggtacaaggggatgccgcgggagttcgtggacggccacaaccagctgcgcgcgcgctacgggctgcagccgatgaggtgggataacaagctggcgaggcaggcgcggcggtggtccgacgccatgcgcggcgactgccagatccggcactccaccggcaacagcttcgtcgagagcctctacattgggaggaacggctgggacggcagggctttcgacgcccgtcgatgctggggcgacgaggag

SEQ ID NO: 1543 - DNA, 546 bp, Oryza sativa
  Clone ID: uC-osflcyp029e10b1
gaaagggtagaatctgcggtgactgacttgaaaaaggaatttggagagcaacatgtgtggggaattgtctgtgatgttagggaaggaaaggatgtaaaggcactagttgattttgcacgtgacaagatgaagtatattgatatttggatcaacaatgctggatcaaatgcatatagttacaaaccgttggtcgagacctccgacgaggctctcatggaagtgatcacaactaacactcttggattaatgatatgttgtcgtgaggcaataaatatgatgagaaaccaacctcgaggtggccacatatttaacatcgatggtgctggttctgatggaaggccaaccccaaggtttgctgcatatggtgcaacgaagagaagtgtggtgcaccttacaaaatctctgcaggccgagttgcagatgaatgaagtgaacaatgttatggtgcacaatttgccgcctggcatggatacaacagatctttttatgcctggtgccacaacaaagcaggccaaattttcatcaatatattagcttgacctgcta

SEQ ID NO: 1544 - DNA, 454 bp, Oryza sativa
  Clone ID: uC-osflcyp029e12b1
gtggtgatggccttgtgagagagattgaatttcgccgacctgttgttgtgagcattctttcggagagaagggtgcatgctcccaggggactgaagggaggaagaaatggggcccgtggtgcaaactatctcgtcaagaaagatggtcgtagagtttaccttggagggaagaacactgttatggttaatgctggtgagattcttcagattctcactcctggtggtggtggttttggctctccttgatggctattcttgtggacgatcatctacctcgcttctgggtactgtcatttctacttctttagtcctacttttatccacaaataaaacatgcagaaggcagaaacttgcacaaatattgcctgatacagatccaaactgctattgttgcttctgggacattggagctgaataaggaagcatgttgcttgttttaaaaaaaaaaaataaaa

SEQ ID NO: 1545 - DNA, 375 bp, Oryza sativa
  Clone ID: uC-osflcyp029f03b1
gtgatccacacacagcaaaagaaccaccaccgtttccccttcccgagaagaagagagcagcatccatggcgcccaaggcggagaagaagccggcggcgaagaagcccgcggaggaggagcccgcggcggagaaggccgagaaggccccggccgggaagaagcccaaggcggagaagcggctccccgccggcaagggcgagaagggctccggcgaggggaagaaggaccgcgccgggaggaagaaggcgaagaagagcgtcgagacctacaagatctacatcttcaaggtgctcaagcaggtccaccccgacatcggcatctcctcgaaggccatgtccatcatgaactccttcatcaacgacatcttcgagaagc

SEQ ID NO: 1546 - DNA, 500 bp, Oryza sativa
  Clone ID: uC-osflcyp029f05b1
tggaattggagggcagaggccgccattttaatcagtggaaataaaatccacgcattttatatatttaatttaacccccaattttaacttagcagcacactagctagctagctgctaagttaactatttgatcaggttacagttgctggcctgacagttaattaatctcttgctggttgattagttgctatcagctacacgctctcgctagctgccactgtactaatacatactcccatctattcgcctgagaaaatatcgaaaagtagcagcaaagaggagcaggcaagatggtgatgaaccctgacgccgtccgcaatgtcgttggaatcatcggtaacttgatatcgttcgggttgttcttgtcgccattgccgacgttcgtgacgatcgtgaagaagaaggacgtggaggagttcgtgccggatccgtacctggcgacgttcctcaactgcgcgctgtgggtgttctacggcctacccttcatccaccccaacagca

SEQ ID NO: 1547 - DNA, 551 bp, Oryza sativa
  unsure (1)..(551): unsure at all n locations
  Clone ID: uC-osflcyp029f06b1
ggcaaggcaaccgccatggccaccgtcagcgccgccgcggcgacctccgtcgttgcccgcgccgtcctcgccgggccacttgggctgccgcagatgagggcgaggaggagcgagagggtgaggtgcaactactccaaggaggcggcgacaccggcggcggccgtcaagggagccggcgcgtcgctactggcgatggcggcgacggcggcgcccgcgatggcgctcgtcgacgagaggatgtcgacggagggcaccgggctcagcctcgggctgagcaacaacctgctggggtggatcctgctcggggtgttcggcctcatctggtcgctctacaccatctacacctccgacctcgaggaggacgaggagtccggcggcctctcgctctagagagcctctatacatgtaaacatggctggttgtgaacggtgtaatttgaggagaacgtacatggctgtgttgtatctaaactggtcctattctgagagatgttntagcatcagataaagtactttctccatggnggattgtgcacgcatctggcaacttaa

SEQ ID NO: 1548 - DNA, 326 bp, Oryza sativa
  Clone ID: uC-osflcyp029f07b1
gccgccgctggtggcgcgccatggcgcgccgcggtacgcttcccgcctcgccggcgtgttgcgctcgtcgtcagggcccaggccgagccggaggtggagccgacgaaggaggagacggctacgtcgtcgtcaccgactccgagccccgcggcggcggcgcccagggcgaagccggcggcgagcacggggctgtgggacgtgctggcgttcagcgggccggcgccggagcggatcaacgggcggctggcgatggtggggttcgtgtcggcgctcgccgtggaggcgtctcggggcggcgggctcctggagcatgcccggagcgggga

SEQ ID NO: 1549 - DNA, 423 bp, Oryza sativa
  Clone ID: uC-osflcyp029f08b1
atcttcctttcccacatcctcctccgccgccggctgcttcccaccggctcccgatctccgaggcaagcagcgccgcacccggccgccgccgccgccgccatggcgttcgagaagatcaaggtcgccaaccccatcgtcgagatggacggtgatgagatgaccaggatattctggcagtctatcaaggacaagcttatctttccatttttggatctggacattaagtactatgacttgggagttctccaccgtgatgcaactgatgacaaggtcaccgtggaggctgcagaggctactctcaagtacaatgtggctattaagtgtgcgacgattactccagatgaggctcgggttaaggagttcaacctaaagcaaatgtggaagagccccaatggcacaatttaggatattatcaatggcact

SEQ ID NO: 1550 - DNA, 463 bp, Oryza sativa
  Clone ID: uC-osflcyp029f09b1
ttcccggcgagcgtgagatcgaagcaagctgctacacagatctcacgacatggccgaggcggcgtcggcggcggcggcggcgacgacggagcaggcgaatgggagcagcggcggcgagcagaagacgcggcactcggaggtcggccacaagagcctcctcaagagcgacgatctctaccagtacatcctggagacgagcgtgtacccgcgcgagcacgagtgcatgaaggagctccgcgaggtcactgccaaccacccatggaacctgatgacgacgtcggcggacgaggggcaattcctgaacctgctgctgaagctcatcggcgccaagaagaccatggagatcggcgtctacaccggctactccctcctcgccaccgccctcgccatccccgacgacggcacgatcttggcgatggacatcaaccgggagaactacgagctggggcttccgtcgatcgag

SEQ ID NO: 1551 - DNA, 529 bp, Oryza sativa
  Clone ID: uC-osflcyp029f11b1
tgcgatgttttctcgaatactcctctaaaccccacctaaaaccctagctctgctgcctaagcgcgcgcgcctcgccgatggactcctcggcgcgatcgggcggcggaggcaccggcgggtacaccagcactcgcgtgtggatggtcgcgggcgtcgccatcgccggcgccatcgtcttcgtggaggccgcgcggcgcaggcgccggtggttgcgggacaggtccgaggttccccccgatttcggcgccttctgctaccgcttcgagatcgccccggcgccgtagcctccgcctcccgccgcgcgccagctactctcgggcctaacattcgcggacagcgacaacttcgagatcgagggctatgtggctgggtttgggaatccggactggaagaggactcacaaggcaggcacgcgcacggcggtttctgtcacgatgctgcagaagcaggggggcacctacgttggtagcacacgcatggatgagcttggatttggggttctggaggaaatttacacagggaacaccaa

SEQ ID NO: 1552 - DNA, 459 bp, Oryza sativa
  unsure (1)..(459): unsure at all n locations
  Clone ID: uC-osflcyp029g01b1
atatactctactactactagccagtaagctaggtaactaactacgtggctatggcccccaccgtgatggcctactcgggcacctccgtggctccattccaagggctcaagtccaccgccggtctccccgtcagccgccgctccaccaactcgggcttcggcaacgtcagcaatggcggaaggatcaagtgcatgcaggtgtggccaattgagggcatcaagaagttcgagaccctatcgtacctgccaccactcaccgtggaggatcttttgaagcagatcgagtacctgcttcgatccaagtgggtgccttgtctcgagttcagcaaggttgggttcgtctaccgtgagaaccacaggtctcccggatactacgatggcaggtattggaccatgtggaagctgcccattgttcgctgcaccgatgccacccangtgctcaaggagcttgaggaggcca

SEQ ID NO: 1553 - DNA, 369 bp, Oryza sativa
  Clone ID: uC-osflcyp029g02b1
gtagattactccattggtcttgagagtcgagtcatgcttgagacacggcttcgggttcttgtgggtaaataacttggcacgtttgctggctctactatgggaaagcccaagatggaattgtatgaaaaggaccggaagaagggtgctggggctttaatgactcctgccaagacatacaatcctgcggctgatctggtacttggacaatccactgaggaaacaccattgaagcctgaaggcgcttcaaagaagaggaaacatcacgaggcggtgcctgctggtgcggggaaaccattcaagaggatggtgaccaagagggtcagaagatatagaagaagaagacgtccaaacatagcgaggattctactg

SEQ ID NO: 1554 - DNA, 340 bp, Oryza sativa
  Clone ID: uC-osflcyp029g03b1
aacggcagggccgacccacgcgacccatcggttgcttctagacgcatccgcgggcgatggcgatccgcctgaggatgctccacttaggccattcgctatgggtcgcgccattgctcacgatgtgatgcgtcttgcaccccatcactatggcgttaccgaaagggatggacgatgacggatgggaacgtcagcggatgaagtcagaacggaagaaggatgagaacacggctgctgaatggaaccacacatatggcatgcgtgctgtgagagcccgtggacaccggatttcaaacctcagaggactgcaggctctacgataattcagcggagtaccgagaat

SEQ ID NO: 1555 - DNA, 567 bp, Oryza sativa
  unsure (1)..(567): unsure at all n locations
  Clone ID: uC-osflcyp029g04b1
caacattaaagatgattttgtatcgacaaccatggaagagatatttaggttgttactcaatactaagaatggtaatgaattcatagtctatatggagcagtaatgatttcttaattatgtctgcaaatgagattatctgattcttccactttcaactgagttgtttcttctatgcagtgtatgggttgctagaaaaccaccaggttttgcctttattgactttgatgaccgcagggatgcagaagatgcaattcgtgatttagatggtaataagcgtagatatttgtctttgtagttcatgcaagatagtttcatgttatgcacttctctaatgagttatctatttcaacttctggcattacatagttttgccattaaaatggctattacattatttctttagtcaagtgagtccccatcaatttttatcttggttatagtataaataactgtctgaatcatgattcaagcaacttataaatttaatttggataaacaatagacacntgaattatagataaaatatgttgtgtccaaacatatagttttagcttaccatcatgaatg

SEQ ID NO: 1556 - DNA, 543 bp, Oryza sativa
  Clone ID: uC-osflcyp029g06b1
caacctccctcctcctcctccacctcgtcgtcgtctccgccgcgctgtctcctcctctatataccctcacccacactcgcacgcgcaaacccaacccccgcatatgcttaactccccaacccaaaccctcctcctcccccatgggcgcgtgcttctcatcccacactgcgaccgccgccgccgatggcgggagcgggaagcggcagcagcggaagggggatcacaaggggaagctccccgatggcggcggcggcgagaaggagaaggaggcggcgcgggtggagttcgggtacgagagggacttcgaggggaggtaccaggtcgggaggctgctcggccacggccagttcggctacaccttcgccgccaccgaccgggcctccggtgaccgcgtcgccgtcaagcgcatcgacaaggccaagatggttcgccctgttgctgtggaggatgtaaagagagaagtgaagattcttaaagaacttaaaggccatgagaatattgttcacttctacaatgcgtttgaagatgactcatatgtatata

SEQ ID NO: 1557 - DNA, 274 bp, Oryza sativa
  Clone ID: uC-osflcyp029g07b1
gcacctctcctccgacttccgagcaaagccaagttgctcaccgactcacccgtagagctagctagccatggctgtcgccgcaagagccgccgccgtggcgtgcctcctggtcgtaggcctcgcggccgtggcgggggtcgacggcgcgacggcgagctccccgtccctggcgccggcgccggccgtggactgcacggcggaggcgctgaaggtggcggactgcctggactacgtgaccccggggaagacggcgccgagccggccgtcgaagcag

SEQ ID NO: 1558 - DNA, 530 bp, Oryza sativa
  unsure (1)..(530): unsure at all n locations
  Clone ID: uC-osflcyp029g09b1
gtcttcccaaacccattcacttctggtgacgggaaacctcagcatgccgactttggtcatttctatggatccagccatttctcagcacctgatgcttcttgcaccccatcactatctcgctaccgagatggcttgatgatatctgatatggacctcaacttatgtcgccagatcaaagacaagtggggcttccgcatgactgcccgttatgacacgtatgcttccttgctttcagagtacttgaagccagattttaaacctcaagtcattgttgaccccttgatcaataagagtgcgtaatggtgagaaacttggtgccaaaggagagcactcaattctggaacttacacatttagagcattcagtttgagggaactcttcaaaatctgccattggggaatcgatttcttttttcaattttcgtatgtaaagaaaaatttgatacatgtttacctcaaatgccttttacttgggagtggaaacatngatactcattttgctctctgctgtaaatttgcagggtatgtatg

SEQ ID NO: 1559 - DNA, 516 bp, Oryza sativa
  Clone ID: uC-osflcyp029g11b1
ctttctcctcataccactgacaatggccaccgagtgtgatgtgaacaaatctcgccgcttcgatcttggcatgtcgaggcggacacgaagatcaacaagtctcatcacttgttatcaagatcaacaggtgcagccccttgtgcagcagctacgtcaagatgccaagctgaagacattgttccagtgccaggatacagagctgcagccaccatgtccatatgaagatcaggagttgaggattctacaggcaccactgcaatgcgaagttgatgcacaggagacactgaatcaacaccgtgatgagcaggaggagaaacttcaccattatctagatgaagagcatgagaagaaacttcaggatcatttggatgaagaaccggagaagaaacttcatcattatctagatgaagagcagaagaacttcaggatcatctggatgaagaaccggagaagaaacttcatcattatctagatgaagagcaggagaaactgttccaggatcaagacgaagagaag

SEQ ID NO: 1560 - DNA, 263 bp, Oryza sativa
  Clone ID: uC-osflcyp029h02b1
gtcgcctatactcccccatcgccgagagagctctagggtttccgctgccgaatttttttttaattcggggggagagatttgaagaggccgcaccatggtgttctaccaggatctgcttaccggtgacgagctcctgtcggattcgttcccctacagagagatcgagaacggcatcctctgggaagtcgatggcaagtgggtcgttcaaggagctattgatgtggacattggtgccaacccatctgctgagggtggtggtgatg

SEQ ID NO: 1561 - DNA, 540 bp, Oryza sativa
  Clone ID: uC-osflcyp029h05b1
gaactgggaagtctggcgtggtttactgttgggtgtttagtgggtcgttccataatacagacatggtctggtgtggtgtttctgcagtttttttttttgacaccagtctgcagaaatttcagtgataaacagcaaggatttattagcgtgagatgtaatgatttttcagagtgcttcgtcggttataggatttttgatgtaataaaacaatggattatattatcaataagtaaatgtagtcttatgagcacaattaagagatgtcatcattgtagcttggatgtttaagatggcttgtgtctccacggcgctgtttggctgcccttgctgcagctgcaagccgggcaacagtgtttccttgcctgcactggctgcagcgcaggcgcagcaacgccaaccgaacaggcccatgtcttgtttaatgatccattgttatagacttgtatatatacctttagagtgtagactggtgaatcatttcttgtattactatatgttctgattaagtatctaaggtgctaattggagattcttaaacat

SEQ ID NO: 1562 - DNA, 64 bp, Oryza sativa
  Clone ID: uC-osflcyp029h06b1
ttgggcttctcactgtatccagtctgtaatctgtactcatttacttaatatgttgtatttcctt

SEQ ID NO: 1563 - DNA, 366 bp, Oryza sativa
  Clone ID: uC-osflcyp029h08b1
gtactactaggcagtaagctagctaactaactacgtgggtatggcccccaccgtgatggactcctaggacacctctgtggctccattccaagggctcacgtgcaccgtcggcctcaccgttagacgccgatccaccaactcgggcttcggtaacgtcagacaatggcggaaggatcaagtgcatgcaggtgtggacaattgagggcatgaagaagttcgtgaccctatcgtacctgtcaccaattaccggggaggatcttttgaagcagatcgagtacctgcttcgatccaagtgggtgcctagcttcgagtttaacaagagcgtgttcgtataccgggagaaccacacgtctgcctgatactact

SEQ ID NO: 1564 - DNA, 524 bp, Oryza sativa
  Clone ID: uC-osflcyp029h11b1
gaagatttctgcaggcaattggacaaggattgtgagtttctggagcaagagagaattatggattacagtcttctggttggcgttcacttcaaagaccgatgcaaagacagcagcagtcctgacaacgagacaactcaaactgctcttgaagatgaggaaagaagaaaagcaccagtcaagctagggatcagcatgccctcaagggtggagaatgttgtgaagaatcctgaaagtgaatcccagctcattggcgaacctacaggggaattccaggacgttatcctgttctttggaatcattgacatcctacaagactatgatatcagcaagaagcttgagcatgcctacaaatccatgcaatatgatcccaactccatatcggctgttgatccaaagcaatactgcaaaaggttcagggatttcatttacagggcttttagtgaagacctacagtaaatacttcattaacaaaagggaacactcttaattcttaactgaagaaagcataacgaccagctgatgga

SEQ ID NO: 1565 - DNA, 414 bp, Oryza sativa
  Clone ID: uC-osflcyp030a01b1
ctccgccgtcggtgtcgccgtccttgccatcctcctcgccgcgccggctgcggaggccggggcacctaccgccgcgccgttggccaactactccctcgaggacgcgtgcaagaagaccggcccacactacggcctctgcatcgtgacgctctccgccgaccggtccgccaagtcgtcggacacggtggggctcgccagggtggccgtcctggcggcgcaaaagaacgcgtcggagacggccacctacctctccagcatctacgacgacgacagcatcgagaagaagacggtgcagctgcagcagtgcctcgaggactgctcccagaggtacgaggcggcggtggagcagctgacggacgcgacggtggcgctggacaccggggggtacgaggaggcgaaggcgctggtggcggc

SEQ ID NO: 1566 - DNA, 498 bp, Oryza sativa
  Clone ID: uC-osflcyp030a02b1
gtggcaatggaaggaggtgctattaagctatttgattcccggtcatatgacaaaggtccctttgacactttcttggttggtggagatacagctgaagtttctgacatcaaatttagcaatgatggcaagtccatgcttttgacaacaaccaacaaccatatatatgttctggatgcatatggaggggataagaggtgtggctttagtctggagtcatctcccaatgtagcaactgaagctgcttttactccagatggccaatatgtaatttcaggatctggtgatggtaccttgcatgcttggaacatcaatacaatacaagagattgcttgttggaacagtcacatcggtcctatcactgctttgaagtgggcttcccgtcgagcaatgtttgcaactgcgtcaactgccctaactttctggattcccaacaatttcagttcgaattaggtgcctagcaaaaggatggaacgtgtgatatgctgattcaacaaacac

SEQ ID NO: 1567 - DNA, 463 bp, Oryza sativa
  Clone ID: uC-osflcyp030a03b1
gtcgggcaagaagatcgccgtgctggggttcgcgttcaagaaggacaccggcgacacgagggagacgccggcgatcgacgtgtgccacggcctgctcggcgacaaggcgcagatcagcatctacgacccgcaggtgacggaggaccagatccagcgggacctcgccatgggcaagttcgactgggaccacccgatgcacctgcagccgacgagccccacggcgttcaagcaggtgagcgtggtgtgggacgcgtacgaggccaccaagaacgcccatggcctctgcatcctcaccgagtgggacgagttcaagacgctcgactaccagaagatctacgacaacatgcagaagccggcgttcgtcttcgacggccgcaacgtcgtcgacccggagaagctcaaggagatcggcttcattgtctacttcatcggcaagccgctcgacgcctggcttaaggacatg

SEQ ID NO: 1568 - DNA, 306 bp, Oryza sativa
  Clone ID: uC-osflcyp030a05b1
gtcaatatccatgagagcaagaggcagagcaggtcggcagttgtgcagagggtaagctagccaaaacctacagctatgagaaaaatggtacagattcgcgcaattgcatcaagattcaatgattcaacgagtgcaggttctgtaaattttgtgcaaataagaggatcccatgtcttgattctttggaattagatggatggatccattcaatcggtatagtttaactgccacggaggtttctaggggctgattcgagcaatgtttgccctgtgtgtgtaattcagtactatgactgactactactga

SEQ ID NO: 1569 - DNA, 389 bp, Oryza sativa
  Clone ID: uC-osflcyp030a08b1
cggacgcgtgggcggacgcgtgggcagcggcaaagcaagtgatctctttagctcggatcatctctgcatttgcatttgcagctgctcgtcacggcaatggcatccaccaacagctggacccacgagatcgagtcgccggtggccgcgccgcgcctgttccgcgccgccgtcatggactggcacacccttgcccccaagatcgcctcccacatcgtcgccagcgcccaccccgtcgacggcgacggcagcgtcggcagcgtcaggcagttcaacttcacctcagccatgccattcagccacatgaaggagaggctggagttcctggacgtggacaagtgccagtgcaagtcgacgcttgtggagggcggcggcatcggcaaggcgatcga

SEQ ID NO: 1570 - DNA, 472 bp, Oryza sativa
  Clone ID: uC-osflcyp030a09b1
tctttttgttactgatggtgagcgaatttgggggcttggagatcttggctgccagggaatggggatccctgttggtaagcttgccctttacactgctctaggaggagtgcgtccatctgcttgtttgccaatcacattggatgttggtacaaataacgaggcgctgctgaatgatgagttctacattggcttaagacaaaagagggccactgctcaggagtatgctgattttcttcatgaattcatgactgccgtgaaacaaaactatggggagaaagtactcattcagtttgaggattttgcaaaccataatgcatttgaactccttgcaaaatatggaacaactcaccttggattcaatgatgatattcagggaacagcttccgtggtcctttctgggcttgttgcagcactaaaattagttggtggttcattgtcggagcacaattacctgttcctgggagctggagag

SEQ ID NO: 1571 - DNA, 222 bp, Oryza sativa
  Clone ID: uC-osflcyp030a10b1
aatttctctccttgtagaaacaagcctagagagtactatggagcagaggaaatttttgttgtgcctaattcttggcttacttgcgacttcaggacctgccaagaccgtcaatgctgactcgccctttgatttttattatctcatcctcatgtggcctggagcatactgcactgacagcgagtatggttgttgcgtgcccaagtatggttacccgtcagaaga

SEQ ID NO: 1572 - DNA, 451 bp, Oryza sativa
  Clone ID: uC-osflcyp030a11b1
ggctcgtccgcctgtacgtgcccggccgtactggccggacccacccacgcgttcgccttcgtctacgttggttttcccatcagcctctccaccgactgcaacaaggtcagttaaatcaatcctgcttggatcgatcgatcgagcttaacatgctagctcaatcggagttgatcagctagtaattaagcacgtacttgctacagcatatatgaacaaagtaattaaaataacagctgcggcagacatgcagcgctccactctctctctgtatcagctgtatactttatgttgcacgctccctgtgtgcatgttctatcttaattttcttcagtatgtacacgatctgtgcgtacgtgtaatcctatacgttttatgaattgcatgttgtccaaataaaaaaacatttattttattatttttattttttttaattattatataataataaaaa

SEQ ID NO: 1573 - DNA, 509 bp, Oryza sativa
  unsure (1)..(509): unsure at all n locations
  Clone ID: uC-osflcyp030b02b1
gccgtgcaccgcctctcacaatgtcgaccgccgccgccgccgccgctgcccagagctggtgcttcgccactgtcaccccgcgctcccgcgccacagtcgtcgccagcctcgcctccccatcaccgtcctcctcctcctcctcctccaacagcagcaacctcccggcccccttccgcccccgcctcatccgcaacacccccgtcttcgccgcccccgtcgcccccgccgcgatggacgccgccgtcgaccgcctcaaggatgggttcgccaagttcaagaccgagttctatgacaagaagccggagctcttcgagccgctcaaggccggccaggcacccaagtacatggtgttctcgtgcgccgactctcgcgtgtgcccgtcggtgaccatgggcctggagcccggcgaggccttcaccgtccgcaacatcgccaacatggtcccagcttactgcangatcaagcacgctggcgtcgggtcggccatcgagtacgccgtctgcgccctc

SEQ ID NO: 1574 - DNA, 368 bp, Oryza sativa
  Clone ID: uC-osflcyp030b05b1
ctccactctcccctgcccccgtcgccgtcgccaccgccgccgccatgtccgggaggaagaagacacgggagcccaaggaggagaacgtcaccctcggcccgaccgtgcgcgagggcgagtacgtcttcggcgtcgcccacatcttcgcctccttcaacgacaccttcatccatgtcaccgatctgtccgggagggagacgctcgtccccatcactggtggcaagaagggtaaaggtgatcgggacgaatcttccccttatgctgctatgcttgcttcacaggatggtgctcaaagatgcaaggagcttggaataactggtttgcatattaagcttcgtgctactggtggtaacaagacaaaaacccct

SEQ ID NO: 1575 - DNA, 475 bp, Oryza sativa
  unsure (1)..(475): unsure at all n locations
  Clone ID: uC-osflcyp030b07b1
tcgttctgctccgcccccctaccccgcaacccgttgctttgtgccgcgcctcgctttggtcttcatccgcctcagatctgattcgttctaggttggtctggggaagatggcgatcacggtgaggcggtcgacgatggtgcggccggcgtgggagacgccgcgggtgcggctgtggaactcgaacctcgacctcgtggtgccgcggttccacaccccaagcgtctacttctaccgccggggccccgagggagggggcgcgccggaggggttcttcgacggggagcggatgcggcgcgcgctggcggaggcgctcgtgccgttctacccgatggccgggcggctcgcgcgcgacgaggacgggagggtcgagatcgactgcaacggggaaggggtgctcttcgtcgaggccgacgcgcccgacgccttcgtngatgactaccgcgacttcgcgcccaccatggagctcagcgcctta

SEQ ID NO: 1576 - DNA, 384 bp, Oryza sativa
  Clone ID: uC-osflcyp030b08b1
ttaggccagggatgagctccactgtttgctgaatgaggatgagctacgtgatgctgtgctgatggcgtttgcaaacaaacacgaacttaataatgccatgaacggtggtgagagacaccagcaagcttggagtggactccttgagccagagggactgggacatgcagaggacatgagctacctatggtgaggggttgtatgaggggcttgactggatttgcaacaacattgacgacaaggctgggagcattttgaccgggcttaaatgaaaggaagacatgggggatatcagtgagtgaacgctgtctttgtacgtgtggaaactatatagtgatgacagataatgatgtggatggattgggaagatatagctgtttatgacac

SEQ ID NO: 1577 - DNA, 483 bp, Oryza sativa
  Clone ID: uC-osflcyp030b09b1
tctctctcgtcgggaggagaaaggagggaagagggtggcaggaggaggaggaggccctcctcatccttcctccctcccctgcgctgagctgtgatgttttactgcaaccctgacgtcatcaatagatacaccccttccgtgcacagtaaccgttctaacaatttactcatgtctgtatataggccttacaaggctagttatttttacattatttatctatataagagccttgctccttcatttatgaaccttccaccaattattcctcatgagacttttttcatctatcctcagtattatttcagtcatacatgattaatacccttgtatggatgttgtcccagttattcttcccaccttttctatcaccgttttgctttttcaattaacttgttcaatgatcatttatatgattcccctgttaagcctgttatttactctttatcttctggatcatcattttgccttgtccacattaaactt

SEQ ID NO: 1578 - DNA, 262 bp, Oryza sativa
  Clone ID: uC-osflcyp030b10b1
gttagacatactctatctcatagcatctgttcgtttactggcaatataccacgaaagatggcttctgacatcgttggacaccatcatatgtgaccaaagaggtagctgaggtaacacccggagtgtttcagggatgggtatagcagatctgaggatggggagaaggatgggaccaaactcaaggccagcatttagaagtaaactggtaacaacagaaacaagtacattcccaggaacaactggtggtactaagatcaggaag

SEQ ID NO: 1579 - DNA, 59 bp, Oryza sativa
  Clone ID: uC-osflcyp030b11b1
tgttaaagggcacaatggaagaaaaaccttgggggtttattgcggacgaccaatgctga

SEQ ID NO: 1580 - DNA, 363 bp, Oryza sativa
  Clone ID: uC-osflcyp030c04b1
tgtagctatgaactgccagattcacatccacttcttgaaggagtaagttcataaaacattatagaattctgtactttccttatcaccaactgagaatatattgatgcttattttcttacaatacacagttcaaccaaagagaaccagatgatccttgcccatacctactctctatatggaccccaggtgaaacagctcaatcaactgatgcacctaagtcggtctgcaattcacaagagaatggtgaactatgtgcaagcaatacatgctttagttgcaacaagtttagaaaagcgcaagcccaaaaagttcgagggacactgctgataccatgccgaacagcaatgagaggaagcttttcac

SEQ ID NO: 1581 - DNA, 451 bp, Oryza sativa
  unsure (1)..(451): unsure at all n locations
  Clone ID: uC-osflcyp030c07b1
ggaggggtgcaggtgttgctgtacctatattctcgatcaggtcaaatgaggaccttggtgttggagaattccttgatcttaaacttcttgttgactgggcagtcaactcaggctttcatcttgttcagcttcttcctatcaatgatacttcagttcacgggatgtggtgggattcatacccatacaggtattgggctgatgcagtgtgcttttgctttgagtaagaagaatagtatctgaacagaaataatgccctacatgttggtttacagctcgctctctgtgtttgcattgcaccccttgtacctgagagtacaagcactntcagatgcaattccaggggatattaaggtgtacctttgttataccttcatatgaactcattgtacccgttatctatgttaacttttaatttcaatatttactgattttggtaggtcttgtatgattt

SEQ ID NO: 1582 - DNA, 492 bp, Oryza sativa
  Clone ID: uC-osflcyp030c09b1
tgtatctatccatccatcccatcctcgatccttcattcctgcccggcggcgagcgagagagaggcggaggagatccgagatggcggggagcgggtggaggaggatcccggcggcgaggaggccgcccatgtcgcgcccggcctcggtctgcctctggatcgtgctcgtcgccgccaccctggcgctcgcccaggcgaagaaatcgaaggcggatttgactgaggtcacccacaaggtctacttcgacgtcgagattgatggcaagcccgcaggacgggttgtcatgggacttttcgggaagactgttcctaaaacggcagagaacttccgagcactttgcacaggagagaaaggaactggaaagagtggcaaagcactccacttcaagggaagtgcattccacagaattatacccagctttatgatccaaggaggtgacttcacacttggtgatggaaggggtgttgaatctatctatgggacgaagttcgc

SEQ ID NO: 1583 - DNA, 262 bp, Oryza sativa
  unsure (1)..(262): unsure at all n locations
  Clone ID: uC-osflcyp030c10b1
ctcttctccacgctcccagcgccaaatcccagcagcttccccgcacgccgcgaatggcgcctcccgccactgcctccgcctccgcctcggcaccggtctccctcctctttctctcccttccgctctccccttcctcgtgtcgcggnctcccgcgccacatacccancctcccccgcgccgnctcgcgctcgcgccggccccgcctggcgccgcgctgctctccagccttggcgacgcgcaggaagaggagggagtacgatga

SEQ ID NO: 1584 - DNA, 236 bp, Oryza sativa
  Clone ID: uC-osflcyp030c11b1
gcagaaacaaacccctctcactcccactaccatggatccttgcaagttccggccgtcgagctcgttcgacacgaagacgacgacgacgaacgcgggagctccggtgtggaacgacaacgaggcgcttacagtgggggccaaggggccgatccttctcgaggactaccacctggtcgagaagggggggcacttcggccgggagcgcatccccgagcgggggggccacgcccgggggg

SEQ ID NO: 1585 - DNA, 278 bp, Oryza sativa
  Clone ID: uC-osflcyp030c12b1
gtaggaggagcttgagcttggagagagacaacaatggcggctcaggctcttctctctgggaggcagctgctggggaggccattgcaatcttcagtctccaggtcttcttcctccaggaaggcacccttcatggtcagggcagaggccactccccctgccaagcaaggggctgacaggcagctgtggttcgcatccaagcagtccctgaactacctggatggcacccttccgggagacttcgggttcgacccgctggggctatcggacccggaggggac

SEQ ID NO: 1586 - DNA, 350 bp, Oryza sativa
  Clone ID: uC-osflcyp030d02b1
caattcttcgctaaaccctagctacagcgcgagcgctgcgcgtgcatcctacttggctggatcagccatggcgtccaccgctggcggctgtaagcattcgcgttccgcctccgccatcgtcgcaggcgccgcgagcgggtaccatctcctcaagatcgacggctactcgcgcatcaagggcctacccaccggcgaggccctcaaatcttgcgccttcaccgtggggggatatcgctggcgcatccattgctaccccaacggcagcaaatcagattactcggatttcatatccctgtttcttcatctcgacgacggacaagtcaccaagcaggtgaaagcgcagtacctat

SEQ ID NO: 1587 - DNA, 477 bp, Oryza sativa
  Clone ID: uC-osflcyp030d04b1
tcttgctttgctcctggatatatagctagcttctttctttcttcctctctccctgtgtggcacgcgcctccaatcgatctcttcggtgagtagacgcatcgagatcggggggaaatgtcggtccagattacatcggagcatgtttgctatggcaactgcaactattgcaacactatccttgtggtgaatgtgccaaacaattgttcctacaacattgtgactgttagatgtgggcattgcacaatggagctctccatggatcttgctccttttcaccaagcacgcactgttcaagatcaccaggtacagaacagaggatttcaaggtaataactttggaagctatgacataggtgtcagaaatcagaggacatcgacagccatgtacccaatgccaaccagtcagcagcaagtgtcacctatacgtccccctgagaaaagacagcgtgtcccatctgcatacaacagattcatcaag

SEQ ID NO: 1588 - DNA, 486 bp, Oryza sativa
  Clone ID: uC-osflcyp030d05b1
ttcttcctcctccccccacccgccttgtcgccgatccgatccgcctccgcctccgcctcgcggcccggcctgcctgcctcgccgccggtggtcccgatccgaggttgctcttgctgggcatcaaacatgggtctggtgaaggatggcgccgccgatttggaggaggggaccctggagatcggcatggagtacaggactgtttctggtgtggcaggacctctggttatcttggataaagtaaagggcccaaagtaccaggaaattgtaaacatccgattgggagatggcaccactcgccgtggccaagttctggaagttgacggtgaaaaggctgttgtgcaggtctttgaaggcacttcaggaatagacaacaaatataccactgtgcagttcacaggagaggttctgaaaactcctgtctcacttgatatgcttgggcgcatttttaatggatctggaaaaaccattgataatggcccacctatt

SEQ ID NO: 1589 - DNA, 382 bp, Oryza sativa
  Clone ID: uC-osflcyp030d06b1
tttgtgacgccgtgccgggcgcccgtgtcgagcccgctcgcccacgggcaccaccaaggccagggcgtaatggcgttcggtggtcagaacccgcggccgtctaccagtcgcggtacgcagtgcctctacgttcgcctcaacacgcttcacttcatgctcagccacgtgcacgcgctcgacaagtcgctctccttcttctcccgcggcaggtgctcgtcgtcgccgtcgtccgccgccaccgcccgcctcctcgcgccgtgctcccacttcgaccgcgcgcgcgccgtggcgcagtccgcggtcgggcacgtcgccgaggtcgccgcgtaccgacttatctttctcgacttgcaccactcgttctacgacgggctttacgtgg

SEQ ID NO: 1590 - DNA, 386 bp, Oryza sativa
  Clone ID: uC-osflcyp030d08b1
tcgtgtttgcccgaaggagcacttcgccgcattattttgactgcatcaggtggtgctttcagggactggccagttgacaagttgaaagaagtaaaagttgctgatgctttaaagcacccgaactggaatatggggaagaagattactgtagattctgctacattattcaacaagggtttagaagttattgaagcacattatttatttggtgctgaataccatgacattgaaattgtgatccacccacaatctatcatacactctatgattgaaacccaggattcatctgtgttggctcaactgggatggccagatatgcggataccaatctttatacaccatgtctttggtcagacagaatctattgctcaaaggttacctggccc

SEQ ID NO: 1591 - DNA, 432 bp, Oryza sativa
  Clone ID: uC-osflcyp030d10b1
tcggtcgctgtcacgcgcttcgtgctcgccgccttccaccttcgtgctaccccccgccatggcttcctccctcgccggatccgccctctccttcgccacccccgtcaaggcagtcaagactaattcgatatctttcaccagcgcaaggaagggaaatgcatttctccgcctgcagccagtgcctatgagatttgctgtttgctgtgccgcaaaaaaggagacagtggagaaggtttgtgacattgttaagaagcaactcgctgttcctgagggcactgaagtttctggtgcatccaagttctcagatcttggtgctgattcactggacacggttgagattgtgatgggtctcgaggaggagttccacatcagcgtcgaagagtcaagtgcgcagtcaattgcaacggttgaagaagccgctgcactcatcga

SEQ ID NO: 1592 - DNA, 426 bp, Oryza sativa
  Clone ID: uC-osflcyp030d11b1
tcgtggacgcgtgggcgagcccgccggaggccaaaacgccttctgcggcagcatccaccaattcgccatggcctccgagaccgagcccgacgccgtggtgttcgaggctccggcgcacttccgcatctacaagagcggcaagatggaccgccttcaccgaccaccctgcctgcccgctggcgtcgacgaggccaccggcgtcgcctccaaggacgtcgtcatcgacgccggcaccggcctctccgtgcgcctctacctccccaagatccaagagccatccaagaagctccccgtcctcgtcttcttccacggaggcggcttcctcatcgagtcggccgactcctccacgtaccacaactacgtcaaccccttcgccgccgcggccggcgtcgacgtggtgtccgtcgactaccgtcttgccccgga

SEQ ID NO: 1593 - DNA, 416 bp, Oryza sativa
  Clone ID: uC-osflcyp030d12b1
tcgtggacaccagcgtcgacgggaccggccgcattggcgtgcagctctcgccctacttccgtgtcactcgcgtccaccccaacaacctggccgaggccaccgtcctcgccttgcgcgagttcaccgcattgagcgccacggtgctcgacggcctcaggcagacgttcctcaacttctcgcagacggcggagaaggtgtctggtccagttgcaatcattgcggttggcgcagaggtggccaggtcaagcgccgagggcttgtttcagtttgcggctgtgataaacctcaaccttgctgcaataaacttgttgccattgccagcattagacggtgggacgttggcgttgatccttctcgaggcggcccgtggtgggcagaagatcccccgtgaaatcgaacagaggatcatgtcgtca

SEQ ID NO: 1594 - DNA, 464 bp, Oryza sativa
  Clone ID: uC-osflcyp030e01b1
tgtagcaccggcggtcaataattaaaaaaaaaaagaaaaaaatggctttcagaaaccatgacgctgccatggtcctcttcttcttcctcctcatggtgactacctacgccaacgcgcacggacacagcaagaagcccgaggagatcactcagggcgtttacggggcggcggcggcggtggcggccggccccggcggcacgttcgacatcaccaacctcggcgccgtcggcaacggcagggcggacagcaccggcgcggtgatggcggcgtggaggtcggcgtgcgccggcgccgggaagcagacgatcctgatccccaagggagatttcatgacgggggcgatggagctcaggggcccctgcaatggcgccgtgaccatccagctcgacggcaacctgctgggctccaacgacctcagcaagtacccgggcaagaagatgcccaatgggtcgaggtcccgcatg

SEQ ID NO: 1595 - DNA, 431 bp, Oryza sativa
  Clone ID: uC-osflcyp030e02b1
tcgaggcgaacacgccggtggtgatcgccgtcgcggcggtggaggaagaagagccgaacacgatcaagtcgccggagccggagaaggagatcgcgaccaccgccaccaccatcatcgaagaggaggaggtggtcgacgacgacgagcccaagaaaggcgacgccgctgctactccagtgcccaccgactcgcctgccgccgcctcctcgacggaggaggacaagttcgtcgcggtggtgaaggaggaggacaagttcttcgcggtggtgaaggaggatgacaagttcgtggcggtggtgaaggaggcgatcaagaagcaacgtgacgacgacgccgacggcgacgagctggtgcggagggttaaggggagcagggtgaaagactgcgatggagaaaaaggtggaggaggagcagcctcccggcgggagatg

SEQ ID NO: 1596 - DNA, 407 bp, Oryza sativa
  Clone ID: uC-osflcyp030e03b1
tttatataacatgcggaaggtcctgctcgctctgctcactcagctctgccccgcgcgcgccaccagcgcgctcatgtcgagcaacatcgacttatgacgattacaagactacttcactgcggactgccttaagggctaccatgacgagttcatttccaccctcggattggcctaaggcggcgtacgttgccacatcccctacaccaagatgaccggctacacgccttttgaccactacggtctggtagacatggagaggtgccacgacctctggctgacatcggggggggacataggagcccacatctgccgtggtcacgaaaaccatgacggcaacttgggccttgccctctgtggtcagaccaacatgcttaacggagtattctactggaacggccagctactgg

SEQ ID NO: 1597 - DNA, 494 bp, Oryza sativa
  Clone ID: uC-osflcyp030e05b1
gtccaacgcacagcgcgactcgccgtccgtcagcggtggtcgcggcggccggctacaagatgatggcgtgcagggccctcgcgctcctcccgctcccggcgccctcccgtctcccccgcccgcgcgccgcctcgctcgcgcggctcgacgccgcccgccgccgcgcctctgcctccttattggtccggtgctgcgccaaccccgccggtcccggaggccaggaggatccgccgcaggacgccgtgctcaaggccatctcccaggtagcgaactctaaaggacgggttgcacagacaacaaatgttgtcatgggtggtactgcgacagatgatgcaactgatgaatggcttgttctggataagcaggtaaatacatatcctacagttagaggatttactgcaattggtactggaggagatgattttgtccaggccatggtggttgcagttgaatcagtactggaaggacaaattccaaaggctcagattttccat

SEQ ID NO: 1598 - DNA, 485 bp, Oryza sativa
  Clone ID: uC-osflcyp030e06b1
tttctttctggatctgtgaaggtggagaaattaatgaacattgaacgctactcccatgtcatgcacatcagttccacggttaggctcttcttctatactgcgaaacaacgggtctgcactcattatgtacctcggcaatgttgcgtcattattatttccttcagcattccagtctgcattggtagttcagacaaatgtctttttatgctaagaaaatctaggatcttaactcattatgcataacactatcagatgtattacctattgcgacaaaatggatatgtggtttctaagcaatttattggcttgttttataaacagccaacaatttctgcaattttgacgcttctatgtttcaaatgtgtcttgtctaatagacatgaaagtgcaaagcttttagtagcaccacaagtgactgatcttactgctatcttttctagggttggtacgatacattgtgtaatgagcaatggttacaataatga

SEQ ID NO: 1599 - DNA, 465 bp, Oryza sativa
  Clone ID: uC-osflcyp030e09b1
ctcctggctatggtgcaggagcaggagtggctcgccgccggcgaggacgacaggatcaccgacacggaaatcaaggcccttatcctgaatctattcgtggcgggcacagacacaacatcaaccatagttgagtggacaatggcagagctgattcgacacccagatatcctcaagcaggcccaagaggagctagatgttgttgtgggtcgtgataggctcctctcagagtcggatctatcacatctcaccttcttccatgctatcatcaaggagacattccgccttcatccatcaaccccgctctcgctgccacgcatggcatctgaggagtgtgagatcgcaggctaccgtatccccaagggtgcagagttgctggtcaatgtgtgggggatcgcccgtgacccagccatatggcctgacccactagagtacaagccctctcggtttcttcccggtgggacgcac

SEQ ID NO: 1600 - DNA, 481 bp, Oryza sativa
  Clone ID: uC-osflcyp030e10b1
gtcggctcctcctcctcctcgtcctcagcctcatgtcatggtgcttcccttccctgcgcaaggccatgtcatgcctctgatggagctctctcaccggctcgtcggcctcggcttcgaggtcgaattcgtgcacaccgacttcaaccgcgaccgcgtcatcaacgccatggcgaacgagacgggggcgatccctgatgggatccacatggtgtccttcccggacggcatggaccctgccggtgaccgtgccaacatcgccaagctgggtgacggcttgccggccgccatgctcggcggcatcgaggagatgatcagatcggaggggatcagtggggtgatcgccgatgtgtccatggcctgggtgacggagctggccgccacggtgggtgtccacgtcgccttgttctcgacttactccgccgccgttgtggcgcacaggctgcaagtccccaagctgatccaggatggcgtcctgcacgaa

SEQ ID NO: 1601 - DNA, 504 bp, Oryza sativa
  Clone ID: uC-osflcyp030e11b1
tgtcgcctctcctcctcctccctaacccctacgcttccagaaccttctcgaagctcccgctcccccccccttccgctccaatggcgaaggaaccgatgcgcgtgctcgtcaccggcgccgcaggacaaattggatatgctcttgtccccatgattgctaggggtgtgatgttgggtgctgaccagcctgttattctacacatgcttgacattccaccagctactgaatctcttaatggccttaagatggagctggttgatgctgcatttcctcttttgaagggaattgtcgcaacaactgatgttgtggaggcctgcactggtgtgaatgttgcggttatggttggtgggttccccaggaaggagggaatggaaaggaaggatgttatgtcaaaaaatgtctccatctacaaatcccaagcttctgctcttgaggctcatgcagcccctaactgcaaggttctggtagttccaatccagcaacaccaacgctctcatttaaaag

SEQ ID NO: 1602 - DNA, 510 bp, Oryza sativa
  Clone ID: uC-osflcyp030e12b1
tcgtagaaattcaataattacacacaaaaaaaataaggcataagaaggcagctgcagctgctagctgctgttgttgttggtagtagttttttgggcaccaattttccatggagacgaaggtgaggatgagctgcaggttgggcactatggtggccctggtgctggtgggcgtcgtgctggcggcgatcctgcaggaggccaccgtcgacgcggcatcgtccagcagcgactcgccggcggcgaaatcgggcaccggctacctcgactacggcaacctcaaggcgaagctgcctccaccgggcgtcgccgttaccaagaggccatgcatagcaaaagagaaatgccgcggctgatcgatcgatcgatcgatcatcaccgacgtacccagacggatgaaacggatcgacgtacgtactgcttatggtgtcagcgtgttcttgtttttttttcttttcttttctttctttccgaaggaattgaaacggtgtgttcttggttttttcttctcat

SEQ ID NO: 1603 - DNA, 473 bp, Oryza sativa
  Clone ID: uC-osflcyp030f02b1
gaaaaatttctccccaatctcgcgaggctctcgtcgtcgaatcgaatcctctcgcgtcctcaagatgcagatctttgtgaagacattgaccggcaagactatcaccctcgaggtggagtcctctgacaccatcgataatgtcaaggctaagatccaagataaggagggcatccccccggaccagcagcgtctcatcttcgctggcaagcagctggaggatggcaggacccttgctgactacaacatccagaaggagtcgacccttcaccttgtcctccgcctccgtggtggcatgcagatctttgtcaagactctgaccggcaagactatcacccttgaggtggagtcttctgacaccatcgacaacgtcaaggccaagatccaagacaaagagggcatccccccagaccagcagcgtctcatcttcgcccgcaagcagctggaggatggcaggacccttgctgactacaaca

SEQ ID NO: 1604 - DNA, 503 bp, Oryza sativa
  Clone ID: uC-osflcyp030f04b1
ttcagatttggcaaacgatcaagccaaagctgctgagtttaccttttttggagaaatcggtgaacaattgattggcaggcctattcttaacctggttgcatctgttcatggagcacgagatatagtatcaccagagatcaaagcaatttttggcagacaatatgtcattagaaccagtgtgtcacgtggctcattgcaaagaaatcgggtatcctaccaggtggattcccttatgctaccccacccagatccaagccatgcaatttgtctacccagccatgatacttgcgtgggctcttctggacatggctcaacatcagctaatgcagttgaaccacatgccatcgttttgtcttctactcaatctatgccaccttctacgccgcttgtgcttccagatacaaaggacacaagggatagccatggtgatcagcatgaggcaacaccacctactccacaggtcatagctatagcacagctagataaaaaacataaatcttcta

SEQ ID NO: 1605 - DNA, 497 bp, Oryza sativa
  Clone ID: uC-osflcyp030f05b1
ttctccaacacgctcacccatgcaacccaacgcccgccaaatgcgcggcggcggcggcggcggcggcggcgggcaggacgacttcttcgaccagatgctgtccacgctgccggcggtgtggtccgagctcggctccggcaagcccgcctgggacctcacggccggcgccgtaggaggaggaggaggagcctccgatgaccactccgccgcggcgttcgacgactccgcgctcctcgcctcccgcctccgccagcaccagatcgacggtggaggcgacaagcccatcatgctccaactcagcgacctccaccgtcatcacggcctcgccgccggcgatgacagcggcggcgctgccgggttccttcccctgtcgctgttcgctgaccggtcgcaggacgacatcgacgccgccttcaagtcccccaatggcgctagaggtgaccatgcgctgtacaatgggttcggtgccgccggaatgcatggcgccgtcgccatgc

SEQ ID NO: 1606 - DNA, 509 bp, Oryza sativa
  Clone ID: uC-osflcyp030f06b1
tgttcaaccagctgctgtccctcatcatcaacaccttctactccaacaaggagatcttcctccgcgagctcatctccaactcctccgatgcattggataagattaggttcgagagcctcacggacaagagcaagctcgatgcgcagccggagctgttcatccacattgtccccgacaaggctagcaacaccctgtcgatcatcgacagtggtgtcggcatgaccaagtcggacctcgtcaacaacctcggtaccatcgccaggtcggggaccaaggagttcatggaggcgctcgctgctggtgctgatgtgtccatgattgggcagtttggtgccgggttctactccgcctaccttgttgctgaagggtttgttgtgaccaccaatcacaacgacgacgagcagtatgtgggggagtcacagggccgtgggtccttcacttgtacacgtgatacctctggtgagcagcttggacggggtactaagatcaccctctacctcaaggatgat

SEQ ID NO: 1607 - DNA, 400 bp, Oryza sativa
  Clone ID: uC-osflcyp030f07b1
tcttctctccaccacacactcccacccaggtaaggagagggaggaggaagggaacctcgaaggcggcggcggcggcggcggagacggtttccctcaagctgcagaagcgtgctcgccgacagcgtgctcaagtgcggcaagggcaaggtctggctcgaccccaatgaggtcaacgagatctccatggccaactcccgtcagaacatccgtaagttggtcaaggatggattcatcatcaagaagccccagaagattcactccaggtcccgtgcacggagagcccatgaggctaagcagaagggacgtcactctggctatggtaagcgtaggggtacaagggaggctaggctccccacccagatcctgtggatgaggaggatgcatgcgctcaagccattgc

SEQ ID NO: 1608 - DNA, 447 bp, Oryza sativa
  Clone ID: uC-osflcyp030f10b1
tcgggtggaacgcgtacttacccacaagttaggtgcatgccatggcaccattcatggcgtgcgcctcgccaccggtactcacgctggccctgctcgcgtcgtgcggtgcccttctcgccacctccatgctcccggcgcgtgcgacggcgggcagctgcttggacgtcggcgacatggtgatgatggacaggttccgcgcttggcagggagctcacaaccgatcgtacccgagcgcagaagaggcgctgcagcggttcgatgtgtaccgccgcaacgcggagttcatcgacgccgtcaacctgcgcggcgacctcacttaccagctcgccgagaacgagttcgcagacctcaccgaggaggagttcctggccacgtacaccgggtactacgccggcgatggccccgtggacgactccgttatcacgacgggtgccggagacgtcgacg

SEQ ID NO: 1609 - DNA, 432 bp, Oryza sativa
  Clone ID: uC-osflcyp030f11b1
tcgttcaattaggaacgaagaaacccagggagagtgaggatggcaaggacacgcgttctacttctcgatgtcctcatcgatgacgaggtggtgctttggggggcggtcgggcgcgcgctggccaagacggacaataagagcaacgacatcgttaatggtccactgctgacctgcaagaacaaagacgagcgcacgctgatagtgggaccgaggacgaggtcaagaccgtgcagtgcgacatcgacgacgagcccggcggaaacaccgggcgggtcatggtgcacctacgctccggcatgtacagggagaaagttatgattacggaaaccaagaagggcatcttaccgaggggaaacagcatgggccggacctcaatcaaccacgagggcgcttgatcctacaacgcctagtctgccgccttcaccgtgcacg

SEQ ID NO: 1610 - DNA, 455 bp, Oryza sativa
  Clone ID: uC-osflcyp030f12b1
tctttcaaccttttgttgcaaagttcgcaagcttcagtatcggaaacttatctaggtatggatttaggtcttggtaagtttttaggtgttctgtgctgtacatattccagtttggtgggttgtcctgttaccagtttgtttcctttggtgctgcaatgtaggattccgtagcgagtttcggtactttagagccttttatcatccatcttcaatgtaggcaatggctttctatccaatttagaatcaaaatctaagctttactgtggaaccaagtttcctttaaagcacttcctgagttcctggtcctgtgtaaacagttcaagttgggtcctttaaattgagaaacccatactagaatgccatcatggaaaagcacccttgcatggtgaacagatatgcactaaatcaagcaaagtcaaagtattctgctctttttattcttttggagctgaatg

SEQ ID NO: 1611 - DNA, 488 bp, Oryza sativa
  Clone ID: uC-osflcyp030g03b1
ataaccctctgactggtggaccctctcatatcctttttcccactcccctctatccactgtttccgccgccgccgccgccgccgccgcccgccgcgccggcgttctccccccgccgacgaagcacggcgtggagtgtagacgcagcctcctcgctctctctcacgccggcgagcagggtctggagccaggagcgacgcggcggccggggccggggcctccatctcggttcgaaccgcactgaaggtccctccctgcattagggcgcacaatggcactgacccttctcagagggatgcgaacgccggttgtagctagaaggaatgctggcttgttcttcaccacattgcagtctccgttgttgtcccgcttcacaatgagagcggagagcgcgcgggccgcagcgcccaagtcgattcagctggcgaccaaagaggcggcggagcaaaaggcgcagggctttgaggcggtcatcgggatcgagacccatg

SEQ ID NO: 1612 - DNA, 472 bp, Oryza sativa
  Clone ID: uC-osflcyp030g04b1
ttcttttctcgcctccttcccctttcccccctgacgtctctgctcttctccggcgcaccaatccgccccctcgcgattcgaccagatcggtgcgagggcatatcatggcatctaagcggatcctcaaggaactaaaggacctgcagaaagatcctccaacatcatgcagcgcaggtcctgctggtgaggatatgttccattggcaggctaccattatgggtcctccatatagtccctatgctggtggagttttcttagtgaatattcatttccccccggactaccccttcaagcctccaaaggtatcttttaagacaaaggtcttccatccaaacattaatagcaatggaagcatatgccttgacattcttaaagaggcatggagccctgctttgacaatttctaaggtgttgttttcgatctgctcgttgctcacttgaccccaacccggacgaccctcttgtccctgaga

SEQ ID NO: 1613 - DNA, 429 bp, Oryza sativa
  Clone ID: uC-osflcyp030g08b1
tcgttggtcttctccacctcctcctccaagccgcgcctcggctcctccgtcggattctcctcgcccgcgcggttccggcgcacggcggcggcggcggcctccaggggcacggggcggcgcgcggggctgctggtagtgcgcgcggcgagggggaagttcgagcggaccaagccgcacgtcaacatcggcaccatcggccacgtcgaccacgggaagaccacgctgacggcggcgctcaccatggtgctcgcctccgtgggcgggagcgcccccaagaagtacgacgagatcgacgcggcgcccgaggagcgcgcccgcggcatcaccatcaacaccgccaccgtcgagtacgagaccgagacccgccactacgcccacgttgactgccccggccacgccgactaccggaagaacatgattaccggcgcc

SEQ ID NO: 1614 - DNA, 400 bp, Oryza sativa
  Clone ID: uC-osflcyp030g09b1
tcgtccatatcacatcctctccttcctcttcctctgctcactcagctctcccccgcgcgcgccaccgtcgtcgccatgtcgggcaacatcgccttcggccgcttcgatgactccttcagcgcggcctccctcaaggcctacgtcgccgagttcatctccaccctcgtcttcgtcttcgccggcgtcggctccgccatcgcctacaccaagttgaccggcggcgcgccgcttgacccggccgggctggtcgccgtggcggtgtgccacgggttcgggctgttcgtggcggtggccatcggcgccaacatcttcggcggccacgtcaacccggccgtcaccttcggcctcgccctcggcggccagatcaccatcctcaccggcgtcttctactggatcgccc

SEQ ID NO: 1615 - DNA, 416 bp, Oryza sativa
  Clone ID: uC-osflcyp030g11b1
tcgttacgagttctgcagcggccaaagcatgaccagaactttggaaagataccaaaaattcagttatggtgggccagatactgcaatacagaacaaggaaaatgagttagtgcaaagcagccgcaatgagtacctcaaactgaaggcacgggtggaaaatttacagaggacccaaaggaatcttcttggtgaagatcttgggacacttggcataaaagagctagagcagcttgagaaacaacttgattcatccttgaggcacattagatccacaaggacacagcatatgcttgatcagctcactgatctccagaggagggaacaaatgttgtgtgaagcaaataagtgcctcagaagaaaactggaggagagcaaccagttgcatggacaagtgtgggagcacggcgccaccctac

SEQ ID NO: 1616 - DNA, 498 bp, Oryza sativa
  Clone ID: uC-osflcyp030g12b1
tctctctatcggctgcagcaaagaatggcaggagctgggaggactaggagcacggccatggcggcgtggtcgtactcgtcgctgctgctgcagctgctgcttctctcgatggtcgccgtactagacggcgcggcgacgaccggcggcggcggtgccggggcgccggcgccggcggcggactgcacggacgcgctgctgagcctggcgggttgcctgagctacgtgcaggaggggagcacggtggcgaagcccgacgcgccgtgctgctcggggctcaagggcgtggtgaagaaggaggtggcctgcctctgccaggcgttccagggcagccagaacttcggcgtcacgctcaacatgaccaaggcgctccagctgcccgccgcgtgcaaggtcaagacgccgccgttcagcaagtgccacctttttatttcgggccggactggtggtgcttctgctcccgcttcattcttcggggctcgtttttggggggtcgcccct

SEQ ID NO: 1617 - DNA, 436 bp, Oryza sativa
  Clone ID: uC-osflcyp030h02b1
gtctcaatctcttccaacctgcacacgactttctgccaatgatcgatgaggttaccaagtccctcttgcaagttgtcagtggaattgaaggtgcaactgttgagaacaacaaattctgcgtttctgtacattatcgcaacgttgcagagaaggattggaaactggtcgcacggctcgtaaacgaagtgctggaggcttttcctcgtctcaaagtaaccaatggacgaatggttttagaggttcgtccggtgatcgactgggacaagggaaaggctgtggagtttttgctccagtcactcgggctaaatgactctgaaaatgtgatccccatctacattggagacgacagaactgacgaagacgctttcaaggtacttcgacagcgaaattgcggttatggaatactagtttcacaggttcccaaggaaactgaagc

SEQ ID NO: 1618 - DNA, 451 bp, Oryza sativa
  Clone ID: uC-osflcyp030h03b1
gtgcgtgccacttatggatcctatagtcacgcttttcggcagtgtccatgagaacatgcctcatgctggaggaagcatgcggagtacattgtttcccaactttggtagtatgtttagtgtgacagatcagcaccccaaggttgatcaatgggatgaggagaaccttcatagggatgatgaggaatacgcgtctgatggtgctggaggtgactatgaagacaatgtccacagcccgttgctgtcccgacagaccacgagcgcagaagggaaggacattgcacaccatgctcatcgtggaagtgctctgagtatgagaagaagaagcctcttggaagagggtggcgaggcggtgagcagcactggcattggtgggggatggcagcttgcatggaaatggtcagagcgagaaggcgaggatggtaagaagggaggaggatttaaaaggatctac

SEQ ID NO: 1619 - DNA, 494 bp, Oryza sativa
  Clone ID: uC-osflcyp030h04b1
ttttagtgtccctagatatggaaggaagagaggcaggcttatggtaagccctggtgaatatttgtgggaggtcagtaagtggtggcctgattaagactgcatcagagaaatttgtggttatctttctttactaatgacggcattgacgagaatgaagttcccaaagcgctatgtcattgtgctgctgacattcatctgcacaaatgtttgttacatcgagcgtgtcggattctcgattgcttacaccgtggcagctgatgccattggcgtgaatcaagcaaacaaaggcatgatactttccatgttctactatggttatgtcttatcacagatccctggtggatgggcagcacagagaattggaggtagacgtgttctgctgctgtcatttgtgctgtggtctttgatatgcggtttaattccactagaccccaagagagaagtcatcctggtcctttctcgcctttttgtcggcgtagcacaaggattcatat

SEQ ID NO: 1620 - DNA, 510 bp, Oryza sativa
  Clone ID: uC-osflcyp030h05b1
tgtgatgcgcaaagatcatctctttgcttctcgccttctcctcctcctcctcttctccctcctcgtgctccgcccgatccgtccgccgcctccagatccgcgcccatggcgtcgcgcaggcgaatgctcctcaaggtcatcatcctcggtgacagcggggtcgggaagacgtctctgatgaaccagtacgtgaacaagaagttcagcaatcagtacaaagcgacgatcggcgcggatttcctgaccaaggaggtgcagatcgacgaccggctcttcacattgcagatttgggacacagcgggacaggagcgatttcagagtcttggtgtggcattttaccggggagctgactgctgtgttcttgtatatgatgtcaatgttaccaagtcatttgaaaggctcaacagctggcgtgaggaattcctaattcaagctagcccatcagatccagagaatttcccttttgttgtacttggaacaaaattgatgttgatggtggtaatagcccga

SEQ ID NO: 1621 - DNA, 424 bp, Oryza sativa
  Clone ID: uC-osflcyp030h08b1
tttttcgccaacccgacacgtctctcatcttcacgcaacgaacagcagcagcagctcaagctaagctaagctaaagtactacgtgttctttcgtcttcgtcggcgccggagtttgattcgtcggagctagctagcaagaggaagaagaaaatgttggccatattccagaagcaggtggcgcacgcgccggcggagctgaacagcccgcggagcagcgcggcgaatcccaagaaccccgacgagatcctcagggacttccacgccctccaccccatcgaggccttctccacctccttcggcggcggcgccgccctcgcctgcgtcgccggccacgcccgcaatggcctctctggctacgagaggatgttctgtgggctggatgacatctactgcgtgttcatggggaggctggacaacctgagca

SEQ ID NO: 1622 - DNA, 440 bp, Oryza sativa
  Clone ID: uC-osflcyp030h09b1
tttttgagggggcgggcgtgcgtgcgtcgtcgatcgtcgacagtcgtctcttgccaccatgtctttcaccggcacgcaggacaagtgcacggcgtgcgacaagaccgtccacttcatcgacctcctcaccgccgacggcgtcccgtaccacaagacctgcttcaagtgcagccactgcaaagggattctctcgatgtgcagctactcgtccatggacggcgtcctctactgcaagacccactttgagcagctcttcaaggagacggggagcttctccaagaagttcgcgccaggttgcagatctacagacaaggaactggcaagggccccaagcaagatatgttcagcgttttctggaactcaggataagtgtgcagcctgtcagaaaacagtgtacccacttgaaaagctaactttgaaggtgagtcatccacaagagc

SEQ ID NO: 1623 - DNA, 497 bp, Oryza sativa
  Clone ID: uC-osflcyp030h10b1
tcgtaaagactgtagatgtggaagagctcactgttgaggagcgcaacctcttgtctgttgcttacaagaatgtgattggtgcccgccgtgcctcctggcgtattgtctcatccattgaacagaaggaggagggtcgtggcaatgaggaacatgttactctgatcaaggagtaccgtggcaagattgaagctgagctgagcaagatttgcgatggtatcctgaagttgcttgactcacaccttgtgccctcatctactgctgcagaatctaaggtgttttacctcaagatgaagggtgattaccacaggtaccttgcggaatttaagactggtgccgagagaaaggaagctgctgagagcacaatggtggcttacaaggctgctcaggatattgctctggcggatcttgctcccacccattccataaggcttggactggcacttaacttttctgggttctactacgagattctaaactctccagacaaggtttgcaac

SEQ ID NO: 1624 - DNA, 397 bp, Oryza sativa
  Clone ID: uC-osflcyp030h11b1
tcgtcgtcgcccacaggttctcgctcgcctcggccttcctgccgcgccaccgccggccatcgccgtccgcccccaaccggcgccggcggcatggaacggtggtggcgtacatggagccgaaccccaactcgccgtcctccatcgcgggccgcctcatcggggctctccccgtggtgggcctcgtggcgcgcatcctgagcgacgagggtggcgtcggcggcgacatgatcgacttcgccgagttccgccgccgcgtcagcaagaagtgcaccgtcatggactcccaggccttctacgatttcaacgaacgccgcggcaaggcaggagatcccttctacgttctgctgtgctgctggctggccgccgatggtggcgggctgctgaaaacggaggagat

SEQ ID NO: 1625 - DNA, 485 bp, Oryza sativa
  Clone ID: uC-osflcyp030h12b1
tcgttaatgttcaccgtggaattcatgttctcagtgcaaaggctaccgatgcatatgagagtgcaagaacaaaagttgcaaattttgtcaatgcagctaatagtagagagattgtttttacacgtaatgctactgaagctatcaatttagtagcatattcgtggggcatgtccaacttaaaacaaggagatgagattgttcttacgattgcagagcatcatagcgctattgttccttggcaatttgtttcccagaagactggtgctactttaaagtatgttgggctaaccaaagaaggggttccagacattgagcagttgaaaggtcttctgtcaaacaagacgaagattgttgttgttcatcatgtctcaaatgtactcggttcaatgcttcctattgaggatattgtaacatggtcaaacagaattggtgctaaagttcttgtcgatgcttgtaaagtgtttcttatatgcctgtcgatgttc

SEQ ID NO: 1626 - DNA, 457 bp, Oryza sativa
  Clone ID: uC-osflcyp031a01b1
ttctttagaccaaccggaatcgtcgcgcgccgcggccgtcgtctcctcgccgtgcaccgcagccgtcgagcccatcggcgccggtcatgtcgatcttcgagtacaacgggagcgccgtggtggcgatggtggggaagaactgcttcgcgatcgccagcgaccggcgcctcggggtgcagctgcagacggtcgccaccgacttccagagggtgttcaagatccacgacaagctctacatcggcctcttcggcctcgccaccgacgcccagacgctgtaccagcggctggtgttcaggcacaaactgtaccagctgagggaggagagggacatgaagccgcaggcattcgctagcctggtctccgcgctcctctacgagaagaggtttgggccgtacttctgccaaccagttattgctggattaggagataatgatgagccatttatatgtaccatgga

SEQ ID NO: 1627 - DNA, 514 bp, Oryza sativa
  Clone ID: uC-osflcyp031a05b1
gttgctgtcacgcgcttcgtgctcgccgccgtggaccttcgtgctaccccccgccatggcttcctccctcgccggatccgccctctccttcgccacccccgtcaaggcagtcaagactaattcgatatctttcaccagcgcaaggaagggaaatgcatttctccgcctgcagccagtgcctatgagatttgctgtttgctgtgccgcaaaaaaggagacagtggagaaggtttgtgacattgttaagaagcaactcgctgttcctgagggcactgaagtttctggtgcatccaagttctcagatcttggtgctgattcactggacacggttgagattgtgatgggtctcgaggaggagttccacatcagcgtcgaagagtcaagtgcgcagtcaattgcaacggttgaagatgccgctgcactcatcgacaagcttgttgagcagaaatctgctgaagcgaaatcatcttgatatgcacaaatcacaaatgtgaagctcgtaaactagctttac

SEQ ID NO: 1628 - DNA, 363 bp, Oryza sativa
  Clone ID: uC-osflcyp031a06b1
ttgtgattgcgttcgtaaaccctactagctggtgttctagatcttctcttcctccttaatttgatagccttaaacctctcttaaataaataattcaagtaataacagtttggtggttcacccaaaagtttgggggttcaactgaacccccatgtgccaaggtggatccgcccctgtgtcgaggtcttggtggtggtgggtaccatttcagaatcaaacctcatttcccatgcataaagtagtatgtatagtggtgtttacttaattttaggagaggttgtcttccatgttattatcttatatgatttgaggcatattattccagattcaccagtcttcactgttggctgaaagaacaaccatt

SEQ ID NO: 1629 - DNA, 469 bp, Oryza sativa
  Clone ID: uC-osflcyp031a08b1
tgccggcgaggaagcggctgatgcgggactgcaagcgggtgcagcaggagccgcccgccggaatcagcggcgcgccgcacgacaacaacatcatgctctggaacgccgtcatattcggaccggatgacacgccgtgggatggaggcacgttcaagctgacactacaatttacagaagattatcccaacaaaccaccagttgttcggtttgtctcaaggatgtttcacccaaatatttatgcagatggaagtatctgcttggatatcctacaaaatcaatggagccctatatatgatgttgctgcgatattgacctctatccagtccctgctctgtgatccaaacccaaactcccctgcaaactccgaagcagccagactgttcagcgagaacaagcgcgagtacaaccgcaaagtccgcgagattgtggagcagagctggacggccgactaagccaaggacatgattga

SEQ ID NO: 1630 - DNA, 404 bp, Oryza sativa
  Clone ID: uC-osflcyp031a10b1
tgaagaaaggctctcaccaatccaacgggggtcgatccatccatccatccaatccgcctcgctccatccatggcgtctgcggatgcggtctcgccggcgccggcgacgtccgccgcggcgcagcagcagctgcggaccgtggtgctgagggtgtccatccactgcctcggatgcaagaagaaggtcaggaaggtgctcaggagcatcgaaggcgtgaaggatgtgaaggtggacgccgcgatgcacaaggtgacggtgaccggcacggtggacggcgacacgctcgtcaagaggctgtacaagtccgggaagcaggccgtgccgtggcagcacccgcacgtggcgccggcgctggaggcggtcaaggcgatagaggccgcgccgcagcagcctgaggctgcgcc

SEQ ID NO: 1631 - DNA, 164 bp, Oryza sativa
  Clone ID: uC-osflcyp031a12b1
tcgtctcaggataaaattacagtgggggctcgtgagccttttgggccttctaaccatctcagacaaagtctattttagcccccttgcaatagatttatagatttacattttaggggggggggggtcttaatgggggctctaatgatttattaggggggtagggg

SEQ ID NO: 1632 - DNA, 501 bp, Oryza sativa
  Clone ID: uC-osflcyp031b02b1
tcttcagcagcagcagcagcagctgagcttgaagcatcatagcgaggtagacatggccgccgccaccatggccctctcgtccccggcgctggccggcaaggccgccgcgaaggtgttcggcgaggggcgcatcaccatgcgcaagtcggcggcgaagcccaagcccgccgcgtcggggagcccgtggtacggcgccgaccgcgtgctctacctcggcccgctctccggcgagccgccgagctacctgaccggcgagttccccggcgactacgggtgggacaccgcggggctctccgccgacccggagacgttcgccaagaaccgggagctggaggtgatccactccaggtgggcgatgctcggcgcgctgggctgcgtgttcccggagctcctcgcccgcaacggcgtcaagttcggcgaggcggtgtggttcaaggcggggtcgcagatcttcagcgagggcgggctcgactacctcggcaacccgagcctgatccacgc

SEQ ID NO: 1633 - DNA, 506 bp, Oryza sativa
  Clone ID: uC-osflcyp031b03b1
ttttcccactcctccccctcccaatcccaagtggcgattactccccaagccgggagagagcccgagagtaaactaatcgccatccgccaccgcgcagccgcggcagctagctcgcgagaagaaaacgccacgcgacccgagagcgagagagagagagagctaagccgccgtgcgccacgccaccaccaccaacccatcccaatctctctctctctctctcctcgtgctcctagctacaagaagaaccccctcacccccaccccggacacctacctagccgctacccctctctcttcctcttcttcttcttccctcttcttggggtggtgggtttgacccaagaacggaggagggatagggcgggcggcgatgggggcagttcgggggattttggtcgtggcggtggttcttgcggtggcggcgatttttgctggggcggcggaagggaaagtgaaccggaaggcgaaggggaaggacagggcgctgttcaactttggggactcgct

SEQ ID NO: 1634 - DNA, 485 bp, Oryza sativa
  Clone ID: uC-osflcyp031b04b1
tgctgagagcacgggcaaaactagggtttcgggtggtctcgcggaggcggagaggccgcaatccctcgtgctctccgatcctccggagcccccgccggccacggggagctcgccgatccgatcaaccggggttccggcctccggccccgcttcggcgggaggtttactcgtatccgcttcccctaccgtctcgtctttgcatttccgctcgcttcgatttcgccgtggcttgatgcctctgatctctctcgttttgcttggattttgccgttggcccgatgatgattgcgatttagaccctcgcgaatcgatcgattggttggttggttgatggatggatagataggatcggctcggatttgaggctcgccctttgcatctgcaagcgggttgaggtcccgagaatggctagtaccgtgttggctccttcatgatctgggcctgaaacatgctgggggggtcggagaggcactgacatgtgggcc

SEQ ID NO: 1635 - DNA, 504 bp, Oryza sativa
  Clone ID: uC-osflcyp031b07b1
ttgaacgaccaatcactcagaaggagagaagggtgacgctgagtccaattgatctgacgctgagagtaaaggtgaagaccattcaactggagatgatatgccccaaagcaatactgtcctagaggaaagcagtgcagagacgaacagaatgccccatgaagaagttgcacatggtgatgaatctactaatgaagatcagtccaatgtgaaaagtgacggatctaatgaagaggaagctgagaaaaaagaggcagtggattctcaaaatgcttctgaatctctgtccgatgatgcgaagggtggaacagatgatgagcattccagtggaactcttcctgatgaaacaggtaatctaccatcagggcagaatgagaactcacaaagtgatgcgacttccaccacatctgatgcttctagcgaggctgttcacattgagactggatctgagaatgaagatgcagcaaaatcatctgggactgcatctggtgatgatgacaagggctc

SEQ ID NO: 1636 - DNA, 498 bp, Oryza sativa
  Clone ID: uC-osflcyp031b08b1
gccatggatccctacaagcaccgcccgtcgagctcgttcaacggcccgctgtggagcaccaactccggcgcccccgtatggaacaacaacaactcgctcaccgtcggctcccgaggcccgatccttctggaggactaccacctggttgagaagctggccaacttcgacagggagcgtatcccggagcgcgtggtgcacgcccgcggcgccagcgccaagggcttcttcgaggtcacccacgacatcacccacctcacctgcgccgacttcctccgcgccccgggcgtccagaccccggtcatcgtccgcttctccaccgtcatccacgagcgcggcagcccggagaccctccgcgacccgcgtggcttcgccatcaagttctacacccgggagggcaactgggacctcgtcggcaacaacttccccgtcttcttcatccgcgacggcatgaagttcccggacatggtgcactcgctcaagccaaccccaagtcgcacg

SEQ ID NO: 1637 - DNA, 481 bp, Oryza sativa
  Clone ID: uC-osflcyp031b10b1
ctcgtctccctcgaaagcaccaccggatccgacgaccccctcctcccctttctcccctcctcacgaaaccgcctcgccttcctcttcttttctttttcgctcgcttcgcatcgctcacatgcccctgcctgccgccgcagacggggcgccatgtcgcgtagcggggtggaggtggtcgtgagcaggggttgctccaggctcgtcctccccgggatgcagccttcctccgcctccgccgcttcctcctcctccttctcgcgcggcggacatggcggcggcggcgaccggaggccgctgcccgatggccccttcgccggattggtcatctgcgtcaccgggctatccaaagaggcgaggactcaagtgaaggaggcgactgagaggatgggaggcgagtacagcgggagcctgcatcccaagtgcacccacctagtggttcagagccttcgccggcccgcagtttgagcacgcggtcaagcat

SEQ ID NO: 1638 - DNA, 511 bp, Oryza sativa
  Clone ID: uC-osflcyp031b11b1
tcgcgaatcccaattcccaattccctactcccagatcccaacctcccattcatcgggtcgtgtcgccgccgacgaacaacacggcgagcggcgccggtggcgagctacctaccctccatctctccagatcccttccagggacagtacaagacaagtcgcacaaaacagaaaatcttgtgatagtttaaatggcttcaaagcttcaagccttttggaaccatcctgctggccccaaaaccattcatttctgggctccgacatttaaatggggtattagtattgccaatgttgcagactttgctaagccacctgaaaagatatcctatccacagcaagttgctgttgcttgcactggagtcatttggtcacgctacagtatggttataacaccaaaaaactggaatctattcagtgttaacgttgcaatggccggcacaggcttgtatcagctttcccgtaaaataaggaaagattacttttctgatcagaaggatgatgttgcatcattgga

SEQ ID NO: 1639 - DNA, 143 bp, Oryza sativa
  Clone ID: uC-osflcyp031b12b1
tctcaaaactggcgttcttccagtagaaaggagaataaaattaacgtgtgagattgtggtttcctttgactatgctgtgacgccgcgagacactcatgtaagtgtaaccattcaataataaaatgaagcattcctgttattgt

SEQ ID NO: 1640 - DNA, 473 bp, Oryza sativa
  Clone ID: uC-osflcyp031c01b1
tttatcatcagcaaccaattcgcaccgatcgagcgatctatcgatccagcagctagatcaacagtactagctaggaagcatggcccgtgcacagttggtgttggtcgccctggtggcagctctgctcctcgccgccccgcacgccgccgtggccatcacctgcggccaggtcaactccgccgtcgggccctgcctgacctacgcccgcggcggcgccgggccgtcggcggcctgctgcagcggcgtgaggagcctcaaggcggcagcaagcacgaccgcagaccggcgcaccgcctgcaactgcctcaagaacgcggcccgcggcatcaaggggctcaacgccggcaacgccgccagcatcccctccaagtgcggcgtcagcgtcccctacaccatcagcgcttccatcgactgctccagggtgagctgagccatcgatcagagagacggatcatatatatacagcagcgcgc

SEQ ID NO: 1641 - DNA, 495 bp, Oryza sativa
  Clone ID: uC-osflcyp031c04b1
catgcaagcaagaagagacgagacgagggagagaaggagaagagggggccggccgcgggcgtcgtcgtgttcctccccccctctctctcctctcctgtcctctcgatctccatccttccttccatccattcctccccgcacccttcgcattgctctcgtcgtctcgattcggtcgaggatctccaggaaaagaggaggaagcgatatgggttgcttttcatgctgcggagcggatgatgtcggcaagaagaagaagcgcgacgatccttacgtcccgatccctgatccaggtggtaactatggacgtagcaagcccgggcccccagccccttcgcgttctccccccaccagcagaaatctgccaattgcagtaccggcaattccccttgatgaaataaagggaataaccaagaacttcagcagtgatgctcttatcggagaaagctcgtacgccagagttttctttgttgtgctgagagatggcaggagatctgc

SEQ ID NO: 1642 - DNA, 509 bp, Oryza sativa
  unsure (1)..(509): unsure at all n locations
  Clone ID: uC-osflcyp031c05b1
gcttttctgattccattcttgcaagttctagaggtacagaaagcagggagtaatggcgtccaactacgtggacactgctggggaggaaggcaggttccacggccacggccaccacagcagcggcacgacgccgaccggcgcggcggcgtcgccgaagatgcggaggagctggtcgtccgccgcctcggcgtcgtccggcggcggcggacacgggtccggccccaagtgcgtctgcgcgccggcgacgcacgccggctccttcaagtgccggctccaccgcagcagctcgcacggccacccgtcgtcctctcccaccgncgccgccgtgccggcggtggccgtgcagtcctcgttctcccgcaccgtcgcggcgcaatgacgcaagaacggtctctcggaccaagaaacgcccaacaagaagagaggagaaggaaaaaagaaggaaagaacataatctaaaccaaagaatatttgtggtcattcatagaaaagggatattatttgggtcc

SEQ ID NO: 1643 - DNA, 446 bp, Oryza sativa
  Clone ID: uC-osflcyp031c07b1
tctagttctagatcgcgatcggccgccctgggttttttttttttaatcagaagatcaacagtactagctaggaagcatggcccgtgcacagttggtgcaggtcgccctggtggcagctctgctcctcgccgccccgcacgccgccgtggccatcacctgcggccaggtcaactccgccgtcgggccctgcctgacctacgcccgcggaggcgccgggccgtcggcggactgctgcagcggcgtgaggagcctcaaggcggcagcaagcacgaccgcagaccggcgcaccgactgcaactgccttaagaacgcggtccgcggcatcaaggggctcaacgccggcaacgcccgcaggattcccttcaagtgcggggtcagcggcccctacaccatcagcgcttccatcgactgctccagggtgagctgagccatcgatcagagagacg

SEQ ID NO: 1644 - DNA, 500 bp, Oryza sativa
  Clone ID: uC-osflcyp031c08b1
ttagccgacgacgacgacggcgagcggcgggggcggctgcggagggagaagcggagctacccgtaccgcggcatccggcagcggccgtgggggaggtgggcgtcggagatccgcgaccccgtcaagggcatccgcgtctggctcggcaccttcgacaccgccgagggcgccgcgcgcgcctacgacgacgaggttcgccgcatctacggcggcaacgccaagaccaacttccccccatcgccgcccacgccgccgccgccggagaagccagcggcggagaggagcccctcgacgacgccgacgacgaccacggaggactccggcgactcgcgcatactcatcgagtgctgctccgacgacctgatggacagcctcctcgccgccttcgacatgaccaccggcgacatgcgcttctggagctaacgaacaacagagcagattcaggacaacataaacggcacgtttttgcaaccttgacatgcgactcgcctaataatctt

SEQ ID NO: 1645 - DNA, 499 bp, Oryza sativa
  Clone ID: uC-osflcyp031c11b1
ttggacgcgtgggtttccagaactagatggtcttagttccatctggaagctgttcacagctgtccctgttcttgtcactgcctacatctgccattacaatgttcacagcattgacaatgagcttgaagacagaacacaaattaaacctattgtgcgaacatccctgttcctctgctccagtgtttacattgctacaagtttctttgcatatctcctcttcggcgagggtaccctagatgatgttctcgctaacttcgatgcaaatcttgggattccatttagttccgtctttgatgatatagtgcgagtgagctatgctgctcacgttatgcttgtctttcccatagtcttctttgcccttaggctcaacttggatggactgctcttccccacatcaaggcacatttctcgtgacaacaagagatttgccataatcactatctcactcctcacagtaatttatcttgctgccattttcataccgagcatttgggatgca

SEQ ID NO: 1646 - DNA, 472 bp, Oryza sativa
  unsure (1)..(472): unsure at all n locations
  Clone ID: uC-osflcyp031c12b1
tgcaaggcaccaaatccccccaccatggatgaccgcctcctcctcctcgggctcctcctcctctccccggcggtggccgccgcctcagtccccggcgaggaggagccgctgatccggcaggtggtcggcggcggcgacgacaacgagctggagctgaacgcggagcgccacttcgccagcttcgtccagaggttcgggaagtcctaccgtgacgccgacgagcacgcgtaccggctctccgtgttcaaggccaacctccgccgcgcgcgccgccaccagctgctcgacccctccgcggagcacggcgtcaccaagttctccgacctcaccccggccgagttccgccgggcctacctcggcctccgcacgtcgcgccgcgccttcctgcgggggctcggcgggtccgcccacgaggcgcccgtcctccccaccgacggnctccccgacgacttcgactggagagaccacggcg

SEQ ID NO: 1647 - DNA, 501 bp, Oryza sativa
  Clone ID: uC-osflcyp031d05b1
tggtgcttctcgtgcaattcaggttctttggatggtttaatattttttttattggttgtaatggacagttagcagtagcaccacgtttttaggcctcagggccaagttataaaacttgagggtgaatatttggaactaataaatacttgacgaacatatcttctcttctaagtctacatttatggcttccactgtccacatctatgtatttgtgaattatattatatgtatatcacaacagacagctgtactgattggtcactataatctgttgcatttattttactcaccaagcacaatcagtgtatgcctagttccttatagcagttcttactttttagtgccaaaattttgcactagaaatgtttaaatgtgtcatgttagtatagatgatctcagatcatatttaaaactagttttgtgattcacttgtgttctgaggaagcgaatataaaacaaaagaaaaagaatcttttgcttcttcatccactctttccattg

SEQ ID NO: 1648 - DNA, 504 bp, Oryza sativa
  Clone ID: uC-osflcyp031d06b1
agatgatggaagctgcattgcaaggtgctgcaggacaatcccagtccaaagctgatgaaattgcaagactgatgaatgagaatgaacaactgaaatcaacaattgatgatcttaagagcaagtcagctgaagccgaaatggatgcacttaaagatgaatatcaccagagagtagcaactcttgaaaggaaggtgtatgccttgaccaaagaacgggatacattaaggagagagcaaaataaaaaaagtgatgcagctgctcttttgaaagaaaaggatgaaattatcagtcaggtcatggcggaaggtgaagagctatcaaaaaaacaagctgctcaagaagctactatgcggaaacttagggcacaggttcgtgaacttgaagaagaaaaacaacggctgaactcaaagatccaggttgaggagacaaagattgagagtattaaaagagataaggctgcaacggagaaattgctacaggaaacaatagaaagaaatcaaactg

SEQ ID NO: 1649 - DNA, 462 bp, Oryza sativa
  Clone ID: uC-osflcyp031d07b1
tttgcttgacgagctgagctgagctgagcggaggagctcccaccttctctgcctctgttgcaagggatctttcggagattttgctagttcatggcggagatttgctgccaggttgtggctggatcctcggccgaggggaagggcccggagtgcgacaccaggagccgagcgagcaggcggcggcggatggagatcccgcggctcagggtggtcgctgagcgtggggccgatgaggacacctccgggaagaggcggaggcttactggcggcacacgagaggcctctacggacgacgaggacacggaggtggagcccgctaggtacaggtttaccactgtgtgcggacgccggatggacatgcaggactccgtctccccctgcaccctgttcctacccggcaccacttcttcgaggtgttcgacggccacggctgctctcatgtggtgacctcgggcgggcagc

SEQ ID NO: 1650 - DNA, 281 bp, Oryza sativa
  Clone ID: uC-osflcyp031d08b1
cgactccgcgccgcggcggccgtctcgtccgctctccacatcatccccgttccctcgcacaccacagcgcgcgcccgcccgccagccatcccgctgccgtgccgtctccatcttctatccctcctcctgctgctgctgctgctgctacttaccccgcgatttctcttcctcttattactcttcctctcggctctcgctcgctcgctccccgcgcgatttctccacgccgcacgccgctcgcgagttagggatcgatctcgtcgggggcgggcgggagaggg

SEQ ID NO: 1651 - DNA, 533 bp, Oryza sativa
  unsure (1)..(533): unsure at all n locations
  Clone ID: uC-osflcyp031d10b1
ttttccccttctcctcctcgcggcgctcnctgancatttttgcggagggggaggcctattaaggacagcgccagcaaccctcccgggggaggaggcggcggaggtggaggggaggaggantantttttcttttttgttgtttggtaggctgttgtttgtgtttgttattcttgtttctgttgttgtctttttttttttttgtttttttcatttttttcgctttttttttctttatttttttttgtttttgtttttattttttttcttttttttcttttggttcttttttttttttttgtctttctttttttttgggttttttttagtttttttttttgtaattctttttaatttttttttttttattttttttttctttttttctttttctctttttgtttattttattttttttcttttttctttctacttcttttatcatttttttttgttttcctttcttttttttttgttgggatttcattttttttttctatttattaatgaatttttttgtttatttttttactttt

SEQ ID NO: 1652 - DNA, 279 bp, Oryza sativa
  Clone ID: uC-osflcyp031d11b1
ttactagttctagatcgcgaaggtgaactaggccggtgtgtcgaccaacaactacgccctggacgagatccaggaggtcaaatgattttaattcggatggatcgtcgtcgagctggagctgcaaagaatcatcttaaattgatcacggagtgaggagaggatgcatgtcgtacatgtggaagaaattaattaagctgcttgatcgagctttgtgtgtattagtgtaatggtggtggtttcttctttataatccgtataatactatgtaatttgcctgcc

SEQ ID NO: 1653 - DNA, 496 bp, Oryza sativa
  Clone ID: uC-osflcyp031d12b1
tcggccgcccgcgtcgccgtcgccaacggcacggcccccgtcgccaaccggatcgtcgagagccggtcgttcccgctctaccgcttcgtccgcgaggagctcggctgcgtattcctcaccggcgagaagctcaagtcccccggcgaggagtgcaacaaggtgttcctcggcatcagccagggcaagctcatcgaccccatgctcgactgcctcaaggagtggaacggcgagccccttcccatcaactaagccaagatcccatcgccattgccattgccatacacccatcatcgaggaggagaggagactaaaaataaaagaaaacgaaccgcttcgtgtatcttcagacaaaaaagaccctgtattttcttcgttcgttgccgtttggtttatagtgatctcgtgttctttgtgttagctgctctgctcagcttgccagccatggcggcaaagcaagcggcttttctaagatattgtcgctaaactgtattttggg

SEQ ID NO: 1654 - DNA, 504 bp, Oryza sativa
  Clone ID: uC-osflcyp031e02b1
tttattaggtgaatttgaaactggttacgaaaaaggaggactgaatcgtgaacggggactgcttgcaaaaactttaggtgttgctaagttgatagttgtcatcaataagatggatgaaccaactgtaaaatggtctaaagaaaggtatgataaaattgagtcaaagatggttccttttctcaaatcttcagggtacaatgtcaaaaaagatgttcactttttgccaatatctggacttttgggaagcaatatgaagaccaggatggataaaagcatttgtagttggtgggatggtccatgtctttttgaagtcctggattgtattgaagtttctttgcgtgaccccaaaggtccagtcaggatgccaataattgataagtataaagatatgggcactgtagtgatgggaaaaatagaatctgggaccatcagagagggtgacagtttgttggtcatgccaaacaagactaacgtgaaagttattggcataagtttggatgagca

SEQ ID NO: 1655 - DNA, 490 bp, Oryza sativa
  Clone ID: uC-osflcyp031e04b1
tgcttcttcccccgagaggcggcgaaatccggaggtccgaacaagccaaagccatcgtcgagctccttcacccaccgatcgattcgatctgaccgcgccgccgcaagggaggaggaggaggaggacgacgagcagcagccatgtgggcggcgtcttgcctggcgtcgtgctgcgccgcgtgcgcgtgcgaggcgtgccgtacggcggtcggcagcatcggccgccgctccgcccgcatcgcctactgcggcctcttcgcgctctccctcttcgcctcctgggcgctccgcgaggtcgccgcgcccctcctccaatccatcccatggattaaccacttccacaagacgcccgaccgcgagtggttcgagaccgatgccgtgcttagggttagcctcggcaacttcgtcttcttcaccatcctcgccatcatcatggctggcatcaaggaccagaaggacccccgcgacaagatacaccatggcggatggat

SEQ ID NO: 1656 - DNA, 487 bp, Oryza sativa
  Clone ID: uC-osflcyp031e05b1
tttcagctctcacagctcactgcatcaatgggcggggtcaccatggcgctctcctccccggtgatggcccgcgcggcgccgtcgacctcctccgcgctcttcggcgaggcgcggatcaccatgcgcaagaccgccgcgaagcccaagccggcggcgtcgtcggggagcccgtggtacggcgccgaccgcgtcctctacctcggcccgctctccggcgagccgccgagctacctcaccggcgagttcccgggcgactacgggtgggacaccgcggggctctccgccgacccggagacgttcgccaagaaccgggagctggaggtgatccactcccggtgggcgatgctgggcgcgctcggctgcgtcttcccggagctcctcgcccggaacggcgtcaagttcggcgaggccgttgtggctcaaggcgggctcgcagatcttcagcgagggcgggcttgactacctcggaacccgagcctgatccacg

SEQ ID NO: 1657 - DNA, 503 bp, Oryza sativa
  Clone ID: uC-osflcyp031e06b1
ttcagaagaacacagattcgaagaggcagaggcggcgaagagacgcgcgagccatgggcgtcaccaaggaggatgtcgaggccgccatcacctcctccctcagcccttccagcctcgtggtgacggatacttccggcgggtgcggcgcgagctacgagattgaggtggtgtcggagaagttcgaggggaagcggctgctggagcggcaccggatggtgaacaccgcgctggcgccgcacatggcggagatccacgccgtctccatcaagaaggcgctcacccctgctcaggcgcagccccagccggagccggccgccgataaggcgccccaggcttaagtagttcttgaactcacacctccaaactgttcgatcacatatgcaccacgagtgaaccgatgcacttggtgtagcgtttgtcatgggtgtttgagatgtgcgtcagctctctctgcttgataatgtgcatacaatggcagaattggaatgatactatgcttgact

SEQ ID NO: 1658 - DNA, 487 bp, Oryza sativa
  Clone ID: uC-osflcyp031e07b1
tcgctttacccttcccctggctcctcctcctgcgattccacttccatccggcggcacaggaggaaggttgctaaggggggatcggctccattcctcattcttcattccatttgcgcgcgtgattcgggtttcttttccttcttgtcacctgtttcttggtcggtttcccgccttctcagaggtcggtctattggatttggagcccggggcccagccttgcctcaacgtctgtgttgtcgtgttcttattggattcttgaccggattggattttggcggttccaatttttgttggattgctccgattcttggttgatttggtcggaagatgatcaagtggggcatcggtagcaccgggacgccagcggattcgtattatgaggtccgctctgattgcacggatgacgtgcccaagagcaagttcaagatcaaggcatgaaaaacatttagtgtcctgaaatggcaggctgcatttagcactgatgggt

SEQ ID NO: 1659 - DNA, 343 bp, Oryza sativa
  unsure (1)..(343): unsure at all n locations
  Clone ID: uC-osflcyp031e08b1
tgttttgtgtcggatcgatgatgatgtctgcccccctgatcatagcaagtgtaatgcgagatcagggggcgctcgacgtctcacaatacctttggttgtcaaaaggaagagtctaccacaatgttttgttttgtgccttgggttgcagatgtgtttgccgtgcgtggagtgagtgctactgctgtaaaagacgaaaatatgcatagtttaccctcctttcctcttcttcactgaaagttaaagagcaggcttaatatttatgttnaaaaaaaaaaaaaaaaaaaaacaaaaaaaaaaaaaaggaaaaaaaaaacaaaaaaaaaaaaaaaaaaaaancnncccc

SEQ ID NO: 1660 - DNA, 505 bp, Oryza sativa
  unsure (1)..(505): unsure at all n locations
  Clone ID: uC-osflcyp031e09b1
ttgtgggcatgctttgctgaataaggattgggaacttgggcgaggagggtggggcacagtctacaaggcagttttaagagatggccagcctgtggccatcaagaagctgacagtgtcaagcttggtcaagtcagaggacgagttcaaacggcaggttaagcttcttggaaaggggcggcaccataatgttgttaccctcagaggcttctactggacttcatcactgcagctcctcatctatgactttgtgcctggcggtaacttatatcagcacctgcatgagtcctcagcagagagatcggtttcatggatggaaaggtttgacataataatcggcgtagcccgagcccttgcgcacttgcaccgccatgggataatccactataatctgaagtcaagcaatgtcttgctagatagcaacggcgagccaagggttggtgactatggccttgtgaagctgctgcctatgctggatcgctacgtgctgagcagcangattcagagc

SEQ ID NO: 1661 - DNA, 460 bp, Oryza sativa
  Clone ID: uC-osflcyp031e11b1
tctcttagcttgttaggggtagttgctgggtcgattcaagggggtctctggggggccttgtctgcaagaaaggaaaggaggttatcggttaccattccttctgtcagcacaaatgcccttggctatggagccttcctaggactatatgcaaacttgcggtatcaactattgtgtggactggatcagtatatggtcaggcgatttgatgttcttggtgtggcaatcttcttcagcacagcactaagattgacgaatattcagattggtgaatcatcgagacgcacatggcttggggaggaagctgatccacagtactcagatcggctgctgagagcatataaaagaccagtcgaggttgctggagaccaacaagattcaaggtggtttatatcgaaggatgcgattgtatctggccttggtcttctcgggatcaagcaaggtggaacagaagctgcattgt

SEQ ID NO: 1662 - DNA, 496 bp, Oryza sativa
  Clone ID: uC-osflcyp031e12b1
tcttcttgtcagctactatttcaatgtctggaggctttgtaagagggctgagcgaacagatcggagccattgcacgtggacagtgatgatgatgaggttcctgatgagccttctgtaacagaggatgaggattctgcagttgagtccccagcacatgattattacgtgaacaatcccatgtccccagagtctgaagactccttccatgagaaggtagctgatagtttatctgggctcagagatggaccaagccagaagcctctgggatccaacacagataatcctggaggtgatgccgacgtccaagacgagtcatgcacatcatttgaggaccataatggagcgcatggatctaatggtgttcaatgtgctgagtttcacatgatgctgccaaatgctgctctagaccactacagtgaccgaggtgcgtgcatgtaagcggatgccaggactcatgagcatataaacataggttattagatgttgacatcatgac

SEQ ID NO: 1663 - DNA, 503 bp, Oryza sativa
  Clone ID: uC-osflcyp031f01b1
tggtgccttttggatcacccctctcctccgagcgaccgggtctctgctgaggtctccacgccgccgacaggtagcgcgagctagagagatggccgagacagtgttcactccctcgttggagggtatgaagcatgttaagtcagagagcagtgtcatactcaccaagccctttcttgatgtctgcaagcaaatcttgcctgttttggataaatttggagctgctatggcacttgtgaagagtgacattggtggtaatatcacgaggctggaaaataaatattcttcagacccatcaaaatatgagcaattgtacagcatggttcaggaagaggttcaaaacaagactgcaaaaggttcgtcaagctgcacaaatggacttctgtggctcacgagggctatggacttccttgttgaattattccgtaacctgcttgagcatcaagactggactatgagtcaagcttgtactgattcatataccaaaactctgaagaaatggcatg

SEQ ID NO: 1664 - DNA, 494 bp, Oryza sativa
  Clone ID: uC-osflcyp031f02b1
tggtgttggaagcgatcgatggcggctactggggcgggacgagttgttgcactcggcgcggtggccgtggtggtggcgctgacattcctcgccggcggcgcggacgccgactgctacgacttctgcttcaaggactgcatggccagggagaacaacatggtcgactactgcagctacgcctgcgacaagacgtgccagccggacaagcccacgctgtactcgtcgtcgtcgtcgtcccgcctcgccggcgacatggagtgccaactctcctgcgccttgggctcctgccaccgcctccttccggacggcaagggcgccgtggaggcctgcttcgggcagtgctacgacggctgcaagaccacggcggcggccagactgccgaggcctctccgcgccgggcactacgtgctctctagtccccctgatgacgtagaccatgatccggaccaccgctacgtgttctctagcccccatgatgacgtagaccatgatcc

SEQ ID NO: 1665 - DNA, 492 bp, Oryza sativa
  Clone ID: uC-osflcyp031f05b1
ttgttgtttacttgcagatgcctagtatagggggaatttcttaaggatgtgcggtgtgcatcacatggatataagttattcttaacaccagaattaagtttgtttactgttttctattccaaaacagcaaagaaaatcaagtaagtgtttccaagaaagtggtgaaccaatgattaactagttatctactatgtttttaagtggtaataatatgtcaatgcaccatgcatgagatagttgcttgattccttgcctcatttgcccaaagcatctcatattttcttttgatgtctgtttacctttatgaaactgtatcccttgctagaatgtcataatgtatgaacaaaaatttgtgccaattgacatattttttgtacttgtttattccaaattcccaatgatcaggtgggtttggcagttatttatttgggatgagtgaaacaatagccaagcaagcaacagaggctaaagatgctcaaaatttcaaggatc

SEQ ID NO: 1666 - DNA, 499 bp, Oryza sativa
  Clone ID: uC-osflcyp031f06b1
tattcataaatgtcgtaaagtaccctgctagcagtgacaacactacaggggataccataaccgagtgtgaagatggatccaccaagattgagcccaaagaatatggtggcaatgtcagctgcactgagactggagtggaatgttctgtgttgaatcagagtacagatgttcctgatccttctatttgtgaggtccaggatcccgtagagcttgacacagattctattcccaagggtcgggaccacaaaaatcttgacacacgtggcgagtgtgatgcacctacagcaggagacgagaatactgatcaaggagtggaagctgatcagacagattctacggatgctcaagatgatgctcgtggaactatagagagagggcatgcagatgcagatccggcgttcttggaaacttcttgttccacagcacctggagatggagcggacaaatctggtagggagaacgagcaacaaggtggggctggtgtgagtgaaagcaacac

SEQ ID NO: 1667 - DNA, 339 bp, Oryza sativa
  Clone ID: uC-osflcyp031f09b1
gaacgtcatgggggggcacaaccggctgggggccgtcaccaggctggccgtggaggcgtgggggctcaagaactgcacgcagaatgaggagtggattaactacaccgtcaccggcgttgatatgccgccttgcatcgacagcgcctagatcgtgaagctcgcctggaagaggtacaacttcagcctcggcctttgcctggacaatgttggcgagcaggcgttaaggagcggacacctggggcacttgaacgaggtacaattgatggatgccctgagtggagtggtgatggcgttcatagtgatacggtaatccatttagctggtgtgcggccacatatg

SEQ ID NO: 1668 - DNA, 470 bp, Oryza sativa
  Clone ID: uC-osflcyp031g01b1
ggcttactgaggttaggttccttgggcagctaagacatccaaatttagtcaagttgattgggtattgctgcgaagatgaccacaggctgcttgtgtacgagttcatgtttcgaggaagtctagaaaaccacttattccgaaggacagctactccactatcctgggctactaggatgtcggttgcattaggggctgccaaagggttagcttgcctccacaatgctgaaaggccaattatctacagggatttcaagacatcaaatattctgctggactcagattatactgctaaactctctgactttggtctggcaaaagctggcccagaaggcgatcaaacccatgtatcaacacgggtgatgggaacatatggttatgctgcccctgaatacgtgatgactggtcacttgactgctagaagtgatgtctacagctttggtgttgtccttcttgaactcttgactgggcgt

SEQ ID NO: 1669 - DNA, 490 bp, Oryza sativa
  Clone ID: uC-osflcyp031g02b1
gaatcacacacgccggactctccccttctgggtggctcgctccttcgttcgctcgctttatcccccccgaataaaggcgagaagccgcagcggcggacgaagaagagggcagatagaaatggcggcggagacgttcctcttcacctccgagtccgtgaacgagggtcacccggacaagctgtgcgaccaggtgtcggacgcggtgctcgacgcgtgcctcgcccaggaccccgacagcaaggtggcgtgcgagacgtgcaccaagaccaacatggtgatggtgttcggcgagatcaccaccaaggccaccgtcgactacgagaagatcgtccgcgacacctgccgcggcatcggcttcgtgtccgacgacgtcggcctcgacgccgaccgctgcaaggtgctcgtcaacatcgagcagcagtcgcccgacatcgcgcagggggtgcacgggcacttcaccaagcgccccgaggagatcggcgccggcgac

SEQ ID NO: 1670 - DNA, 456 bp, Oryza sativa
  Clone ID: uC-osflcyp031g03b1
gggtacaattagaagtggttagccatggctgcggaaaaatactgttccttgggctgcatttctccaaggtctgcaacgccacttccgtcaggaaccctgagtgggaaggatctccaaacctggctcagaaatcgggcctcatctcaacactcatcagcacacatttctccacagcagctcaaaagcccgcgcctcgccctgctgatgtgaacatcaactcggcagtgtaccctggtggaccccctgttccagtgcagaccccaaaacttctcaagtttgtggatccaacagagatgatgcgtggaccgcaggatctgccaggttattgggtggtctcaagtgcgaagctgcagctcgagaggggcaagatctcgctgcgggtgaagtactcgctcttgacagcaatgttggctgacgacgattagtttgcgttcgatgaagagttttagaaccatg

SEQ ID NO: 1671 - DNA, 536 bp, Oryza sativa
  unsure (1)..(536): unsure at all n locations
  Clone ID: uC-osflcyp031g05b1
tttatgctatacaacttacattatattatcaacatcgggtggttaacgcgatggtccccggccgaagctcatgcatcagcgttcgttcttgctncgccaccggctcgtgagtgctgcgtggtcgtttcgtgcagggcggcgcacgacgcacgcaagtgccgccacccgccaccaccggctgcgaacacgcagggccccggaggagccatatgagatctcgcgaactacacgaggtgcatcactgcgatattgctcggacgccccaatgccgagcagctcctggtgcccggagatctccgagctacccaacaagcggaaccgccagatgcgtgcgcgccgatctcaggggcaccggactatcaatcggggtaaccgcgagcaataatgtcacaggcagcatcctcaagatctgcaacaaagcttccctggacctcttgactgtgaactgcagcagagcctagatgatcgtgatctggatctagctaataaagcatgcatgcactacgcgcgtactttacccttaaatcgtaaatata

SEQ ID NO: 1672 - DNA, 511 bp, Oryza sativa
  Clone ID: uC-osflcyp031g07b1
tttggcttcttgatttttccaacaacactgtgcagggtccagcacgtgctctaatggctgatttatcaggacgtcatggacctggcacagctaactccatcttctgttcttggatggcaatgggaaacatcctaggatactcctctggttccacaaacaattggcacaagtggtttccattccttaaaacaagagcttgctgtgaagcttgtgcaaatttgaaaggtgcatttctggtggctgagattttcctgtccctgtgcttggttataactctgatatttgccaaggaagttccattcaaaggaaatgcagccctcccaacaaaatcaaacgagccagctgagcctgaaggcactggtccactagcagtgttgaaaggcttcaggaacttacctactgggatgccttctgtgcttattgtgactggccttacctggttgtcttggttgccattcatcctctacgacactgactggatgggccgtgagatctaccacggtgacccaaa

SEQ ID NO: 1673 - DNA, 510 bp, Oryza sativa
  Clone ID: uC-osflcyp031g08b1
gatctacggtattgatgccgtgcatgggcacaataacgtctacaaggctacaatcttcccccataatgtcgggctcggcgctaccagggaccccgacctagtaaagaggataggagaagcaactgctcttgaagttagagctactggaattccctacgtctttgctccttgcgttgcggtttgcagagacccaagatggggacgctgctacgaaagctatagcgaagacccaaaggttgtccagtcattgaccacactcatctctggcttgcaaggcgatgttccatcaaatgatgtaggaagaccatatgttggtggaagtaagaaagttgctgcatgcgcaaagcactatgttggtgatggtggaacggtcaagggaatcaacgagaacaatacaatcatcgatactcacgggctgttgaccattcacatgcctccttattataattctatcattagaggagtctccactgtcatgggttcatactctagctggaatggagtaaaaat

SEQ ID NO: 1674 - DNA, 496 bp, Oryza sativa
  Clone ID: uC-osflcyp031g10b1
gagtcagtggcgcaggaccttcaaagactgcgaatattggttttaatttcactattgctggtggtcctccgccaactagacagaattttcggccaagagtttccttacctgttgtcagtcgacatttgaaagctgacttaagctcccatgggcattttatttcctctggaagtgataaccacatggttcctgttactttgcatgcttcagggctgaccaaacgcaaaagaagcatggatgagtctcatatgttggaaggcaacaatacaatctcaactgatgctgacacaaccaccaatggagcagatcatcaaagagagaattctgtaaatggcacatcaaacttggtagcaaaccctgaacaccaacaagggggttcacattcagatacaagcagggttaccagcacaggagaagtttccaatgaagaatcagaaacaggtcatgctgcaatcaaaagtcacacaagcacagatgaacttggccaacatggatc

SEQ ID NO: 1675 - DNA, 500 bp, Oryza sativa
  Clone ID: uC-osflcyp031g11b1
tagggtagcaagccatatttctccttccacggctcttcatgacattggaacacaagagtatatacagcgcttgctccatgtgctctcgcactatggggttcgacgtggcaactcaaccatcttcttagatcaccatcttggtggagacggttgaagtcacctatcatttctaggctcctggttaccacactttgagctttgggattactgctttctttggcgtgatggcggagcagagaggaaatatgttgatgaaaaagtatgagatggggaaattactcgggcaaggaacctttgccaaggtttaccatgcccgtaacaccgagacttctgagagtgttgctatcaagatgattgataaagagaaggttttgaaaggcgggctcatggatcagatcaaacgtgagatttctgtgatgaagttggtgaggcatccaaacattgtgcagttatatgaggtcatggctaccaagactaagagatattttgtgctggagcac

SEQ ID NO: 1676 - DNA, 494 bp, Oryza sativa
  Clone ID: uC-osflcyp031g12b1
tcgccgttaaccccgttcgttttatttgcggtgacttcgtttcttgggaaggcacttccttcctcttcctaggaaggcttgaggagccaagaggaggaggagagcaatgggggaatctgccggcgaccgcgtcctgagccgcctccacagcgtcagggagcgcatcggcgactccctctccgcccaccccaatgagctcgtcgccgtcttcaccaggctggttaacctcggaaagggaatgcttcaggcccaccagatcattgctgagtacaacaacgcaatctctgaggctgatcgtgagaagctgaaggacggtgcttttgaggatgtcctgaggagtgcacaggaggggattgttatctccccatgggttgcccttgccatccgcccgaggcccggtgtctgggagtatgtgagggtcaatgtgagcgagctcgctgttgagttgctgacagtccccgagtacttgcagttcaaggaacagcttgtggaag

SEQ ID NO: 1677 - DNA, 424 bp, Oryza sativa
  Clone ID: uC-osflcyp031h01b1
tttgcgcccgggtgtcggcgaggaacccgctgctgacgaggaacctggagaggaacggcaggatcacctgcatgacgtaagtagcagtagtaggatcacctgcaagaagaattctgagagcagcaagcgtacgtggcgtgagattctgacggtgcgtacgtggtgttgtgtgttgggcctgcaggtttccgcgggactggcttatgagggacctgaacgtgatcgggttcgggctgatcgggtggatcgcgccgtcgagcgtcccggcgatcaacggcaacagcctcacggggctcttcttcttcagcatcggccaggagctctcccactttccctcgccgccggcgctcgactcgccgttctggtcagtacctctatcttcttcaggcacgcagtatagtactcctatataattagtagcaaa

SEQ ID NO: 1678 - DNA, 438 bp, Oryza sativa
  Clone ID: uC-osflcyp031h02b1
gctttatgcagcagctgagcttgaagcaccggagggaggtatacatggccggcgccaccatggccctatcgtgcccggcgctggccggcaaggccgccgcgaaggtgttcggcgaggggcgcatcaccatgcgcaagtcggcggcgaagcccaagcccgccgcgtccgggagcccgtggtacggcgcctaccgcgtgctctacctcggaccgctctccggcgagccgccgagctacctgaccggcgagttccccggcgactaccggtgggacaccgtggggctctccgccgacccggagacgtttgccaagaaccgggagctggaggtgatccactccaggtgggcgatgctcggcgcgctgggctgcgtgttcccggagcttctcgccccgaacggtgtcaagttcggcgaggcggtgtggttcaaggcggggtcgc

SEQ ID NO: 1679 - DNA, 484 bp, Oryza sativa
  Clone ID: uC-osflcyp031h04b1
gtctaaccctctccagtctccactccactgaatcctcccacctcggctcgaaggaatggcaagcggtagtgaagctgagaagtcacctgaggttgtgctggagtggcctaagaaggacaagaagaggcttctacatgctgtttaccgtgttggagatttggatcgcaccattaaatgttacacagaatgctttggaatgaaattactgaggaaaagagatgtgcctgaagagaaatatacgaatgcatttcttgggtttggacctgaggacaccaactttgcacttgaattgacatacaattatggtgttgataagtacgacattggagcaggatttgggcatttcgctattgcaactgaggacgtgtacaaattggctgagaaaattaaatccagttgttgctgcaagatcactcgtgaacctggtcctgtcaagggaggatccactgtgattgcctttgcacaggatcctgacggttacatg

SEQ ID NO: 1680 - DNA, 505 bp, Oryza sativa
  Clone ID: uC-osflcyp031h05b1
gtttatcgacctgttagtccaaatgtgcaggcgcgagcctactggccttaaaaagtcatggcaccagctgtttagtcgctcagcatctgtgtcaccttgtcctgatgttcctgctgcagcccgtgaaatgaacgggcaaccagaaccatatggagcacaaattagcaatgctcaaatcttcctatcgcagtatccccctctggacagtaaccctagttcaagccgctgtatgcaatttccaggttttccaccagtgaatggagcacctgccaacatgtcactctctcattttccagctggacatgtgccctactattgtgagccagaaccaacagtgtttgaagaaccagaacaatttgaggacccatgctatgatcctgatgcaattgcgttgcttgggccagtttcagagtccctagataactttcctcttgacttggataagcgggttcatctctagtgacatcaccaaggaaacacatacgaagccttcaccaatcgaatc

SEQ ID NO: 1681 - DNA, 453 bp, Oryza sativa
  Clone ID: uC-osflcyp031h07b1
tcgttctcaagcagcttagctcctgcctccttctctgatcattcttgcaaaccaatcgagtcttgaacgaggtcaatgggcaaggaggtggacgtgtccactctcgaggccggcggcgcccgggactacatcgacccgccgccggcgccgctcgtcgacgtcgacgagctgggcaagtggtcgctgtaccgcgcgctgatcgccgagttcgtcgccacgctgctcttcctctacgtcacggtggccacggtgatcgggtacaagcaccagacggacgccgccgtgaacggcgccgacgcggcgtgcggcggcgtgggcgtcctcggcatcgcgtgggcgttcggcggcatgatcttcatcctcgtctactgcaccgccggcgtctccggcgggcacatcaaccggcggtgacgctcggcctcttcctggcgcggaaggtgtccctggtgcgcg

SEQ ID NO: 1682 - DNA, 501 bp, Oryza sativa
  Clone ID: uC-osflcyp031h11b1
tcggcagtttagccatatcgccgccgccgccggggccatgctcgcctacctgctgcacgcccccgccgccgccgccgccgtggtgcccagcccgctctccctccgctcgccgccgaagacgcccttcctcccgacgtcccccatccgcgtgcccacgccgaggcggcgccccgccgcgttctcctccgccgccgccgcggtggtgcccatcgcggcgtcgctgctcgagggccccgtgctggtctgggccgggaggctctgcctctactacgcgctcctccacatcggcctcgccggctccccgcgcaaccccttcctcgcccacgagattggcgatgatggcgccggggacagcgacctagggttctcgaagtgggcggacaagctgcgcggcggcgcgccaggagaaaacgaagcccaggataagaggaagctagttagcaaatggaaaccaacaactaaaggcacgctgaagaggacttaccgagttcgttcagtaga

SEQ ID NO: 1683 - DNA, 503 bp, Oryza sativa
  Clone ID: uC-osflcyp032a01b1
tcttaagatggaggaagaaaatgatgtggcaaagaacaatatggaagagtgagctaacatggctgctatctgattggactagaggctaacaaaggcttcatgttcgctagcttgatccaccacaattcttgatctggaataccaaatattgaagcacgcaacatcacatggaggggttcataacatggctcctgggatggtgtgcgtggaatggagcatgatatgcgaaggttaaagatatttttggagcttcttggccaaactatgctccttttatttccggccaattgtgtggtataccgtatacacatgtactgttatatggtttcacacatttggccgaaacacacgacggctattcagggggcattagcatgtacaaaagagatgagtttcttgttgtggtttcttcccttaactgtttaacatagctatgcgagtgcaagagggcagatgaaacattgatgttgtgatatttttgtatactcgattgctttgtatat

SEQ ID NO: 1684 - DNA, 462 bp, Oryza sativa
  Clone ID: uC-osflcyp032a02b1
tcttcagcttaagcaggtctatcgggataaggtgtttggaaaatatagcgagaagatggctgagtttttacagagctcggttggcatcattcataagaaccatgctgagagtataacttctttcattaaggagagtgttgatgaggagctgaaggatgcagactcatctaaggcttctcagaagaagaggctcaccttttgcgtggaagggaatattagtgttgggaagtctacctttctccaaagaatagctaatgagaccatcgaactgcgtgatcttgtagaaatagtgcctgaacctgttgctaagtggcaggatattggccctgaccacttcaatatattggatgctttctatgctgagccacataggtatgcctatacctttcaaaattatgtgtttgtgacaagggtcatgcacgaaagggaatcttcaggtggaataaaacctctcacactgat

SEQ ID NO: 1685 - DNA, 506 bp, Oryza sativa
  Clone ID: uC-osflcyp032a04b1
tcttgacaacactatcatcctgccaccacaacacacaaatctggcgatgcttccacctgcatctgcatgcccctggctccctgcatacaagaaaaaagagtattcttttcctgtctcggtaatgcacttggctaagaaagttggtgggcagtaagctgctcatgcttcttgatcaccaagttgctcatgctccttgatcagaacataaatggttaattaaagatgcacatgagaaaggctcgattatgcctggtgttatggtgctgaattgctgataaaaaaaaccggtggtaatgttgtaccgttttggtattggttgatatttcacaaaggttgcaggcctcttgctattgacagatgagtgagcaaacatggatggtgatggtattctgacatctcaatgtgaaccagtcaaccagtacagagttgatcgctaatccatgtcatggactctaaaagcaaatggtaagcttggtgtgatgcttgctttggtagatggagctgag

SEQ ID NO: 1686 - DNA, 496 bp, Oryza sativa
  unsure (1)..(496): unsure at all n locations
  Clone ID: uC-osflcyp032a06b1
tctttcgttctggccatggcccgatcaccagcacttccactgatcgatcgatccatggatccaaccaaccaaccaaacaaccattggcaacaacaaactatcttgcagtgatgaagcgatcgacagtatgtacggggtgatgaattaacgatgatcacacaccaacgcaagcgcatgcacgtgtgtggaagattcagacgcatgcatttggattaattcttggagagatcgagcaagcttaattgggaagaacaatgagaaggttgtgtatgatgatgatgctagctacgagtattgaggtgatgaatgcattgaatttttctcttgggtttgaagaggatatcgaatcgaaggaacttgtagatgaataagcgagtgagatggaacgacgtacgtagggttagattttggagttcagtagtagtatattctggcactttttaattattttttttatttattgggntcttatttttttcccttttttcttacatac

SEQ ID NO: 1687 - DNA, 509 bp, Oryza sativa
  Clone ID: uC-osflcyp032a07b1
aaataaaatcacaagagaggaggagaaaaaaaaatcgcagcagcaaaccctcctcctccgccatccgccgccttccctcctcccccacgatctccggcggcggcggcggcgatggcccggaagaggaagacggacgcggcgccgcggctggacgaggccgaccggacgctctactccaccttctgcggcgccgccaactccctctcccagctctacacccaggccatggcccagcagaagctctccttccaggccggcgagcgccactccctcgaaaaactccaccagtggatattgagaaagcatgaggaagagtcgaggctcacggcggctgatataatgtctcatatccagcatgagttggatatggaggtaatgatccacatgtttccccagagtacatcagcatagtgcaaatccgtttgcaaactcaagcatccaaccctcagctggttcctatggtcaagcaacagtagggattgcgcctagacccagcatcagtgatcagt

SEQ ID NO: 1688 - DNA, 425 bp, Oryza sativa
  Clone ID: uC-osflcyp032a09b1
ttaatccccacctccccctccccaccaaagccgcgttcgcatccgccgccgcagccgcagccgccgccgccgacgccgacgaggagaggaggagagggaaggcgagagggaggtaggtaggtaggcagtcagccatgtcgccggcggagccgacgagggaggagagcgtgtacaaggcgaagctggcggagcaggcggagcggtacgaggagatggtggagtacatggagcgcgtggcgcgcgcggcggggggcgcctccggcggggaggagctcacggtggaggagcggaacctgctgtccgtggcgtacaagaacgtcatcggcgcccgccgcgcgtcgtggcggatcatctcgtcgatcgagcagaaggaggagggccgggggaacgacgcccacgccggcaccattcggttctacaggggc

SEQ ID NO: 1689 - DNA, 481 bp, Oryza sativa
  unsure (1)..(481): unsure at all n locations
  Clone ID: uC-osflcyp032b01b1
tctacggccgctgggagcagccgatccggccccgatccgatgggtggcgaggtgccggagccgcggcggctcaaccgggcgctcagcttcgacgactgggtccccgacgaggcgctgcacctcgtgatgggccacgtcgaggacccgcgggacagggaggcggcgtcgcgggtgtgccgccgctggcaccgcatcgacgcgctcacgcgcaagcacgtcaccgtcgccttctgctacgccgcgcgccccgcgcgcctccgggagcggttcccgcggctcgagtcgctctcgctcaagggcaagccccgcgccgccatgtacgggctcatccccgacgactggggcgcctacgccgcgccatggatcgacgagctcgccgcgccgctcgagtgcctcaaggcgctccacctncgtcgcatgacccgcaccgacgccgacatcgccgcccttgtccgcgcccgcggacacatgctgcaggagc

SEQ ID NO: 1690 - DNA, 510 bp, Oryza sativa
  Clone ID: uC-osflcyp032b03b1
tcgtccagaaacagttgcaaggacattggttccgaggatgcgagttgtgaaaggaagtggaaaggcgataaactacttgacaccaccaaggatcttgcttgccttggttactgcatgggttcgccgaggccgatggtttgatgaagagggaagagcagtatatgcagcagaggctgatagaatccgtaattgggctgaaagtcgagcacgcttctctttcacagatgccatggagatgtacacagaaaacacatgggtttctgtgttctcgctctctgtcgtctgcgcattcataattctttccagctcaggtggacctcttccaggcacatgatcccaggagttgccaaactagatggctacacacaccatttttcttcagtacggggattctattatgtactgatatatgacacacgaaacttatgaaggggggaaattgaacccagaaagcttactgcgtacatacgcccaacggtgagaagcatcagctgccactcaccatttaag

SEQ ID NO: 1691 - DNA, 478 bp, Oryza sativa
  Clone ID: uC-osflcyp032b04b1
tcgtacacctgcacctccgccctccgccggaattccgctcctgcacctccgccatcagtgctccgctccgtatcagccgccgcgccgtcctctgcatcgcatgtctgccaccgatccccgccgccggctcgccctccacgatcctccgcctccccgctgcacgaggtcctcccgtcgccaggtcgtcgctgccgttctgctccaccgatccccgccgcacgaggtgctcccgtcgctaggtagccaccgcgccgtcctctgcatcgcctgtctccaccaatcccctctgcatcgcaggggtgagctgcagctatggagttcctcgccggtgggggagcagcaggtgaatcccgtgagagagtacaatgaacgcggggtgctcggcgaaatgtcccgtccggctcctcacctgcaatgcatgtgttctggagagtggttatggattctggatcttagaccccctcaacgacttggatca

SEQ ID NO: 1692 - DNA, 261 bp, Oryza sativa
  Clone ID: uC-osflcyp032b05b1
cacggtaccggcccggactgactggctggacccacccacgcgtgcttttgccccatttttacctcactaccggggcgcttgaaaaacccaaccgtgttgtgacccttcgccgccggcaagcgccaaggagggtgcccgccagggaggggagaggagaggagacggcggcttggcgtcgggaagggagggatggcgatggcgccctcaccgccggtgtggaccttacataaagccgcgtagagcctcttttgctcggagacg

SEQ ID NO: 1693 - DNA, 489 bp, Oryza sativa
  unsure (1)..(489): unsure at all n locations
  Clone ID: uC-osflcyp032b07b1
tgatgccacagaggttgattttgatacggcaaacactggcatcaactttgatgcctatgaggacattcctgtggaaacaagtggccatgatgtgccaccgccagtcaatactttcgcagagattgatttgggtgatgcgctgaatgagaacatacggaggtgcaaatatgtgaaacctacgccagtgcagcggtatgccattccaatctccattgcagggcgggatctcatggcttgtgctcagacagggtctggaaagacagccgccttttgtttccctatcattagtgggattatgagctctaggccaccacagaggccaaggggatcgaggactgcataccctcttgcattgattntatcccccactcgcgaattatcagtccaaattcatgaagaagcaaggaaattcgcataccagactggtgttagggtggtggntgcgtatggtggagcaccaatacatcaacagttgagggaattggaaag

SEQ ID NO: 1694 - DNA, 497 bp, Oryza sativa
  Clone ID: uC-osflcyp032b08b1
ttctccggcaggagcggcaggctgctgctgaggcaggccgagtcgtcgtccgcgcgggcgtcgttcgccgtgcgcgccgcggcgcccgacaggccaatctggttccccggcagcaccccgccgccgtggctcgacggcagcctccccggcgacttcggcttcgaccccctgggtctcggatcggacccggagagtttgcggtggaacgtgcaggcggagctggtgcactgccggtgggcgatgctgggcgcggcgggcatcttcatcccggagttcctgaccaagatcggcatcctcaacacgccgtcgtggtacaccgccggcgagcagcaatacttcaccgacaccaccaccctcttcatcatcgagctcatcctcatcggctgggccgagggccgccggtgggctgacatcatcaagcccggctgcgtcaacaccgaccccatcttccccaacaacaagctcaccggcaccgacgtcgggtaccctggtggtct

SEQ ID NO: 1695 - DNA, 482 bp, Oryza sativa
  Clone ID: uC-osflcyp032b09b1
ttctacttcgattcgcttcgttacgttctcgctgttgatttgttcgtgagattggaattctagcaatggctcctctcggtgacggagcggcggccgcggcggcggcggagcccaacctggtggcgtcgctcggggagatgctgatcgacttcgtccccgacgtcgccggcgtctcgctggccgagtccggcggcttcgtcaaggctcccggcggcgcccccgccaacgtcgcctgcgccatctccaagctcggtggctcctccgccttcgtcggcaagtttggcgatgatgaggtcgggcacatgctggtggacatcctgaagaagaacggggtgaacgcggaggggagcctgttcgacgagcacgcgcgcacggagctggcgatcgtgaccttgaaaagcaactgcgagcgcgagttcatgttctaccggaacccgagcgccgacatgctcctgacggaggcggagctcaacctggacctg

SEQ ID NO: 1696 - DNA, 492 bp, Oryza sativa
  Clone ID: uC-osflcyp032b10b1
tgcgattcccccatttttacctcactacctccgcccccgaaaatcccaacaattttttgatccttcgccgccggcaagcgccgcggagggttccccccagggagtggagaggagaggagcgggcgggttggtgttgggaaggggagggatggggttggaggaggacacgccggtgacgaagacggtgaaggccgcggcgacggggctggccgcggggaccatctggggcacggtcgtcgcgacatggcacgacgtgccccgggtcgagcgccacgtcgcgctcccggggctcatccggacgctcaagatgtgcggcagctacggggccacgttcgccgccgtcgggggcctctacatcggcgtcgagcagctcgtgctgagccagcgcaagaagaacgactacgtcaacggggccgtctgcgccttcgtcgccggcgccaccatattcggctacaaaggaaggagcatcccttctgcgctcatagctggttc

SEQ ID NO: 1697 - DNA, 401 bp, Oryza sativa
  Clone ID: uC-osflcyp032b11b1
ttaagttcccataggcagcaacgcccatcctaagaaggagcaaagcaaatgttacaagttcccttttttgtggcttgagaaacagcaggccagcagcaacattttggtgattttcaccgcagattagtagcaatcataggctcaagtaagatttttggtgacctttactgctgattagcaccattcatagactcaagtaagttcttttttggtggtttacttgagcatcggtatttttgagaagcagcaacaataggcatagatcagatcactatcatgtgtagttctgagattgtcactccaactttcttgtcggctctatcatgagccatgaagtattttcttcctaacaaatatgttctctaaatacaagtattcaacttagttctatttaactcttg

SEQ ID NO: 1698 - DNA, 489 bp, Oryza sativa
  unsure (1)..(489): unsure at all n locations
  Clone ID: uC-osflcyp032b12b1
tctagctagctaagctagcacgcacccatggcgtcgtcttccacctcgagctcgctcgccgtggcagcgatggtggccgtcgtcctcctcctcctgggtgccaccgccacgtccacccaggcggcgcgcctcctcgacgaagaactccccaccgccgccatcccggcgatccccggcgtccccggagtgccggcggtcggccccgggatcccggtgatccccggcgtgcccggagtgccggtggttggccccgggatcccgttcgtgccggtgatccccggcgtgccggtgatcgtgccgatcatccccggcgtgccgatgatcgccggcatgacaaccctgccagtgccgccatttgtgccgccgattgatcccggcgccggcgccgggattcccggcgtgccgccggcgtcgtcgaccaccgtgcaggaagacccacaggcgncgatgccgtncgtcgttcacccgtgccataagtgtaatcaactc

SEQ ID NO: 1699 - DNA, 453 bp, Oryza sativa
  Clone ID: uC-osflcyp032c01b1
tcttttggagtttatcattggggtaagtttcaataggttagtgtgctttgcgaattcacaggccctatattgtggtatgaactaagtacgcgatgatttctggcacgcattgggggcttaccataagataatgccgtgaattcgtaaagcgttcaaacccaccgaagtgttgtgtaaaggtaaatatttgtaagtgtttgtgcttgcgcgccagtcccatgcctgcaatctgagcttgcgcgttactcccgcattgccgacgctcaaaggctgtgatgggagggcggccactagcagtagccgatagaggatgaagtgcgtagagcaggggactctccggtgatagatgacccatactcagattatgaatcacctattgaggagcaaagggattacgagcggatggcctggaccaagctttgactagagatggaagaacaagagagggagcac

SEQ ID NO: 1700 - DNA, 505 bp, Oryza sativa
  Clone ID: uC-osflcyp032c02b1
tcttcaaaatgagtggtgataggagaactagctaactaggatcatcttcttcattatacagttccaaagatgatcaccacctacatggcgatctagagtctagacacaccatttcatgtacaaacaaagctgggatccatggctgaactagtagggtacgcctccagcgcgaggggactgatcaagatgatcatggccgccgtgcagacggcgaagcggaacaagaagcagtgccgggagctggaggagcgcgtcaggatggtctccgccgtgctgagccgccaccgctgccatgagctgcagccgagcacgacggagacgacgatggcggcgcggctgccgccgggcgcgagggaggcggtggacgggctggacggcgtgctccgggaggcgcacgagcttgccgtcgcgttcagccagagcggcggcggcggcaagaagacgatgcggcggcgcctcgtctgctgggcgcgggcggtggtcggcgcccggcgggacgccgaga

SEQ ID NO: 1701 - DNA, 392 bp, Oryza sativa
  Clone ID: uC-osflcyp032c03b1
cgtcttgtcgaaagtgaggcacacgtgcacggcgggggtgtttgccgaggctgcgacggtgccgcccctacaccttatttaccgaaacctaatagactactggcgagtccacctaccacgtgtacaccaggcgagtgaacggatgggcccggcctattcttcagatgacatcgatgctcccgagagctacctacaaagagcatcagacttcaactctatgacataaatctatctagtatggaagaatatacgaaatgtctacactctggttgatatgattaggacgaactgtggtctttggagatacattgagtggccgctgattgaaaccgcaatggaagatgacgactgggttgttatcaggtgatcctatagaacggtgttttatacgg

SEQ ID NO: 1702 - DNA, 487 bp, Oryza sativa
  Clone ID: uC-osflcyp032c04b1
tcttgcttcattgggtcgtgggtggtgaaggagctcctgatccgtggctatgccgtgagaggaactgcaagagatccatctagtcaaaagaactcccatttgcaaaaacttgaaggagccaaagagaggctcagtctgaactatgcagatgtgatggactttgatagtctttctgttgcatttaatggatgtgaaggtgtattccatgttgcctcacctgtatccgttgatccgcgacttgtgcccgatgctgttgaaggaactaagaacgtgatcaacgctgcagcagacatgggcgtacgacgcgtggtgttcacatcaaccttcggtgctgtacacatggacccaaataggagccatgatacagtcgtggatgagagctgctggagtaaccttgagttctgcaaacaaaaagactggtactgttatgccaaaacggttgctgagatggtagcagcagagcaggcatcgaaaagagggattcagc

SEQ ID NO: 1703 - DNA, 400 bp, Oryza sativa
  Clone ID: uC-osflcyp032c07b1
cgctgcatacatctatccatccacggagagtgtagcgccacacgccagtttactactcaatgctaatctgatcattgccggatgagaggatttgctgtacgactgggttgcatcgcattagttcgatacgtcgcatgtaaagaccataactagctctgatttgacggacaggacacgaatgctgaggatgatgattgggtgcagcacgccgatgttctgaggtcccctcttggtgcatgggtagcggtcagcccaccaccgtctgcgaagacaggtgcgaccaaactagcatggcgtttattgggcgtcgcggagtcaggcgggcgcctgcaaagtcgaagcctacgccaacttggctagtgccaagccaaaaaattcctgctccgtccaagatcctttg

SEQ ID NO: 1704 - DNA, 470 bp, Oryza sativa
  unsure (1)..(470): unsure at all n locations
  Clone ID: uC-osflcyp032c08b1
ttcgtcgccaagcgaagcgagacagtctcgtgcgcctccggctttcctctccgacggcgacgcgccgacgtacgacgccgtggacgagcagcagcgctgtggatcgacgagcggcgatggcgaaggcgcggaagcagcagccgcagggcccgttcgccggcggggccgccgctggggagaggtcgttcctcgggttccagtaccaccaccaccaccgcggcggctccgtggcgccggcctacggcgacgacgacgacctccccgatttggcggaggctgatgtctggtacgcgcccgcgtcggaggggggcgcggatcatcgaggcgggcgcngccgccgaggggagggaagggcttgnaaatcggcggcggcggctgcggcggagggaagcacaaggtgggcgggctgagccggccgttcgcggacgggcggcaggtggcggcgtcggcgcccgtgcaggtgcccgcgt

SEQ ID NO: 1705 - DNA, 474 bp, Oryza sativa
  unsure (1)..(474): unsure at all n locations
  Clone ID: uC-osflcyp032c09b1
tgttcctgaaattgagtcatggctgccaagctagctcgcctccacagtctccgcgaacgcctcggtgccaccttctcgtctcatcccaatgagttgattgcactcttctctaggtatgttaaccagggaaagggaatgctccagcgtcaccagctgcttgcggagttcgatgccttgatcgaagctgacaaagagaaatatgctccctttgaagacattctccgggctgctcaggaagccattgtgctgccgccctgggttgcactggccatcaggccaaggcctggtgtctgggactacattcgggtgaatgtaagtgagttggcagtggaagagctgagtgtttctgagtacttggcattcaaggaacagcttgttgatggacacaccaacagcaactttgttcttgagcttgattttgagcccttcaatgcctncttcccgcgcccgtccatgtccaagtccatcggaaat

SEQ ID NO: 1706 - DNA, 450 bp, Oryza sativa
  Clone ID: uC-osflcyp032c10b1
tgaggaggaggcggtggccaacgaggcgcatcacttcctcgtcgtcacgtaccccgcccagggccacatcaacccggcgcgccacctcgcgcggcgcctcgcgcgcgccgcgccgggcgcccgcgtcaccatctccaccgccgtctccgcctgccgcaagatgttcggcgacgccgcggcggcgggcgccggcggggagctcgtcgacgaggggggtgtgcggtacgcgccgtactccgacggctacgacgacggcttcgacagggcggtgcacgacagcgccagctacatgacccaggtcagggtcgtcggcgcgcgcacgctcgccgccgtcatcgaggggtaccgcgccgccgggaggcccgtcacccgcgtcgtctacacgctgctgctcacctgggtcgccgacgtcagccgcgaccatggcgttcccgtcgcgcctgactggat

SEQ ID NO: 1707 - DNA, 496 bp, Oryza sativa
  Clone ID: uC-osflcyp032c11b1
tttactgacctatgttgagaagaattgtgccccagcagtttacactccagaactaaaatatgtgtgcattgctggaaggtacattcaaggtgctcctttaactgggcacaccatcgctactacagatgatattctcgctgtggatactccatcagatatagctgaagcagtcatggtcagtaccaacgacaaatctactcaatcaggcccaaccttgagagcccgcttcattggacaaggctacaagcaggtctgtggccgtgctgatgtgtggggagacggcgtcgttcccgaggtgtcggcgcatctagaaggcgcactgaacataagcttcgacggcgtgtaccactctcctgtaggttctgacgatgagcagaggccgtggtatggttcaccggcaatcctcaagcagtgggtacatcatctcctcagttgaacggttgatggctttgatgcagagaagctgacgatctgaaagtttgtagacagaaatgta

SEQ ID NO: 1708 - DNA, 485 bp, Oryza sativa
  unsure (1)..(485): unsure at all n locations
  Clone ID: uC-osflcyp032c12b1
tctcctctccagctcacacccaccccccacgcaaatctagaaccttctggatccgccgcttcctcgatccgatcgcctcccccgccgcccgcccgatcggatccccaagggtttccggtttgccgcccccgcgatttagatggtttacgatggcgccgtgaaggaccaggagagctcggctaacccggcgtcggcatcggctgctctgtcggaggcatcggcggcggcttcggaggtaacagcggctgccgcggcgggggcgggggctggggcggacgaggagggggcggctgtgagtgggcgaccgccgaggcctccccacgacaagcggctcggcgtgcggcatcccttgaagcaccgcaggttccgcgccggggggaaggtgatgnttggagcccggtgatccgccgttcgacaagaagtggcggatgaggaggccagcgaggtggaacatgaggcggcgcccgtggagagggaaccaccac

SEQ ID NO: 1709 - DNA, 381 bp, Oryza sativa
  Clone ID: uC-osflcyp032d01b1
tatgacgcgtgggtcgccatctctctgaggtcttacagttaactgcatcagtggccgcggccaccatggcgctctcctccccggtgatggccacagcggtgccgcctacctcctcccagctcttgggagaggcgcggatcaccatgcgcaagaccgccgtgaagcccaagccggcggcgacgacggggagcccgtggtacggcgccgaccgcgtactctacctcggcccgctctccggcgagccgccgagctacctcaccggcgagttcccgggcgactacgggtgggacaccgcggggctctccgccgacccggagacgttcgccaagaaccgggagctggaggtgatccactcccggagggcgatgctgggcgcgctcg

SEQ ID NO: 1710 - DNA, 489 bp, Oryza sativa
  Clone ID: uC-osflcyp032d02b1
ttgaatcttgcaataggacggtttcagaatgcattggcatacatcgacaaggataatggtgctcatggatccaaggcggggttccctatatctggattttacagtgatatgaggaaaatgcagaacatgaatggtttagaggggcagttattgttgggacctatcactaatgatttacaaccaatggaaaaatgcaattctgttcaatctcctaaagtggcaaattttactgcccttcacaatgtagataatgagagcatgaaccatgtttcaacagcaactggagcaaccacatcagtcacaacagtggacactttaccttcaaccatcagaccattgagcagctactccctcttggatggatctcttgatgatggattaccatcacctgcaagtaatgtatcattcaggcctcagataaccaacaattcttcagtaagcaatggtacaatgactgacatctcaaatgggtgtctcacgagcatcaat

SEQ ID NO: 1711 - DNA, 453 bp, Oryza sativa
  unsure (1)..(453): unsure at all n locations
  Clone ID: uC-osflcyp032d03b1
ttacctcgcacttataaatgaggtcgcgatcacaccagccaaaacggtagatcaattcgtcgaacatctcgcgcgcgctccagtgacggcgagagcgaagcacgccggagttgggagagagagaaggcgaagtgtgatgggggaggcagcggccgtgtccggcgacgctggcgcgcgcgcgcgcgtgcgcgtgctcgccgtgtcccgcgtcgcgccgtcgccggcgccggtggagcgggagcgcgtcgggctgtccttcttcgacacgccgtgggtcgtgctcccgccgatccagcgcgtgttcctgtacgagacggcggcggcggcggacggcggcggtgggatgggtnncgcggcggcggncgagaggctcaagggctcgctcgccgccacgctggcgttgtacctgcccctggcagggaagctggtctacgtggaggagaccgaggaccg

SEQ ID NO: 1712 - DNA, 507 bp, Oryza sativa
  Clone ID: uC-osflcyp032d04b1
ttcgaaacgacggatttcaccaacacatccatgtgctcaagcccttcttgctcttcccgttcattgtccagctcgattgatctccatggaaatggtcatgttattgaaaagtcgatatctagggttggctccttcaatctcaggcagatcaaaggcttatcaggtagcatgccattgccacctgaggaactaaggtgcccgatctccttgcaactcatgcatgaccctgttattatcgcatctggtcagacatatgagcgggcttgcattgagaaatggtttagcagcggcaacacaacctgcccaaagactcggaatgaattatcccagctctccatgacgcccaactattgcatcaagggtttgatagcttcatggtgcgagcagaacggggttctagttccatcggcgccgcctgattctcccaagctcaagtacctgaggatatcatccttgaatagtagcaaatgtcttgtgaccaattggcgtagcacggtcttgtttgaa

SEQ ID NO: 1713 - DNA, 482 bp, Oryza sativa
  Clone ID: uC-osflcyp032d05b1
ttgtggacaagggcaccgtggacatcgccgggaccaacggcgagaccaccacccagggcctcgactccctgggcgcgcgctgcgccaagtactacgaggccggcgcccgcttcgccaagtggcgggccgtgctcaagatcggcgccgccggcgagccgtccgagctcgccgtcaagcagaacgccgagggcctcgcccggtacgcgctcatctgccaggagaacggcctcgtccccatcgtcgagcccgagatcctcaccgacggcgcccacgacatcaagacctgcgccgccgtcaccgagcgcgtcctcgccgccgtctacaagtctctcaacgaccacaaggtcctcctcgagggcaccctcctcaagcccaacatggtcacccctggctccgacagcccaaaggttggcgcggaggtgataggggagtacacggtggcggcgctgcggcgcacggtgccaccagcggagcccgggata

SEQ ID NO: 1714 - DNA, 459 bp, Oryza sativa
  Clone ID: uC-osflcyp032d06b1
ttggacgcgtgggcacctttctgcagttctgattccattcttgcaagttctaggtatacacaatcttctctttgttcctgtttttttttcttgcacaagtctagttgagttgttgataacttggtatggagaagggaatcaaaggctggttgtaattttaggtcagggttagatttgtttgatctgataactacagaaagcagggagtaatggcgtccaactacgtggacactgctggggaggaaggcaggttccacggtcacggtcaccacagcagcggcacgacgccgaccggcgcggaggcgtcgccgaagatgcggaggagctggtacgtccgccgcctcggggtcgtccggcggcggcggacacgggtccggccccaagtgcgtatgcgcgccggcgacgcacgccggatccttcaagtgccggctccaccgaagcagctcgcacggccacccg

SEQ ID NO: 1715 - DNA, 388 bp, Oryza sativa
  Clone ID: uC-osflcyp032d08b1
ttcccttgtatactagagggcagtaggagtttggatccaagatgaggggcagaagcgatggggggcagagcaagaggcccatcttgctgctctgcgggatggacgggtgcctgtgcctcctcttcttgaatttctctggctccaatgggcaggctgggagtgccgcattagagtacgggaccaagttctcgcgctcactcgggtggggaagtgatggggacggagacgaccggtcgtaggagtccatatttggcaccggagatgcaaatgatgatgagctcatgagctttcctgagtgtgatgaccggcattctgtgctgatcccatccttggataggagcttgatatatcacatgaggatgaaactggatttaaacctgaccgaaca

SEQ ID NO: 1716 - DNA, 469 bp, Oryza sativa
  Clone ID: uC-osflcyp032d09b1
ttatattctcagcttatagtcaggtgaggtctgagctgaggttgagagatggcacaggcaatggcgtccatgaccgggctgtcgcagggcgtgcagctgccggccgggcccaggcgcgccggcggcaggtccaggctcgccgtcgtcagggccgacgccgccgccgccgacgtccagaccggccgccgcgccgtgctcggcctcgtcgccaccgggatcgccggcggcgccctcgcgcaggcggcgctcgccgaggccgccaagcccatcaagctagggcccccgccaccgtcctccggtggactccctgggacgctgaactcggaccaggcgagggacacggacctgccgctgagggagaggttctacctgcagacggtgccgccggcggaggccgaggcgagggcgaaggacacggcccaggacatgatgaacctaaagccgatcatcgagaagaagcagtggccgt

SEQ ID NO: 1717 - DNA, 391 bp, Oryza sativa
  Clone ID: uC-osflcyp032d10b1
tttttcaccgactctccgtggtccgatccctcggggccgacgccgccgtgagggtgttggcgcgcgcggaggacgtcggcgatggaggtggaacggatcacggcggagatgggcggggacattgacgtgagcctggactgcgccgggttcagcaagacagtgtcgacggcgctggaggcaacgcgcggctgtggaaaggtgtgcctcttcgtgatggggcacaacaagatgacggtgccgctgacgtcaggggctatcagggaggcgtacgtagtggggatattgcggaacagggacacgttgacgctgtgcatcgagtttcttctgagcttcaagatcgacctgaatcctttaatgatccaccggttcctgatctaacaggaggactttg

SEQ ID NO: 1718 - DNA, 411 bp, Oryza sativa
  Clone ID: uC-osflcyp032d12b1
tgagcagcgtgatgatcagccctgtggtgcaaggaaagatgcagcagggcgtcatgaacggcatgcagaactctaacatcggcaacagcacgagtgtccctgtgtctggctccagcttcaatggcactgccttcctcagtggcaactatgctaatgcacctgcaccggctcggcaggttccaagtttttctattactggcataggagggaacgcaaccttctaagcagctagcctcagatggcaaaaggaccagcatgcataattaagcttgaacgaacgaatgaattatgtgtgctgcaaccaaataaaaaaccgcttaatagcgtgtttgtaatataatcctatatatgtatgattaaataaaatcatgggcctagctgggactaagctaaaaaggcattttaattgat

SEQ ID NO: 1719 - DNA, 258 bp, Oryza sativa
  Clone ID: uC-osflcyp032e02b1
tctactagttctagatgggatgggccgaagaagtcgctgatagcaacgtaccgtttgcatatagctattacgcttttgtcgatggcgaatcgtgggtcgtgcccaggcccgcggaccatatcgagattcacatgtgatgatccatatgcgtgaggaataccaccatattgccacacgatatatctcgcacttcgatggtctcataagtacttatctgtaatgataatgtatttatagcagaggatgtgaacccgatcc

SEQ ID NO: 1720 - DNA, 511 bp, Oryza sativa
  Clone ID: uC-osflcyp032e03b1
tttaaaccaactttcaagcacataccaaagaatggaatgctgacatttgagacggctcagttgagggaattcttaagaaactctctgaattcaatgcaacactttcatctaatttggaacagaaggaactatctttgtctgagatcgagttgtccagattagctgccatagcaaaagtattgaaagaaacatcattttatcatacaagtaagcttgcagatgctgacatgaccttgctgctgaaaatgttgaagtcttggcctacacaaatgatgtttccagttattgattttctgaggatgtttgtgttgcatcctgatggagccactctacttctcaaggctattgaaagtggaaatgatgtacttgccgagactttccataaggttgtaacgccacctgtgcagccaccaaatgtgcttacaacccttaaagcagttactaacttatttgacaggccatgcttgcaccaatggttgagaatccatggcatggagattattgattcagt

SEQ ID NO: 1721 - DNA, 405 bp, Oryza sativa
  Clone ID: uC-osflcyp032e05b1
tctataggctaccatgtacaggctcactgatggggtgcatgaaaggtaccatggatgagtcaacgctgatacacagctatttgctttcagcgatattatgtgctcttcacggactatctattgataactacaccatatcctactttcctgggggatgcagagcatcgaaacttatgtgctcgagggtattgtcataactaacactctgttttggacgaatacctgagtaggatgacaactacttgatcatatattcttgattctttttgcagtatttgtgactgtcgcactgaccaactatagagagactgtgacaccaatgctactaatgcttgctgttgattagacttaaaacaatacagctagaaaaggtatggagccctcatggatctataggtcatatat

SEQ ID NO: 1722 - DNA, 480 bp, Oryza sativa
  Clone ID: uC-osflcyp032e06b1
ttctccggcggcgaggatctggctttgatggttgcttgacaaggatgaaatggcctcccgttcaaagttatctggtattcagaggcaggtattggcattgtacagaggattcctgcggacagcaaggctcaagtctccagaggagcgccacagaattgagtctgttgtctcagcagagttccgtgagaatgcaagaaacattgatcggaagaactttgtgtacattgaatacttgctgagaagagggaagaaacagcttgagcagctcaaggaccctgatattactggactatcaacccttgaaattaataagcaactttctggagttcgttcatttggctatgtgaattctagatggatttccttggcacctaattttattatgaatcagacatatgattcatgtatggaaaatttttgatgacatcaagagtaatagagccagagttcgctgtgtgggcgtgcatgtgcctgagaatg

SEQ ID NO: 1723 - DNA, 306 bp, Oryza sativa
  unsure (1)..(306): unsure at all n locations
  Clone ID: uC-osflcyp032e07b1
ttgtcatcccgcctccgcatcacccgccgccgccgccgcctcctgctcgtggtcgcggctgcgttgccggtgctgcaggaggtgcttcgggggggagatctcggtggggtttgctgcttgctgcttgaggtggtggcagttgaggaggaggaggaggttgctgtggttggcgaggtgggagtggcacttgnctcaccttgaaacagaggactgaatttactaccgacgtgaccgcaggtactagagggaccaccgatgttgatggcgatgatgatatccagccaccgaccacggaatacgatcatc

SEQ ID NO: 1724 - DNA, 350 bp, Oryza sativa
  Clone ID: uC-osflcyp032e08b1
tctactaaccaactttcaagcacataccaaggggtggttttataacatttgagactgctcacatgagggaattcttaagaaactctctgaattcaatgcaacactttcatctaatttggaacagagggaactatctttggctgagatcgagttgtccagattagctgccatagcaaaagtattgaaagaaacatcattgtatcatacaagctagcttgcagatgctggcatgaccttgctggtgaaaatgccgaagtcttggcctacacaaatgatggttccagttattgattttctgaggatgcttgcgttgcattctgatggaaccactttactttctaaggctattg

SEQ ID NO: 1725 - DNA, 396 bp, Oryza sativa
  Clone ID: uC-osflcyp032e09b1
ctactatcagatgggcacgatacatatacagtcttaccaaccgctggtgtacacaaagcagcaccagagtactgctcactcctgccatatactagtaatggttgtcaacaggtaccagttcatgtctttggatttggtgctgaccatgattcagactcgctgcattcaatctcacaaacctccgggggcaccttttcattcatagagacagaggctgccatccaagatgcatttgcccagagtattggtggactcttgagtgttgatgcacaggatttgcatgtgaaggtggagagcctccaccctgatgtacactttggctcgatcagatcaggaagctattgtagcagacttgcagatgacaagaggaatggctccatagatgttggcgacatg

SEQ ID NO: 1726 - DNA, 494 bp, Oryza sativa
  Clone ID: uC-osflcyp032e10b1
tttttattctagcatgcttctccttggctcgctggggtttgcctgttggttggaacatgtgcttcttcggcggttgtgatgctcccgatctttgttctctcttgttgatgtttcatccatctgtagatccccatctctttcatttctcttttgttcagtcccctgatcgcccttcaccctgtccgcttgggtgtccctgactgcaatgtttagcggcccttcctcctttggggcttccttcccccgaaggacgttgaactggatagcaatttgttaaagcccgattgaagacggcttgatgcgggtggcctatggcctcaacctttagtggccctccctcttttggggcttccttcccccaatagacgttgggggacattgattcaagcagcaacatgactaagtcgtatttctgacggcttgatacgggtggtcttcgatatccacagtctttcgactgccagagaactgagccggcctgcgcgtggcaatga

SEQ ID NO: 1727 - DNA, 484 bp, Oryza sativa
  Clone ID: uC-osflcyp032e12b1
tgtttggtgtggcctacactgaagaagaaacaaaggctatggctgctgagattgaggtggttgatggtcctaatgatgagggtgaaatgttcacacgtcctggtaagttaagtgaccggttcccacaaccatatccaaatgagcaagcagcccgttttgcaaatggtggggcatacccaccagatctcagtcttatcacgaaggcaaggcacaatggccagaactatgtgtttgctcttcttactggttaccgtgatccacctgccggtgttcagatccgtgagggtttgcattacaatccctacttccctggtggtgccatagctatgcccaagatgcttatagatggagctgttgaatatgaagatggtactcctgccactgaagcccagatgggcaaggatgtcgtttcgttcttgtcatgggcagctgaacctgagatggaagagaggaaactgatgggagtgaaatggatcttcctact

SEQ ID NO: 1728 - DNA, 509 bp, Oryza sativa
  Clone ID: uC-osflcyp032f02b1
ttcgaatggggttgatacagcagcaaagagcagcaggtatttacccccagactagcatggtcggaatgcctgggagcagttctccgattcttcctggttctgccaatttgtccatgatgaatcagctaaacagaagcaacattaaccctttgcagcgggccatgatgggtccaccaaagatgccaggcagtaattacccgttgactccgcaacagcaaatgcaactccagcaacagttccaacagaacccgctgcagcagcagcaactgcagcaactccaacaacagcagcagcaacaacaacaacagcaaatccagcagcagcagcagcagcaacagcaacagcagcagcagcagcagcaaattcagcagcagcaacaacaaatgggctcttcgttacagcaggcggcacaggtgggctcacctgctggttcgcagcagtcattggtgatgtcgcagcatcagcaaataagcccacagcaaatggccgcgatgagtccacagctgagc

SEQ ID NO: 1729 - DNA, 432 bp, Oryza sativa
  Clone ID: uC-osflcyp032f04b1
tttgcggccaccatggcgctctcctccggggggattgtccgcgcggcgccgtcgacctcctccgcgctcttcggggaggcgcggatcaccatgcgcaagaccgccgcgaagcccaagccggcggcgtcgtcggggagcccgtggtacggcgccgaccgcgtcctctacctcggcccgctctccggcgagccgacgagctacctcaccggcgagttcccgggcgactacgggtgggacaccgcggggctctgcgccgacccggagacgttcgtcaagaaccgggagctggaggtgatccactcccggtgggcgatgctgggcgcgctcgggtgcgtcttcccggagctcctggaccggaacggcgtcaagttcggcgaggccgtgtggtatatggcgggctcgcagatcttcagcgagggcggtctcgactac

SEQ ID NO: 1730 - DNA, 430 bp, Oryza sativa
  Clone ID: uC-osflcyp032f06b1
tcgctcgtcgtcgtcgcctctagggtttgtgtgcccccctccctcctccacctgccaaaacctcgcccccctcgccatggccaagaccaagcagggcaagcgggacgtcgactcctacaccatctccggcaccaacaaggtcgtccgagtgggggactgcgtgctgatgcggccggtggactcggacaaccagccgtacgtggcgcgggtggagaagatggagctggacgggcgcgggagcgtgcgggtgcgggtgcggtggtactaccggcccgaggagtccaagggcgggaggaggcagttccatggcgccaaggagctcttcctctccgaccacttcgacatgcagagcgccaacaccatcgagggcaagtgcgtcgtccactccttcaagaactacaccaagctcgacaacgtcggccccgaggac

SEQ ID NO: 1731 - DNA, 282 bp, Oryza sativa
  Clone ID: uC-osflcyp032f07b1
tttgtaatccaaccaaaaatctcgcgctctcctgtcctccttctccgcatgagctcatcggcgttggcgttggcctgtcgtctccgggaggagtagtgcaggcggcggcggggaattccgaaacggagtttgttcgttttggagcggagtggtgaggtgagtcgtccagatgggggagtgcaaggtgggaggaggaggcggatgccgagactgcttgatcaagctggtcagtgggaccatgcgccagccagagcccggcgcctgcgccggcggcgatgttca

SEQ ID NO: 1732 - DNA, 423 bp, Oryza sativa
  unsure (1)..(423): unsure at all n locations
  Clone ID: uC-osflcyp032f08b1
cgttccgcaaccgcaaccgcgagagccgagagagaagcctttttccccgatcgattcccttctctccgctccgcatcgccatggcctcctcagcaccgacgccgccgccgctcctcccggtgaccaacccggcagccgcggggtcgtccccggccgccaccgccgtgggatctgacgcgccgatcgcaaccccggcgttccggctcttcctgagcaagctctccgactcggcgcggcgctcgctgtccgaccggcggccgtggacggagctggtcgaccgctcggcgttctcgcggccggactccctctccgacgccacctcccgccttcgccgnaacctcgcctacttccgcgtcaactacgccgccgtggtggccttcgcgctcggggcgtccctcctcgcgcaccccttatcggtcctcg

SEQ ID NO: 1733 - DNA, 446 bp, Oryza sativa
  unsure (1)..(446): unsure at all n locations
  Clone ID: uC-osflcyp032f09b1
tttttattctatcaggagggttgtgctagcgaggtcttgttagcaacaaattgacatattgctcggcacatccccaccgagaataccaagatgacgttctctggtacacaggacaagtgcaatgcttgtgacaagaccgtgcatttcattgatctccttaccgcggacagtattccctaccacaagtcttgcttcagatgcagccactgcaaaggcacactttcgatgtgcagctattcgtccatggatggggttctttactgcaagacccattttgagcagctattcaaggaaacaggcaccttcaagaagaacttcccctcaggtacaaaggcaaacagtgaacaggctaagattcccagcaagctgtcctctgtgttctgtggaacccaggacaagtgtactgcctgcaagaagactgtgtatccattgnagaagatgaccat

SEQ ID NO: 1734 - DNA, 327 bp, Oryza sativa
  Clone ID: uC-osflcyp032f10b1
tctttatcgcgagcggtcgccctaccaaggttcatataatacaatttataggttgaaccaactctcaaaaaacacaaaagattggacgccgggtattttatacagcattatggactggtcaccggactatacgtcctaacttataacctgctttcagtagaacagataatgattgaatacccaagttgaacagagcagataacaaggggattactaagtttgaactggcggcttgcacattgcactctgatcctccactagaaactggtgcattggacttggaatgtccgggacaaaaaaatccacacattacattgtgtttctcct

SEQ ID NO: 1735 - DNA, 509 bp, Oryza sativa
  Clone ID: uC-osflcyp032f12b1
tgctatctggacatactctactactactagccaggaagctagctaactaactacgtggctatggcccccaccgtgatggcctcctcggccacctccgtggctccattccaagggctcaagtccaccgccggcctccccgtcagccgccgctccaccaactcgggcttcggcaacgtcagcaatggcggaaggatcaagtgcatgcaggtgtggccaattgagggcatcaagaagttcgagaccctatcgtacctgccaccactcaccgtggaggatcttttgaagcagatcgagtacctgcttcgatccaagtgggtgccttgtctcgagttcagcaaggttgggttcgtctaccgtgagaaccacaggtctcccggatactacgatggcaggtattggaccatgtggaagctgcccatgttcggctgcaccgatgccacccaggtgctcaaggagctcgaggaggccaagaaggcctaccccgatgcctttgtccgtatcatcggctt

SEQ ID NO: 1736 - DNA, 337 bp, Oryza sativa
  Clone ID: uC-osflcyp032g02b1
ttcgaagtggagctcccgcagcaggaggtgaagctcttcagccgctggtccttcgaggacgtccaggtgaacgacatctcgctggcggactacctggcggtgaacccgacgaagcacgcgacgtacctgccgcacacggcggggaggtactcggcgaagaggttccggaaggcgcagtgccccatcgtggagcgcctgaccaactcgctcatgatgcacggccgcaacaacgggaagaagatcatggccgtgcgcatcgtcaagcacgccatggagatcattcaccttctcaccgacgccaaccccattcaggtcatcgtcgacgccatcatcaaca

SEQ ID NO: 1737 - DNA, 487 bp, Oryza sativa
  Clone ID: uC-osflcyp032g05b1
tcaaatttcagcaggaaacagcctgtgagtgtagggaactgatcaccatccacgctggcaaaccaaaaggccatttgaaggatgcgcttaaggtggatcctgacaaagtcaggcgcctttctttgagcgaaacacagctagctaaagcaacagcttctcatggtgccgatgttataaggttcacccagaagaatatactcagggtgtatccgaagggtacaaggattaattcttccaactatgatccaatgaatgcctggactcatggtgctcagatggttgcatttaacatgcaggggcatgacaaagcactccggttaatgcaaggattttttagagctaatggaggttgtggctatgtcaaaaagcctgacttcttgcttaggacaggtccaaatggtgaagtatttgaccctaacgcaagtatgcctgtgaagaaaactctgaaggtgaaagtatatatgggagatggatggcgaatggattt

SEQ ID NO: 1738 - DNA, 469 bp, Oryza sativa
  Clone ID: uC-osflcyp032g06b1
tcgcaccgaattccattcctcgcgattcctctgccctcgcctcctcgtcctccccctcccaggggatcgccggagaggaatcgcgcggaggaaaaaaaaagaaaagggcttccccgtcgtctaagttaaaaggaagccatggagcacaaggagactggatgccagcagccagaaggcccgatcctttgcatcaataactgcggcttctttggcagtgcggctaccatgaacatgtgctcaaagtgccacaaggagatgataatgaagcaggagcaggccaagctggcagcctcctctatcgacagcattgtcaatggtggtgattccgggaaggaaccaattattgctggtcacgctgaagtagctgttgctcaagtcgaggtgaagacgcttgttgcgcagcctgctgagattgctggtcctagtgagggggtcacggtgaaccccaaggggagggaaggaccaaatc

SEQ ID NO: 1739 - DNA, 374 bp, Oryza sativa
  Clone ID: uC-osflcyp032g10b1
ttcattgctaccccagctgcaataatactcatacacctcacctcgtgccgcccgttgcgacacctcccgtacgtcaatgcccgtggccgccattgatggggaagaaggccggcaccacctcctcctggctcaccgccgtcaagcgcgccttccgctccccctctaaggacgactcccccaacaaggccgcccgcctacgagacgacaccgacgacgacaagggcaagagggagcgccgcagatggctcttcaggaagtcctcgtcgccgtctcccgcgccttcgacaccgccgccgccacagcagcagcagcagcaatcgagggcggcggccgtgactgaggagcagcggcacgccatcgcgctcgccgtggcg

SEQ ID NO: 1740 - DNA, 491 bp, Oryza sativa
  Clone ID: uC-osflcyp032g11b1
tgagttctccgtagcagacacgtacaacgtaccgagcaaccttagctagtggcgcctgaaaattattaagcgcttcaagatggcaaagcatggcgttgcttccgttttaacactggcattggtccttggagttgcggccattcctacagtggtgcaatctatcggcgtgtgctacggcgtgatcgggaacaacctgccgtcgccgagcgacgtcgtgcagctctacaagtccaacggcatcgactccatgcgcatctacttcccaagaagcgacatcctccaggccctcagcggctcaagcatcgccctcaccatggacgtcggcaacgatcagctcggatccctcgcctccgacccctccgtcgccgacgacttcgttcagaacaacatccaggcgttcccgggcgtcaactttcgctacatcaccgtcggcaacgaggtttccggcggcgacacgcaaaacatcctcccggccatgcagaacatgaaca

SEQ ID NO: 1741 - DNA, 458 bp, Oryza sativa
  Clone ID: uC-osflcyp032h02b1
cttctttgagcacgagcggctgaagatgaagggtgggcatcctgctaaatcatcagggagaaaaaaacgtaggaaagatgatgaggtgatgatggataacgaccagataatgatcccaggaaatgtatatcaaacatggctgaaggatccatcaagcctcattaccaaaaggcacagaatcaacagtaaagttaatcttattcggtcaatcaagatgagagacctcatggacttgcccctcgtttctctaatatcttccttggagaagtcacccttagaattttattatcctaaggaacttatgcagctttggaaggaatgtactgaagtcaagtccccaaaagctccatcttcaagaaggcagtagtcatcatcaccagaacaacagcaaagaaacttgcctccttaggcattttcaacccagcctcaagttgataatgacagggaaatgggattta

SEQ ID NO: 1742 - DNA, 553 bp, Oryza sativa
  unsure (1)..(553): unsure at all n locations
  Clone ID: uC-osflcyp032h03b1
gcgcgccccggaataactgcggggaccgcacgcggcctgcgttcaccgggagtagaaagagatgatgggcaggattgaccattacaaagtgcgccagatactgaaaccctgcctcataacactccaaagagtagcataagcattagcgaagctgcagacggcaacgtttctgaggaggcaccacctcagagcagtgcatccatagaaacgccatcagaaagtgccatagctgtcgaggaaccaaaacacgacgacgaggccagcataaagccatccgaagacagcagtgctcttgaggagccgccgcaggacgatagcgccagcgtggagccatcagagaacactataactcttgagaaggcatcagaggaagatgagggaagtgtaaagccatcagaaggcaatgatgctcttgagaaaacattggaggaggatgaggcgagtgccaagctaccagaagacagtacgacctttgagaagccatncgagaaagatgatgctggcaccaagcagacagaggaccctgntactcttgagaaggaaccagaggaag

SEQ ID NO: 1743 - DNA, 293 bp, Oryza sativa
  Clone ID: uC-osflcyp032h06b1
ttaaggattagagccttgccttgcatctgccaccatccttgatggtacggtgttactccttacccggaaaagaagttttccctccctttttttccatgtcagatgacatccgatatgtaatttatcatcccctccgccttccacccttagcaagcatatgtgctgatatctttctttgcctaaggattctctctctttgtagccttacttgactttgtataagctgccataatttagtagtggaaaaagtatcaggaatgttttcgtaggctttgtcgcgagattcgactggc

SEQ ID NO: 1744 - DNA, 443 bp, Oryza sativa
  Clone ID: uC-osflcyp032h10b1
tccttctccgtaaccaccgcctcctcccatggccatcgcgtgcttgtccctcccattcctcgccgccaccgccgccgccgagccgaaaccctagggcggcagcgtagggttcccctccccccccctcctccgccccgatgacgccggtgcaggcgggggcggcgcccgcgtcgccgtcggcggcggcggcgctcgggttcctactcccgacctgctgggagatcgaggtcacctgcgccgccgtgatgatcctcgtcgcgctctacgccgcgtacgagctgctcgccccgcgccccgcgtcggtggctgggggatcctccgccgccggggacgacctcctcctcgtgcgggacctcgacggcgccgacaagtacaagggtggctcgagtgggccctcggcgtacgtggtgaagctagagatgttggctgcgaagaatttgatt

SEQ ID NO: 1745 - DNA, 501 bp, Oryza sativa
  Clone ID: uC-osflcyp032h11b1
ttcttccctccggctcgagccaatctctcgctgtgtctctctcgcgctctccactagcaccggctcggctcggctcgcgcggcggcggcggcggggcggcgtggcgccgagggaggggaacgccggtgtggggagggcggcggcgaggggactcgccggcgacgagctggtttgggtatgagaggggttacccatgcggcgccgaccacgagcgtcccccgccgcggctccatggacggcctcctcatcttcgcattctacctctcgcttcctatagcgggtggccgcgaccactcaataatctcctcctctaattgttagccgatctcgcctgtgccccacactctctgatcccgctctctctctctgcttcgattcgattcgattcgatcttctccacctcgtcgccgtcgaacgcaactcggatcgggaggataatggaccagccttctaatggcttcgccgccggaggtgttttttcttcgcacattgatgggcaaa

SEQ ID NO: 1746 - DNA, 457 bp, Oryza sativa
  Clone ID: uC-osflcyp033a01b1
gagcttgccagtatgaggatggataatgggtggccgcggttcagatccaagtacatgtccacggctgaaattgagaacattgcatggatgcagtaagctggtactcagatcaatgatccgtacattgatgattactatcatcaagcctgtttagctaaaaagtcagcaggaggtcaactcaagcaccacttctgtgcgaccttgattagagatccatcatcctgtgcacggagtaaagatgagccacatgcatatgtccagggtgaagctgttggaaggttaccatttgcttgcatgcgcaggcctcgtccgctcctcgatggtgaacaaacctgtgaatcaagtgatgacgttactgaaaaatctgcttcaaaaacacttgaccaagaaccaatgctggctgctaggatcacaattgaagatggcctttgcctactgcttgatgtagatgatattg

SEQ ID NO: 1747 - DNA, 460 bp, Oryza sativa
  Clone ID: uC-osflcyp033a02b1
tttcgcgcgttcgtgcctggttataagtcgagtacggctatagctcgagtaacgcgcgggccgcgatcgtgcgaggggcacttgcatttccccgcgagatttttacgatgaagaccgcatcgtcgtcgtcgtcgtcgtcgcacgggttcccggccaccgcctcgctctgcaccccgtatctcctgctggtgccgctcggcctcctcgccgtggtgctcgtcgtccccagcctcggctcctcccacgtccgctccgacggcctcggcgtcctctgccacgccggcccatccaccgccgacggctacctcgtcacgccgggtggagatgcagcttccgctgctgctgctgctgctgagacgaaggccgtcgtgcggccggagctccgtctgctggtgggggtgctgacgacgccgaagcggtacgagcgtcgcaacatcgtgcgcctggcgtacgcgctgca

SEQ ID NO: 1748 - DNA, 470 bp, Oryza sativa
  Clone ID: uC-osflcyp033a03b1
tttagactattagcttagatctcaagccatgagatgccatcaacattgctttccggtgtaaggttcctatacaagtgaataggcgtatagcgtataacaatggattgaaagttgtacaaccaacaccatctgagagctatgtaagctcagaccaattccaatacacaagacttgacaggcctgacgatcaaccttgctttgaggcccaagagtttgatttggtccgcaatatgctggtcgctgctgttgaggaacgctacaaagatgctgctcaatacagagatcagcttttcatgttccgggcaaagaaaaagaacatgatttaacagttcctgaagggaggtgtacatactagtcccgcctgaagtgcataaagccaaacatcaagaactttgtaaatacttacagaagaacctatacatagatacatatacatactagaacatgattttgggtgctttcaattcgtg

SEQ ID NO: 1749 - DNA, 486 bp, Oryza sativa
  Clone ID: uC-osflcyp033a06b1
tgttagcggcagaggaaggaggaggtggtgacgggggattttcaccattaacctggacaagcgcctccacagctggacattcaagaagaaggcgcccaatgccatcaaagagatcaggacgttcgcgcacaaggctatgggcactaccaatggcaggtgagctgtgaagctcaacaagcacatctgggactgtcaaatcaggagtgtgccgcggagggttcgaggggggatgcttccaaggagggatgcctaggaggatgccaaggcagagctatactctctggctacataatgacactgccatgctgacttgtttccttgcctggcctccaaggccattggcacaacttggtaacagcaccagctgcggcacgggaagcagcgttaccaatgctatcgttcagctactacgaccagcacgttccctggtctggttgcttcggtcaaacgagcagcactccccaaagcagatccctccgcgatctc

SEQ ID NO: 1750 - DNA, 461 bp, Oryza sativa
  Clone ID: uC-osflcyp033a07b1
tgcgagcagagaagaaatctctgagctttatgaagatcgccactcacctgcgccgctcctgcttcctccactccttctcggttgtcttcctctactggttttatgtgatctcataattctgggggaatcatcttctccgcgtcaatccgccattgttactagtagtagtagagctctcttgttgttgttcttcttcttcgtgttcttcttcggttgattaaataatcgtagcagcagaagaagcagctgtttgtagacaaggtgtttgtggaaatgtcgtcgtcgtcgctgtcgccggcggggtcgtcggacggggactcggcgggggtggtggtggcggcggaccaccggagggagaagcggcggctgtcgaacagggagtcggcgaggcggtcgcggctgcggaagcagcagcacctggacgagctggtgcaggaggtggcgaggctgcaagcggacaa

SEQ ID NO: 1751 - DNA, 465 bp, Oryza sativa
  Clone ID: uC-osflcyp033a08b1
tttctctcctgcgcgggcgagtcgtcctggtggtcctcgtcgtcccctttctctgctcccgcgagatctcacccccgctgcggcgacgcggccatggcggggaggaactaccacggctacggcggcggcggcggcgggggcatgtccatggtggcggcgagcacgccggggcaggagctggccctcaccaactgcgcgtacgtctcctccgccgacatccgccgcttccccaacgccctcgccctcgtcggcgacgccttcgtcttcaccctgcgtgcccatgatgctgtttctgctggaagcatcgcattgaatgccattcagcgtcgccagacgaaggtttcagctggggattcaatcactgttagcagttttgcccctcccgatgatttcaaattggcattgctcacattagaactagagtataccaaggcaagaaccaaccgaaatgaggagctggatgct

SEQ ID NO: 1752 - DNA, 457 bp, Oryza sativa
  Clone ID: uC-osflcyp033a09b1
tcgattcgatcctagcttaagccgagtgaagtagctagcaggacattgttggtagtgtgatcttctccctgttttgcaacaatggcctcacgcagtagtgccctgctcctcctcttctcggccttctgcttgctcgcccggcgagccgccgccgactacggctcctggcagagcgcccacgccacgttctacggcggcggcgatgcgtccggcacgatgggcggggcgtgtgggtatgggaacctgtacagcaccgggtacggcaccaacacggcggcgctgagcacggtgctgttcaacgacggcgcggcgtgcgggtcgtgctacgagctgcggtgcgacaacgatgggcagtggtgcctgccgggcagcgtcaccgtcaccgccaccaacctgtgcccgccgaactacgcgctgccaacgacgactgcggctggtgcaacccggcggcccccac

SEQ ID NO: 1753 - DNA, 471 bp, Oryza sativa
  Clone ID: uC-osflcyp033a11b1
tgaggattcacctgtggccgaggtcgatgagccgcagcccagccaggcggtggcggaggtgccgcagcagtgcgctccatcaccgccgccgccgcctccgatactgcaggagcatcctcagccggtggtggcagtggtaccaaatgtggatgagcaagaggtggttgctaagccagcagtgattgccaagatagaggtggaagatgagcgagatgaggaggtttgctttcaggaagtggatcgatacaaagatgctgaactggaggactcaaacctgctggataatgacactccgatgctgccttgtttccttccctcgccctcggaggccattggcacagatggcagcagcaccagctgcggcacgggaagcagcgttaccaatgctatcgctccagctacgacgacgagcacgttcgctggtctgtttgcgttcgtcacaacgagcagcactccccaaagcagatccct

SEQ ID NO: 1754 - DNA, 460 bp, Oryza sativa
  Clone ID: uC-osflcyp033b01b1
tgtggacgaggttaaaagcaagcttaagggacgttcaatatagatcactgggctggcattctcgcagacaatgaatatgcttgtatcttcaggcgctgatgctcatctatgtgcttggagcattgatggttgggaaaagaagaaatcaagatatatccaatctccagcaaatcgttctggtgctttagttggtgatacaagggtgcagtttcacaatgaccaaacacatattttggtggttcatgagagccagttggcgatctatgatgcaaagctagagtgcttgcgctcgtggtccccaagagaagcactccctgctccaatttcaagtgcaatatactcatgtgatggtctcctcatctacgccggattttgtgatggtgcaattggagccttcgaagcagagtctcttaggctgggatgcaagatagcaccttttggatacatacccaccttccat

SEQ ID NO: 1755 - DNA, 445 bp, Oryza sativa
  Clone ID: uC-osflcyp033b02b1
tttttgcgaccttaccttgttaaaggtggtttgcaatcttgggcaaagaaccttcgagtgaaagaattgaaacctgagaccgcattaacagtaataaatgaggacgcagaggaaatccttgaaggcataaagcccactccaacacttgtccttggatctctcctgggcctctcagcagcagcgtacgctttgctagaatgggaaacgactctgcaatacataggtgttctaagccttggtctgactatctatctgcggttctctacgtacgagggttcagaggatctggagcaagatctaaaactgctgctttccccgttaagagtaggcgcggaggcgttctcgtgggcggccaagaagctggagccaagcaagattggcttggcgacttccccctccacgacggaggttcaagaccgggttctccaggccgccgcgaagcacg

SEQ ID NO: 1756 - DNA, 463 bp, Oryza sativa
  Clone ID: uC-osflcyp033b03b1
tttaccatttaatactggattatcacgaaatgaaggcacaattcctggcattggggtcgcaatgcctcttgatggatctgatcatggagagcagaggccatcgatacctggccttccacctgggcaacctcccttgcctccaggtccccatccatctcttctagccggtgggcagcaacagcaatatcaacagatgcagcagcagcatcctcaatttcctcgaccaccacctccaaatatgcctcaattgcagcccccagcacacatgcttccacacgcgcaaggatctcgagcaccacttcctcagcttccatcaatgtcaggtccaccaccagtgaatccaccactaccacctatgcctcacccaatggcaatgcaagtacaaggttcatcaaaccagatgatgcctcaaatgccacagcacttgattggcatgaatcagacacaccagggccctcctagt

SEQ ID NO: 1757 - DNA, 482 bp, Oryza sativa
  Clone ID: uC-osflcyp033b04b1
tatcttattgtcacttccatctcattctcctaattgtcatcactagcttctagctagcttaattaattaattagccatggcggaggagaagcaccaccaccacctgttccaccacaagaaggacgacgagccggccaccggagtagactcctacggcgagggcgtctacacgtcggagacggtgaccaccgaggtggtcgccggcggccaggacgagtacgagaggtacaagaaggaggagaagcagcacaagcacaagcagcacctcggcgaggccggcgccctcgccgccggcgccttcgccctgtatgagaagcacgaggcgaagaaggacccggagaacgcgcacaggcacaagatcacggaggagatcgcggccacggcggcggtcggcgccggcggctacgccttccacgagcaccacgagaagaagaaggaccacaagagcgccgaggagtccaccggcgagaagatgcaccacc

SEQ ID NO: 1758 - DNA, 439 bp, Oryza sativa
  Clone ID: uC-osflcyp033b06b1
tgtagttgtccttggtgtagttggccagcgcgcccaggcagggggtagagcgagcgagccgagctcgagctcgatccatcgcccgccagccatggtctcctctccctcgccttcctctcccttccccgccgcagcagtatccgacgcgaggcgggccggcggtggcaggacgacggcctcggaggtggacgagaagtacgcgcacgtcgcgacgccactccacaaccaccgcggggggagcgggggtgccaagaagacgccgcggcgagcgaagagcgaaggaggagggttagcggaccccgcggcgtacgtcgcggcggtgtcctgctctgactgccgcttcaagcagcggctccacgcgccggcgtcgcctggccctggggcggtcatcccgtcgctgttcgtgtcactcacccgacgatccacgccgcggtcgtcg

SEQ ID NO: 1759 - DNA, 461 bp, Oryza sativa
  Clone ID: uC-osflcyp033b07b1
tttctcctcgccggccggagttctcgtctccggcgaccgccgccgccgccgccctcaccgtccggtggagctccggtgatcgacgccgcgatgtcgaggtctggggccatggatcttgcatctggactcggggggaagatcaccaaggatgaggtcaagtcggctgtcgatgagtatgagaaataccatggatactatggaggaaaagaagaagcaagaaagtccaactacacagacatggttaataaatactatgatcttgccaccagcttctatgagtatggttggggtgaatccttccactttgctcacagatggaatggagaatccctacgtgaaagcattaagcgacatgagcactttcttgcccttcagcttggagtgaaaccaggaatgaaggttttggacgtcggttgtggaataggcggaccactaagagaaattgccaaatttagcttggc

SEQ ID NO: 1760 - DNA, 461 bp, Oryza sativa
  Clone ID: uC-osflcyp033b08b1
tgtcctgtcagttgctgactctccaccggtctcggcgatcgggtttgagggatatgagaaacgcctcgagatcactttctccgaggcgcctgtctttgctgaccccaatggcagggggttgcgtgcactgtcacgtgctcagattgactctgttcttgatctggcgaggtgcaccattgtgtctgagctctccaatgaggtcttcgactcgtatgtcctttctgaatcgagcctctttgtgtacccatacaagattgtgatcaagacctgtgggactaccaagctcctgctcgccattccgaggattcttgagcttgctgaagagctatctctgccacttgaagctgggaagtactctcgtgggacattcatttttcctgaagcacagccctctccacacaagaacttctctgaggaggttgcagtcctgaaccgctacttcggcggtctcaaatctggtg

SEQ ID NO: 1761 - DNA, 463 bp, Oryza sativa
  Clone ID: uC-osflcyp033b09b1
taaaaaagggaaggaattattttctttgggttttgttcgcctccgcttcttcctcacgcagctctcgcctcgcctcgccgcccgccactagagaggagagggagaaggaggaggaggcaaatcccagcaaaagaagatgcagatcttcgtgaagaccctgacggggaagaccatcaccctcgaggtggagagcagcgacaccatcgacaacgtcaaggccaaaatccaggacaaggaagggatccctccagatcaacagcgtttgatattcgccggcaagcagctggaagatgggcgcacactggccgactacaacattcagaaggagtcaactcttcacttggtcctcaggctcaggggtggcactatgatcaaggttaagaccctcactggaaaagagattgaaattgacattgagcccaccgacacgatcgataggatcaaggagcgtgttgaggagaaa

SEQ ID NO: 1762 - DNA, 484 bp, Oryza sativa
  Clone ID: uC-osflcyp033b10b1
tgctgctaccatgtttcttaaaggctttggtggtcttctgttcatcatcagcagctcatttggagcattcctactgctcctgtacttagcagttataacacctgttgtgtacgacttctacaactatgaaatggagtcttcacaatttgttcagcttttcgtcaagttctcacagaatttggcactttttggtgccctgcttttcttcttgggaatgaagaactctattcctagaagacattccaagaggagggccgggaagaccaagacaaactgaaaccagccactgtagtaggggaagctatttgtgctccttatgtttgcatactttacaaagtacatgtctcaattttcctcttgatactccatagaaattgtgaattggggacttaacaggacctagtatgtaggatacctaagtatgtctttaatagttctgttatcggtatatcccgttgtgtttcttctgtcatgaaagtaccat

SEQ ID NO: 1763 - DNA, 197 bp, Oryza sativa
  Clone ID: uC-osflcyp033c03b1
tgtctgccgccgtcttccgacctgccggcgtgccgcgctttaaatccccaataccactctcagcaccaacacaggaacgatttgcccctccaagtctatccttgggtgagcggcaggcgcttctacttccgctccccgttaatccgctcctccttcccttgcaagccaccgccaaaatccattccaattcaaatccc

SEQ ID NO: 1764 - DNA, 482 bp, Oryza sativa
  Clone ID: uC-osflcyp033c04b1
ttggcaccaataccaatctctgactcctccggcctccggcggccggcgagagagatcccaccctcaccgacgacggcgagcgaccaccatgtcctcctccaccttcagcggcgatgagaccgcccctttcttcggcttcctcggcgccgcctccgccctcgtattctcctgcatgggcgccgcctacggcaccgccaagagcggcgtgggcgtggcgtccatgggggtgatgcgcccggaactggtgatgaagtccatcgtccccgtcgtcatggccggagtgctcggtatctacggcctcatcatcgccgtcatcatctccaccggcatcaaccccaaggccaagccctacttcctcttcgacggttacgcccacctttcctgcggtctcgcctgcggcctcgccggtctcgccgccggcatggccatcggcatcgtcggcgacgcccgagtcagggccaatgcgcagcagccaaagttgt

SEQ ID NO: 1765 - DNA, 477 bp, Oryza sativa
  Clone ID: uC-osflcyp033c05b1
ttaatctcaagtctctgtctcgtcgtcctcgcatctccactcgccatgggcaagattaagatcggaatcaacggtttcggaaggatcgggaggctcgtggccagggtggccctccagagcgaggatgtcgagctcgtcgccgtcaacgaccccttcatcaccaccgactacatgacctacatgttcaagtacgataccgtgcacggccaatggaagcacagcgacatcaagatcaaggactccaagactctgctcttgggcgagaagccggtcaccgttttcggcatcaggaaccctgacgagattccgtgggctgaggctggtgctgagtatgtcgtggagtccaccggtgtcttcactgacaaggagaaggctgctgctcacttgaagggtggtgccaagaaggttgtcatctctgccccgagcaaagatgctccgatgtttgtctgcggtgtcaacgaggacaagtacacttca

SEQ ID NO: 1766 - DNA, 480 bp, Oryza sativa
  unsure (1)..(480): unsure at all n locations
  Clone ID: uC-osflcyp033c06b1
aatccagcctctctttcttgctttcttggagttggaggtagtagctcggatgaggttcatggagaggtggagatgcgtcagtgtgttggctctggtgctcttgctgtcaaatgcttcccatgggagagatatctctgtccagcactctcagcaaactttgaactatagccatactcttgccatgactcttgtggaatatgcttctgctgtgtacatgacagatttaacagctctttatacatggacgtgctcaaggtgtaatgacttgactcaaggctttgagatgaaatctctaatcgtggatgtggagaactgcctacaggcattcgttggtgtggattataatttaaattcaataattgttgcaataagaggaactcaagaaaacagtatgcagaattggatcaaggacttgatatggaaacaacttgatctgagctatcctaacatgcctaacgcanaggtgcacagtggattttt

SEQ ID NO: 1767 - DNA, 456 bp, Oryza sativa
  Clone ID: uC-osflcyp033c07b1
gcttgggaagaggaggaggagcttgagcttggagagagacaacaatggcggctcaggctcttctctctgggaggcagctgctggggaggccattgcaatcttcagtctccaggtcttcttcctccaggaaggcacccttcatggtcagggcagaggccactccccctgccaagcaaggtgctgacaggcagctgtggttcgcatccaagcagtccctgagctacctggatggcacgcttccgggagacttcgggttcgacccgctggggctatcggacccggaggggaccggtgggttcatcgagccacggtggctggcctacggcgaggtgttcaacggccggacggcgatgatgggcgtcgtcggcatggtcgccccggagctcctcggcaagctgggcctcgtccccgccgagacggcgatcccgtggttccagaccggcgtgatcccccccg

SEQ ID NO: 1768 - DNA, 458 bp, Oryza sativa
  Clone ID: uC-osflcyp033c08b1
cgtcgaggagggcgtcggcggcgcgctcggccccaaggcgcaagcggccgtgactggcggcagcggcgcacgagcgggacatcggcagcgcatggggccccatggcgcaagcgaccgtgactggcggcggcggcgcgggagcggggcctcggcggcgcacggggccacagggcggaagcggcgccatgggacgtctcctccgcctatgccgcgcgcctcccggaggtcgtcgtcggcgccaaaccgcgagtcagacccgaagctgttgctcccatcgagccggcggaggaggagggcacgaacaccgggtagccgaacgcggcgtccgccggcacgcacgttgcacaccccgtcagccccctcacgtacatgtgccacgccctccccactccccagtgccctcgccggcgccctgcacatccagctcagcctgctccccctgctcatgatggttgttt

SEQ ID NO: 1769 - DNA, 267 bp, Oryza sativa
  Clone ID: uC-osflcyp033c10b1
gattcactgaacagtttctcatcaatagtacgacatatgttaacatacatggtctaaaaccagtacttcggggatatataccttctactattcatgttaagacaagaagcagcaccttttctttccatgtatgccatgtcagatactcgggtcccaagcacctgacccctttgctgaactctctgctgcccaaaccgacagtttgctgaacggttacctaatagaaatcaaccatttacataaaggctcattggaatcctttttgac

SEQ ID NO: 1770 - DNA, 477 bp, Oryza sativa
  Clone ID: uC-osflcyp033c12b1
gcgcctctctgacctcgccggagcgccgccgggatctctacggtgatgccgccgccgccgcctcccccaccgcccccggcggcgccggatccgccgcagctccatggcgtggtcatcatcaccctccctcccccggaccagccctccaagggcaagaccatcaccgcgttcacctacaccgacgacgacgtcaccccgcccccgcctacgcctgcgccgacgcatgtgccgacgcgggctctagtgcccgcgggggcgggggcgggggcggaggctaggcgatcgaggcgggggttctcgccgcggcgggcggcggcgatggtgctcgttctcggggcgctcgccgtcgcggcatactactccttctactcggacgtggccgtccagttcttggggatgcaggaggaggcgcagaatgagaggaacgagaccaagtcgttcctgctgccgctgtaccccaaggcacggcaggggcgc

SEQ ID NO: 1771 - DNA, 436 bp, Oryza sativa
  Clone ID: uC-osflcyp033d03b1
tttcgcgcgcacgcctatccctcccctgctgcgccgcctcgcctcgcagtgtggcagaaaggaaggaaggctaaaaccctatggagcgcgccagcgaccgaggcatctctgcttccttgcaatgacggcacccgcggacaaggggaagaaggacacgaccgacgccgacggcggtgccgccgaggagaacgagcagatcgacggcgcactcctgctctccatcgacaagctccaggagatccagcacgagctacagaaggacactgaggaagctcgcgacacggttctgcaggccgagcagaaatacagtgagattctcagacctgtatatctacgaaggagtgacattatccaaacaatgcccgacttctggctgacagcgtttctgagacatcctctacttagcgagcttttgaccgaagaggatcaaacgatg

SEQ ID NO: 1772 - DNA, 469 bp, Oryza sativa
  Clone ID: uC-osflcyp033d05b1
atcccctctcactcccactaccatggatccttgcaagttccggccgtcgagctcgttcgacacgaagacgacgacgacgaacgcgggagctccggtgtggaacgacaacgaggcgctgacagtggggcccagggggccgatcctcctcgaggactaccacctgatcgagaaggtggcgcacttcgcccgggagcgcatcccggagcgcgtggtccacgcccgcggcgcctccgccaagggcttcttcgagtgcacccacgacgtcaccgacatcacctgcgccgacttcctccggtccccgggcgcccagacccccgtcatcgtccgcttctccaccgtcatccacgagcgcggcagcccggagacgatccgcgacccgcgcgggttcgccgtcaagttctacacccgcgagggcaactgggacctgctcggcaacaactttcccgtcttcttcatccgcgacggcatc

SEQ ID NO: 1773 - DNA, 455 bp, Oryza sativa
  Clone ID: uC-osflcyp033d07b1
cccacgcgtccgaattaatcatgacggagtaccattttttttctctcgaacatgcagcgtgcacatcatcattcccggcgttcacggcggactacggcctggcggtggcgaacgggacctacgcagttactgccaaccggtgtgtccagtgcagctgtggcccaggcaacttggacctgttctgcgtgccggcgccgctcgccgactcgacgtgctccagcatgcagtgcgccaacagcagcatgatgctcggcaacttcactctcctcatgaccagctccggctgcagcgtcacgtcctgcagctacggcggattcgtgaacggcacaattctcaccacgttaaccacagcactcaagcctcaatgcccaggtccgcatcagtatcctccgctgattccgccgccgacgtcgtccttcttcgagacgtacctcggcccttcgccgacgccgatg

SEQ ID NO: 1774 - DNA, 359 bp, Oryza sativa
  Clone ID: uC-osflcyp033d08b1
gatttggaacgtcttgctttaataagacaacaaagagctgatgctgcaaagaaacgtgaagaggagaaagctgccaaagaacagaggaaggctgaagcacgcaaataactgcggcaaccatgtggacaatgaaggcgtgagctgcgtcggctggatatttatttcttatatatatgcccctagtatcttttaaactcggtctcgatttcgatatttccataaaattatgcattgactaactgtagtattgtcgacgtggcttgatgtaaacttgagcttggcagggtgcatatgtagtatgatcagtttatgcaaaatttgcgtttacttacgttgatatataaatcaagaacgttgtg

SEQ ID NO: 1775 - DNA, 431 bp, Oryza sativa
  Clone ID: uC-osflcyp033d10b1
gtcgatcagggtgttcaagaacagcggggacctgggcgtgcggtacccgttcaaccagccgatgaagctctactccagcctgtggaacgccgacgactgggccacccgcggtggtcgggagaagaccgactggtcgcgggcgccgatcgtcgcctcctaccggggcttccacgtcgatggctgcgaggcgtcggcggaggcccggtactgcgccacccagggcgcccggtggtgggaccagccggagttccgtgacctagacgccgaccagaaccgtcggctcgcctgggtccgcaagacgcacaccatctacaactactgcgacgaccgtgaacgctaccccgccatgtcgcccgagtgccaccgagaccgcgacgcctgagatctatcgagatctgtgatcgatgcttgctggccgttcgatggatgga

SEQ ID NO: 1776 - DNA, 470 bp, Oryza sativa
  Clone ID: uC-osflcyp033d11b1
cttctcctcttcttcctccctcgccgccggcaaccccccgcgccgccgcgattcggtcgcgtccaccctaagcctcagccaactccggcgaggcttgatcccttgcacgggcggcgcgcgggcctgccccgtaggccaaacctcgacccgcccccgccgcccgctcgccggcggcgccggggcgggggttatccccgctcggcgcgctttctccaagaaacgtgcgggcttcgagggcttccatcttctaccaggagccggttgaaaggcgggattcctcttccccttctcggcggcggccggtgattcgcgtggggaggcaagatgctggggttctccaccggccagcttcgggtcatccttggggcgtgctccctcatgatgaagcgcagcgacatgatcaagatcgcgagggtggcgtggaggatgaccgggagggcggtcgggcgccctatgttgtttcgcaggca

SEQ ID NO: 1777 - DNA, 472 bp, Oryza sativa
  Clone ID: uC-osflcyp033d12b1
gttgtcaaggttctggtatgaaggtccaaattcgccagttggggccaggaatgattcagcaaatgcaacatccctgcaatgagtgcaagggaactggtgagaccatcagcgacaaggatagatgcccaggctgcaagggtgagaaggtggcgcaggagaagaaggttcttgaggtggtggtcgagaagggcatgcagaatggacagaagatcaccttccctggtgaggctgatgaagcgcccgatactgtcactggagacattatcttcgtcctccagcagaaggagcatcccaagttcaagagaaagggagatgacctcttctacgagcacaccctgaacctcactgaggccctttgtggctttcagtttgttctcactcacttggacaacaggcagcttgcttatcaagtccaagcccgtggaagttgtcaagcctgattcattcaaggctgtcaacgacataggcatgc

SEQ ID NO: 1778 - DNA, 460 bp, Oryza sativa
  Clone ID: uC-osflcyp033e02b1
ttgcttaatgggggttttccgttgcagtgactacattcaggctcaaatagctaccgtgcagtatagtatgagagacctggatgaagctgacatgatttttgaagaactccttaggactgatcctttccgtgtggattctatggacgtttactcaaatttattgtatgcaaaagaaagctcgactgctttgagtttccttgctcacagagtatttttgacagataaatatcgcccagaatcttgctgcataattgcaaattactacagtttgaaggggcagcatgaaaaatcagttctgtactttcaaagagcgctgaagcttaatcgaaagtatctttcagcttggactcttatgggacatgagtttgttgagctaaaaaatacacctgctgcgattgatgcctacaggagagctgttgatataaatcccagagattaccgtgcttggtatggtcttggt

SEQ ID NO: 1779 - DNA, 472 bp, Oryza sativa
  unsure (1)..(472): unsure at all n locations
  Clone ID: uC-osflcyp033e04b1
cgggccctgcctgacctacgcccgcggcggcgccgggccgtcggcggcctgctgcagcggcgtgaggagcctcaaggcggcagcaagcacgaccgcagaccggcgcaccgcctgcaactgcctcaagaacgcggcccgcggcatcaaggggctcaacgccggcaacgccgccagcatcccctccaagtgcggcgtcagcgtcccctacaccatcagcgcttccatcgactgctccagggtgagctgagccatcgatcagagagacggatcatatatatacagcagcgcgccggttgccacctagtagattctgcctgggtcgatgtgtggagccgaattctgtatccagtactagtagtatcatatctgtattctggaataaaagatgagctagctaaggtctcgatcaatcaccatgcatgcatgtgtgtgcatccatggttgatcggnccggtcacgctagctagctttc

SEQ ID NO: 1780 - DNA, 474 bp, Oryza sativa
  Clone ID: uC-osflcyp033e05b1
ttaaagcattcgcatccacgagaccactcgaacccgacccgcctcgccgccgccgccaccgaagtaatcccttaattggtcaaaatgtctcgggaggagaatgtctacatggccaagctggccgagcaggctgaaaggtatgaggagatggttgagtacatggagaaggttgcaaagactgtagatgtggaagagctcactgttgaggagcgcaacctcttgtctgttgcttacaagaatgtgattggtgcccgccgtgcctcctggcgtattgtctcatccattgaacagaaggaggagggtcgtggcaatgaggaacatgttactctgatcaaggagtaccgtggcaagattgaagctgagctgagcaagatttgcgatggtatcctgaagttgcttgactcacaccttgtgcccttatctactgctggagaattaaggtgttttacctcaagatgaagggtgattaccaca

SEQ ID NO: 1781 - DNA, 475 bp, Oryza sativa
  Clone ID: uC-osflcyp033e06b1
tatcgccggatcgccgcccgccgccgccacgatgtcgtcgatgctgtccgcgttctcgcagtggttcgtgaacccgcgccgcaacccgctcgcccgcctccacatgcaggcgatctcctcgcgcctccggaaatacggcctgaggtacgacgatctgtacgacccgaagcatgatctggacatcaaggaggcgctcgagaggcttcccagggaggtggtcgacgcccgccaccagcgcctcaagcgcgccatggacctctccatgaagcaccagtacctctccgaaaacgaccaggcgcaacagacaccattcagaggctatttgagtgacatgatggatctggtgaagaaggagagattagagcgtgaagaactgggagcccttccccttcaccagaggacccttcctgaagtcttatcttgataggccctgctgttttttcccaccacaatgcatcaaataaaatgcagtgga

SEQ ID NO: 1782 - DNA, 457 bp, Oryza sativa
  Clone ID: uC-osflcyp033e08b1
ttcttctgatgtctgcaacgtcaagcgctgatattgagaaactgactaagctacttctgcacaacccttttattctgacccttacggaggttggtcatgcgaaggatgatttgatcccaaaaaatgtgcagcagttttggatatcatgtgatgctaaggataagatgctttatatccttgtactcctgaagttggagcttattcagaagaaagttctcatatttgtaaactcaattgactcggcattcaaattaaggctgtttctggagaagtttgggataagatcttcagtgctaaatgctgaattaccacaaaattcacgcctccatatcattcaggcattcaatgctaggctatttgattatctgatagcaacggatgacaataagtctaaagaggagaggcaagccaataagggaaacaaaaaggattctagggtgtcacgcaagcagttgca

SEQ ID NO: 1783 - DNA, 472 bp, Oryza sativa
  Clone ID: uC-osflcyp033e10b1
tttttattttcagaacatttcagctttcagggtgggatgttcatgaatgaagtgaccgttgcccggcttgcaactgttccatggtgcaaatcaatcagtttggatatggaacacgcattgtacgggttgctgcttataggttgtttggatatcacttaatggatcaaactagcttgtcatatttgtttatatacatgtgctatttggaattaagtgcagtggttgtacgggttgattcagagttgatcccagcttatatcagataaaaaggtcacacatcattctgtgaaactggaccatctccagatgcattagtgatcaacctacaagttgctttcatcttttagggacagaggtagcaagtaagaagtatgacataacatacaaaatagagttgtttttttcctaacagttcattaccaccattttctgagttatatctatgcaatacataacaaaaaaagtctcactc

SEQ ID NO: 1784 - DNA, 474 bp, Oryza sativa
  Clone ID: uC-osflcyp033e11b1
ttctcctccgctcccgatctcacaaccaccgactcctcctcctcgcgcggcggcggcggcggcgtgagccagcagcagccatggtgctgttctcggtgacgaagaaggccaccacgcccttcgacggccagaagcccggcacctccggcctccgcaagaaggttactgtattccagcagcctcattacctccagaactttgtgcaatccacatttaatgcccttcctgccgacaaagtaaaaggtgcaaccattgttgtgtctggtgatggccgctatttctcgaaggatgctgttcagatcattacaaaaatggctgccgctaatggagtaagacgtgtttgggttggacaaaacagcctcatgtctactccagctgtatctgctgttatccgtgaaagagttggtgcagatggatcaaaggctactggtgccttcattttaacagctagtcacaaccctggtggtcctactg

SEQ ID NO: 1785 - DNA, 388 bp, Oryza sativa
  Clone ID: uC-osflcyp033e12b1
tctcgtccgtcacgatcccgcaccgcgcgcgcgcgactgatcggagcgcgaacaacatgccgtgcaccgtacaccgatcgaccaaccggccgtgcccttcgatctctctctcatgtgtatataatctgtgaaagaccgacctgtgcgggctcggtcgtgcgttgagcagtccatgtatgcattcagtaggttagctagcagtagaagaagcagactcctttcaaaaaaaaaaaaaaacagagagacaagaagcagcagcagactgtatagcactaccaacttgatgcatgattggttattattggtcgaaaaaaaaaaaaaataaaaaaaaaaaaaaaaaaaaaaaaaaaataaagaataaaaaaaaagaataatttatagggctttc

SEQ ID NO: 1786 - DNA, 473 bp, Oryza sativa
  Clone ID: uC-osflcyp033f04b1
cccacgcgtccgcccacgcgtccgcggacgcgtgggtttctccccaatctcgcgaggctctcgtcgtcgaatcgaatcctctcgcgtcctcaagatgcagatctttgtgaagacattgaccggcaagactatcaccctcgaggtggagtcctctgacaccatcgataatgtcaaggctaagatccaagataaggagggcatccccccggaccagcagcgtctcatcttcgctggcaagcagctggaggatggcaggacccttgctgactacaacatccagaaggagtcgacccttcaccttgtcctccgcctccgtggtggcatgcagatctttgtcaagactctgaccggcaagactatcacccttgaggtggagtcttctgacaccatcgacaacgtcaaggccaagatccaggacaaagagggcatccccccagaccagcagcgtctcatcttcgccgggcagcagctgg

SEQ ID NO: 1787 - DNA, 469 bp, Oryza sativa
  Clone ID: uC-osflcyp033f05b1
tataagtgtactgaaggatattttgcatggtgaggagaaaaggtcgcaaaaggttaatgaaatacgacatcccccatcgtctaatcaacggaatggcagaaagcgtgacagggatgacgaaccgcaacaaataaagagagacttgcctttgcgccgtgacgttggtgcctcctgccgtcttctaaagtttgctgttcgagatgctgtgaaagctgtacagcaaaccagcagctctacggaaccatcttctaagcgcctacgttctgtggtttccacatcatctgcagacagcctgcatggtaaaagaatagaaacatctacagagggccacctgtatgacaaaaagccagaaagaactaggcaaattcttcaagtacctggagctgctttagctctcagagctgccgcagaggctgctgcagattctaccaaagttagatcttactggagcgtgtttagtcgattaggc

SEQ ID NO: 1788 - DNA, 430 bp, Oryza sativa
  Clone ID: uC-osflcyp033f08b1
tctccctcctctcctcgtccctcctccccgccgccgccgcagcagatttaatcctcaatggcggccttcaacaagctcggtagcttcctcaggcacagtggcttgacaagcagtgcctcggccggctcttcccctgccatgttcaatgctgctcgtctgatgtccaccaagcttttcgttggtggtctttcttggaatactaatgacgattcgctgaaagaggcattcaccagcttcggggatgtgactgaagctcgggtgatcaatgacagagaatctggaaggtcaagagggtttggctttgttagctttgccaatggcgatgatgccaagagtgccatggatgccatggacggtaaggaacttgagggacggagtatccgcgtgaacttcgcgaatgagagacctccagggaaccgaggtggcggcg

SEQ ID NO: 1789 - DNA, 461 bp, Oryza sativa
  Clone ID: uC-osflcyp033f09b1
tttcctttaactgcaacctgctgtaccatgacagacttaaaattgacccagaacttgagaaagaaattggggccaaatatgaagaggatctcgatgctatgcttccaaagtgtgatgtcattgtgatcaatacacctcttacagagaaaacaagaggtatgtttaataaagaaagaattgcaaagatgaagaaaggtgtaatcattgtgaataatgctcgaggagcaatcatggatacccaggcggttgcagacgcttgctctagtggtcaagttgcaggatatggtggtgatgtctggttcccccaaccagcaccaaaggatcacccatggcgatacatgcctaatcatgccatgacccctcatatctctgggactacaattgatgcacagctgagatacgcagcaggagtgaaggacatgctggacaggtacttcaaaggggaagacttcccggtgcag

SEQ ID NO: 1790 - DNA, 465 bp, Oryza sativa
  Clone ID: uC-osflcyp033f10b1
tagggcatcgcctggtccttcggaggcatgatcttcgcgctcgtctactgcaccgccggcatctccggaggacacatcaacccagcagttacttttgggctgttcttggccaggaagctgtccctgacccgggccatcttctacatagtgatgcaatgcctaggggccatctgcggagctggagttgtgaagggcttccagcagggtctgtacatgggcaatggcggtggtgccaatgtagttgccagtggctacaccaagggtgacggtcttggtgctgagattgttggcaccttcatcctggtctacaccgtcttctcagccactgatgccaagaggaatgccagggactcacatgttcctatccttgccccactgccaattggttttgcggtgttcctggtccacctgggcaccatccccatcaccggtactggcatcaacccagccaggagccttggcgct

SEQ ID NO: 1791 - DNA, 464 bp, Oryza sativa
  Clone ID: uC-osflcyp033f11b1
gaaaactctccattttccttgcctctgtgtctccccacccaatcccaacccaccacctctcctctcgccgccgccgccgccgccgccgcgcgccgttctatggcctacacctcctcctccctccacctccacaagcacctcctcctccccaagaccaacccctcctcctcctactcgcggcctccgcctccgtcgttcgtcgtcgcggcggccaagatcaacggcgtgaacggacactcctccaagaagtcccccaacggcaaggcgcagatcaacggcgacggcaagaagggggtcaacgggagcgggaggaagaaggcggcggcgcagcacatcaacgggaatgaccggatccatctgtcggtgagcacgggcggcgccgggggccaggatgggttcgggctcagggtggcgttccagggcgcgccgggcgcgtacagcgagttcgcggtgaagacggcgct

SEQ ID NO: 1792 - DNA, 464 bp, Oryza sativa
  Clone ID: uC-osflcyp033g01b1
tattagagcagcgtcgcctctcctcctcctgcctaacccctacgcttccagaaccttctcgaagctcccgctcccccccccttccgctccaatggcgaaggaaccgatgcgcgtgctcgtcaccggcgccgcaggacaaattggatatgctcttgtccccatgattgctaggggtgtgatgttgggtgctgaccagcctgttattctacacatgcttgacattccaccagctactgaatctcttaatggccttaagatggagctggttgatgctgcatttcctcttttgaagggaattgtcgcaacaactgatgttgtggaggcctgcactggtgtgaatgttgcggttatggttggtgggttccccaggaaggagggaatggaaaggaaggatgttatgtcaaaaaatgtctccatctacaaatcccaagcttctgctcttgaggctcatgcagcccctaact

SEQ ID NO: 1793 - DNA, 460 bp, Oryza sativa
  Clone ID: uC-osflcyp033g03b1
tgtgtacacgtgtggcccggccaccatcgtcccttccaccgtctacctcaccccggaccggcgccgccgcacctaggcgctcatgacgtggaccgtcacctgcacctactcccagcagctggcgtcgcgctacccgacctgctgcgtctccttctcctccttctacaacagcaccatcgtgccgtgcgccaggtgcgcctgcgggtgcggccacgacggctaccgcggcaacggcggcggcgggaagaacgcccgcgccggcgacggacgcagcagaccacagcggcggcggcggagggcacagcggcggcaccgagtgcatcatgggcgactcgaagcgggcgctgtcggcgggggtgaacacgccgcgcaaggacggggcgccgctgctgcagtgcacgtcgcacatgtgcccgatccgcgtgcactggcacgtcaagctcaactacaaggactactg

SEQ ID NO: 1794 - DNA, 462 bp, Oryza sativa
  Clone ID: uC-osflcyp033g04b1
tgtacagcagaggttgagtctgctctggtttcacatccaaaatgcgccgaggccgctgttgttggaattgaccatgaggttaaaggccagggaatttacgctttcgtgacattggtggacggtgttccttacagcgatgagctacggaaaagcctcgttatgactgttcgcagccagattggggcgttcgcggcgccggacaagatccactgggcgccggggctcccgaagacgcggagcggcaagatcatgcggaggatcctgcggaagatcgcgtccaggcagctggacgagctcggcgacaccagcacgctcgccgaaccaggcgtcgtcgaccagctcatcgcgctcgccgatagctagctttagctaaagccaccgtcgtctcgtcgcgcgcgaggaacctctgctcggccgagagtctcattttcgttatgagcaagattacattcttattccatc

SEQ ID NO: 1795 - DNA, 469 bp, Oryza sativa
  Clone ID: uC-osflcyp033g05b1
taaaccattcgtctcccgagcactgttacaatctttggctccacctggattcctgttggttcttcccatggttggctcatcttttacagcccatctcatggaaccatgcagctggttaatcccattagtggcatgcagttcaatcttcccccaatcggacgaagggccttctccaaggccatgttgcttgacatgaatgacacaaacttcactgttgctgtcatcttacgtgaccagaaaggatataaggtaacgcgtaaaggaagcaacagctggtcatcagtggaatcaaagcatgatctagtggatatcttcaagcacaggagacagctttacaccgttgatatatatggcacagttcagttgtgggcagaaccgccccgttcatggccagatgaagatgccccgcaggtgaatgacccgtatcataacctcattcactatccgcatcaacatggaaagcttaact

SEQ ID NO: 1796 - DNA, 473 bp, Oryza sativa
  Clone ID: uC-osflcyp033g06b1
tgagagcaccaaggacacgcgactagcagaagccgagcgaccgcctcctcgatccatatcttccggtcgagttcttggtcgatctcttccctcctccacctcctcctcacaggttcttggtgtagcttgccactttcaccagcaaagtttcatgtctgatctcgacattcagatcccaactgccttcgatccctttgctgaggccaatgctggagactctggtgcggctgcaggatcaaaggactacgttcatgtacgcatccagcagcgtaatggccgtaagagcctgaccactgtccagggattgaagaaggaattcagctacaacaagatcctcaaagatctcaagaaagagttttgctgcaatggtactgttgtccaggacccagagcttggccaggtcattcaacttcagggtgatcagaggaagaacgtatcaaattttcttgttcaggccggcattgtgaagaagg

SEQ ID NO: 1797 - DNA, 342 bp, Oryza sativa
  Clone ID: uC-osflcyp033g07b1
tgaatcaattaaccatcggcgagcagaagaagagcagaggctcagctagcaggcgagagagatcagcgagcaggatggctggggctgcagggtcgtcgtggtcctctctgctcctcgcagcggtggcggtggcgctcgccgtcgtcgcagtgccgccgatcgccggtgacccggactacctgcaggacatccgcgctgccgacctccactccctggagatggcgcccggtaccccgtgcatggcggaccctacggtggacgactttgtctccggattgcttgtctggcccggagccgtcgccaccaccgccgccgtggacgcgtgcactggtgccaacgttg

SEQ ID NO: 1798 - DNA, 317 bp, Oryza sativa
  Clone ID: uC-osflcyp033g08b1
ttgtggtggtgggcgtacgcggggatatcctgcttcctggtgctcttcgccgggatcatgtcggggctcaccctcggcctcatgtcgctcggcctcgtcgagctggagatcctccagcgcagcggcaccgatgccgagaaggcccaggctgctgccatcctcccagctgttcaaaagcagcaccagcttcttgccaccctgctcttgtgtaatgcttgtgccatggaggctcttcctatattccttgacaggatttttcatcctgttgttgctgttatcttatcagtaacgtttgttcttgcttttggagaggctat

SEQ ID NO: 1799 - DNA, 465 bp, Oryza sativa
  Clone ID: uC-osflcyp033g11b1
gtttggtatcagtttattcctcagctgatattcttgaacagcttatttggttacctttcactcctcatcattattaagtggtgcacgggctcaaaagctgacctttaccatgtgatgatatatatgttcctgagtccaactgatgatcttggggagaacgagctatttcctgggcagaaactagtgcagcttgtactacttctgcttgctctggtttctgtgccttggatgctgattccgaaaccatttttcctgaagaagcaacatgagcagaggcaccaaggccagcagtacaccatgcttcaggccactgatgaatcagtgacagagctagaagaacaccaggatgaccctcaccaccatgaggagtttgaattcagcgaagtctttgttcaccagctgatccacacaattgagcttgtgctcggtgcagtctcaaatacagcctcttaccttcgtctttgg

SEQ ID NO: 1800 - DNA, 444 bp, Oryza sativa
  Clone ID: uC-osflcyp033h01b1
gtttgatactggtgccaccactgcgaggaggggatcgaacctgtggagcctgatatgaagtgtcctagctgtgacagcgggttcgaggaagagatggggtctgcaggctttgagccatcgaccaacttgaggtctgatcgtatctccctctgggcaccactggtgctcgggatgatgggaggctcatcgcggcgagcaaggcggctccgaaggcagatcatggaggatgatgacgacgacgatgacgatgaggatgatgaagatgattcagaccatgagcttgaagacttgtttaggaggcagaggaggggctcatctcttgtaaggctgctccagaccctccgggatgacttgaggggcttggatgacattggcagggatagtgacagagacagggaaagggagagaagggagagggagaggcttaaggagcgggaagggaaa

SEQ ID NO: 1801 - DNA, 453 bp, Oryza sativa
  unsure (1)..(453): unsure at all n locations
  Clone ID: uC-osflcyp033h02b1
tgcgtcaaggaaggcctcgatgatctgatcctcgacatcccaaatgcacaggagaagtttggagcatatgtggatctcgcaactgaacgtggatggctgcttccacccttcgcctaggcggttaaacttgatgaatcttctcaatgtacatctccacccctgctgtctttagcaccataccaaaagttttcctgttcctagtgtacttgttgtgttaccgtataccggaggatgataggttggttggccgtgttggtacttgttgaggtagtgttcatcattggtttggtttgggagtttatgccctgggagagttatgaataaccatatcgtttcaggttatgacatgctatgcaatgaacaatagagctgttcatgaccagtggaatttttgtaattagctggcgatgggcttccagcttctggaanaaataaantaaattcccatttagt

SEQ ID NO: 1802 - DNA, 469 bp, Oryza sativa
  Clone ID: uC-osflcyp033h03b1
ttgaaaacccaggtaattacgaactagggcttctccagcccggcgacgcgggggaattttacagataagccctcggattccttccccctattctccgctcctcgcgtcgtcgtcctccgagagggggaggagaaggcgagaaggggctccggtggtgggagagggagaccgccattgccgctacttccgagttcagattggggaagatggttgtccaggagttcaccgttgatctgaacaagcctctcgttttccaggttggccatcttgaggaacgttatcaggaatgggttcatcaacctatcgtgagcaaggaaggtccacgctttttcggaaatgatgtcctggagttcttgacgcgcacaaagtggtttgctgtgccaaccatatggctgcctgtcgtctgctggttgcttgtgaaatctattcggatgggtcatactattcaggaagtaggtctaatggccct

SEQ ID NO: 1803 - DNA, 468 bp, Oryza sativa
  Clone ID: uC-osflcyp033h05b1
tgtctctctctctctctctctctctagatatgtctctctttttctctctagatctctcttttttcttgtatctctataggttgttagagcggcgacggcgagaagaggaaggagcaacaaggagtagatcatcagtatagagagcagcagcaatttgggaaggttcattattacagctctgttgtttcatttctttgaggagacgaagttagcaagcagggattgctgtttctgaatttcaaggagaagataacaatagcaaatgatgatgtcatctgggttccagctcggtgtgatcgggtctcttgcgctgacggttgcatcatcagttgccattgtcatctgcaacaaagctctcatcagtacccttggtttccctttcgctacaacattgacaagctggcatctcatgatgaccttctgcaccctccatgtggcacaacgcttgcatttctttgaaccaaaggc

SEQ ID NO: 1804 - DNA, 466 bp, Oryza sativa
  Clone ID: uC-osflcyp033h06b1
tgtgataaagacactaaaaagcacttgaaaaatatgataatgtgacatcttactgattactagtagtattttttgaaggttattcagcacttacgatgacctatttcaattcgtttaccaaaacaatgaggaaacatatcttttcatttttttccctttttttctattatgacatgtgctgtgatgcagctatttctgtcatcaccatgagttgaaataaatgctaaatgactagaaaaaagaatgggaactaaatgcttccatgtgaaactatttctgctaacatgctttgttgaagatttttgaattgtatactgggtaagtggtttttcttagacgtggtagtcacacggtaaaggtattggaagaaccatcatgactgatgccatcagagaggtatctatcgtatctataatttgttttgctcttggaacattattaaatgtcataggtgcacaagttgatg

SEQ ID NO: 1805 - DNA, 454 bp, Oryza sativa
  Clone ID: uC-osflcyp033h07b1
tgggataactactgggtgatgcattagttgagctaatttgagcggggcacgtttggaatgacttggcacatgcttgcttgctaacttatgtaattcgtgggtatcctcatagttaagctatgtttcacttgaggtatgcctgcaggtaaggtaatttctgctagctttcttgtaaagatgggaaggtatgtagctagggctgagtttgggaactccaagcctcttttagtaaatagtagagagatatttatttaattcctgaaaaattgtgtgaagtgagagttactagtagtgcctgcaggtgatatatggcataagtaacccaacaggtgacaagtaacccccgttattcttgtaatgtattatgctcttccaatgcaatttgttgcttcatcttgggccccctgtgtactcatccttggtagaaaaacagagcttacaaacttgggagttc

SEQ ID NO: 1806 - DNA, 463 bp, Oryza sativa
  Clone ID: uC-osflcyp033h10b1
tgcttgagcttggagagagacaacaatggcggctcaggctcttctctctgggaggcagctgctggggaggccattgcaatcttcagtctccaggtcttcttcctccaggaaggcacccttcatggtcagggcagaggccactccccctgccaagcaaggtgctgacaggcagctgtggttcgcatccaagcagtccctgagctacctggatggcacgcttccgggagacttcgggttcgacccgctggggctatcggacccggaggggaccggtgggttcatcgagccacggtggctggcctaccgcgaggtgttcaacggccggacggcgatgatgggcgtcgtcggcatggtcgccccggagctcctcggcaagctgggcctcgtccccgccgagacggcgatcccgtggttccagaccggcgtgatcccccccgcgggcacctacacctactgtgccgac

SEQ ID NO: 1807 - DNA, 270 bp, Oryza sativa
  Clone ID: uC-osflcyp033h12b1
tctcccatctccacctccgcctccacgcgtggccgacgtcgacgccgccgccggcgtcgtcgtccgggcagtcgaccgctgcggcgccgtcagagctacccgggccccgtggatgagagcggcgtggataaagtagatgagttcccgctttgcctggacacgactggacgacgggagctcacagggatggatctatgttataagaatgagtggatataaatgctaaatgacaagaaaaaagaatggaaactgaatggtatcctgcgaaac

SEQ ID NO: 1808 - DNA, 521 bp, Oryza sativa
  Clone ID: uC-osflcyp034a01b1
ttgacgcgtggggaagtactcgagcaaagaaggagagagcttggtgagctgcagagatggccccctccgtgatggcgtcgtcggccaccaccgtcgctcccttccaggggctcaagtccaccgccggcatgcccgtcgcccgccgctccggcaactccagcttcggcaacgtcagcaatggcggcaggatcaggtgcatgcaggtgtggccgattgagggcatcaagaagttcgagaccctctcctacctgccaccgctcaccgtggaggacctcctgaagcagatcgagtacctgctccgttccaagtgggtgccctgcctcgagttcagcaaggtcggattcgtctaccgtgagaaccacagatcccccggatactacgatggcaggtactggaccatgtggaagctgcccatgttcgggtgcactgacgccacccaggtgctcaaggagctcgaggaggccaagaaggcgtaccctgatgcattcgtccgtatcatcggcttcgacaacgtcaggcag

SEQ ID NO: 1809 - DNA, 550 bp, Oryza sativa
  unsure (1)..(550): unsure at all n locations
  Clone ID: uC-osflcyp034a03b1
ttaacttgttgatggctcaccagctatggtcaaatcaaaaagaggtcgacctcctggactaaagtcattggagaagaaggctgctggaaagaaagttctaggtctgaaaaaggttgaggagactactgattcaacagggaagttatcgaagcagtcatctaaggatgattccaagtcatctacaagaaaggcaagtggagcagggtcatcaaaaaagcaacaaaagatcagtttgaaacagaaggatgaaactgactccaaggaagatactgctaaggatctgagcctaaaggaaatggtctctccaaagtccgtgtccaaggggtcagctaagaccaagggcagccaaggccaggacaataatggctccaagaggaaaaggtcacaagaggatgaacaagagactcctcgttctaagaagaataaaggccttgatgctagccttgntggtgcaaggatccaagtatggtggcctgacgacaagaagttttacaagggcattgttgactcatttgatacagcttcaaaaaggcacaagattgcatatgat

SEQ ID NO: 1810 - DNA, 422 bp, Oryza sativa
  unsure (1)..(422): unsure at all n locations
  Clone ID: uC-osflcyp034a04b1
ttcaagttccactggaagcccacctgcggcgtcagctgcttgatggacgacgaggccacgctcgtcggcggcaagaaccacagccacgccacccaggacctctacgactccatcgccgccggcaacttccccgagtggaagctgttcgtccaggtgatnacccggaggaggaggagaggttcgacttcgacccgctggatgacaccaagacatggccggaggacgaggtgccgctccggcccgtggggcgcctcgttctcaaccgcaacgtcgacaacttcttcaacgagaacgagcagctggcgttcgggccggggctgggggggccggggatctactactccgacgacaagatgctgcagtgcaggggtgttcgcgtacgccgacacgcaacgctacaggctggggccaaactacctgat

SEQ ID NO: 1811 - DNA, 448 bp, Oryza sativa
  Clone ID: uC-osflcyp034a05b1
ttcgtgttgctgcttccttctcggaagatagcaccaccagaggtcgtcgttgggttgtaatggcggaggtgcagagcgtgcaggcgctggcgtcgtcgctggcggcgctgccgccggagttcgtgcgttccgagcacgagcggccgggggcgaccacgttccgcggcggcgacgcgccggagatcccggtgatcgacatggcggcgcccgagtccgccgcgcgcgtggcggaggcggcggcagagtgggggctcttccaggtggtgaaccacggcgtgcccgccgcggcggtggcggagctgcagcgcgtcgggcgcgagttcttcgcgctgccgcatgaggagaaggcgcggtacgccatggacgcgtcctccggcaagatggagggctactgcagctagctgcagaaggaccttgagggcaagaaggcgtgggccgactttttttt

SEQ ID NO: 1812 - DNA, 516 bp, Oryza sativa
  Clone ID: uC-osflcyp034a07b1
ttcattgagagggcaaggagaggtgaaggaccgactcttgtggagtgtgagacttaccggttcagaggacattctcttgctgatccagatgagctcaggaggcctgatgagaaatctcattacgccgcaagggaccccattacagccttgaagaagtacatcatcgaacagaaccttgcaactgaatccgagctgaagagcatcgagaaaaagatcgatgatgttgttgaagaggccgtggagttcgctgacgcaagcccgctccctccccggagccagcttctggaaaacgtgttctcagatcccaagggctttggaattggccctgacgggaagtaccggtgtgaggatcccttgttcacgcaaggcacggcccaagtctgagaggctcaacgagcacgcttatcagttattatgtcatgctttttcttgtctctctctagctttaccctatcctagtttttgtcgaacccatcgtcgtgttaagcgtaatgtaagcacaacctacttcttcat

SEQ ID NO: 1813 - DNA, 560 bp, Oryza sativa
  unsure (1)..(560): unsure at all n locations
  Clone ID: uC-osflcyp034b03b1
ggccggacggcgatgatgggcgtcgtcggcatggtcgccccggagctcctcggcaagctgggcctcgtccccgccgagacggcgatcccgtggttccagaccggcgtgatcccccccgcgggcacctacacctactgggccgacccttacactctcttcgtcttcgagctcgccctcgtcggcttcgccgagcaccgccgcttccaggactggtacacgccgggctccatggggaagcagtacttcctcggcctcgagaagtacctcgccggctccggcgagccggcctaccccggcggcccgctcttcaacccgctcggcttcgggaccaagagcgaggcggagatgaaggagctcaagctcaaggagatcaagaatggcaggctcgccatgctcgcctttctcggcttctccgtccaggcgctcttcaccggggttggccccgtgcagaacctgcttgatcacctcgctgatcccgtncacaacaacatnctcaccagcctcaagtccattagagatgccatcaactacgtatttaattaattacgagttttaattat

SEQ ID NO: 1814 - DNA, 447 bp, Oryza sativa
  Clone ID: uC-osflcyp034b06b1
aagaaatcttctgttaatgtaattacatcatcctcaggcctctcacttagtgtcctcacactgcaatcgctccttgcttgcggttctgtcttccttcacgcatatgctgaaggtcttcaacttggtgtggctgcgcgcaaggcttatggtctagggcgctacatggttcttccagtttcccttcatggtctaccacgaggtgctgctgttgcgagctgcatatatggtgccactgatagttggcgggcagccttggcagccgctgctttgaccggctttgcagggccaagcgctgccatcagtgcaatcctcgcgaagattgactacagtggactagactactggatggtcattgcctgtggtgctttgattccaagctttggccgagtcttcaaacgctcgctaaggttggacatgcggaagagcatctgtgggcttttgaagggt

SEQ ID NO: 1815 - DNA, 518 bp, Oryza sativa
  Clone ID: uC-osflcyp034b07b1
aataaaggttcttgggatagtggtgacaattggaatgccccaaagtcatctgatgaaaatcaaacttccgcttggaacagttcagaagataaaaggccatctggaggccaagagcaacaaagtggtgcttgggctagcaagatgacttctactgctggcgctgaggataaaagtgatgcctggggcaccaaggcggaaggcaattctggtagcactgggggaaagtgggagaatgcttcatctggggaagagcagcaaagcgacccttggggaagcaagatctgttctaatgaaggcaaagaacaagaaactgacccttggacaagcaaggtgacatccactgcagatgctgatgataacaataatgtctggaacactagcgcaagtgatactgcctttgggagtgagagcaagtggggcaatgctggggcagaggaaaaggcagatgcctggaaaagtaaagtggggagtgaaaataagtggaggtggattaagaaatttttttgggtaaaccaagc

SEQ ID NO: 1816 - DNA, 492 bp, Oryza sativa
  unsure (1)..(492): unsure at all n locations
  Clone ID: uC-osflcyp034b08b1
gagcagccgagtcggccatggcgcggtcgccggcggcgaggaagccctcggcggcgcagaccgtcgcggtgacgctggcgctggcgctcgcctccgcggggctcctcttcctcctgttccacctctccccgtccagccccaccccgcacccgcacccgcaccgccgcctccgcctccgcggcgcgcgcgcctccccctccccgcgcggccagatcccgttcgaccccgtcatcgcgggcctcgagcgccgccgcgacgaccgcgaggnggnagcgcctcgccgccgcggggctgcacgcgccggggttcgaggcggcgcccgtccccgaggactacatcgacggcggcggcggcttcggcgccgaccccgacgaggactacatcaacgacgccgtgcggttcaacctgacgcggggggtggaggcgctgttccccaagatcgacgtcgaccccgccgacggggccgagacgcccgccgagctgaccgcctgg

SEQ ID NO: 1817 - DNA, 562 bp, Oryza sativa
  Clone ID: uC-osflcyp034b09b1
tgactcgttcgctaactatcttagtgatgattggtttccacctgctgaagcttctctcaagcgttcattgattcgaaaattaatccataagctgttgaaagagccttctcaagattttcccaaactagtctgctgtagtgagcagctggataaaacacatgggagtgagaacgctgagctagaacaaatgagtgagaatgctgagcgagaacaagctaaagagctcccagctcagatgtgcactgatggtgaacctgattcagttggcaccattcttgaaacacagcaaccatccatatcaacatgtttcaattattctgatgaaaacggcccacctgtttctgtacacaacctacataagttggaggtatcgtctgcaaacaaggatgccattgtctgcttgtcaaatcatgatgagaaaaatgagtcacctcctgcagattcttacaatcatcttgatttgagatcatgcgactcagaagaggctgagacagtcaatggatcagctggtgttgtgaaagacccaatagtcataaagagcctttgctggatctttgataat

SEQ ID NO: 1818 - DNA, 513 bp, Oryza sativa
  Clone ID: uC-osflcyp034b10b1
ctctctctctttcctctcgtctttctcggcggcggcggaggcggaggcggcggcggcggagatggctcaccggctgctgcgagacgcgcaggcggacgggtgggagcggtccgacttccccatcatctgcgagtcctgcctcggcgacaacccctacgtccgcatgttgagagcagaatatgataaagagtgcaaaatatgtgcacgtccgtttactgtcttccgttggcgacctggccgggatgcaagatacaagaagacagagatctgccagacatgttgcaaactgaaaaatgtctgccaggtctgcctgctagatcttgaatatggtctaccggtccaggttagggatacagcactcgctattaattcaaatgatgcaatcccaaggagtgatgtgaaccgtgagtactttgcggaagagcatgatcgcaaggccagggctggaattgattatgattcttcccatgggaaggcacaacccaatgacaccattctgaagcttcagaggac

SEQ ID NO: 1819 - DNA, 476 bp, Oryza sativa
  unsure (1)..(476): unsure at all n locations
  Clone ID: uC-osflcyp034b12b1
tcgggcacgagggggagtcgtgcgcggcgcacgcggcggggaacctgtgccagagcttcctgctctcctacggcgtccgggtcggcatcggcatcctcctccgcgccttcaagctcgcccgccgcagatcctactcctccctcctcgacctcaagcaactggtttcggagaaagatctaatagtgagggaggaagcttgccgggtaggattactttttggaggattcactggatcatatcatgcacttcgatgtttccttcggagatttcggaaaaaggaaacaccatttaatgcaatattagcaggttcggtggcaggcttggcgatagtagcgctagatgattcaagtaggaggcgcaccctttctctatatcttctggcaaggcttgcccagtgtgcatataattctgcaaagtctaagaacagatttcacttttggggaagccatnggaggcatggagatgcattacttttt

SEQ ID NO: 1820 - DNA, 336 bp, Oryza sativa
  Clone ID: uC-osflcyp034c01b1
acaaatagggttagcgagaatcggcggcggcggcggcgagagcggagagagacaggagggggcggcggcggcggcgggggggcgcggagatgacggggaaggcgaagccgaagaagcacacggcgaaggagatcgcggcgaagatcgacgcggcgacgacgaacaggggcggcgggaaggccgggcagaaggaccggctggggcaggacaagggcggccacgccaagctcgagtgccccctctgcaagaccaccgcccccgacatcaagtccatgcagatccaccacgaggcgcgccaccccaagctccccttcgagcccgacaagctcaacaacc

SEQ ID NO: 1821 - DNA, 404 bp, Oryza sativa
  Clone ID: uC-osflcyp034c02b1
ttctcagctcgtcgacaaggcagtgagcacccaccaagatagcgggatgatccaccgagcgcgtgtaggcggcgtttgattctagattgttctagaaccgatcgagcgagcttagctagctagctagctgcatgctgcttcgatcgatcggtcgttgcctcatgcaggagttccagtccatgccggggctcgccgggcggctgttccgctgcctggcggcggttgacatccagcgcgcgcaggcgcagaacggcccggtgtcgcggtgctgcgggataccgaccccggaggtgttgaactgcccgcggagcgagtcgaccaacaccaagctgtgctactacaacaactacaacctgtcgcaggcgcgccacttctgcaagagctgccgacggtactggaccaag

SEQ ID NO: 1822 - DNA, 495 bp, Oryza sativa
  Clone ID: uC-osflcyp034c03b1
tggtgtgactctggccacgatggccaccccctccacctccgcctccggccccgcccccgccccagcgccggcctcctccgcctttcccctcaccgccgccgcgcgtttcctccgcgtctctgccttctccagcacgcgcgctttcgccctcgctgagcggcgccgcactccgcggtgccggctatccgaggtgggaggcggcgaccgctcggtagccgctggccgctcacccggcccccgttccttccacggtctcgttctctccggcaatgcagaaggagccatgcaatctcttagaagagagctaagttctgggatgcaccctttacgcgaaaactttgtggctttagtccatgtttttgccaagaatgatcttactaccaagggcatggagattcttgcagctatggagaggcagagcatcaaaagtgaagcggatacttttcgtccagcaaaaatacaagaagcttttggcatgaggagatgcagcaaatc

SEQ ID NO: 1823 - DNA, 143 bp, Oryza sativa
  Clone ID: uC-osflcyp034c06b1
gggggatctcggccaccgcccaccgccaccgccgcgccgccgccgcgcgcgcgcgcgcatcgcgtcacgatctcgcgagaccccgaaccccacgaaccctcgccgcgtcgccgcgggccgtcgcggtgggggaggaggaggag

SEQ ID NO: 1824 - DNA, 505 bp, Oryza sativa
  Clone ID: uC-osflcyp034c11b1
tggacctcaccaaccccgtccagaacgtcggcgagggcgccggcgcctccgagtacggcgtgcccttccgccgcctcaccggccactcccacttcgtccaggacgtcgtcctcagctccgacggccagttcgcgctctctggctcctgggacggcgagctccgcctctgggacctctccaccggggtcaccacccgccgcttcgtcggccacgacaaagacgtcctctccgtcgccttctccgtcgacaaccgccagatcgtctccgcctcccgcgaccgcaccatcaagctgtggaacaccctcggcgagtgcaagtacaccatcggcggcgacctcggcggcggcgagggccacaacgggtgggtctcctgcgtccgcttctcccccaacaccttccagccaaccatcgtctctggctcctgggaccgcaccgtcaaggtgtggaacctcacgaactgcaagctgcgctgcaacctcgagggccatggcggctacgtcaacgc

SEQ ID NO: 1825 - DNA, 517 bp, Oryza sativa
  Clone ID: uC-osflcyp034d01b1
tgttttgctctccggcggatccctcatcaagaacatcaggaagctcgcggagccaccgtacctggattcggtggattggagcaagtggcatgtgttctgggtggacgagagggtggtgcccaaggaccatgaggatagcaactacaagctcgccttggatgggtttctctccaaggtcccaattcctactggccaagtttatgctataaatgatgccttgtcagctgagggagcagcggatgactatgaaacttgcttgaagcaacttgtcaagaatggtgtgattgcaatgtcgcaatcgactgggtttcctaggtttgatgtcatgctcctgggaatgggccctgatggccatattgcatctcttttcccaggccaccctcttgttaatgaaaacaagaagtgggtcacctacatcaaggattctccaaagccaccacctgagaagattacgtttacatttcctgtgatcaactcatctgcgtatgtcgcaatggtggtcactggagctgggaaa

SEQ ID NO: 1826 - DNA, 564 bp, Oryza sativa
  unsure (1)..(564): unsure at all n locations
  Clone ID: uC-osflcyp034d04b1
gccagcgttggggatcaggcgtacggtttcttcaaggggccatggcggctgcggcgccgagttcggtggtagccggactcgtgtccgggctagggctggcgcgctcctcgttaacgcccagcgacggccgctctccttccctctcgcccctgcatccgccatggcccgcggccccgcggctcgtctgtaggagcagcggagcccggccccccagggagagagccgtggccgccgccgccgccgccgcaaattctccgcggcagcagcagcagctaggagagcatgagcatgaggaggctgtggcagcggcggccatggagccgnagaggagcagtccccatgaggtgagggaggagaagcnaaggtgctttcgatctcgtgcgccgtctcggccgtggcgccgtctacctcggctcctcagggtgccggccacccatccccattacctccatgccgccgagctctcaagggagatagctaggctgctggactgcaccacatggtccggagctggtacaggttttatggatgctgccaccaaggcgcttttgaggcggcaaaccc

SEQ ID NO: 1827 - DNA, 562 bp, Oryza sativa
  Clone ID: uC-osflcyp034d06b1
tttgtgtttttttatggtcgtcgcctgatccctcctccgtgcgacagatcgatgacggaaggaagagaaggggaggggaggagaggaatcttgtcgtgtctgtcatgtctgtcagtacaggagctcagttcaggaccaggagcgactagagtttctgatttgaggtaggtaggcgcacagattttctcttctttctttttttgttttttgtttcgttttgttttgcctgtctttttaccacctctctcctttctttgctaatgatggaggagtacattacatttagtacttttttctttttttgtgcctctccctatttattttatgtcttttttccttaacgcattaattctcatttttttttattctcttctaccttacttttttttattttttcattttatttgatctttttatcattttgagtttttctattttctaaacgtttttctaaatttccatcttgcttctcccccttttctttttccctttctttttcttttttttcccccccaacttatattttttttctttttttctctttttttttttcctctttttt

SEQ ID NO: 1828 - DNA, 569 bp, Oryza sativa
  Clone ID: uC-osflcyp034d08b1
gctcgccgccgtcgaaacccaaaatcttctcttcccgtacgtgagaagcgccaggtcgtcgtcgccgccatgggcgtggaggtgtgcgtcaaggccgccgtcggccacccggacacgctcggcgactgtccattctcgcagagggtgctgctgactctggaggagaagaaggtgccctacgagatgaagctcatcgacgtccagaacaagcccgactggtttctgaagatcagcccagaggggaaggtgcctgtgtttaacggtggtgatggcaaatggattcctgattctgatgtgatcactcaagtcattgaggagaagtacccaaccccgtctcttgtcacccctcctgagtatgcatcagtgggatcaaaaattttctcatgcttcacaacgttcttgaagagcaaggatccaaatgatggttcagagaaggcacttcttactgaactgcaggcactcgaggagcatctgaaagctcatggcccctttatcaacgggcagaacatttcagctgctgaccttagccttgcaccaaagctctaccatttctcagttgcttctgagca

SEQ ID NO: 1829 - DNA, 219 bp, Oryza sativa
  Clone ID: uC-osflcyp034d09b1
aaagaaattaaaaagaaaatcacggcgcgtgagcttgcagagacagcaatggtgagagttgctgccgccgcggcggtgctcgtgctggcggcggcggcggcggcggcggcggccatggccgccgagccgcccaccgatgacggcgcggtccgggtggcggcggggctgacgaagtgcgtgtccgggtgcggtagcaaggtgacctcctgcttgctcggc

SEQ ID NO: 1830 - DNA, 524 bp, Oryza sativa
  unsure (1)..(524): unsure at all n locations
  Clone ID: uC-osflcyp034d12b1
tgcgcacctccacagcattagccatcaacgaccagcatctcagctttgctcgccttctcgaagcttctgctgccatggcggaccagctctccgaagagcagattggagagttcagggaggccttcagcctcttcgacaaggacggcgacggttctatcaccaccaaggagctaggaaccgtgatgcgaagtctagggcagaacccaacggaggcggagctgcaggacatgatcagcgaggtggacacggacagcaacggcaacatcgaattcaaggagttcctgggcctgatggcgcgcaagctgagggacaaggactccgaggaggagctgaaggaggcattccgcgtcttcgacaaggaccagaacggtttcatctctgccaccgagctccgccacgtgatggccaacatcggngagcggctcaccgacgaggaggtcggcgagatgatcagcgaggccgacgtcgacggcgacgggcagatcaactacgaggagttcgcaggtgcatgatggccaagaaga

SEQ ID NO: 1831 - DNA, 489 bp, Oryza sativa
  unsure (1)..(489): unsure at all n locations
  Clone ID: uC-osflcyp034e04b1
tgcagcaggttgcccgcccggttgatcgatcaccaccagcaagctagagatggcgagacgggctgcatcggtggcgctggcgtgcgcggtggtggtggcggcgatggtgctcccggaggcggaggcggggcagaactgcatctgcgagtgcgtgaagctgtgcatgcggacgcggatcccgagcatcgaggcgcagtgctcgggcaagtgcagggagacggcgtgcgtgcggagctgcgaggaggcgtgcgcgcgcaagggcttccccgccctgcccggcgagggcatcggcgcctgcgagctggagccgctcacccccgacgaggcgcacatgctgcactgatcatcgagtcaccaaccaatcgatggcaagcctaccgccgtttccgtctccgnctctggctctgtctctgggtatggtactgtctccgcctcttctgcgctgntgtatactntgatatgtgtactacatctaccacaccggtcaaa

SEQ ID NO: 1832 - DNA, 151 bp, Oryza sativa
  Clone ID: uC-osflcyp034e07b1
cacgcactcacgcgcactgcacgccgcaacacaacgcgctcgcctcgcctcgccccgatcggtggtggtgctcgccgtcgccgggcggcgctagggtggccggagaggctccggagagtaggaggaggaggaggagccggagatgaggggg

SEQ ID NO: 1833 - DNA, 515 bp, Oryza sativa
  Clone ID: uC-osflcyp034e08b1
tgtggtttttggccgggagataactgttgttcttgctgctgagtcacggaaaaggccagaagagatgcgcagtagagccagagtcagagggtactctgaccatgaaggccgtcgttcatcccattacgggaggtctcgttcacgttcgcgttcccgctctccccgttatcgtggtcgtccacggtcaaggtcatactctcctgctccaagacgacgagatgactattccgcatccccacagagaaaagacacacatcgtgcaaaatctcctaggcgtcagccaaaagaacatgaagtagacaagaagcggagatcctattctcctgccaataaagatggggaccggcgtgatgctgataatggttatgaaaagaggtcgtcgtcagctgacagcgatggatccccttcgcaccggaggtcctccaggcaattcttaggatcgtctccaggatcccgctccaggtctgccgacgggtcttccggccgcagtgactaacagaagaacactgcgcacg

SEQ ID NO: 1834 - DNA, 517 bp, Oryza sativa
  unsure (1)..(517): unsure at all n locations
  Clone ID: uC-osflcyp034e09b1
cgcaaatgacgccacgagattgcttgggaattacttcggccctccttgcatatcggtgactcctctccaagtgctgcaaggctatgtgaaggacaccaggttcctagctgggtgcaactcggctgcctgcaatgtgtcatcaattggtgaagcggcgcaattggcaagttcagtggactacgttgtgctgttcatgggattagaccaagatcaggagagggnagaggttgataggctggaactgtcgctcccaggaatgcaggagaacctcatcaacacggtcgctaacgcggcaaagaagccgngtgatcttggtgctactgttggggtggtccaagtggatgtgacctttgctaagtataatcccaagattggggccatcctgtgggctggttaccctggcgaggctggagggattgcgattgctcaggtcctctttggagagcacaaccctggtggaaggctgccagtgacctggtatccaaaggagttcacgagcgtgcccatgacagatatg

SEQ ID NO: 1835 - DNA, 430 bp, Oryza sativa
  Clone ID: uC-osflcyp034f01b1
aaaagtcaatccacgccaccatcgatctctctatccaatccaagcgcgcaaatcaatggcagagcatttcagccacgccggcatgtacatcggctacacggcagacgccgccgcgtcctcctcctcctcctcctcgtcttcgtcgtcttcctcctcggagatgcttcggttcgacacgggctggcccgacgagacacctgcgccatcctccgtggcggggaggaggaggagcgcgggcggtgatcatcgtcaaggtcggggacagacggaggcggcggcggcgttcatcggggtgcggaggcggccgtggggcaggttcgcggcggagatccgggactcgacgcggaacggcgcgcgggtgtggatcggcacgttcgacagcgccgaggccgccgcgatggcctacgaccaggccgcgctctcgcgcgtg

SEQ ID NO: 1836 - DNA, 569 bp, Oryza sativa
  Clone ID: uC-osflcyp034f05b1
ttcactcgatcgcagcgagacccaccctcaagctccaagctccaagaaccatggccgccacctcgctgtcgccgccgaccgtggccgggctgcggctggcgccgtcgccgcgcgtgcggtcgccgtctgtggcgttcagggcggcgccggcgaggaggaggtcggtggcggcgagggcggagctgagcccgtcgctggtgatcagcctgagcaccggcgtctccctgttcctggggcggttcgtgttcttcaacttccagcgggagaacgtggcgaagcaggtgccggagcagaacggcaagacgcacttcgacgccggcgacgagcgcgccaaggagttcgccggcctgctccggtccaacgaccccgtcggcttcaacctcgtcgacgtcctcgcctggggctccctcggccacatcgtcgcctactacatccttgccacctgcagcaacggatacaacccaaacttcttctgatcattctcatcctggatggatgcaatgtaatctgaatggatctctggtggttctacgtgaatatgaatgagatgggtaaaaaagaaaagaaaa

SEQ ID NO: 1837 - DNA, 447 bp, Oryza sativa
  Clone ID: uC-osflcyp034f07b1
ttttcaatagatcaacattttgtctcctcatcagatggcccaacagtgccaggtgttcagtcccttcctgcagtgcgcggtaaaggtcctttggataatattggtttgagactgtctcgaccagattcatctattgctacggaagcacgcatgaagcttaaagtcacaatggttctaaggagaggacataagttacccatattcaatattctctccttcaactaactggcttatttgttgcttccattggttcctacatttctatttgatttcgttcagcaagtgttgattcgaccaatctatagctcctcaatttgtgattgttacattaggagctggtcctgaagatttctcatcttcacattcgatgtgttcaacgttgtacttcccccaccaagtcaattgccaggcatttgtgatgtgctgatttgcctggaattatgggta

SEQ ID NO: 1838 - DNA, 518 bp, Oryza sativa
  unsure (1)..(518): unsure at all n locations
  Clone ID: uC-osflcyp034f08b1
atcccctgagtctacagaggaagaagagacagaagagagtgaagagaagaagcccaagacaaagacagtaaaggaaaccactactgagtgggagcttctgaatgatgtgaaggctatatggcttcgtagccctaaggaggttactgaagaagaatacacaaagttttaccactcacttgctaaggactttggtgatgacaagcccttgtcttggagccacttcactgctgagggagatgttgagttcaaagctttgctctttgttcctcccaaggctccacatgatctctatgagagttactacaactctaacaagtcaaaccttaagttgtatgttagaaggggttttcatctctgatgaatttgatgagcttcttccgaagtatctcagctttttgaagggtctcgtcgactcggacacattgcctctcaatgtatcacgagaaatgctccacaacatagcagcctggagaccatcaagagaaactaatncgcaaagttttgacatgattagaaac

SEQ ID NO: 1839 - DNA, 498 bp, Oryza sativa
  unsure (1)..(498): unsure at all n locations
  Clone ID: uC-osflcyp034f09b1
ttagtctcaagtgttcaattagctagctctcttttgcttagccatgagtgcagcaatggctgcctttgccttcctactagtcatcgccatcgtcttccccctcgcatccgcattcccttcccctcctgtttcatggggccaacagcagctagaccctcacttctacgaccactcgtgcccacaagcacagcaaatcgtggcatctatcgtcgggaaagcgcattaccaggacccccgcatggccgcatccctcctccgtctccacttccacgactgctttgtcaagggctgcgacgcgtcgatcctactagacagcagtgcgacgatcatgagcgagaagcggtcgaaccctaaccgggactctgcgagggggttcgaggtgatcgacgaaatcaaggcggcgttggaggccgcttgccacacaccgtctcttgcgctgacatccttgccctcgccgngcgtgactncaccgtcatgacgggaggcccccggtggata

SEQ ID NO: 1840 - DNA, 572 bp, Oryza sativa
  unsure (1)..(572): unsure at all n locations
  Clone ID: uC-osflcyp034f10b1
cggacgcgtgggatgtcttgctgcggcggcaactgcggctgcggcagcggctgccagtgcggcggcggctgcggcggatgcaagatgttccctgatgtggaggccacagccaccaccaagaccttcgtcctcgctgctccatccaacaaggcgagctctggaggaatggagatggcggtggagagcggcgagaacggcggctgcggctgcaacacctgcaagtgtggcaccagctgcagcggctgctcctgctgctcctgcaactgaatctatcgtcgtcgtcgcccggctgcatgaggatttatcgtatggatgctgctactgtcgatcagagttttgatcgaggccttaatttgcttgcattagtacccagcttatatgtaggcaggccttgccttttgctctgacgcctaaataaaaccgtcgtcgtcgttgtcagtgtgtgcgtgtgtcgatcaatgttggatggatccctagctagcttggatggatcatctatcatcatggtgatctcatcatgtactnctgctncatctnctcatgcgtgccaggctttttaatataatctacct

SEQ ID NO: 1841 - DNA, 278 bp, Oryza sativa
  Clone ID: uC-osflcyp034g02b1
tgtttttctaggtgctcgtcattgttgccaaaagaggcagaagcatgtttacttgttgcctggcgcttgagctctgccgctttgcaaggctggatatgtaataccggtgttactgtctgttgttccttttgtggtttgggagttaagatgtttttgcacttccctgcttttgtattgtatgagacgctagaacttgttttggattcatcttttgcttcagtactctgttcagaaaggttttgttatttgagcacatgaactacagttatttcgaatgg

SEQ ID NO: 1842 - DNA, 525 bp, Oryza sativa
  Clone ID: uC-osflcyp034g03b1
ttacttgttacgcctgttggtgttcgagtggtaggagcccttgggcttttccaggttcagatcgacgcctccttcctctggacattgttgctagttggtgatggctgagcaggctaatcaaccgactgtccttcagaagttcggtggccagttccaccttggctccagcttttctgaaggtgtacgggctcgcaacatctgcccatctgtctcatcctatgacaggcgctttaccacaaggagctacatgacccagggccttgtcaatggtggcatcaacgtcccaatgatgtcgtcctctccaatttttgctaatgctccagctgagaaaggtggcaaaaacttcatgattgatttcctcatgggtggagtgtcagccgcagtttcaaagactgctgctgctccgattgagcgtgtgaagctgcttatccagaaccaggatgaaatgatcaaggctgtgaggctttcagagccatacaagggtattggggcctgctttggacgcactatcaaggatgaggtttt

SEQ ID NO: 1843 - DNA, 494 bp, Oryza sativa
  Clone ID: uC-osflcyp034g05b1
ttgacgcgtgggcggacgcgtgggaacgaataaggagaaggataatgtactatcacaatgaagctttcaagaaggttgatgtcatagcaactcctacaactggcatcactgctccagaaataccacaaagttctctgaagttaggagagtccaattacgttgtgtcagcttacctgatgcgattcgtgatagctggcaatcttcttggtttgcccgcgataactgtacctgttggtcatgataagcaagggcttcctataggcttgcaactgataggtcgaccatggggcgaggctagcttattaagggtggcttctgcaatcgaggagctctgtctgaagaagcggaaacggccatctgcatttcatgacatcctgaacgcttgagttgacaaattatgtatccatccatcaatgatgtatggcacttggtgctacgcttttattcagaacatttgtacagtgcagatgattcagtctttcctgggggtggat

SEQ ID NO: 1844 - DNA, 207 bp, Oryza sativa
  Clone ID: uC-osflcyp034g07b1
tttctcccttggtatgtaaatatgatggatgtgtagataaataaaatccagtttgttgttgtgtttcctgctgtgtgaggcgttaagagaacttctggcgtgctttgatttggagcagttaccatgactgttggactggtttttgtatgtattgatggacaaagctagtaagcattaatctatgagctgcagttgttttccttgatc

SEQ ID NO: 1845 - DNA, 463 bp, Oryza sativa
  Clone ID: uC-osflcyp034g08b1
ttcggattacaaatttctgaaccctggcttcgtgaataccaggtccttccatcacgaactcatccacacatgcaaatgaatgcatttggtggttatattttgagtggcattaggatacacaatggcgatgcatgtaatggaagcaagtgaatgaccaagcccgtcaatgcgtgcttctatccttggaattaaaatatggtcaccattttacacggtaacctgaaacaatagacacaattttgtagtccagagaagccaacttttatgctgaagcgacttatgtgattagtagaaattggtgcgcatatagagaataactagtgcgagttctagaagaaaatgaaatgagcatgtacaccaaatccatgtagcttacataacaatgttgtgtttgtttatcaaccaaattgaaacgcttgtggactttgagatatttgttaaggtgtgctacttactatttgtt

SEQ ID NO: 1846 - DNA, 517 bp, Oryza sativa
  Clone ID: uC-osflcyp034g11b1
tttcttccattttcaggtgcggtaccagagcagaaagaggctggccgagcagcggccaagggtccgtggacagttcgtgcggcaagctgtgcaagaccaacaacagcagggtggtgggcgcgaagcggcagcggacagatgacctacctacctacctacgcgatggctttggactccaaacagctaattaacagttagtagacaacagataatgattcttcttccttggccgatcgatcaacaacatcccatgcatccggcatcccaccactattgattccatcatatttagagtctggaataaataaggaactcctatcctatttatcccctatctatatatgaagatatgataatggtgatctgcgttactactagtagaagaatatggtgtggctgactccacttcaggtggacctataatactactccattagtatgtgcctgtggaggcaagctcgaacgtactacttcatatttaagcatgtcatgtactgctactatgagacgagagtgc

SEQ ID NO: 1847 - DNA, 472 bp, Oryza sativa
  Clone ID: uC-osflcyp034h02b1
gtcgttttcgtactcgcctctctccgcgccctcctccgccgccgctcgccgccgttcgtctccgccgccaccgccgccgccatgagggagtgcatctcgatccacatcgggcaggccggtatccaggtcgggaacgcgtgctgggagctctattgcctcgagcatggcatccagcctgatggacagatgcccggtgacaagaccgttgggggaggtgatgatgcttttaacaccttcttcagtgagactggtgctgggaagcatgtcccccgtgctgtcttcgtcgatcttgagcctaccgtgattgatgaggtgaggactggtgactaccgccagctcttccaccctgagcagctcatcagtggcaaggaggatgcagccaacaactttgcccgtggtcactacaccattggcaaggagattgttgatctgtgccttgaccgcatcaggaagcttgccgacaactgcactg

SEQ ID NO: 1848 - DNA, 315 bp, Oryza sativa
  unsure (1)..(315): unsure at all n locations
  Clone ID: uC-osflcyp034h03b1
ttcgtttggagacggcgtcgacgccgcgcgggtgggtgttcccgaacaacgggaaggcgctgcggatcggggtgccgtaccggacgacgtacaagcagttcgtgtccaaggacgcgggggggccggacggcgcgagcgggtactgcatcgacgtgttcaaggcggcggtggcgctgctggcgtacccggtgccggtgtcgtacgtggtggtgggggcggngtttgaagaacccgagctacggggagctggtgcagcgggtggcggagggggtgctggactcggaggagggggacatatcgatcgtgaccaacaag

SEQ ID NO: 1849 - DNA, 444 bp, Oryza sativa
  Clone ID: uC-osflcyp034h07b1
ttttctgacgagtttttacctgccccagccgccagccgccgggcgcctaggccgaggcgccgtcgacgtgccagcccagccgcctgcccgcctcgccggacgaccactcgccctgcgccccgtcgcccgtggcggcacggccccccggccgccgcgcgcactcgcgcgtagcgcccgctgacgctgtcgtgacgccgcgtcgccggctgggggcctgcccggtccggcgaccggcggtccccggtcaccggtcagagcagaactgcagcagcgttatataatggatcctaaaatgaagcaacttcaagaagcactggctgacattgaaactgatgcagagcagcttcttctggcaaggcatcagttaggggaaaacgataggataaggaatggtaatagggaagcactgacagccctccggaaagagccaagacaaccaaacta

SEQ ID NO: 1850 - DNA, 458 bp, Oryza sativa
  Clone ID: uC-osflcyp034h09b1
tcagaaacaaacccctctcactcccactaccatggatccttgcaagttccggccgtcgagctcgttcgacacgaagacgacgacgacgaacgcgggagctccggtgtggaacgacaacgaggcgctgacagtggggcccagggggccgatcctcctcgaggactaccacctgatcgagaaggtggcgcacttcgcccgggagcgcatcccggagcgcgtggtccacgcccgcggcgcctccgccaagggcttcttcgagtgcacccacgacgtcaccgacatcacctgcgccgacttcctccggtccccgggcgcccagacccccgtcatcgtccgcttctccaccgtcatccacgagcgcggcagcccggagacgatccgcgacccgcgcgggttcgccgtcaagttctacacccgcgagggcaactgggacctcctcggcaacaacttccccgttt

SEQ ID NO: 1851 - DNA, 501 bp, Oryza sativa
  unsure (1)..(501): unsure at all n locations
  Clone ID: uC-osflcyp034h11b1
tcggcgctcactgccctccgcgacgaggtcagcgccggcacgcgcacgggcccctgggcgctcgtcgacgacctgctgcagtacaacagctggttatacattcccccggcatcgcccttagctcgggagatcatcgaggctacacatgaggacgggcacgagggtgtcaagcgcaccatgcaccgcctccggcgcgagttccacatccccaacatgaagcagctcgtccaggactgggtacgctcctgcgcagtgtgccaacgctacaagtccgagcacttgagcccggccggcctcctgctgcccctgccggtgccccagggcgtttggaccgacatcgctctagatttcatcgaggcgctaccacgagtgcgcggcaagtccgtcatcctgacggtggtggacaggttcagcaaatactgccacttcatcccactggcgcacccgtactccgccgagtccgtcgctcaagccttcttcgccgagatcgntcatctacat

SEQ ID NO: 1852 - DNA, 424 bp, Oryza sativa
  Clone ID: uC-osflcyp034h12b1
taaagattatggcttcagctgctcctatggttaagcctgtttcactggaacttggtggaaaaagtcctatagtggtgtttgatgatgttgatgttgaaaaagctgttgagtggactctctttggttgcttttggaccaatggccagatttgcagtgcaacatcgcgtcttattcttcataaaaaaatcgctaaagaatttcaagaaaggatggttgcatgggccaaaaatattaaggtgtcagatccacttgaagagggttgcaggcttgggccgttgttagtgaaggacagtatgagaagattaagcaatttgcatctaccgccaaaagccaaggtgctaccattctgactggtggtgttagacccaagcttctggagaaaggtttttatattgaacccacaatcattactgatgtccataca

SEQ ID NO: 1853 - DNA, 526 bp, Oryza sativa
  unsure (1)..(526): unsure at all n locations
  Clone ID: uC-osflcyp035a02b1
caaaatctacttctcgtgggtagaagagagagagagggaggcgatttaaaccaagaagagggccgggatcgtggtggtgttcgacttcgacaagacgatcatcgacgtcgacagcgacaactgggtcgtggacgggctcggcgcgacggaggagttcgagcggctgctgcccaccatgccgtggaacaccctcatggacaccatgatgggcgagctccacgcgagcggcaagtcgctcgccgacgtcgcgggcgtgctcaggtcggcgccgctcgacccgcgcgtcgtcgccgccatcaaggcctgctacggcctgggctgcgacctccggatcctcagcgacgccaaccgcttcttcatcgacaccatcctcgaccaccacggcctcacgggttacttctccgagatcaacaccaacccgagcgccgtcgacgccgncaccggccgtcttccgatcgcgccgtaccacgacttccacgccggcccgcacgggtgccgcctcgggatctgcccgccaacatgtgca

SEQ ID NO: 1854 - DNA, 437 bp, Oryza sativa
  unsure (1)..(437): unsure at all n locations
  Clone ID: uC-osflcyp035a03b1
ggaaattaaaggaagagaggaggaggaggaggaatatggcgataagccaccaccgccggggggggaggagctctatttatgccctcgcggcggcgcctcctctccccgcacccccccgcctcgccgctcgccaccgcgccccagaggctgggaacttcgaggaggagcaggatccatggagggtggaggcgcaagaaatggctcgacgaccggggcggcgcggacaggggggagtgggggtgatgctgctgctggtggtggtggtggctccnccgggaacgggaagccgctgcccccttgctgcgtcaagggcagggcggcggctcctgaatccgaggccaagtgccacgccaccgtggtgtccggatggttcaccgagccccggtctcgcgggggataaacgagcgaagtgcactattacaataaccctatgtggc

SEQ ID NO: 1855 - DNA, 444 bp, Oryza sativa
  Clone ID: uC-osflcyp035a04b1
gcgaggctacatcggcggcgagaggcgggctagggtgtggagcaccgacaccgcgcgccatggccgaggccaaccagtaccagatcctggtgcggctcctcgacggccgcacacgctgcctccgcttctcgacgacgaccgtatccggcgcggcgctcctcgacgccgtctcggcgctctcccgcgtgcccgccgcgtgcctccgcctcgtcaccggccgcctcgacgtctcgccgtcctccgtcctcgcctcctccgccgacggccgattcccctccgcatccgcgctccttcgccttcgcggaggcaagggcgggtttggctcgctcctccgtggcgccgcctccaaggccggccagaagaagaccagcaacttcgacgcctgccgcgatatcaacggccgccgcctgcgccacgttaacgccgagcgcccgctctaggagt

SEQ ID NO: 1856 - DNA, 535 bp, Oryza sativa
  Clone ID: uC-osflcyp035a09b1
accggtaccagtttgtgggaaccataggctttttgggtgtagtctctcttcaactattactgcaagaattgtatctcttgcatgtctaactagcctgcacaacgcaaggcatatacacgggtgattcacacgaacaaatcaaaatgaacaagtgcaaaaaaaaaaaaaaatcctcgtggatcatcagaccacgccttgctggtctcgcacgacggcgtagttgatgacgcgggcaacggtgcccatcgatggccggaacgtagggtcgtactgcaggcactgcaccgcgattctccccagcttgagagctccggtaggaggatacttgtcgccaagattggggtcgatgcagtcctggaccctgtcttcagtcaaaattggagttgcccagttaaccaggcttctctgaccctgcggcaacgttcgggccagcggctttctccccgtcaagagctccagcagaacaatcccaaaactgtagacgtcgctcttatcgttcatctgaccagtcattgcatacctggaacatccccaa

SEQ ID NO: 1857 - DNA, 478 bp, Oryza sativa
  Clone ID: uC-osflcyp035a10b1
cgctcatcgccatctctctctcagctctcacaggtgactgcatcaatggccgcgggcaccatggcgctctcctccccggtgatggcccgcgcggcgccgtcgacctcctccgcgctcttcggcgaggcgcggatcaccatgcgcaagaccgccgcgaagcccaagccggcggcgtcgtcggggagcccgtggtacggcgccgaccgcgtcctctacctcggcccgctctccggcgagccgccgagctacctcaccggcgagttcccgggcgactacgggtgggacaccgcggggctctccgccgacccggagacgttcgccaagaaccgggagctggaggtgatccactcccggtgggcgatgctgggcgcgctcggctgcgtcttcccggagctcctcgcccggaacggcgtcaagttcggcgaggccgtgtggttcaaggcgggctcgcagatcttcagcgagggcgggctcgact

SEQ ID NO: 1858 - DNA, 488 bp, Oryza sativa
  Clone ID: uC-osflcyp035b01b1
gaatcggtgctaatggcccagaacaagaccatggcgctgctccttgccacccttgtggcggtggttgcggtagtacgagccaccgaagagaaggatatagaagaagctgtgtgctcagagcattgcaacgacgaggaaaaagaaggcaccatcgaccacaagcactgtgtagacatctgcatcctcacgaacagggaactttttggggccttggagagaggaatgaagccctcgatggagcaattcagcgctttgtgcaatgaggggtgtagcaaagaatttaaggaggatcctgccaccaacaagaagtgcgtagacagttgcatcgtcgatgctaaggaactcaatggacacttagcgaaaggtggcgcttctagtgttcccgcacgtgcatgattgtgtcgagctgcacatctgttccttcatccatgatcgagggacgatacccattaatggttcccacccagcggtcggccttgtattacatt

SEQ ID NO: 1859 - DNA, 420 bp, Oryza sativa
  Clone ID: uC-osflcyp035b02b1
cgctcatttccatctctgtctcaggtctcacagctgactgcatcaatggccgcggccaccatggctctctcctccccggtgatggcccgcgcggcgccggcgacctcctccgcgctcttcggcgaggcgcggatcaccatgcgcaagaccgccgcgaagcccaagccggcggcgtcgtccgggagcccgtggtacggcgccgaccgcgtcctctacctcggcccgctctccggcgagccggcgagctacctcaccggcgagttcccgggcgactacgggtgggacaccgaggggctctgcagcgacccggagacgttcggcaagaaccgggagctggaggggatccactcccggtgggccatgctgggcgcgctcggcttgcgtctgccggagcttctcgaccggaacggcggtaagttc

SEQ ID NO: 1860 - DNA, 386 bp, Oryza sativa
  Clone ID: uC-osflcyp035b04b1
ctctcacagctcactgcatcaatggccgcggccacgagggcgctctcctccccggggagtggcccgcgcggcgccgtcgacctcctccgcgctcttcggcgaggcgcggatcaccatgcgcaagaccgccgcgaagcccaagccggcggcgtcgtcggggagcccgtggtacggcgccgaccgcgtcctctacctcggcccgctctccggcgagccgccgagctacctcaccggcgagttcccgggcgactacgggtgggacaccgcggggctctccggcgacccggagacgttcgccaagaaccgggagctggaggtgatccactcccggtgggcgatgctgggcgcgctcggctgcgtcttcccggagctccttcgccggaacg

SEQ ID NO: 1861 - DNA, 481 bp, Oryza sativa
  Clone ID: uC-osflcyp035b07b1
cttgattgaagctagacctcatctagttcttggtttgttatcccaaatcataaagatacaactgttagctgatctgaatttaaagaagacacctcagttggcagagttggtggctgatgataatagcaaggaagcagaggagctagtcacattagcaccagataagatgttgctcaaatggatgaactttcatcttaagaaagcagggtacaagaaaactgtgacaaacttctctactgatgttaaggatggcgaagcatatgcttaccttctcaacaccctagctcccgaacttagctccacaaccatgatagaaacttcagatcctaatgaaagggcaaagaaagttcttgaaactgcagaaaagctcgagtgtactagatatgtaacgtctaaagatattgtggagggttctgcaaatctcaacttggcttttgttgctcaaatattccaccacagaaatggcctgtcagacaacaat

SEQ ID NO: 1862 - DNA, 541 bp, Oryza sativa
  unsure (1)..(541): unsure at all n locations
  Clone ID: uC-osflcyp035b08b1
agatttgcatattaaagcctcccatcaacttcttgcgcacaccctccctttggctttcatctgcatctattcagttgcagattgagagccaaagacattatcttgattctatcaggagggttgtgctagcgaattcttgttagcaacaaattgacatattgctcggcacatccccaccgagaataccaagatgacgttctctggtacacaggacaagtgcaatgcttgtgacaagaccgtgcatttcattgatctccttaccgcggacagtattccctaccacaagtcttgcttcagatgcagccactgcaaaggcacactttcgatgtgcagctattcgtccatggatggggttctttactgcaagacccattttgagcagctattcaaggaaacaggcaccttcaagaagaacttcccctcaggtacaaaggcaaacagtgaacaggctaagattcccagcaagctgtcctctgtgttctgtggaacccaggacaagtgtactgccttgcagaagactgtgtatncattggagaagatg

SEQ ID NO: 1863 - DNA, 522 bp, Oryza sativa
  unsure (1)..(522): unsure at all n locations
  Clone ID: uC-osflcyp035c01b1
gcaatgtttcagaaatctggaaaaactagaacttggatgctgtgatgtgctcctgttctggccactgagagaattccacagcctagagtcgttgaaggaattaatagttaagtcatgtaataatctaaaagttaagccagtcgacggagagccgcacaaggacagctcctaccacatcttacctcgctacaaatagaagattgccaagacttaacagagctttttaatctccccctatccctcaagtctattgacatcgacggctgccctaagttgaagtctgtatgggatgaacaggaggatactgaattggggacaaacacgcaagacccatcaccatcagcaagggtgcatagtctaccatgcctagaaacgttttatataaacgattttgataacttaccaaggtttcgcgatctcccgtcatcgctccagtcattggcactgtttaactgtcctaaggttcagtttctatcanggaagctggatgcactgacatgtctagctatttctggatgcgag

SEQ ID NO: 1864 - DNA, 389 bp, Oryza sativa
  Clone ID: uC-osflcyp035c03b1
gcgtgttctcagcgcaggccaacggcgtggacgacgggcgccctttatggatcgccggtgccccgcgcgccacagcttccatccggcgactgcaaggccgcccaagccaagagggtttctttgcaagctttagccgctcgacgttcattgacagaacatgcctaaaataaagacaagccgtgtcaaatatcctggaggatgggagcttattgaaccaactatccgtgagttggaggccaaaatgagggaagctgaaaatgacacacatgatgggaagagaaagtgcgaagccctctggccaattttccgtatttcccatcaaagaagtcgctacatatatgatctttattacagaaggaaggagatatcaaaagagttgtttgagtttt

SEQ ID NO: 1865 - DNA, 545 bp, Oryza sativa
  Clone ID: uC-osflcyp035c04b1
cacttctctgttatgtaacaccaaaggagcaccttggggggcctaaccgtgatgatgttaagacaggcgtgatatcctacaaaattgctgctcatgctgctgatttggcaaagggccatccctatgcacaagcatgggacgatacactaagcaaggcaagatttgagtttagatggttggatcaatttgctctatctctggatcctgtgaccgctatgtctttccatgatgaaacattaccatcggagggtgccaaagtggcacatttctgctcaatgtgtggcccaaagttttgttcgatgaaaatcacagaggatattagaaaatatgctgatgaacatggttacgggacagtggaggaagcggtgatacaaggaatgaatgctatgagtgctgagttttcagctgcaaggaaaacagtcagtggggagcaacatggtgaagctggaggggagatatatgttccagaaagctttacagcttggcaataagatcgtcttggttcctttactccgggtgagcgtttttagctcactcctaaccat

SEQ ID NO: 1866 - DNA, 564 bp, Oryza sativa
  Clone ID: uC-osflcyp035c05b1
ggcgtctgtactcccggcctccggcgaacccagcagccgccacctctggcggctccaatcacacagaccagatgatggccgcggcggccgtctaccggcgggtgctcaaggcggtgcagaagcacgtcggcgggggcgactccaagaagcacttccgcgagttcgtcgcctccgagttccgccgccccactggcacggacgccgacgccagagcgcggctgcggctcgccggggattacacctacctcctcgccagcgtacaccaccacaaggacctgctattctcgtataatatagctgtggaccgatcagaggagatgaagaagatattgaacaaatctgctgctagtgtaggccttcagcttccagatgtctatcaggcgtgaggaacttcatttttgcagaaatctgcaatctttggtactgccttttagcgacgattttcttccagaagctttacttgcaaccagtaattcgctttcaattccagatttaggtaggctgaaaggttacttgtaggtgtagcagctgatttttttaccaaatatgagcatggaatatttt

SEQ ID NO: 1867 - DNA, 477 bp, Oryza sativa
  Clone ID: uC-osflcyp035c06b1
ggatgttcctgaattttacagcactgcattgaattcagagacaacagcaattaagactgctggctttaaaacatttcctgattacctggtgttgcagatgcgcaagtttgtaatggaagcaggatgggtgccaaagaaactagatgtatacgtagatgtgccagatataattgatatctcgcacatgcgcagcaaaggcatacagcctggtgaagagctactacctgaaggagcttctggtgataacaaagctgaacctgttcatcctgttgccagtgaggacattgtatctcagctggcaagcatggggttcaattatcttcattgccagaaagctgctattagtacatcaaacacaggagttgaggaggcgatgaattggcttctctcacacatggatgatccagatatcaacgatccaatatctaaagattcacaggctgctgaacaaactgttgatgaaactagcgttcaaac

SEQ ID NO: 1868 - DNA, 443 bp, Oryza sativa
  Clone ID: uC-osflcyp035c07b1
ctagtcgttcctcgccgacccctccccggacagggggaacgtcggcgtcggcgcgtaccgggacgacagcgggaagcccgtggtgctggagtgcgtgcgcgaggcggagcggcggatcgccgggagcatgaacatggagtaccttccaatgggtggaagcataaagatgattgaagaatcacttaaactggcctatggggagaactgtgagttcatcaaggacaagaggatcgcagcagtgcaggctctttcaggaactggtgcatgtcgcctctttgcagatttccagaagcgtttcttgccagattcacagatttatatacccacacctacatgggccaaccatcacaatatttggagggatgcccaagtaccacaaaagacatttacctattaccatccagagtcaagaggacttgactttgcaggcctaatggatgata

SEQ ID NO: 1869 - DNA, 511 bp, Oryza sativa
  unsure (1)..(511): unsure at all n locations
  Clone ID: uC-osflcyp035c08b1
ctcatcattttccccaaataataatagaggaagggggggaacacataagcagccacgtcatccatggcctctctccgcaccattccggtgatcttcggcatcctcttctatgtccttgccagcactgccactgccaccgacgcaccggactacgtcgtccaaggccgtgtctactgtgacacgtgccgcgccgggttcgagaccaatgtcaccgagtatatcaagggtgccaaggtcaggctggagtgcaagcactttggcaccgacaaggtcgagcgtgcgattgacggtgtgactgatgagaccgggacatacaagattgagctcaaggacagccatgaggaggacatctgcgaggttgtcctcgtccacagcccccttgcaaactgctctgaaatcgaggccgaaagggatcgtgcccgtgttttgctcaccaggaatgtcngcatctgtgacaacctgcgcttagccaacccactcggctacctcaaggacatcccactgcccatct

SEQ ID NO: 1870 - DNA, 550 bp, Oryza sativa
  Clone ID: uC-osflcyp035c09b1
gaaggagaaaggaattgagccggaattctcacgggatttcaaggcttcatttctcaggcttctgccattgcgttcgatgtcacgtttatggggatccttgatggaagtggaacttccagtgttcatgcgccctgccatctataaagcatgggctagagccttccactccagtatgtcttctcctgttatgatgctttcttatattacagttcattaggtaatttcactctgatgattgacttgcattttagagtatctagtgcagaggttgtgtgcctgcacactgctagattgactttgaaatatatttttttgaccaaaatgactttgaaatatatgcagttttagactttttagtgcattggaatgagtagtacacattattcttgatataacacatgaatacttgctattcccgtgaggcaagtttttggcaagaacttgcttctccatagatagtgcaatgcttctaagaaagtcatgcttagttagtagcacttctttcagaaattatgtgccatctttctgaataaaatgatgattgttgagt

SEQ ID NO: 1871 - DNA, 565 bp, Oryza sativa
  unsure (1)..(565): unsure at all n locations
  Clone ID: uC-osflcyp035c10b1
cggacgcgtggggttggtagcagttgcaaaagagcgtgctgcatatggtgatactgcagaatcaacggctggtcagggggtcaaactgttgaatatactcagaaaatattgtgaagccttttcttccatggtggaagggaaaaataaagtgtcaacagatgaactatctggtggagcaagaatccactacatttttcagtcaatttttgtcaagagcttggaggaagtggacccctgtaagagcataactgatgaagatatccgtacagccatacagaattctgacggtccaaagggtcctatgtttctgccagagttgccgtttgagattcttgtgcgaaggcaaataagtcgtttgcttgatccaagccttcaatgcgcaaattttatctatgacgagctagtcaagattagccgtggttgcttaaccagcgagctgcagaaatacccgattcttaaaaagcggatgggtgaagcagttagcaatttcttgagagatggtcttcgacctgcagagacaatgataacccatattatngagatggagatggattacataaatact

SEQ ID NO: 1872 - DNA, 468 bp, Oryza sativa
  Clone ID: uC-osflcyp035c11b1
agctggagcaggagctgtacgacctgaacgcggggggggagagggacggcctgcagtgcgcgtacccgcggcggcggtcgagcagggtgtcggcgacgtcgaggaggtccaagccccggcggtcgtcggtgtccgcgggcgcatggaacccgcgctcgccgtcgttcaccatcaagaggaagaggaaggtgatgcccaacctcctgaagctgatcaagaataaaagaggcggcaaaaagaacatcaactgatcgagctgcgtagattgtcatgaccgctcgcgacgctgcgaccgtttttcttgttctgatttccggcggcgcagcacaagaatgttttgatcatcagtttcgcgggattaatggcactgatactgtatacttgggctagatgtaagtacatattaagctggccatccgttcactacataatgtaacctgcacgttcctaataaaattaattatcttt

SEQ ID NO: 1873 - DNA, 506 bp, Oryza sativa
  Clone ID: uC-osflcyp035c12b1
ctcctgtccttagtcctgctcaagaaacaagagggggagaagttgaccttctatgatgggccattcaaagcatctgcaattgccgattttgtatctgcaaacaagcttccgttggtcaacaccctcacacaggaaactgctccttccatttttgacaatccaatcaagaagcagattttactatttgttgttgcaaacgaatcgtcgaaatttctgcccatctttaaggaagcatcaaaatcattcaaggggaagcttttgtttgtctttgtggagcgtgacaatgaggaagtaggtgaaccagttgccaactactttggtattactggacaagagaccacagttcttgcttacactgggaatgaagatgctaggaattttttccttgatggtgaaatatcggtagagaatattaagagatttgctgaggatttcttagaggataagctcacaccgttctacaaggctgaacctgtccctgatctaatgaatgagatgtcaaaatt

SEQ ID NO: 1874 - DNA, 538 bp, Oryza sativa
  Clone ID: uC-osflcyp035d01b1
gcggtaccggaggagcctaccgcgcgtctcgccgtggcagctccgcaaggcttgcagccctgccggagatgcagacgacgaccgtgcccatggcggcagcggcggcggtggcgccgtccaccaccacctcctcctccgcctccttcaaggttgcggcctatgcttggtcgtcatgccggagcagctcctctccggcgacaagattggtcgccgcccccaatcaccagcgaccaccgctagttgttggagccattgccggcctggatccggttaccgcggtgcagctgccattaaccgctgggaacgtcgagtctgttctagatcaagtgcgcccttacctgacggcagatggaggggaatgttgcccttcatgaaattgccgggaatgtggtgaggctgaagcttcaaggagcttgtggatcgtgcccaagctcgctgatcacgatcaagaggggcatcgagcgccggttgatggagaaaataccagatgttgctgctgttgaccttgtacagataagagactgggcttgagctgatg

SEQ ID NO: 1875 - DNA, 184 bp, Oryza sativa
  Clone ID: uC-osflcyp035d02b1
gcagcctggtgcgagtgctgcggcttcacggaggaggcacgctctggaacatcgcggcggtgcgggaggagtacatggggcggtgggtgtgcggcctctgcgcggaggccgagggcgactagatccgtcgcgccggcgccgggaaggccaccatcaccacggaggttgcgctataccggcacct

SEQ ID NO: 1876 - DNA, 351 bp, Oryza sativa
  Clone ID: uC-osflcyp035d03b1
tggttatttcgcctagggcaggcggaggcggaggcggccgcttttacaggaaggtggtgccttttgtggtggcggcggcggccggcgactaggcgcatagcgagatgcacgtgctggcggtggacgacagctccgtggaccgcgccgtcatcgccaagatcctccggagctccaagtacagggtgaccactgtggagtcggcgactagggcgctcgagctcctctgcctcggcctcgtccccaacgtcaacatgatcatcaccgactactggatgcccggcatgaccggctacgagctcctcaagcgcgtcaaggaatcgtctcagctcaaggagatcccggtggtgatca

SEQ ID NO: 1877 - DNA, 410 bp, Oryza sativa
  Clone ID: uC-osflcyp035d06b1
gtttctggtggctagccctctatctgttgataatgatgagagtcgattcaggtgtactagaccaaaaggaaacacaacaggggaatggatggaccaaagctgaaaacatggctaaccttacagaacagatgggcctcctgtcatcacaccatacaggatgatgaggtacaataggacatacttagccaccatttgtcaaggtaccctgggatctcggtaataaactcccacatcatcacctacccttatgtctatgttatgttctatcattttgctgaaacaatactgaaacgtcaccctatatgtgggaggatactaatcttccacctatgaaacacggtttacccgaggggtttacctgcttgtatctaggtttggcaggcgtaagaattgatcaatggtaacttgtc

SEQ ID NO: 1878 - DNA, 506 bp, Oryza sativa
  unsure (1)..(506): unsure at all n locations
  Clone ID: uC-osflcyp035d07b1
tttttagtataatctcaaagaacaatgaacgtgctctttggtcatctgcagttcctgaaatgaaagcaaaatttttggaaatagtccatccttccaacaggggtttgtcggagcaggattttgaggttttaagaggaattgctggttgtggtgatgacattggaagagacgagtttgataagctatggtcctggttatacccagttgccattgctttgtcaaaagacaaaataaacaggctatgggatttcacagcacatagatggatagagggattgattacattacaggaaactgagaatgcgctaagaagttccagggaccggcttatgaagccaggaacatttgtccttagatttcctactacccgaagctggccacatccagatgccggtagcctggttgttacctatgttggctccgataactcaattcatcatagactttngtctcttgatgtcagtgatgctaagtctggcaacctagaagatttgttgctgaaggag

SEQ ID NO: 1879 - DNA, 487 bp, Oryza sativa
  Clone ID: uC-osflcyp035d09b1
gtttttcctgtcgtggtactcgcagatgctgggggggcacggttagcgcgtactgtcgggcgcgacgtccgtgttcggcgacggcgccggcgccaagatctcggtcaaggtggccggcatccactggcactacggcacgcggtcgcacgcgccggagctcacggcggggtactacaacacgcggcaccgcgacggctacctcccgatcgcgcacatgctggcgcgccacggcgccgtgctcaacttcacctgcgtggagatgcgcgaccatgagcagccgcaggaggcgcagtgcatgcccgaggcgctcgtcaggcaggtggccgccgcggcgcgcgcggcgggcgtcgggctcgccggggagaacgcgctgccgcggtacgacggcacggcgcacgaccaggtggtcgccgtcgtcggcgaccgtgcggtggaagaccggatggtcggcttcacctacctccggatggggcccgaccttttcacc

SEQ ID NO: 1880 - DNA, 385 bp, Oryza sativa
  Clone ID: uC-osflcyp035d10b1
gcttttgcttctgaaaggtgccagtgagaggggagcaaaaagaattcgtgttcacattcttactgatggacgcgatgttttggatggcagcagtgttggttttgtagagacactagagagtgatctttctcagcttcgtgacaagggtattgatgcacggattgcatctggtggtggaaggatgtatgttaccatggaccgctatgagaatgactgggatgtggtcaaacgtgggtgggatgcccaggtgcttggcgaagcaccctacaaattccaaaatgcagtcgaagcagggaaaactctaagagcagagaccaatgcttgtgatcagtatttgcctccatttgtgatcgtggatgagagtggtcaatttgttgggcctgtt

SEQ ID NO: 1881 - DNA, 461 bp, Oryza sativa
  Clone ID: uC-osflcyp035d12b1
tcctatctcgcgaggctctcgtcgtcgaatcgaaggctctcgcgtactcaagatgcagatctttgtgaagacattgaccggcaagactatcaccctcgaggtggagtcctctgacaccatcgataatgtcaaggctaagatccaagataaggagggcatccccccggaccagcagcgtctcatcttcgctggcaagcagctggaggatggcaggacccttgctgactacaacatccagaaggagtcgacccttcaccttgtcctccgcctccgtggtggcatgcagatctttgtcaagactctgaccggcaagactatcacccttgaggtggagtcttctgacaccatcgacaacgtcaaggccaagatccaggacaaagagggcatccccccagaccagcagcgtctcatcttcgccggcaagcagctggaggatggcaggacccttgctgactacaaca

SEQ ID NO: 1882 - DNA, 543 bp, Oryza sativa
  Clone ID: uC-osflcyp035e03b1
ggttctttatcgagcttatcaacaaaagcatgatccagcgaatagaagacacatactaccttggcactattagtggttgtcacatccatgacatggtgctggacctcatccgcatgtcggcaaaagaagagaactttgtaaaaatattggatagagcacatgaggagcacaactcatcttcgcattgcagatcagtccgtaggctagcactgcataagagttggaaccagcataaaaacaataatccggcgatgggcatggagcagcagctgaggtcattcaatgccattgagtgccctattagcatgattcccctgcctgcgagattccaggttctacgtgtgttagcgctggaaggttgtgatgtcacaggaggctgtaaactgaagcatcttgggaagctgcttcagttgaggtaccttgggctgagaaatacacgtgttggtgagctcccaaagcaaacactgcgggatctcgttcacctgcaggtactggacgttagggacactgacttggtgcactgccagcgacagttagcgaact

SEQ ID NO: 1883 - DNA, 407 bp, Oryza sativa
  Clone ID: uC-osflcyp035e04b1
attgagcgtatcaagatgcgcctgaccggggcgatataggacacatactaccttgccactactagtggttgccacatccacgacatggacgctggacctcaggcgaaggtgggctgaaggagagaacttcaggaaaatataggatagagcacatgaggagcacgactcatttatgcattgcagatcaggaacgaggctagcactgcataagagatggacccagcatggaggcagtattgccgcgatgggcctggaggagcagcgtgaggtcatccaatgccattgagtgccctatacgcatgattacgatgcctgcgagattacaggggctagaggtgccagcgctggaagggcgggaggtcacatgacgctggaaccggacgcatagtgggaggctcgtgtagttg

SEQ ID NO: 1884 - DNA, 507 bp, Oryza sativa
  Clone ID: uC-osflcyp035e05b1
aatttctgcgcgtcatggaggataaaatttggaatactgaggcaaaagtatatggtctaatccctgcattaaaactgagttatgatgcacttcctccccatctgcgagcatgcttttcttgtttatccattttcccaaaagaccatcagttgttttattctactacagtcatgttatggatggcattggggatgttgaatacaggcaaggaaagcaaacaaatgatatctgctggaagtaagtgctttcatgatctcctaggaagatcgttgttccaagaccaaattattgtttatgatgaaaccattcaaagctgtaaaatgcatgatcttattcatgatctagcacaattcgtttcagaaaatgagcatgctgttatcagttgtgaaaagactgctttctctaaaagggttaagcatctagtgtgagattgcaaggacttctcaggagagcacgaatttcctaagcagttgaaaaaggcatgtaaggtgagaacattttcaagca

SEQ ID NO: 1885 - DNA, 465 bp, Oryza sativa
  Clone ID: uC-osflcyp035e07b1
gtttttacttcaccaaggacttcaagggctccgtgggcggcttctacgtcaacaccgtggacaccaccggcgccggcgacgccttcgtcggctccctcctcgtcaacgtcgccaaggacgactccatcttccacaacgaggagaagctgagggaggcgctcaagttctcgaacgcgtgcggagccatctgcaccaccaagaagggtgccatcccggcgctgcccaccgtcgccgtcgcgcaggagctcatcagcaaggcagccaactagagctcctcggtttcgtcgtcgatcgccgccattgggggcctcggaattttaggtcgatttaatttagttgctgcttcgttttagacaaggaagaggaggggcttgggtgtgttcatgtctgtcttttgtgtgctaaagtagttggttccgtgtgagaacttttggcgtttattttactatattattataagaagct

SEQ ID NO: 1886 - DNA, 410 bp, Oryza sativa
  Clone ID: uC-osflcyp035e09b1
tttttcaactactccgttgatcactattgcaatgacggaaatagttgccagtgtattggagaggaacaacttgccaggctcaatttttacagcattctgtggtggtgctgacattggccaagcaatttctcttgacacaaggatacccttggtttcattcacaggaagcacaaaggttggtctaatggttcagcagcaagtgaatgcaagatttggcaaatgccttcttgaacttagtgggaacaatgccattattgtaatggatgatgcacacattcagctagctgtccgttcagtgttgtttgctgctgttggaacagcaggacaacgctgcactacatgtcgtaggctgcttcttcacgaaagcatataccgaacatttcttgatcaacttgttgaggtttataaac

SEQ ID NO: 1887 - DNA, 226 bp, Oryza sativa
  Clone ID: uC-osflcyp035e10b1
cggtcgcgtgggcggttcggttcggttcggttcgggtccggttcgatttcggtttttccttcggttcgggggttggtgggaaagcatggcggcgccggatgttgagtaccgctgcttcgtcggcggactcgcctggaccaccaacgaccgttgcctggaagccggcttctccacctacggcgagatcctcgagaccaagatcatcaacgatcgggagaccgggagg

SEQ ID NO: 1888 - DNA, 561 bp, Oryza sativa
  Clone ID: uC-osflcyp035e12b1
ttcctctctacctcgccggagttcaccctgtgtgggactgggagcggcggcggcgtcggaggcaatggacgcttcgtcggtggcgctctacggccagctcaaggctgctcaaccattcttcttgttagctgggcctaatgtgattgaatcagaggagcatgtcctgaagatggcaaaacacatcaaaggcatcacaaccaagcttggtctgccacttgtgttcaagtccagctttgataaagcaaatcgtacatcatcaaaatccttccgtggtcctggtctggaggaaggcctgaagatacttgaaaaagtgaaagcaacatatgaccttccagtggtcactgatgtgcatgaaagccaccagtgtgaagccgttggaagagtggccgacatcatacaaattccagctttcctctgtcgccagactgatcttctagtggctgctgccaagactggaaaaattatcaacatcaagaaaggacaattctgtgctccttctgttatggccaactctgcagagaaaatcagacttgctggaatcaaaatgttatggtctggagc

SEQ ID NO: 1889 - DNA, 521 bp, Oryza sativa
  Clone ID: uC-osflcyp035f01b1
atttccattaccagtattggagttaagacgccgagcgaaagatagggcaaagaaagctgaagggaaacccaaacgatctttaccacctccaaaaaatgggatgctgatcaaaagactgataccagttgcatacaaggtgtataatgcaagaattttgctgatcaacaacttgaagaggcttatgaaagtaattccagtgaaaggatgcaaacattgcagtgagatacatgttggatctgttggacaccctttccgaacatgcaaaggaatgtcttcagataaacgtagggggcaacatgactggggaggtactttggttgaagctgtttttgtgccggttgaagcctaccatctagaggatcgcttagggaagcgtatccctcatgatcagaggtttgctgtacctcgcatccctgctcttgtggagttatgcattcaagctggagttaaatttcctgaataccccacaaagcggcgaagaaagcccattattaaaatccgaaagaacgagtttgtgatgc

SEQ ID NO: 1890 - DNA, 367 bp, Oryza sativa
  Clone ID: uC-osflcyp035f02b1
gcgccgtgtcgccggcgcgcgcgaggggcggcgaccggcggcgaagctcctccctccgcgcccccacgacctctgcgccgccagatctggccccgcctccaccgccgcatccagagactgcatgtccggcgtccagaacacagcggaagatgggttgccagatggaggagcttctgaactgtcgacgaaaacctccgtcacgttgtactccgatgaaaccagaagatccctccacgcaattcttacagctttcaacatgtcggtcacctccgccatggatggcctctccttccccttggcgctcagacacatactccccaccttggcgacctcctggagcaggggcagcgcctccatgctggcacca

SEQ ID NO: 1891 - DNA, 507 bp, Oryza sativa
  unsure (1)..(507): unsure at all n locations
  Clone ID: uC-osflcyp035f03b1
cgcgtgctccgtggggatgctggtggtgggggcgtgcggcgccggtgagaccagcgagtaccggcgccagctcggctccgccgtcgacatgccgctcgacgccgacgtcttccgcgccccgcccggccgcaatgcgccccagcaggttcatatcacacaaggaaatcatgatggcactgccatgataatctcatgggtgacaacaattgagccaggctcaagcactgtgctctatgggacttcggaggataatcttaatttctctgcagatggaaaacacactcagtatacgttctacaactacacctcaggatacattcatcactgtacaataaaaaagttggagtttgacacaaaatactactatgctgttgggattggacaaaccgtgaggaagttttggttcagaacccctccaaaaagtggcccagatgttccatatacanttggtctcataggtgatcttggtcagagctacgactcgaatattacgctggcccattatga

SEQ ID NO: 1892 - DNA, 527 bp, Oryza sativa
  Clone ID: uC-osflcyp035f04b1
cccacgcttccgctctattatcaagaaacaagcaagatgtgccccagctaactagctaccttggcaatggcctccttatcctccttcctgctcgccgcatcagtggcgacactgtttgtcgttggctcatacgccaccgagcttaccttcaaggttaatgagggctctagcgcaactagcctggaactcatcaccaacgtcgccatctctgaggtggagatcaaggagaagggtgccagcgactggacggcgctgaaggaatcatcgtctaacacctggacgatcaaaagcggctcgccactcaagggccccttctccgtccgcttcctcgtcaagaatggcgggtaccgcgtcgtcgacgatgtcatccccgaaagctttacggccggctctgtctataagagtggtatccagctctaagtaacatacacgtatgcttttttttttggttgagtcgcatgagaatttttagcctctaaataattctattttaagacagattgggccgcctgcgagcgagccaaaaa

SEQ ID NO: 1893 - DNA, 186 bp, Oryza sativa
  Clone ID: uC-osflcyp035f06b1
tgattgatagagatctactcaaagatctcctaattagtgggatctagatatgctaggcgcgtaatataataatgctagttgatcgatgtcgactaatatggtataaatgaaggaccaatccatatgcttcagatgcagatgttatatatgtttctgcaatgtagcttcaagaagtattttacgcat

SEQ ID NO: 1894 - DNA, 491 bp, Oryza sativa
  Clone ID: uC-osflcyp035f07b1
cagctctcgcctccccatcaccgtcctcctcctggtgctcctgcaacagcagcaacctcccggcccccttccgcccccgcctcatccgcaacacccccgtcttcgccgcccccgtcgcccccgccgcgatggacgccgccgtcgaccgcctcaaggatgggttcgccaagttcaagaccgagttctatgacaagaagccggagctcttcgagccgctcaaggccggccaggcacccaagtacatggtgttctcgtgcgccgactctcgcgtgtgcccgtcggtgaccatgggcctggagcccggcgaggccttcaccgtccgcaacatcgccaacatggtcccagcttactgcaagatcaagcacgctggcgtcgggtcggccatcgagtacgccgtctgcgccctcaaggtcgaactcatcgtggtgattggccacagccgctgcggtggaatcaaggccctcctctcactcaaggatggagcaccagac

SEQ ID NO: 1895 - DNA, 519 bp, Oryza sativa
  Clone ID: uC-osflcyp035f09b1
cggtcgcgtgggcggacgcgtgggcggacgcgtgggcgccagaagagcaacctcccagtgaactggcctgtttttggtatgcttccattcctcgtgcagaatctgcactatatccatgacaaagtcgcagatgtgctccgcgaggcggggtgcaccttcatggtcagtggcccgtggttcctcaacatgaacttcttgattacctgtgacccagccacggtcaaccattgcttcaatgccaacttcaaaaactacccgaaaggcagtgagtttgctgaaatgtttgacattctaggtgatggactccttgtggcagactctgaatcatgggagtatcagcgacgcatggcaatgtacatatttgctgcccgtacctttcggtcctttgcgatgtccaccatcgcgaggaagactggcagtgtcttgttaccctaccttgatcacatggcttagtttggctcagaggttgagctggagggtgtcttcatgaggttctcactagatgtgacatactctact

SEQ ID NO: 1896 - DNA, 319 bp, Oryza sativa
  Clone ID: uC-osflcyp035f10b1
gtttgggagcgtcagcaaccactgcgtccagcgctgcaagtgccccgtcgtcgtcgtcaagaggcccggcaccaacgccaaggcctcttgatgcgccaactccgcggtccaggatgcaatctgtggaatgttgtgataatatgggtgtatgtatatagtggccttggtgcagagtttgtgtatgtgtagtagtacatgttttccttgtagtaacaagtaacaacattattgcactctctaaaaaaaaaaaaaaaaaaaaaaaggaaaaaagaaaaaaaaaaagaaagaaataaaaagagaaggaataaaagaggggggg

SEQ ID NO: 1897 - DNA, 357 bp, Oryza sativa
  Clone ID: uC-osflcyp035f11b1
ctcttcgggtcccgagtagggaaccccccctgcgcgcccttcccggcaatgtcggcgcaccacccgccgcacggcatcgccgccggggacgccaggaaggcccaccacctcggcggcgaccccaagaacctgtcgtggtgcggcgtctgcgtcggcgaccaccatttcctccccaggaagctcgtcgggggcggcggcccctccgcggcgaagctcgcgctcgtgtccttcctcgctgtcatcctcgtcctcgccgtcgacctgtccctcaccggcgccggggcgaaccggcggctgcggctccaatacctgcattacatcggcgacggcggcgggggtggcggtggttgcgggttg

SEQ ID NO: 1898 - DNA, 490 bp, Oryza sativa
  Clone ID: uC-osflcyp035f12b1
gaatataaaaatctcccctcgaagcgaagcgtcggggcgccttctcaagatgcagatctttgtgaagaccctcaccggcaagaccatcaccctcgaggttgagtcctcggacaccattgacaatgtcaaggccaagatccaggacaaggagggcatccccccggaccagcagcgtctcatctttgctggcaagcagcttgaggatggccgcaccctggccgactacaacatccagaaggagtccaccctccaccttgtgctcaggctcaggggaggcatgcagatcttcgtcaagaccttgactggcaagaccatcacccttgaggtcgagtcgtctgacaccattgacaatgtcaaggccaagatccaggacaaggagggcatccccccggaccagcagcgtctcatcttcgctggcaagcagcttgaggatggccgcaccctggccgactacaacatccagaaggagtctaccctccaccttgtgctc

SEQ ID NO: 1899 - DNA, 175 bp, Oryza sativa
  unsure (1)..(175): unsure at all n locations
  Clone ID: uC-osflcyp035g01b1
ctcgtttttttcctctctccagagtccaactccagaccganctcttttcatcggtcagatccacaatcgcaggccagcaaggcgaaggttaggttggttcttccagatccgggctcctccccctcgctcctgtcaccagatccggagctggtcgtcgcaggggtgggggtgggtg

SEQ ID NO: 1900 - DNA, 483 bp, Oryza sativa
  Clone ID: uC-osflcyp035g03b1
cgagtatttgctccggtccaaatgggtgccttgcctcgagtttagtaaggtcgggttcgtctaccgtgagaaccacaggtctcctgggtactatgatggcaggtactggaccatgtggaagctgcctatgttcggatgcactgatgccacccaggtgctcaaggagctcgaggaggccaagaaggcatatccagatgcatttgttcgcatcatcggcttcgacaacgtcaggcaggtgcagttgattagcttcatcgcctacaagcccccgggttgcgaggagtccggcggaaactaaactagttggcaagccagcaagcttcactcgtgagctctatacagaggagactcgattgatctattcggttttggcagctttgacgttcgaatcgggccaccttgcattggtttccctttcccagtttgtgcttcagtttttttttcatttgttgggcaacatcagctggatgatgtcatatgatg

SEQ ID NO: 1901 - DNA, 561 bp, Oryza sativa
  Clone ID: uC-osflcyp035g04b1
cgagttcttgctccggtccaaatgggtgccttgcctggagtttagtaaggtcgggttcgtctaccgtgagaaccacaggtctcctgggtactatgatggcaggtactggaccatgtggaagctgcctatgttcggatgcactgatgccacccaggtgctcaaggagctcgaggaggccaagaaggcatatccagatgcatttgttcgcatcatcggcttcgacaacgtcaggcaggtgcagttgattagcttcatcgcctacaagcccccgggttgcgaggagtccggcggaaactaagctagttggcaagccagcaagctcactcgtgagctctatacagaggagactcgattgatctattcggttttggcagctttgaacgttcgaatcgggccaccttgcattggtttcccctttcccagtttgttgcttcaagtttttttttcatcttgtttgtgtcaacatcagctgtgtatgtatgtacatatgtatgtatcaacataggttgaagagcatgcatatgtgaatgctagcaccaggctatcatatgcacatacaca

SEQ ID NO: 1902 - DNA, 481 bp, Oryza sativa
  Clone ID: uC-osflcyp035g05b1
tctccatctgtgcacggagggattcattgtccctgggggcaatttcccggccggccgggacggcggaacctcgtccatgatcacttgaaacacctcccttgctcttcatggccatggagacgacgagccaagattcgcaggtgatcatgggccggtacaagctcggccggctcctcggccgtggcacgttcgccaaggtctacaaggcctataagttggccaccggcgaggccgtcgccatcaaggtgttcgacaaggaggcggtgcagcggtccggcacggtggagcaggtgaagcgcgaggtggacgtcatgcggcgtgtgcaccaccgccacgtcatccgcctccacgaggtgatggctacgcggtccaggatctacttcgtcatggagtacgcgagcggcggcgagctcttcacccgcctctcccggagcccgcggttcccggagcccgttgcgcgccgctactttcagcagctgat

SEQ ID NO: 1903 - DNA, 88 bp, Oryza sativa
  Clone ID: uC-osflcyp035g06b1
cccatttttctcggcctctactcggtggtcgacgcctgcacttttccagaccggaccagggttcgacaccgggcacccgagcgccggg

SEQ ID NO: 1904 - DNA, 461 bp, Oryza sativa
  Clone ID: uC-osflcyp035g07b1
ttttctaaccagaccaaggacaagaccgactacctcgggtacactaccagcttccgggtggagacggacgacctgccgtaccggaaggaggtcaagccggtgctggaggtgagcagccatggacacgccatcgtggcgtttgtcaatgacgctttcgtagggtgcgggcacgggacgaagatcaacaaggcgttcacgatggagaaggcgatggatctcaaagtgggcgtcaaccacgtcgccatcctctcctccacgctgggtctcatggacagtgggtcatacctggagcaccggatggccggggtgtacacggtgacgatccgggggctgaacacggggacgctggacctgacgacgaacgggtgggggcacgtggtggggctcgacggcgagcggcggcgggtgcactcggagcaagggatgggcgcggtggcctggaaccccgggaaggacaacca

SEQ ID NO: 1905 - DNA, 340 bp, Oryza sativa
  unsure (1)..(340): unsure at all n locations
  Clone ID: uC-osflcyp035g08b1
ttctcgagctcggctcagctcagctcacctcgcacggagatcccaatgcaccaaccagccataatgcagcgggctctcgccgtcgtcgccctcctcgccgccgcagccgccatcgccgccgcccagggggagtcgccggagttgctgccgttcgcggtgggggcggcgccggaggggtgcgacgtcggggaaggggagtgggtgttcnactaggcngcacagccgtcgtacaccacggaggagtgcccttacatacagtgtgacctatggtgagagggtcatagccggagcaacgtctggtaccagtgttcacgctggctgtcctgcggctgatccctgc

SEQ ID NO: 1906 - DNA, 506 bp, Oryza sativa
  Clone ID: uC-osflcyp035g11b1
cttttcctccgccgctgcagctcagccatgccgcggggggtttcccactcgtacaccgacggcgaccacccggtcaccgccaaggccgccctcgccttctacctcgacttcgccgcctccaccatccacgcctccgcgctgctcaccctctccgccccgcactccggcgacctcctcctcgacacccgcgccctcgccgtccactccgcctccaccgcctccggcccgccctcccccatccccttctccctcgccgacgccgccgaccccgtcctcggctccgccctcacgctcaccctgccccccgacaccacctccttcctcctcaccttctccaccttcccctccgcctccgcgctgcagtggctctcgccgccgcagaccgcctcctcgctccccttcgtcttctcccagtgccagtccatccacgcccgctccgtttttccctgccacgacacccccgccgtgcgcatcacctttgacctccttctcaacgtccccaccca

SEQ ID NO: 1907 - DNA, 519 bp, Oryza sativa
  Clone ID: uC-osflcyp035g12b1
ctttctctatacaaagcaagtagtagcaataactgggtcttgatcatttttatctaagttcttaatttcgatcgcgaagggccatggcgaaggtggcgttggcggtggcggcgatggcggtgctgctgctgctcgcggcggcggcggcgccgggggcggaggcggcgtgcgacgcgctgcagctgtcgccgtgcgcgagcgcgatcatcgggaacgcgtcgccgtcggcgtcgtgctgcagccggatgaaggagcagcagccgtgcctgtgccagtacgcgcgcgacccaaacctgcagcgctacgtcaactcccccaacggcaagaaggtcttggccgcctgccacgtccccgtcccctcctgctaaaaccaaaccataatactccagttctgcgtgccgtttatacgtgtgtgagtgcgcctgtcgcatggcccacctgccatagacgccgtctatatatggacgtacgtacgtgtctcgcttacttgatttcgtgtctgcttcgacgagttcgatc

SEQ ID NO: 1908 - DNA, 501 bp, Oryza sativa
  Clone ID: uC-osflcyp035h01b1
agattctatgtgttctacacctgttttggcccttgggggcttttctaagccttttgtgagttgagactgatgcttgtgccacaggaattggtgttgtgttgtctcaagaaggacatcctgtggcattttatagcaaggcattgggaattgtgaatcagcggctgtctatatatgaaaaagaatttttggctataatgatggcagttgatcattggagatcttatttacttcggggtccttttgttatcaagactgatcacaaggctctttgtcatttagatgatcagactttggacactgagttacagaaaaaggcgatgactaagcttattggattacagtacaagttccagtataaaaaaggagttgagaacaaatctgctgatgcactatccaaagtagggcatttttttgggatttatgtggttcaatcttgttgggtttaggagattctcaactcctatgctggagattcatctgctcagcagttactttgtgagc

SEQ ID NO: 1909 - DNA, 474 bp, Oryza sativa
  Clone ID: uC-osflcyp035h02b1
agattctatgtgttctacacctgttttggcccttggggactttgcttagccttttgggagtgagactgatgcttgtgccacaggaattggtgttgtgttgtctcaagaaggacatcctgtggcattttatagcaaggcattgggaattgtgaatcagcggctgtctatatatgaaaaagaatttttggctataatgatggcagttgatcattggagatcttatttacttcgggggccttttggtatcaagactgatcacaaggctctatgtcatttagatgatcagactttggacactgagttacagaaaaaggcgatgactaagcttattggattacagtacacgttccagcataaaaaaggagttgagaacaaatctgctgatgcactatccaaagtagggcatttttttgggattcatgtggttcaatctgtttgggtttaggagattttcaaactccatgttgagattca

SEQ ID NO: 1910 - DNA, 510 bp, Oryza sativa
  unsure (1)..(510): unsure at all n locations
  Clone ID: uC-osflcyp035h03b1
agaatattctgtagaattacagaagaagatcatgggggcggaattcgacttcaatggctggctaaagcaatcacagaatgttgcaaaaatgggttccatgagccgtgtagttggaatgattccaggcatgaacaaggttactcctgcacaaattcgagaagccgagaaaagacttgcatttgtggagtctatgatcaatgcaatgactgccgaggaaagggaaaagccagaattactggctgaatcacgtgacaggaggataagagtggctgaagagtccggaaagagtgaacaagaggtgagccagttggttgcccagcttttccaaatgcgtgctcagatgcagaagctgatgggtgtgatgaccggacaagaagcacttncaggcatggggaatctcatggaatctcttaacgccgatgagaaggcacctcctggcactgcacggcggaagaggaggcacagcaagacgaggcagagggagctggatgcagtccctagttcttgagc

SEQ ID NO: 1911 - DNA, 566 bp, Oryza sativa
  Clone ID: uC-osflcyp035h04b1
ggttcttttgtaccaagtaggagcattttatccttggggtagaggtcatgctcatgatggcgccaagagacgcgagccatggttatttggagagcgaagaactgctctcatgagggaggcaattcatatgcgatattctttgctgccatactattacacactgttcagagaggctagtgtaactggtgttcctgtgatgcgtcctttatggttagaatttcctgatgacaaagagacatataataatggtgaggcttttatggttgggccaagccttttagcacaaggaatttatgaagagggccagaaatcagtgtcagtgtaccttcctggagaggagttatggtatgacttgagaaatggatctccatacaagggtggtgtgtcacacaagctagaagtttcagaagatagcattcccagtttccaaagggcaggcgcaattgtgccaagaaaggatagattcaggcgcagttctactcagatggtgaatgatccatataccctggtgatagcgcttaatagctaaagtgcggcataatgcgagctttatgtggatgatggga

SEQ ID NO: 1912 - DNA, 219 bp, Oryza sativa
  Clone ID: uC-osflcyp035h06b1
gcagattgtcactctcatagtgaacaagctcaagaagtcaaatttataagcatcacaggggggccccatcattctggcacagattgagaatgagtaccagcacctggaggtgggattcaaagaggctggcaccaagtacatcaactgggcagctaagatggccatcgcaaccaacacttggtgtcccgtgggatcatgtgcacgcacgactaaagctcc

SEQ ID NO: 1913 - DNA, 279 bp, Oryza sativa
  Clone ID: uC-osflcyp035h08b1
ttcttctcgcttccttttcggcttcttggagccagccagctatcgagagagagagagagagacccacctcaccttctcctcctgtcctcttcctcaccctggtcccgctcaagctgagcctttcccagtgcaagattcaatctgctgctgctgttcttgagatttgcccggctcggatttcttgcgtgcagtttctttgttgatctggttggttcagattgatttgctgcaagtgcaaacctgttcttgggggggtttgatttgatgtggtgtgttctt

SEQ ID NO: 1914 - DNA, 457 bp, Oryza sativa
  Clone ID: uC-osflcyp035h09b1
tctttatctcgtcttctctctctcgcaggactgggtggcgattgcggcggaggtggcgaaggcggcggtggtgccggagtcggtgctgaagaagcggaagcgggaggagcagtgggcggcggacaggaaggagaaggcgctcaccgagaagaagaaggccgtcgagagccgcaagctcatcttcgcccgcgccaagaagtacgcccaggagtacgacgcgcaggagaaggagcttgtgcagctcaagcgtgaggctcggatgaagggtgggttctacgtcagccctgaggccaaacttctgtttgtggtccgcatccgtggtatcaatgccatgcaccccaagaccaggaagatcttgcagcttctgcggttgaggcagatcttcaatggtgtcttcctcaaggttaacaaggcaaccattaacatgctgcgcagggttgagccatatgttgcatat

SEQ ID NO: 1915 - DNA, 424 bp, Oryza sativa
  Clone ID: uC-osflcyp035h11b1
gtttttatcgccgcccttttttttttttttttggggggaaatgatggttgacatactccttttacatccacttatactgaaaactgttattctatacccatatattaaacatttaagtcatcagaaagatgacattaacattaagatataaaaactttatccaaaagattcatctctagagcactaatatacaagacacagacatattgtagatgtaatctgaattccgtggttgtacttcgttgtgacagggctggacaaactggaggcttgaaattgatcaacgaacagaaacgtttttcatctttcccgacttgtgcttgacaaagaaagcagctagcatacttttggtacggaggggagccttttggatttgacgccctcttgggtttgcaaaggactaaatgacgatagatgcctgaca

SEQ ID NO: 1916 - DNA, 454 bp, Oryza sativa
  unsure (1)..(454): unsure at all n locations
  Clone ID: uC-osflcyp035h12b1
gtattgaaaagaaaagaaaagagagagaaggtgggggggtggaaggaaccctagcggcggcgaccggctccgatggcccctccaccgccgtctccgtccccatctccggcgagcggcgcgcagtacgcgcaccagttcctgaacacggcgctctcccagcgcgggccctccgccctgccctacgcggaggacgtgaagtggctgatccgcaaccacctcgtcgccctcgccgacgctntcccctcgctccaccccaaggccgccctcttcacccacaacgacggccgcgccgcccaccttcttcaggccgacggcaccatccccatccaccacgccggcgccttctacaaccttcccgctgtcctctggctcccggagccctacccgcggtcggccgcccttcgttttctctccccaacacgcgacatggtcatcaagccccaccacccccttg

SEQ ID NO: 1917 - DNA, 432 bp, Oryza sativa
  Clone ID: uC-osflcyp036a01b1
acttgattctggagaccggcgccctcctcttcggggccatgtacgtcaacaactccgtcaccaatagcaagtttgacaacctgtatggttgccgccactctctccctgatggtctcatgagggctaccgatgttatgatcgctggcaaggttgccgtggtctgcggttatggtgatgttggcaagggctgtgctgctgctctcaagcaggctggtgcccgtgtcattgttactgagattgaccccatctgtgccctccaggcccttattgagggtgtccaagtcctcaccttggaggatgttgtctcggaggctgacatctttgtgaccaccactggcaacaaggacatcattatggttgaccacatgaggaagatgaagaacaatgccatcgtttgcaacattggtcactttgacaatgagattgacatgc

SEQ ID NO: 1918 - DNA, 421 bp, Oryza sativa
  Clone ID: uC-osflcyp036a02b1
ctttgggtcttatctagtttatctactgacctaggtaagggaattattgaactatataggggaataattgaattaatagggcagtaaaactacttgtctctagtttatcgatgttatgaaaatgactaattcaatttatgttggaattggaaattgttttgaggtaaactttcaaacttactttcttaagtgtacaggtgctactatcttctttaatggcctgtccaagtatttaattcatggattgattcaacggcgggaagatagatttactacatcaaacagcagctgggtgttcttttgaaaaaaaagcatcgatctggtttgccgggccaaaatgcattaatcttgttctggagataattttaaattccttcacagtgtacaactttgaaccaatgggcttctttgatgctaacgg

SEQ ID NO: 1919 - DNA, 440 bp, Oryza sativa
  Clone ID: uC-osflcyp036a03b1
cgttctgtttttttcactcgcgctggcctctcttggctgggtttctatgtttcgggggaatcgcacacgacacgctccggggttgcatatagatccctttttccgcagagcttccagtgaccccttgtgcttggaagacatctccgtccaacatggaattgaaagatgcccattcctaaggaacatcaatgagcctacaaggttttcattctcgtccgttaattttcctggtcctgcaagatgagacaagggtccaatttttgaagattgacccaatttccacatcgcatttgcagtgttccatggccaagatggggtgtgttccactttcacatggatcatttgaacgatctgagaagccaatgccaaaggccaatcctgaatttaaccccttggctgctaaagcagctccatcaatctctctgcattggagggttttt

SEQ ID NO: 1920 - DNA, 383 bp, Oryza sativa
  unsure (1)..(383): unsure at all n locations
  Clone ID: uC-osflcyp036a04b1
atttgttgtgaactaccatggcaagagctccaaggtcagcatgttctaggggatgggcagggtactaaactagggcaagcagaccgaccaggacaggtggaagggtctcgcctacgacatctacgatgaccagcaggacatcaccagggggaagggcttcgtcgactcccttttccaggctcccacgggtgatggcacccacgaggccgtactcaggtcctacgagtacctcagccagggtctcataacgtacgacttctacaacaccatgggaggcttatacatcgtccctgctntcatggacaagctcgtcgtccacatcttcaaaaacttcatgacccttcccaacatcaaggtcccactcatcctgggtatctggggag

SEQ ID NO: 1921 - DNA, 399 bp, Oryza sativa
  Clone ID: uC-osflcyp036a05b1
agctgatgaactgctgccgacattgcaatttttccggggagtaccttttaaactgggggatcctaacccatactaatcatgaaggggaggctgctactgtcatgcaaatcttgcctagtatgatgattttacccagctgaatcccagccacacatgatgcgttcgttcattgtttgcacacaaatattattgcgtcatatgagtattctttgggtcagaactgcacagcaacgcggcctgggcactcaatctggcatgttgtctatggggtgcatgcttgttaacagaagaagcccaacatgtgggattttcgacttttgcggactaatttttttcctgttgttcttttgctccatggatatatattcgattttgatctccaggtttggagatacaatg

SEQ ID NO: 1922 - DNA, 231 bp, Oryza sativa
  Clone ID: uC-osflcyp036a06b1
gttctctccgtccccctcctgctgtgcctgctcggcggcgtctcctacacccgctgggcggcggcggacaaccacctcctcgcctgcggagcgacggcaccggccgtgctccccgacggccgacgcttcgtccccgactccggctgcgcatccacgcgcctccgctgcccagcacctaccctcccgtccgcgggctgcagcggggcccccgaggcgacccctatccacgcc

SEQ ID NO: 1923 - DNA, 432 bp, Oryza sativa
  Clone ID: uC-osflcyp036a07b1
tcgttcgcccgcttcgccaagtggcgggcggggctgatgatctgcgccgccggcgagccttccgagctcgccgtcaagcagaacgccgagggcctcgcccggtacgcgctcatctgccaggagaacggcctcgtccccatcgtcgagcccgagatcctcaccgacggcgcccacgacatcaagacctgcgccgccgtcaccgagcgcgtcctcgccgccgtctacaagtctctcaacgaccacaaggtcctcctcgagggcaccctcctcaagcccaacatggtcacccctggctccgacagcccaaaggttggcgcggaggtgataggggagtacacggtggcggcgctgcggcgcacggtgccaccggcggtgcccgggatagtgttcctctccggcgggcagagcgaggaggaagcgtcgcagaacctg

SEQ ID NO: 1924 - DNA, 438 bp, Oryza sativa
  Clone ID: uC-osflcyp036a08b1
tcggtttaaaaaagagaggccactaacagagctcaggtgatagcttatagcttactgggggataaggaagaggaggaggaggagggcaccgacatggccgcagccacggcgtacaccgtggcgctcctcggcgccaccggcgcgcgcgtccccgccgctccacgctccgccgagcttatgccgcgccgcggcggcgtgctccaaccgctgcgcctccaggacgcgccgcgactgtccctgctccgcgtcagggccgcctacgacgacacctccacctcggccagcggcgacgagctcgtcgccgacctcaaggcaaagtgggaggcgatcgaagacaagccgacgttcctcctctacgcggcggcgccctcgtcgccctctggctcccaccgtcgtcgtcggcgccatcaacttcgtgccgctgctccccaagatcct

SEQ ID NO: 1925 - DNA, 460 bp, Oryza sativa
  Clone ID: uC-osflcyp036a09b1
tttgtctttttcactgccgccgccgccgtctgctgggtctattctcttcggggtctggataacgaaacgcaccaagaaggcaggaatcgtcggcaaatatggtaccaggtatggtgccagtttgcgtaagcagatcaagaagatggaggtttcccagcactccaagtacttctgcgagttctgtggcaagtttgctgtgaagaggaaagcagttggaatctggggatgcaaggactgtggcaaggtcaaggctggtggtgcctacaccatgaacactgccagtgcggtcacggtcagaagcacaatccgtcgcctgagggagcagacagaagcctgatcaggatctgtttgagaaaagtgttcttggagttctatcaagactggtgaagttgccattttgcatatttagctaaaaagagaaatctagaatggtatctatctatttgtagaaggaatatct

SEQ ID NO: 1926 - DNA, 486 bp, Oryza sativa
  Clone ID: uC-osflcyp036a10b1
ttcatctttttagttgttatttgttgcatgctgacagtatctaatactggaaagaggggtattaaaattgctaaggacaaaagaaattacatacaagttacattcttttcttgtttcttaaattgtagtaccatatcacttatcttaagtaaaaccatgttctgttgccacttattaacattttttttcaaaaagaatccattaacaaaaccatggtatttcttcaccgtttgtaattacatatataaaaaagttaatattttgcatggagctgttgaatgaatatttccttgatgtttaagattcttaaaactatgtagatccgagtggcaattttcactttggaggtatgcaactgatcctctcattctattattttttacattatacaagggtctatccctaaaagcttatttacagacttgtctacattatgcttgaatggaaaattcatctagcctgcaactcctacaatatctaccatac

SEQ ID NO: 1927 - DNA, 408 bp, Oryza sativa
  unsure (1)..(408): unsure at all n locations
  Clone ID: uC-osflcyp036a11b1
tgcttttggtgagctcaagcagacactanatggagggagtacatgtgattcttgggggggaggtgaagtttttacatgatccatcaaaggatactgggtatgtgggctgtgctctgacaagcaacatggtcagatttttcaagactgcagatggatcatggagccatgaggttgctatatctataaaaccattgaaagtgcgcaactggattctgcctgaaatgccaggactgataactgattttgttatctctctggatgatcgctatctctacttggtcaactggcttcatggtgatatcaggcagtacaacatcgaggaccctgcgaagcctgtgttggctggacaagtatgggcaggaggccttcttaaaaggcagtgaggttgtgtatgtaactgaagatgac

SEQ ID NO: 1928 - DNA, 357 bp, Oryza sativa
  Clone ID: uC-osflcyp036a12b1
tcttcttcctcccgagttcccccaaactcctgcgggcttcctatctcccaccggggggtgggcgcctggcggtttgctccactccataggcggccatcgtcttctcaaccagaaagcttctggctgtacagcttggcgggatacaagacgacggtctgccgtcggcgatccgcagtcgccggagctgaaggtggaagcggccaacacggcagtccgtgcagccgcttgagaattttttgtcatggcagtgaaaagatgcgcagaagtgccgatatctgctaggccgggaaagatgatgcggattgctattaagtcttgggcacgggtcttgcccccttacatccctgacgatgggat

SEQ ID NO: 1929 - DNA, 456 bp, Oryza sativa
  unsure (1)..(456): unsure at all n locations
  Clone ID: uC-osflcyp036b01b1
attggattttctcaaggttgttgtaactgaagggcttgggggtggtaagttctatggccaaacagttggtgaccatagagtggcttccattcaacaacagcttgcatctttaaaacttaaagatgcacctgttattggtgcttttaatcctgtgaagggggaaatagttcttgctcagtttagtgctgacaactcctggaatagagcaatgattgtgaatggacctcgaggagctgtatcatctcaagacgacaagtttgaagtattctacattgactatggcaaccaagaagtcgttccttacagtcgcatacggcctgctgacccatcaatttcctcttcgcctgctcttgctcagttgtgcagccttgccttataaaagtgcccaactagaagatgattttggccatgaagcagcagtctatctgaatggtntgttgctcaacagccaaaaac

SEQ ID NO: 1930 - DNA, 314 bp, Oryza sativa
  Clone ID: uC-osflcyp036b02b1
atctttattgcactccgcaagctttctgatgtggggagcggtgacttgagcaccaggttgctccactttgtcattgaggaggttgtgcgttcagaggggaagcgtctagccatcaaccgcaactacagtcttcgacgctctggcagccttgccaagagcaccgatggtggcaacccagcagcaagctccacaagtcagggtccatcacgggaggagaggcaaaatgaatacctgaacctcgggctaccgattgttggagggctcagcactgagtttgccaatgtgaagaaagcggcactggtggactatgacac

SEQ ID NO: 1931 - DNA, 444 bp, Oryza sativa
  unsure (1)..(444): unsure at all n locations
  Clone ID: uC-osflcyp036b04b1
cctcgttcgcgtccgcctccgcctcctcctcctgggccgcctccaccgccgcatgcgccggcggcggaatcgcctcgcatccgtttcctcctccgctcccactcttctccagctgccccccaatcatcgccgcccccgaacaatccgttcatccaccaggcaggcagtccagtccacgcgcaatctcggacgagcacccacatctttgactcgggtgattgattccgccatcagatctaggcgagagccatgaacggcggcgacgcggcggcggcggcggcgacgccgagccaccggcggctgccggacttcctccagagcgtgaacctcaagtacgtgaagctggggtaccactacctgatcacccacctnctcacgctcttgctgctgccgctcatggccgtcatcgtcctcgaggcccggccgcaccgacccgacgatctc

SEQ ID NO: 1932 - DNA, 381 bp, Oryza sativa
  Clone ID: uC-osflcyp036b06b1
ccttctcgtagtttcagtccccatgtatctcatcgggcagcttttttaggccacagcggagtcaaacacggcattccttaagggcgagatcaatacctccatgaggatcgggaggctcatggccagggtggacctccagagcgacctccataagcatcgcggccatctcgaccccttcatcaccaccttcttcacgacatacattgtcacttatgacactgtgcacctccactgggaggatcatgaggtgcatgtgactgactccaagacggttcccattggtatgcaggatgataccgagttgggctgcgagtaccgttacgagatcccgagggggagactggcgctgtgactgatgctgagcacactggcgtcttcact

SEQ ID NO: 1933 - DNA, 376 bp, Oryza sativa
  Clone ID: uC-osflcyp036b10b1
tcgagtaaggcctcgctataccgacaaaagaggggacgattaaaagtaactggggcgatccaactaatctccagcacatatcgtatgacggtccttgaaacacttgtctcaggacaagatgcgtgcgcacatgaaacacctcacatactagagagcaaagctgaacctcgcctcattcgtatagcgtcagcggatgcccttttcattctaacatcctacccagtaaatactagcactcacaacactagatagcaacactcacggcataatctgtaacaaacctcgttctcctagagggaaaaaacggtggcagcatcatcggcaactgccagacaaagcgtgcaaacacgacttatcccagatgcatacaactcca

SEQ ID NO: 1934 - DNA, 425 bp, Oryza sativa
  Clone ID: uC-osflcyp036b12b1
tttggctacatgggcggcatcggcgcctacgaggaggggttcgatgaacgtgatggcgcacgtaaaggggttccaagggaggctgccgttccacctggagacggggtatgtggaggtggacaacaccgataccgttgagctcttctactacttcatccagtcggagcgcagccccgccgatgaccccctcatcctctggatcaccggcggccccggctgctccgccctctccggcctcctcttcgagattggccctctcaagtttgacgtagctgggtacacggaagggttccctcaattgttctacttccaagattcctggaccaaggtgagcaacgtgatatttctggacgcgccggtggggacggggttctcctacgcccgtgaggaacaagggtacaacgtcaccctcacacagacgggac

SEQ ID NO: 1935 - DNA, 328 bp, Oryza sativa
  unsure (1)..(328): unsure at all n locations
  Clone ID: uC-osflcyp036c02b1
attaatgtgaggccacgaagagagctcanctggggcctgtttcaactaggtgaggagggggaggaggaggaggagggcaccgacatggccgcagccacggcgtacaccgtggcgctcctcggcgccaccggcgcgcgcgtccccgccgctccacgctccgccgcgcttctgccgcgccgcggcggcgtgctccaaccgctgcgcctccaggacgcgccgcgactgtccctgctccgcgtcagggccgcctncgacgacacctncacctcggccagcggcgacgagctcgtcgccgacctcaaggcaaagtgggaggcgatcgaggaca

SEQ ID NO: 1936 - DNA, 477 bp, Oryza sativa
  Clone ID: uC-osflcyp036c06b1
attcccttctttattagcaccaaccccgtctccggccggcattcctccgccgctggaaccttctaaaaactctcctcctcctcccatggcggcgacgatcgtgtccgtcaaggcgcgccagatcttcgacagcaggggcaaccccaccgtcgaggtcgatgtgtgctgctcagatggaacctttgcaagggctgcagttcccagtggtgcatcaactggtgtctatgaagctctcgaattgagggacggtggatctgattacttgggaaagggtgtttccaaggctgtcgacaatgtgaactcggttattgccccagctctgattggcaaggaccctacgtcacaggctgagcttgataacttcatggttcagcagcttgacggaaccaacaatgagtgggagtggtgcaagcagaagcttggtgctaatgcaatcctggctgtgtcactggccatttgcacagctggagctatcat

SEQ ID NO: 1937 - DNA, 448 bp, Oryza sativa
  Clone ID: uC-osflcyp036c07b1
tcgttatgtcctccgatcccttcctttcttggcatggatctatcaaagatgaggtggggggacgcggctcgcaacgtcgtcggcatcatcggcaatgtcatctccttcggcctcttcctcgcccccgtgccgacgttctggaggatctgcaagaggaaggacgtggaggagttcaaggcggacccgtacctggcgacgctgctcaactgcatgctctgggtgttctacggcatccccatcgtccacccaaacagcatccttgtcgtcaccatcaacggcatcggcctcgtcgtcgagggcacctacctcttcatcttcttcctctactcccccaacaagaagcgcctgaggatgttggctgtgttgggcgtggagttggtgttcatgctggccggtgattctgggcgtgctgctgggcgcgcacacgcacaagaagcgctccatgatc

SEQ ID NO: 1938 - DNA, 468 bp, Oryza sativa
  Clone ID: uC-osflcyp036c08b1
tcggtttgctcctaccgtggaaggcaccagaggggtgctctatgttagctcaggtgcgagcgttcaaaaactcgtcgtggcctcctccattgctactgtttgccttaacccgagctggcctcaagatatgccgaaagatgagacttcctggtcagacaagaagctctgcattgaaaatgaggattggtactctgttgccaaaatcgaagctgaagagatggccctggaatacggaaagaaaaatgggcttcatgtacttacgatttgtcctggaattgtttttggcccaatgttgcagacagtggaaatcaacacaagcagcaaagtgctcctctatatgattaagggaggagacggccctcacgttatgaacaacaaattctggcccatggtagatgtccgtgatgttgctgatgctttacttctagcataccacatggcagggccatctgagcggtacttatgcac

SEQ ID NO: 1939 - DNA, 424 bp, Oryza sativa
  Clone ID: uC-osflcyp036c12b1
tttgtttctcctctctcgccgccgccaccacgggcggggttgattggaatctgggggggggacaccaccgacccaagcatggccgacacgaagactgcgccggcggtgacgctccgcaccctcaagttcatgacgaaccgcctcctctccctcaagcagttcgtgctcgaggtgctccacccgggccgcgccaacgtctccaagggggatctgaaggagaagctggcgaagctgtacgaggtgaaggactccaactgcatcttcgtgttcaagttccgcacccacttcggaggaggcaagtccaccggattcggactcatctacgacaacctatacgccggcaagaagtacgagcccaagtacaggctcatcaggaatggcctcgccaccaaggttgagaagtctcgcaagcagatgaaggaga

SEQ ID NO: 1940 - DNA, 390 bp, Oryza sativa
  Clone ID: uC-osflcyp036d01b1
ggtgcttctcttgaatgaattgaagtcattgggagcgagcctagcagataatataggggagggtcctaaaatgaaattgatctcaaaaaaacaaacctagcgattaagctattcttatatatgtgtttgcctgctgccccctaccctacaggctacatatgatttgcaagaaattaattatgagcaaggatcaggatgtgtctttgtgtaatcatcagcacgtacctagtgcttcctactgatatatatgcatgcaattgtgtgcatataaatatatttgcatgccatgctcccgtgatggttaattaaaaaaaaaaaaaaaaaaaaaaaaacataaaaaaaaataaaataaaaaaaaattttaaaaaaaaaaaaaaaactttataacgt

SEQ ID NO: 1941 - DNA, 372 bp, Oryza sativa
  Clone ID: uC-osflcyp036d02b1
gttgcattcttgcggcgtagttcatgagattttgagcctgacacttgagaagcgcacgctggtggatcatctgacacacttccgggaggaattccggttctcgcaatctctgcgtggtatgctaattcgccacccagacatgttttatgtgtcgcttaagggggacagggactcggtcttcctccgtgaggcatacaagaactcccagttggtcgagaagagcaaactcgtgctgcttaaggagaagatgagggctcttgttgcagtcccacgcttccctagaaggtggtgtgccggcaactagtgaggaagctgatagaaccaatggagctgcgcaaatgctgaatgaaagaagcgatgtagaagatgatg

SEQ ID NO: 1942 - DNA, 438 bp, Oryza sativa
  Clone ID: uC-osflcyp036d05b1
gatgatatcgagacgagggagagaaggagaagagggggccggccgagggcgtcgtggtgttcctccccccctatctctcctctgctgtgctctcgatctccatccttccttccatgcattcctccccgcacccttcgcattgctctaggcgtcacgaaacggtcgaggatctccaggaaaagaggaggaagcgatatggggtgcttcacatgctgcggagcggatgatgtcggcaagaagaagaagcgcgacgatccttacgtcccgatccctgatccaggtggtaactatgagacgctgcaagcccgggcccccagccccttcgcgttctccccccaccagcagaaatctgccaattgcagtaccggcaatgccgcttgatgaaataaagggaataaccaagaactcaagcagtgatgctctcatcggagaaggctc

SEQ ID NO: 1943 - DNA, 425 bp, Oryza sativa
  Clone ID: uC-osflcyp036d06b1
catctctctctcaggccgtcgcgtcgccgccgtgtcgggctccgcagccgcagggggccgccgatcagacgcggtctcgcggtcgcgccgagccgttgtccgccaactcgccaacccccgcccgccttcgcgccttgctcccgcctcgtgcaatcgcgtcgccttgagaagccgagaggcgagagccgcagtcgccgccgcgcccgacgccaaatagccaagcccggccagcttcgcgccgtcgcgcggtgccgccgccgccgccgccgacgccctctgcgctgccccgagaggccgagaagcccaaggactacccaaggaaaaattcctagctataccactgtttgccatggcgcctgccggcttcttcgacctcagcatccctcccgacgactccaaatctaccaccaccaacactagcgtag

SEQ ID NO: 1944 - DNA, 450 bp, Oryza sativa
  unsure (1)..(450): unsure at all n locations
  Clone ID: uC-osflcyp036d07b1
tcggtcatatggttgtgattgtgttttccatacggctgctcccttttaccacaatgttaaagatcctaaggctgagttacttgaccctgcagtcaaaggaacccttaatgttctaggctcctgcaagaaagcttccattagaagagttatcgtgacatcatccatggctgctgttgtctacaatgggaaaccaagaactcctgatgtagttgttgatgagacatggttttcagttccagagatttgtgaaaagcatcagcaatggtatgttctgtccaagaccctagcagaggaggctgcttggaagttttcaaaagataatggatttgaaatagttacggtgaacccagcaatggtcattggtcccctgctgcagccttcactgaatactagtgctgaagcaattctgaagctaatcaatggatcatnctcgacatatnctaatttcag

SEQ ID NO: 1945 - DNA, 279 bp, Oryza sativa
  Clone ID: uC-osflcyp036d09b1
tctatcttctccttcacttccccacatatcatgtgagtcttatatgaaactaggggggggcaaccacatctccataactaactctacaacgttctccatcaatcacttaaacactcattagttctcacagacctacttcacccacctcaaacgctactgaaacatggacctacctctatatgtcaacatattcacctctgcctgtatcaccaaactccctccttattatccatactaacactacacaacaactctctcgccatcatagaaaacatacct

SEQ ID NO: 1946 - DNA, 502 bp, Oryza sativa
  unsure (1)..(502): unsure at all n locations
  Clone ID: uC-osflcyp036d10b1
ttgttttcacgcaaatgctaacgccgctattagggggtccgaatgttctaacataggtgctggagctagtgcgtcgaagagtgttggtgctggtatcggtgccggtgtaggagtacacactggaatgaacattggatttcacggaggaattgggggcaatgcaaatgttggtagtaatgctggcataggtgcttctggtaaggaaaacaatagtgttgaggaagaaaaaagcaaatcggctgaagctagcacacacaaggaatatggttcggcaaattaaagaggaattctaaagaagaagcccattatacgaagatcgatatgctcattacaaacgtttgagatgtttttttttaacacattcagtaactatatgatttttttctatatttttagtctggagatcttatggcatgataaggctctccttgacgacataagccaatgaataaaatgtggctangcatgtaacctgacatgttgattttgatgataagcatca

SEQ ID NO: 1947 - DNA, 455 bp, Oryza sativa
  Clone ID: uC-osflcyp036d12b1
ttgatttttatgagctgggctttttctatttggggtgagtttatgggaacaaggggggggcataacatcgctgtctagtgaacaaatcagaggaatatgttgcattcaagggcaaaacaacttctccaaaaaggtattgtgttcgaccaactgtaggattcattcttccaagggcaacatgtgtttttacagttattatgcacgcacaattgattggtccacctgatctgcaaataagagacaagtttcttgtgcacaccacaattgttccttttggtacagctgaccaagacattgctactggttttttttccaaagaagcgggaagatatatcgaggagaattagctgagagttgctcttgtcactgcgactcaacttgaagaacagcaactcattgcaggagttcccagtgctaagactggtgttgagggtccagtggcacaagagacactg

SEQ ID NO: 1948 - DNA, 395 bp, Oryza sativa
  Clone ID: uC-osflcyp036e02b1
gtccagttatacacattaccaggtatcattggagtcccgtctcgttggacatgaggactgggtgtatactgtagaatggcagcctcctacgctactaactgatgatgaagctcatcagccaatgagcatattatctgcatccatggacaagatgatgatgatatggaagccagagaaaaataccggtctttggataaattcagtgactgttggtgagttaagtcactcagcactgggattctatggtggccattggcagcctgatggcaaatccatccttgcacatggatatgatggatcgtttcatatgtggggggatgttggactgggttctgaaaactggcagcctcagatagtcccatcttgtcattttgcacctgtatctgacttaacat

SEQ ID NO: 1949 - DNA, 305 bp, Oryza sativa
  unsure (1)..(305): unsure at all n locations
  Clone ID: uC-osflcyp036e03b1
ctttatttcgatttcccccaaatccaccncaagggaagggctaattggaaccggggaggggttaagaaatggcccgtactaagcaaaccgcccgcaagtccaccggcgggaagggcccgaggaagcagctcgccaccaagggggggaggaagtctgctccgaccaccggcggggtgaagaagccccaccgctacagggcggggacggtggcgctccgcgagatccgcaagtaccagaagagtacggagctcctgatccgcaaggtccccttccagcgcctcgtccgcgagatcgcgcaggacttc

SEQ ID NO: 1950 - DNA, 410 bp, Oryza sativa
  Clone ID: uC-osflcyp036e05b1
ttttgtttccttatgacacttagacatgcaaagggagggtttggtcatgagtatggtttgtgatcaatcatttgattgtgccattgataaaggtactttggactcattgatggtaagtaggctacattattcattgttccttttccttattctggtacttcttcaacattgcgatcttgctacttccatagtgtggtgtgggtgctcctctcagcgcagctcagatggttctagaagtagaaaggtttttaatgtcttgcttaccccactatgctatcattcacagtctcatctgcaccaagatacgccatagatttcaataacgctgctgcagactcaccagctcaaccatttgattgcaggcttcttaaaccaggagggacctttatgctggtaggcactttgaaaag

SEQ ID NO: 1951 - DNA, 423 bp, Oryza sativa
  Clone ID: uC-osflcyp036e06b1
agatcagctcttctcctccttaattggagggccttaacctctctctgggttggagattgtttgttcgttcgttcccccaaaaaatttggatccgcctctgcagattggtgccttccttccgctggaggcaacccccccccccccctcccttgtacgcttcgtcttcgtctccggcgacgagcggaagcaaaccttctccggcgagcagcaggatgcaggtgaagcacaaggtgtacgagctctacaaggggacggtggagcgggtcacgggcccgcgcaccgtgtcggccttcctcgacaagggcgtcctctccgtgcccgagttcatcctcgccggcgacaacctcgtctccaagtgccccacctggtcctgggaggcgggcgatccgagcaagagggagccgtatctcccacctgacaagc

SEQ ID NO: 1952 - DNA, 456 bp, Oryza sativa
  Clone ID: uC-osflcyp036e07b1
gttggtgttaacatgcgaccaatgaatggcacaggggtgttggatttgaatgctagcaatccagaatggaggcatgtcaatgtaagctcagctcctcctggccgttggggccataccctatcatgcctaaatggatcgctgttagttgtgtttggtggatgtggaagacagggcctgcttaatgacgtgttcacattggatttggatgcaaaacagccgacctggcgcgagattcctggagttgcaccaccagttccacgttcatggcacagctcctgcactttagatgggacgaagttggtggtttctggtggctgtgcagactcaggtgtactactcagtgatacatatcttcttgatgtaacgatggacaaacctgtgtgaggggaggtacctgcatcttggacgccaccttcgagattgggccactcaatgtctgtctatggtggcaggaaa

SEQ ID NO: 1953 - DNA, 464 bp, Oryza sativa
  unsure (1)..(464): unsure at all n locations
  Clone ID: uC-osflcyp036e08b1
gtttcacactcctctcgctgttcttctctgctggtcctgtttgtaggctgcttggtctactgcaattatttattgccacctccaattcttagtactgcgagattaattactcattcctccccgcagtgccatgttcttgagtttctttcggtttttttaatccattttgcaacactctctgtcctgcagccagagctgcatttgctggggatttatactagtaggcggcttcagctttactctctcccctttctgcttctgctgcttctccctttccctctcaacttctcaagtggcanntggtggggagggtagcattctggcccaagcaaagcgccgggttcttggctctgctcgctttttttcgtggtaaatctgtgtgcaagatctggggtacaaaaggaggggacagcagcacaagggaagaggaagagttctcgcgtttggattctctcttcggcaat

SEQ ID NO: 1954 - DNA, 453 bp, Oryza sativa
  Clone ID: uC-osflcyp036e09b1
tctatctgcaccctcactccctcctctctcctgtgggctccaatcaacggcggggggggtaacagcagcaggatggcggattcgacggcgaggacggtgaaggacgtgaaccctcatgagttcgtcaagggctactccgcccacctcaagcgctccggcaagatggagctccctgagtgggttgacatcgtgaagactgcgaggttcaaggagctccctccttatgatccggactggtactacacgagggctgcctcgattgcaaggaagatctacctgaggcagggtattggtgtaggtggcttccagaagatctatggtggccgccagaggaatggctcacgtcccccgcacttctgcaagagcagcggcgctatctcacgcaacatccttcatcagctgcagaagatgggcatcatcgatgtccaccccaagggcggaagactcatcacc

SEQ ID NO: 1955 - DNA, 451 bp, Oryza sativa
  Clone ID: uC-osflcyp036e12b1
tctatctccccacactccttcggcgcgcgcatgggtggtctagatcgcacgcgggggggggctaaaccagcccgggaaacccaaggcccctctcccttcctcaagcgcgccagcgggcctcgccggcgcgcgacattgagctcaacccccccgtcgtagtcgcacgtcgagcgccaccaccaccgccagcgcgtcgcatcgtacgtcctccacgcgcggggccgtgctaggcaacctcctctgctgatcgcccgcctcctcatgagcgtgtgacctgctgtcgaatggtgcggcggcacctgctgcgcggacacagcctggacaggttcctgccgatcaggagcctcatcatgtcgtccagctcttccttctcgtcgtcgtctccgtcgccggcggcgccgtcgtcgtcgtcgtcacggggaagcagcaccggcaggtggtgcggcgtcag

SEQ ID NO: 1956 - DNA, 263 bp, Oryza sativa
  Clone ID: uC-osflcyp036f01b1
ctttagttgagagatgggcactcctcattctcggagggggatccatctcatgaagaggggctttatgtactccaagcctaaggggctacctagcgcttcactgacaaggaggccccacttgacagtcaaagccatacagtctcagaagccaacgtaccacatggtgcaacccatcaatggcgaccccttcatctgcagcctggagacacgcttgacctacagcccgctagtcgcctagtacctttccaacctgccggcgtacc

SEQ ID NO: 1957 - DNA, 155 bp, Oryza sativa
  unsure (1)..(155): unsure at all n locations
  Clone ID: uC-osflcyp036f02b1
ctttccttgaagattgcaagcaagatcaanggggacgggctaatctcaatgtgcggtggcctaccaatgtggcctgaaggcatcccaaccccgggacccattcaccaaatcctcttttggcagagcccaacaatgtctatgatgtacaagatcat

SEQ ID NO: 1958 - DNA, 358 bp, Oryza sativa
  Clone ID: uC-osflcyp036f03b1
ctttaatatctctctccctcacctatattacctggaccgactcgaatgaccacggggtgctccaaatcttgctccttcctcccagtgtctctcaagagcggtgcagggctcacaacgcacgggaaaatgggggagatcaccaatgtcatggagtaccaggccatcacgaagcaaaagcttccgaagatgatctaccactactacacctatggagctgcagatgagtggactctcacggagaacacggaggcattctccaggatcttgattcgggcccgcatcctggtccatgtctcaaagatcgacatgtccgcaactggtcttgggttcaagatatcaatgcccataatgattgctc

SEQ ID NO: 1959 - DNA, 478 bp, Oryza sativa
  Clone ID: uC-osflcyp036f05b1
gtctattcgccagccacacctctctccatcctctggttgtctctatggctcctctggggtgtcccccgacggagaggagagaaggcgaggagccgggggagatgggatcggactcgccgcccaagaaatggggcctcagggagcagcgcgaagcctacctccggtgggtctccctcgccgacgacgatggagatgggcgcgtgacggggaaagacgcgctcaagttcttcgccatgtcgaatctctcccgccccgagctgaagcaggtctgggcaatcgctgattccaagcgtcagggttatcttggattctcggagtttatgaccgcaatgtagctggtttctcttgcacaagctgggaatgagattagtcaggacacccttgcacatgcagatttggagacgttgctacctccgacatggaagggtctggacaaaaacctaaaaataattctatgagcaagagcaactctgatatt

SEQ ID NO: 1960 - DNA, 91 bp, Oryza sativa
  Clone ID: uC-osflcyp036f08b1
gtggctcgatctccctatttctctctccggtggtgtcgattctcactgggggggggacaacagccgcaaacgaggggggagagagagaggt

SEQ ID NO: 1961 - DNA, 271 bp, Oryza sativa
  Clone ID: uC-osflcyp036f10b1
cctccttagtcatagaatttatggttttggcactcctgattttgtaaaagggattttggtagtgtcagggataaacatcaatgctgtatgcttccacacttataaagttataatgaagcaattgagatattcaaagttctgatgtatgctttatttgtgtttatatagagatgggtcagtctgtcccaaggtgataaatgctggaagacctgctcatgtcgtgctatcagacaattgattttgtagagtgaactaaattggtttctgtgtt

SEQ ID NO: 1962 - DNA, 473 bp, Oryza sativa
  unsure (1)..(473): unsure at all n locations
  Clone ID: uC-osflcyp036f11b1
tctcttcatcggaaaattcatctcaaaaaatgggcatgtgatccttaacacactaggaggggtagagctaactcnatggaggcatcgccgccgacgtcgccgtcgtcgctaaggcacagactgaggacgacggtgtgctgctgcttcngctcgccgggggagcggcggagcggggagaagctgaggtggaggcggcgggtggcctcgggggagttcgggtacgacccgctcagctacgcgctcaacttcgacgatggcgacggcgacgacgacgccgcagacgacgccgccgcggccttccggtacaagaacttctcctcccgggtcccgccctcgccggtggcggcgccggcgcggcggtcgacggccatcgccatctcatgaactggaccccacctgtgtcctncttcacgccctaactnttcttcactatagagagattaaactgtgtactcatgattaaactacagcat

SEQ ID NO: 1963 - DNA, 339 bp, Oryza sativa
  Clone ID: uC-osflcyp036g03b1
cttcgtttcgacctaatcgaccgccttctcgagggggggccccgctctaccgcctagggggggtccgaaacgccgccgacgtcaagtcccaccccttcttcaagtgcctcaacctagccctcctccgttcgtcgcgcccgcccgtcgatcccggcgcctgcaccggagccgagcctgtacaccggtcagaaatcgtgcaaggcggagacagcttctgcatattcgtacgacaacttcaaacccagattaacgccaccgtgccggacgaacctcttctgatcattattgaccagcacatgtatggtactacctacccgactcgtggaattcttgacctga

SEQ ID NO: 1964 - DNA, 451 bp, Oryza sativa
  unsure (1)..(451): unsure at all n locations
  Clone ID: uC-osflcyp036g04b1
attcttttaggacatgaccatgtccccacctggggcccatgtggtgaagaatgcgtactgcttactgaactttggggacagcattactacagaccatatttcaccagctggtatcattcacaaagacagccggtggtggaagtacttgcttgagcgtggtgtggaccgtaaggacttcaattcatatggggggaagaaccggtaatgatgaagtaatggcaagaggaacatttgcgaacatcatgattgtgaacaagtgctcgaatgggaaagttggacccaagaccgttcatgtccctacaggggagaagctctatgtatctgatgctggcttgaaatacaagtctgagggtcatgacactattgctcttgctggtgctcattnggaagtggcaggtctcgtgactgggctgccaagggaccgatgctctgggtgttaaagtgtgatcgc

SEQ ID NO: 1965 - DNA, 382 bp, Oryza sativa
  Clone ID: uC-osflcyp036g05b1
gcttgtttcgctgcaggcctgcgatgctggtggcctcccagcgttggttacatcataccacgagcattgcttatatctatactacggggcgctgctggtgcagacaatgatgggtcggtttactactgtcgcctccccttggtatcccggaatcctttatgtttgcagggatactcctatgtaagattgttcgtttcgccctgtgtggctgcatgtgtggtgtccaataattgagatgccttttacactacgatgagaggagacgtttcctgcgtcgcaatgtaatcagattatggagcagaatatatttgcctggattgtctgatgcgtcgaccatagctcatatataaaactatagtgagctgcgtagaatcgtgagccg

SEQ ID NO: 1966 - DNA, 493 bp, Oryza sativa
  Clone ID: uC-osflcyp036g06b1
ttttgtttgggaagaagaagaagcaggggagcatggggggcaagtcgaacccgacggtgagcgatgagtacctggcggccgtgggcaaggcgaagcgcaagctccgcggcctcatcgccgagaagaactgcgccccactcatgctccgcctcgcgtggcactctgctggcaccttcgatgtgtcgtcgaggaccggcgggcccttcggcaccatgaagaaccccggcgagcagtcccacgccgccaacgccggcctcgacatcgccgtcaggcttctcgaccccatcaaggaccaacttcccatcctctcctacgccgacttctaccagcttgctggcgttgtggccgtcgaggtcaccggcggacctgaggtccccttccatccgggcaggcaggacaagcctgagcctcctcctgatggccgtcttcctgatgccacacaaggttctgaccacctaaggcaggtcttttctgcgcagatgggtttgagtga

SEQ ID NO: 1967 - DNA, 459 bp, Oryza sativa
  Clone ID: uC-osflcyp036g09b1
tttgtttctggaaatgactacttctatattgggtgtgggtctgatactgttccggtgtcgatcacaaaggtagctttaaatgaggacagaacaaaagtagttagtttctcaataatttggtcatcctcatcagatgttgtacaatatagttctttcttcagtgcaccagaatttgttgagttttcaacatccagcaccggccagaaagcttatgcatatttctacccaccttcaaacccaaattttcaaggtttgccagacgaaaaacctccattgcttgtcaaaacacatggaggaccaacagcagaaacacgtggaattctggacctgagtgttcagtattggacaagtcgaggatgggcatatcttgatgttaactatgggggaagcactggttttgggagggagtatcgagagaggctattgaggaaatggggtatcgccgatgttgatgattgt

SEQ ID NO: 1968 - DNA, 476 bp, Oryza sativa
  unsure (1)..(476): unsure at all n locations
  Clone ID: uC-osflcyp036g10b1
tcggttgggattggtctggacaccaaagaatgggacatgcatgtgataattgagaccaaccgcacaacagcaaggattttccccgctgttcttgacgtcgagaaccctgaattcaagaggaagttagacaggatggtggagatcaacaaaaagatcattgccataggcgagtctgacgatatccccctggtgaagaacctgaagaggattcctcacgttgccgctctggtgtctgagatcattgctgcgtacctcatgcccccaatcgagtctggctctgttgatttcgctgaattcgagccccagcttgtctactgattctgtaggaagaccatctccagcttttttttccttcaaaaaggaatgctgatattttctgcctgaggggcttcgaacggtgagatgatgggtggttagcaaaatctgcacctcgtgtgttcctttggaaagtattgagacttcncaatgtaccattt

SEQ ID NO: 1969 - DNA, 463 bp, Oryza sativa
  unsure (1)..(463): unsure at all n locations
  Clone ID: uC-osflcyp036g11b1
tcttacgcgtccggtgctagctccatggcgttcttcagcagcggatcgcgggcgctggtggaaatcctgacgggattgcagaggtgcgttgctgttggttaatctttccttctctttctttgccagtgaaagcggaaatctttttttcgataattgaattcaatccagtctctacattgaggtgaaagcagaaaagttgtctgtgtgcaaaggttggctgcctgagttgtgccgctcctacatacatacatggattggttgacgcaatgtgatcagaaaactatgtttctcttgatctttgcagtgttgaacgacctatgcctgttgatcataccttgtttgagtttggatcaatccgttaccatttacaggtaattttgctccaaacacctttgatgcattatcttgcaatttgaaacaattaatgtanggcatggaaaatgatcatataatacgcatcaag

SEQ ID NO: 1970 - DNA, 285 bp, Oryza sativa
  unsure (1)..(285): unsure at all n locations
  Clone ID: uC-osflcyp036g12b1
ttgttttagtgagttgttgtaaagttncnagggagggatagttagatcagttggtgggggttagtagaaccacatcangaagatgctggagaagctgtgggacgacgtggtggccggtcctcgaccggagaccggcctcgagaagctccgcaagggcggtacaacccggccccttgtcatcaacaaagatggcgacngctaggcgagcggagtggcgtacaagcggacgcagtcgatgccgacgaccccgacgactcctgtgacgccgtcgtcttcgtccccgac

SEQ ID NO: 1971 - DNA, 306 bp, Oryza sativa
  Clone ID: uC-osflcyp036h01b1
gcttgaagtgtacaattcattgacagaagaaggggagaagctatatatcgagggtggcagtgcaacatattatccatgcatggatatactatatgaatgctatgaagatgtttcttctggaagtgaaattagaagtgttgttttggctggaaggagattttatgaaaaggaaggacttcctgctttcccgatgggcaacattgatcaaacacgtatgtggaaggtgggtgaaagggtgcggtcaacacggccagcaggtgatcttggcccattacatcctttcactgctggagtgtatggtgcact

SEQ ID NO: 1972 - DNA, 236 bp, Oryza sativa
  Clone ID: uC-osflcyp036h03b1
gactcactagatttatgggaagcccattttggtgattcttccaatggagctcaagtgatatttgatcagtttctgagtagtggagaggcaaaatgggtccgccagaccggtcttgtcgtttgccttcctcacggatatgatggtcaggggcctgaacattccagtgcaagggtggagcgtttccttcagatgagtgatgacaacccttatgttattcctgagatggatccaactct

SEQ ID NO: 1973 - DNA, 382 bp, Oryza sativa
  unsure (1)..(382): unsure at all n locations
  Clone ID: uC-osflcyp036h04b1
catccagaattcccttgtcgtcccacgcctcccgtttctttatatcaacggctcaagtcttccaaggtngtgcttaaattaaacttgaggttggtcaaccaatggacagggaagcgttctttcagtgggcatagcctgcacacgattggcagcacaccaaatccatattagcaagccatcaccatcatcaggaactcattagcacctttccacgatgataatctcatcccatgctttggcttccgcgacgcaaccacacatgactacaatgggtgcaggttccatcctgacaactcaccctgccatggattacaggagggcctatcatgctacaagaagattgtgccacacctcaggctatctgggcctacctctttcgcgc

SEQ ID NO: 1974 - DNA, 360 bp, Oryza sativa
  Clone ID: uC-osflcyp036h05b1
cttgcatggtgtactccaagccccggcggctcgggacggactagatccctcaggggggcgatgacttcaggcgagccgcgcggaacgccatcgaggctgggttcgacggcgtggagatccacggtgcgcacgggtacctcctggagcagttcatgaaggacagcgccaacgaccgcaccgacgagtacggtggcaggctcgagaaccgttgccgcttcgccgtcgaggtgatcgacgccgtcgtcgccgaggtgggagctcaacgtgtcggaatcagattatcgccgttcgtggacttcatggactgcttcgactccgacccggtgactctcgggtatacatggtgcagcaactcaacaa

SEQ ID NO: 1975 - DNA, 479 bp, Oryza sativa
  Clone ID: uC-osflcyp036h06b1
gtttctttcacctatatcgcgccgcctccatcggggaggtcttaatgcaacgtggggcagggacataagtaacaacaagcgcatctccaaggggaagaagggatccaagaagaataccgtctatccctttgctaagaaggactggtatgatatcaagggcccgtcggtgttcaatgtgcggaacatcggcaagaccctcgagtccaggacacagggtacaaagattgcttctgagggcctaaagcatacagtgtatgagggctccttagctgatctccataacgatgaggatcaagcgtacaggaagatcagacttcctgctgatgatgtgcaagggaagaacgtgctcaccaacttttggggcatgtcttttactaccgataagctcagatcactttgtaaagaagtggcagacactgattgagggtcatgtgggatgtcaaaaccacatgacgctacatgctgcgtctgttctgtat

SEQ ID NO: 1976 - DNA, 350 bp, Oryza sativa
  Clone ID: uC-osflcyp036h07b1
gtcttaccgaggaggaggaggagggcccagcagggaccacagcggcgggggggccggcaccaacccacacccacacctactactacgacgacacaagtagtggtcgtcgaatccgcggcggcgctcgcctgagcttgcgctgcacctgcacgcggcatatgcctcaccgccctcacctgggtcagctccgacggctactcctcctgccttgtcctgcgtccccgtacccgtccccgcccgccgcctctcctcccctcgcgccatggcctcctcctccgtctccgccgccgccgccgtcgcgcaggcaggtggtgctgtggcggcagcggagtacagggacgtgatggggc

SEQ ID NO: 1977 - DNA, 471 bp, Oryza sativa
  Clone ID: uC-osflcyp036h08b1
gtacccgtccttacttcctcgacccacccacgcgtgttgtttaatcgagttcaatgagccacggtttggtgggttctatctaacggcagcgggtgtcacacaatatggcaggatgaacattggtagccgaccatcaaagagaaagcctagtggtggcattgaatcgctccgtgcaattccttggatttttgcttggacacaaactaggtttcatcttcctgtatggcttggatttggtggagcgttcaaacatataatgcagaaggatatcaggaacatccatacactgaaagaaatgtacaatgagtggccattcttcagggtcaccttggacttgcttgagatggttttcgccaagggagatccaggaattgctgctttatatgacaaattgcttgtggcagggtgatctgcaatcctttggagagcagctgagaaacaactttgaagagacaaaacagctactccttc

SEQ ID NO: 1978 - DNA, 539 bp, Oryza sativa
  unsure (1)..(539): unsure at all n locations
  Clone ID: uC-osflcyp036h09b1
agctgcccggctggcggtaccagacctacattcccggctccaacccatcccgttctgtttggggaccattctcaacacctcacggtggtgttaatagacatccagagggtgtgaataaaccacaatccttcttcccagacagggctgcggatggacaaaacgaagcgaagatggtgatcccatttggtatggggagaagggggtgcccgggagagaatttggcgatgcaaatggtcggacttacactagggacgctgatccagtgctttgattgggaaagggtgggggaagagctcgtggacatgggtgagtcctctgggattacaatgccaaagaagttgcctcttgaggcattctatcaacctagagcatgcatggttcatcttctttcgtcctaatatttaatcagcagttttccaaacataattgggtggtgaactctgtaatcgaaagaaatgaatgagctcatttggtgggatttgcccataataattgggggctctggtactctatatatgtatcctatgaaactntttatg

SEQ ID NO: 1979 - DNA, 437 bp, Oryza sativa
  Clone ID: uC-osflcyp036h10b1
tcttgtcaccttcctcgcgaacactcgcgaaggcttgctctacatatcccgagggggctccgaccgccgcccgcgccgcataaatggcggatccgctcgtcttcctcctcatacagaagaagaagcaacgcgctcgccaacgacgacgacgacgacgaactagggaaaagcggaccgcatcgcgcgccggtagctgacctcactcggccccgtggagatccaaaaggttttttggtggtggttgttcgtctcggattatcttctggccgcaccgcacatcgggggcagctctgctctgtatcagccctagaacctgttcggcaggtctaggtatttatcaaactagtatatactaaattaggtagtgatgtatcctgcaaccagtacatggatccatactattcacattacagagatcacgctccttacgcacatta

SEQ ID NO: 1980 - DNA, 441 bp, Oryza sativa
  Clone ID: uC-osflcyp036h12b1
tttcttttgactacacccgcttcgcttcctcgggtgggtttagatgagaagctgggggcgtggaatacatcaccgcccgcaccccggtcgcagccctacggtcgtcagcgtcactcaagtctaccttcctagggcaatcctacacccgcctcgcccgcgcaccgactacgaggcgtaatgttcgggcggaggccaagggagagtggctccccggcctcccttctcccacctacctcaacggcagcttgccaggcgataacgggttcgacccgttgggtctggcggaggacccggagaacctgcggtggttcgtgcaggcggagctggtgaaccggcggtgggcgatgcttggggtggccgggatgctgctgccttaagtgctgacgataatcgggttgatcgacgcgccgcaatggtacgacgcccgcaatgccacctact

SEQ ID NO: 1981 - DNA, 319 bp, Oryza sativa
  Clone ID: uC-osflcyp037a02b1
catgtttgctccagccacacgagcctagttcagggagatacaatggcgtgcaccgcctctttcatgctcgccgacttgctggcggtggccgacgcggtggtgccgctgagggcggtacggttggcgcgtggcattaaccttgcctaccgcgacacaagaggcagtgatccatatgtcgcgcttcgtctcggcaagcaaaaagtgaagactagtgtaaagaagaaatttgtgaatcctatttggcatgaagagctaactttgtcgatcatgtaccctattgcaccgattaagcttggggcgtttgcaaagacactttcag

SEQ ID NO: 1982 - DNA, 218 bp, Oryza sativa
  Clone ID: uC-osflcyp037a04b1
gcgtgatggcacgcggatccgccgccgcggcgatcgccggagttgtgtgggtgcttctcctcctcgtgggggtggcgtcgggggcgcgtcttccgggcgggagcgggggtaaccgggggcgggagccgcgcgggggagcggcggcggtcgcggtggccacggagacagcggagttcgcgctgggaagctcatgcaggtcggaggccaggttcggacgc

SEQ ID NO: 1983 - DNA, 329 bp, Oryza sativa
  Clone ID: uC-osflcyp037a05b1
ggggcgacgacacacgtgcggattcgtcttcctcctcctcggcggacggcgacagcgccggcgccccatcatcgagaatgaagcgacagcagctcacaacggtgcccatgggccacctaggcgacggcgtcccgtggcactggcggcgtgttctgggcagagaagccgtcgctggcatctgggccatggtcgaccagggaacaggccatggctaccgtgattaccagatgaagagtgtcccttttgtttccctgataaagtctccatagcagcagagcattcattcccaaaaacgacttgcaaacattttggtttttgatgcgttgatc

SEQ ID NO: 1984 - DNA, 189 bp, Oryza sativa
  Clone ID: uC-osflcyp037a06b1
atcgtcatctatctcagctctcacagctcactgcatcaatggccgaggccaccatggcgctctcctccccggtgatggcccgcgcggagccgtcgaccttctccgcgctcttcggcgaggcgcggatcaccatgcgcaagaccgccgcgaagcccaagccggcggcgtcgtcggggagcccgtggtacg

SEQ ID NO: 1985 - DNA, 490 bp, Oryza sativa
  unsure (1)..(490): unsure at all n locations
  Clone ID: uC-osflcyp037a08b1
atccccctcctcctccgccaccgccatggctcgcctcctcctccccctccccatcgccgccgccgccgcctcccgcctccgcctccccgtcctctcctcctccgtggcgcggcgtgaggcgctgctcttcggggggagggtggcggcggcgagggcgccggtgaggctggcgaggagaggggtgagcgccggggcggaggcgggcgggtcgtcgtcggccgccgcggcagcgcaggtgatcgggcaggacgaggcggtggagtgggtcaagaaggaccggaggcgcatgctccatgtcgtctaccgcgtcggcgacctcgacaagacgatcaagttttacaccgagtgcttgnggatgaagctgttgcgcaagcgcgacattccggaggagaggtataccaatgcttttctcgggtacgggcctgaggactcgcattttgttgtggagctcacttacaattatggtgtggaaagttatgatatcgggact

SEQ ID NO: 1986 - DNA, 552 bp, Oryza sativa
  Clone ID: uC-osflcyp037a09b1
atgcttctcagctcacagcaaagcccaggcttgttgagcccgtctacctggtggagatccaggcccctgagaatgcccttggtggtatctatggtgttctgaaccagaagagaggacatgtgttcgaggagatgcagaggcctggtacccctctgtacaacatcaaggcttacctccctgtcatcgagtcctttgggttctcaagccagcttagggctgcgacatctggccaggccttcccccagtgtgtgttcgaccattgggacatgatgacctctgatcctcttgaagctggctcgcaggcttcaaccctggtgcaggatatccgcaagaggaagggtctcaaggagcagatgactcccctctccgatttcgaggacaagctctaaatttttggccgccgcatgtgttgtgccgttacccttacatgttctagttggtctactgctaagagaactgctttcgttgtcgtatttcaatttccttttgtcgaatgcatgtgtttcacatcaacaattctatgttcgcgtgctactgagaaactatttttac

SEQ ID NO: 1987 - DNA, 285 bp, Oryza sativa
  Clone ID: uC-osflcyp037a11b1
attgaattgggccagtgctggcgagaagcgtggtgatacccctgactacaccatttttgtcggggatttggctgcagatgttacagactacctactacaagagacattcaggggccattacccttcggttaagggtgcaaaagttgtaactgacaaaatgacaatgcgttcacagggatctggccatgggtaccgtgatgaccatacagagcaggctcgtgcagtgactgagatgaatggaatgctgtgctcttccagaccttcccaaaaacgacttgcaaacat

SEQ ID NO: 1988 - DNA, 347 bp, Oryza sativa
  unsure (1)..(347): unsure at all n locations
  Clone ID: uC-osflcyp037a12b1
gctgtttaattatgggattggtatccatctgcttcaggctgaagatcctgacagcctgtcagggaaaacagagatcaatcctaaagataatcacatctccttccagtgtgagagcatggtggcagtggagcggcggctgaaggagctaggcataccttacatacaacgatgtgtggaggaaggtggcatctatgtggaccaaatcttcttccacgatcccgatggcttcatgatcgagatctgcaactgcgacaacctgcccgtcgtccccctgggcgccgaccagccgctcgtcatggccgtctgcangagggctcgtcgtcatcaagcagcagcagcaggcgttc

SEQ ID NO: 1989 - DNA, 256 bp, Oryza sativa
  Clone ID: uC-osflcyp037b01b1
gatgaagagatcgccatgtccaacgtgcccacctccctccgcgactcctccctcaccgtcttccgcctcgccatctccagctccgacccctggcccttctccctttaaccccatcaaacgcttcttcctcttccaagaagatcacaagcttcttcgtgttcttgttcttcttcggatcactcggttggtttcttggtttcttggtttcttggattgttgcgagatgcacgggaagcatcagcatcagcagcagggg

SEQ ID NO: 1990 - DNA, 257 bp, Oryza sativa
  Clone ID: uC-osflcyp037b02b1
gattattgagatcgccatgtccaacgtgcccacctccctccgcgactcctccctcaccgtcttccgcctcgccatctccagctccgacccctggcccttctccctttaaccccatcaaacgcttcttcctcttccaagaagatcacaagcttcttcgtgttcttgttcttcttcggatcactcggttggtttcttggtttcttggtttcttggattgttgcgagatgcacgggaagcatcagcatcagcagcagggg

SEQ ID NO: 1991 - DNA, 101 bp, Oryza sativa
  Clone ID: uC-osflcyp037b03b1
atatgaagaaggtggtttcgctggaagaagaagaaggtgaaaccctagatctgatctcggatgacggcgcgatcgttgttggccggtaggatggtggcggc

SEQ ID NO: 1992 - DNA, 308 bp, Oryza sativa
  Clone ID: uC-osflcyp037b04b1
cggtcgcgtgggaaaaaaaccaccacgctctgagcctactccctgcctgccccacccccgtcaaagcgagagctccgtatgaccggcactatttcccttgccttgccttccgatccaaggcctgcttctcctactcgcggcgctcgctgagcatggcggcagagggggaggccaagaaggacagcgccagcaaccctcccgggggaggcggcatcagaggtggaggggaggcggatcacaactactgttcatgcagccgacagccggtgaggcgcaactgctggggatgctgttgaagaaggccggtg

SEQ ID NO: 1993 - DNA, 448 bp, Oryza sativa
  Clone ID: uC-osflcyp037b05b1
gcatcaggctgtaagcacaagtatcgaaatggttaggcggtgatgtaggagtagtagtgtactacctgctgctagtattagtggtggtgcaggggtgcaaaggcagcagcgcggtgcagggtgaaggtcggtggtacaacgagagcgaggccatcggtggtgcggcagcgtgggggaacgcgaaggcgacgtggtacgggcagccgaacggcgccggggcggtggacaacggcggggcgtgcgggttcaagaaggtgaaccagtacccgttcatggggatgacgtcgtgcgggaaccagccgctgtacaagggcggcaagggctgcggctcctgctaccgcgtcaggtgcaatcgaaaccccgactgctccggcaacgcccagaccgtcgccatcaccgacatgaactactatcccctctcccagtaccacttcgacctcagcggcat

SEQ ID NO: 1994 - DNA, 381 bp, Oryza sativa
  Clone ID: uC-osflcyp037b06b1
acttgccagtaagctagctaactaactacgtggctatggcccccaccgtgatggcctcctcggccacctccgtggctccattccaagggctcaagtccaccgccggcctccccgtcagccgccgctccaccaactcgggcttcggcaacgtcagcaatggcggaaggatcaagtgcatgcaggtgtggccaattgagggcatcaagaagttcgagaccctatcgtacctgccaccactcaccgtggaggatcttttgaagcagatcgagtacctgcttcgatccaagtggctgcctggactagagttcagcgcggttgcacacgtctaccgtgagaaccacaggtctcccggatactacgatggcaggtattggaccatgt

SEQ ID NO: 1995 - DNA, 572 bp, Oryza sativa
  unsure (1)..(572): unsure at all n locations
  Clone ID: uC-osflcyp037b07b1
tttacgcgtgggtgattatgaagctgtagaaaggaggttttgcagtactaacattgtataggatattactaacattgtataggatataataccagggccaaacatttgggtggtttgtattaatgctcttctttttctagccaatcacttcattcagtttgacaatatgtatatcattttttgtccttaacattagaatggtaatgctttaatgcagccaacttttttacaaagtattttaagcataatttcaccaagattgccttaatgaaatgattgtcagacatagatgcacatgcttttttcttgcgttatgaaatgtcagataaatttatttcaagttactacttgcaaagttgtcaaatcttagtcgagcaaaagtcagcagtacacaatctgcacatatacggtaccgttcattttgagcaatgtctatacatgaaagtcctttcttagcagtcaattccatggtccctgcaagtgtacattctatttgacaatgccacgtttattattattntgcatgcttatgcangatattatcaagctgatacttcgcattttctagattt

SEQ ID NO: 1996 - DNA, 509 bp, Oryza sativa
  unsure (1)..(509): unsure at all n locations
  Clone ID: uC-osflcyp037b08b1
cagcagctgagcttgaagcagcagagcgaggtagacatggccgccgccaccatggccctctcgtccccggcgctggccggcaaggccgccgcgaaggtgttcggcgaggggcgcatcaccatgcgcaagtcggcggcgaagcccaagcccgccgcgtcggggagcccgtggtacggcgccgaccgcgtgctctacctcggcccgctctccggcgagccgccgagctacctgaccggcgagttccccggcgactacgggtgggacaccgcggggctctccgccgacccggagacgttcgccaagaaccgggagctggaggtgatccactccaggtgggcgatgctcggcgcgctgggctgcgtgttcccggagctcctcgcccgcaacggcgtcaagttcggcgaggcggtgtggttcaaggcggngtcgcagatcttcagcgagggcgggctcgactacctcggcaacccgagcctgatccacgcgcagagcatcctcgccatctgggc

SEQ ID NO: 1997 - DNA, 436 bp, Oryza sativa
  Clone ID: uC-osflcyp037b10b1
ggagaatatatgttgacctcaagaagaatgataccataactgtgaagctgagtaacaactacaatacatataactttggtggcaagaaaaagctggtcctttctactgcaacctggcttggtgggaagaatgattttctaggatttgcgtatgttatagtcggaggggtctgctttttcttggcatttgctttcaccttgctatacctcataaaaccaaggaaattgggtgatcacaactacttgtcctggaacagacatcctggaggccgttaagacgtccaaaacacttgtcgcataaaaatggctcatccggtgacatgtatcatgcacttaatgatgatatactgaaaattgtcagggagtgtaatcaggtctttggtttgacctagaccttcatgtacatcttagcataagaaccacgctgttttgtatca

SEQ ID NO: 1998 - DNA, 528 bp, Oryza sativa
  Clone ID: uC-osflcyp037b12b1
tgtcagccgcagttcaggatatcatggagcagctatctgcgaacaatttttgacaaacgtgatggtggaaaacaaatttctaacacaacaaatgaaattaaggaatcagatgaatccgaggattcaatctgttgggttaaggctgatgatgaagaagctgaaattgcttcctttcttgaaattatgaaaactttttcagcccatcgcttgcttattgtggttgacaactttgaagacaaatctcctcattatcaaaagttaattaaggatctctctcaaaagttttacacgtgttggatgagtaaagaaggcagtgtcacaattgtggagtatgactctcctaacactgaagagaaagagaccaaaagattggtggttatgtttggtgggacaatggcactggatgaatatatccaccaaaaaaatctctgtacagttgttttggtgaagacatctgagataagctgctaagagatgctggaatcgaagaaatagtgcttagacacttctgagttttcgcaacatcaa

SEQ ID NO: 1999 - DNA, 537 bp, Oryza sativa
  Clone ID: uC-osflcyp037c01b1
cggacgcgtgggcacgcacgttgccaccacaggctacgcaaaattctctcccttcctcctccaccacctccactccgacgatcctcctcctgatcctgtgccggccggcgatggcgtaccggttgctggagctcacgctggtctccgcgagcgacctcaagaaggtcactctcttctcgcgcatgcatgtctacgccgtcgcctccatctccgggagcaacgtccccatgcccatgcacggcacccacgccgaccgcaacggcggcagcaaccccgcgtggaacaccgtgctccacttccccgtccccgcccgcttcgacacccgcggcctcgccctccacgtccagctccgcgcccggcgctccttcggcggccaccgcgacgtcggggacgtgttcgtgcccctcgacgacctcctcgccggcgcgcacgacggcggcgagccgaggccggctagctaccaggtgcgccgccccatggtccgccgcgcgcacggtacgctctacttctgctacaggttcaccgacgtcaagcatc

SEQ ID NO: 2000 - DNA, 375 bp, Oryza sativa
  Clone ID: uC-osflcyp037c02b1
ctttttggacctgacactgtgcggattcatcgtatcggtgttcttgggagccaggacggacttctacgagtgagtgcattaccgtgtcagcctcatgcgatccgacattctatacagcgttccctggctgatggtgatcaatgggcgcactgatctgatcacattaagtgtcccatctgtgggctatgaggatgcattgcgatgaatatactcagtcctgagaggggcgacacttacactataagcatagaggatagacgatgctttgatgtcaatcacgcctggtacacaggttgatggtacatggggtggtgatgatggactctggagtctcagaggtgctttggagtggatccttggcatccatgctcatgc

SEQ ID NO: 2001 - DNA, 519 bp, Oryza sativa
  Clone ID: uC-osflcyp037c03b1
cacccgggaaatcgccggctgcgagccccctcctcctcctcctcctcctcctcttccggcgacccccgactccgctccagcgacccgatccccacctcgaccaatatggactcagagccctcatcgcagaacccggcagatatgacagcatttgtacaaaacctcctaacccagatgatgaaatgggaaccaagatcgatgagctggagcagagcgtcaacgacctgaaagctgagatgggtactgatgtgcctaccaagaaggccgacgaggcgaagcctgccgactccacataacttggccgcagaccagagattggcccgtaacgatttggcatcggtgatggatttttcagcgttttatgtgtatccgatattagttttcttggaccattgctgttgaatgactcgagagtgattttatgctatgagcgttctcctctagagtatctgctgctgctgctgctaaggcgatgtgtttggcttgtatgcaaatttgaatttagcagaatgccacaga

SEQ ID NO: 2002 - DNA, 409 bp, Oryza sativa
  unsure (1)..(409): unsure at all n locations
  Clone ID: uC-osflcyp037c04b1
gctagctaactaagcttaccacactcacatactcctatatattttggcacgcattgattacctgctagctccttgagcaatatcaatatggctcagccgacttggtcagcaaggcgcgtcactgccgccctggtcgtgatggtggtggtgtngtctccccgacgggctcctcccgctgccgtccctggaggaggtcgggtacaaccgcgccgccgggttcgtgtggctccggcagacccatgcgggcggagccacccacacgtttgacaccatctggaagcatgtgtggtacgtcggcgaggtgactgcgttcgtggagcaggggcggatgcacggcgtcgtcggggtgaagagcaaggagctcctcatctgggtctccatcttcgagatcgttctcagcccctccggc

SEQ ID NO: 2003 - DNA, 459 bp, Oryza sativa
  Clone ID: uC-osflcyp037c05b1
ctctccaaggaccactacgtcatcaacggcaccgtgcgcgacctcggtgagggcaagaacgcccatctgaaggcgctggagaacgccggcgagaggctgcggctgttcaaggccgacgtgctcgactacggcagcgtcgcggcggcgatcgccggctgcgacggcgtcttccatgtcgccagccctgtcacctccggccgacccaccaatcctgaggtagatatcatcgctacggctgtaactgggacactgaatgtgttgagagctagccacgaagcaaaagtgaagcgagttgtggtggtttcttcagttgtcgcagtgttcaataatcccaactggccaacgggtgagcccttcaacgaagacagctggtcagatgaggagacctgcaggaagaatgaggaagtggtacccctattacctttccaaaacactggcagagcgtgaggcttttgagta

SEQ ID NO: 2004 - DNA, 517 bp, Oryza sativa
  Clone ID: uC-osflcyp037c07b1
aatggccaccatggctccaaggctgctcatcgtcgtcgtctccgtcctcttcaccgccggcataatcgcctccgccgccgccgcgcgcgacctcaccgccgacccggccggccaggccccgccggcctacgacttcggcatcccggcaggcttcttcgtccccggcaccaacaacccgtacaacggcgatcctgcagcgtgggcagctgggtacggcagcgccgccgccggcgacgtcggcgggttcgggaatggtggggctggaggcagccgtcgatggtttgctccgacaaggggccatgcaacggcaagaagctgacctgcccgaagaagtgcttcgtctacttcagccgctccggcaaggctacgccgccggcggaggcggaggcggctgctcctacgactgcttgaccaagtgcgaagctacctgctgatcatattactacttgatgtgctgacccatcgaatacaacgcctcctgtggcatcagctcaatacttcatggatcgccatatca

SEQ ID NO: 2005 - DNA, 478 bp, Oryza sativa
  unsure (1)..(478): unsure at all n locations
  Clone ID: uC-osflcyp037c08b1
tggacgcgtgggcgacggctcgagcttaaaaccctagagccgctcctcctcctcctcctcgcctaccccgaaacccaaatcccccccaaggcggacgcgcccgcaaagggtcgagcgcgctcatggctcgcgtgtacgtggggaacctggatccgcgcgtgacggcgcgggagatcgaggacgagttccgcgtgtttggggttctgaggagtgtatgggttgctagaaaaccaccaggttttgcctttattgactttgatgaccgcagggatgcagaagatgcaattcgtgatttagatggcaagaatggatggangggttgtagctgtcaaccaaagctggtagtggtcgtggccgagatcgttccggtggttctgacatgaagtgctatgaatgtggcgaacctggtcattttgcacgtgaatgccgcttacggattggttctggaggccttggcagtggaagacgccgcagccgc

SEQ ID NO: 2006 - DNA, 558 bp, Oryza sativa
  Clone ID: uC-osflcyp037c10b1
tcaactccgggcctccggcaagccaagaaacccccaacccaactccggcgatggcgtcgcagctggtggaggagcaccggtcgggcgcggaggtccacacggggcacgagctctgcgagcggaaggcccgggagctgctggtggagctcggcctccccgacgggctcctcccgctgccgtccctggaggaggtcgggtacaaccgcgccgccgggttcgtgtggctccggcagacccaggcgggcggcgccacccacacgttcgacaccatcgggaagcaggtgtggtacgcgggcgaggtgacggcgttcgtggagcaggggcggatgcacggcgtcgccggggtgaagagcaaggagctcctcatctgggtctccatctccgagatcgtgctcagcccctccggcaccaagctcgtcttccgcaccccggccggactcggccgcgccctccccgtcaccgtcttccagctcaacccggcgccctcgagccggagaagaggacgccgtcgtcgtcgacaggccgaccccgcgcaccactgatccagaaacatggcgt

SEQ ID NO: 2007 - DNA, 208 bp, Oryza sativa
  Clone ID: uC-osflcyp037c11b1
gagccctcacagagaagaaaccctcgcttcgccgtcgcggctggccggccgccaccggcgataacctcgccgccgacgactccgcatccgcttccgccgcacccggtggggaatggcttcggcggtggagcggagggagcattcgcggaggtcgtggcgctcgaggtcgcgctcgccggcgagggaccgtggctggccgccgcgcagg

SEQ ID NO: 2008 - DNA, 106 bp, Oryza sativa
  Clone ID: uC-osflcyp037c12b1
gttccggacaaggttctggatcaggatatggctctggtgcttttggagctggtggttatggaagcggtggaggtggcggaggtggtggcggttaaggtggcggtgc

SEQ ID NO: 2009 - DNA, 531 bp, Oryza sativa
  Clone ID: uC-osflcyp037d01b1
atcacactcacacaacacaaccctccccaaaacctcccgaagagagcaagatgttcggcttcgggcaccacggccaccatggccaagaccagccgccccagcaccacggcggcggcggcggcggcgcgcaccagcccaccttcaagatcttctgccgcgccgacgaggggtactgcgtcgccgtgcgcgaggggaacgtcgtcctcgccccgaccaacccgcgcgacgagcaccagcactggtacaaggacatgcgcttcagcgccaagatcaaggacgaggagggcaacccggcgttcgcgctcgtcaacaaggccaccggcctcgccatcaagcactccctcggccagggccacccggtgaagctggcgccgttcaacccggagtacccggacgagtcggtgctgtggacggagagcggcgacgtgggcaagagcttccgctgcatccgcatgctgaacaacatccgcctcaacttcgacgcgttccacggcgaccaggaccacggcggcgtgcacgacggcaccacca

SEQ ID NO: 2010 - DNA, 384 bp, Oryza sativa
  Clone ID: uC-osflcyp037d02b1
gttgttcttttagatggaggaccgctttcacagaaaaggagtattgaattcacatctgatcctctcgcttcaagcacatgggaggaggtgtcagaaaagaatacgctgatcacaccagtgcagtgtaaattcatctggaggcaattcaatgcagagacagagtatgctgttgcacaagcaatttctatgcaggaagcacacagacgtagcaataactggctgccacctgcatggactgttttgcttctcgcaattttaggttacaacgaatttatattccttctaaggaaccctttatatctgctggggctcttcgtcgccttcgtagtattctatgctgcatggttgtaatatgacatctcagctctatttttgccttggcac

SEQ ID NO: 2011 - DNA, 106 bp, Oryza sativa
  Clone ID: uC-osflcyp037d06b1
ctcatcgcgcgacgaaggggattggattgggttgggttggattggagcgtgcttcgtctcgaggagggaattagcaacgtttacggcggctagctcgtcgcgggtg

SEQ ID NO: 2012 - DNA, 518 bp, Oryza sativa
  Clone ID: uC-osflcyp037d07b1
gtatatgtatggtcttctcctgctaccagcgaaaccaagccaccaccaccacgtctccttactgcgaaaaccgccatggaaggaagttctgcaagccaggccaaggccttgttcaaagccactcttattggcctggccatcctatccatggtcacttgggtgccacacatgtattcctgcattaagatgttcttggtttcggtcccttccgcggcttccaccctcgcgacaccgaggtgtttgttcatcttctccaacatcatcgtcatcttcctcgccagcgagttaaaactctccgagggggagagcttcggcgagtctccgatccggaccaatcatggctccgatgctttcatcagatatagggttgaagctttcactccagctaccaagtcaaacgatgtgattgttcaccatgttgttgaagagcaagttagcacggtaattgtacatgatgacagccctgcacagctagatcaatgtgaacaagtggttgctttatcaaccatgttcatgga

SEQ ID NO: 2013 - DNA, 558 bp, Oryza sativa
  Clone ID: uC-osflcyp037d08b1
ttacaaaggagctcaaacgtgcccttttgacagctctgaggtgcatcgatttgaattctgagaagagaccaaggatggaccaggtggtccggatgttggactctaatgaacccattcctcaagaggaaagaagacaacgacagaaccacatctctaataattcagaaaccgagccattaagaggcaagagcagcagcggcaagagtgatgcccctgaaaatgagatgaggccacctcggtataagaatcgatcatttccccccaagtgaaaagtgaaaagcatactagagtggaagttatggagttacctgcgatgctctcaatacataatgaattggtcaattgttttgtttctcttttattatttctcttcacctgatcaatttttttgttccctgggaggctgggggagcggccattgctgttacacatatttgtatatttcttgaaacatgtacagtgctggtgtgtgatacatgtacagtagtttgtgtgtgatagatagttgaaggatgcacatgagagcatataagctattatttagaagctagtggctgg

SEQ ID NO: 2014 - DNA, 388 bp, Oryza sativa
  Clone ID: uC-osflcyp037d10b1
gtcggcctgggcatggccgctcgtcttcctggtctcgtgctgctgttcttggacccagcggcgaatcttggttgctgcgaccactgacgccaatgatgttactgtcctcaatgcgctattcaccagcctcaattcgccggggcagctgcgcggttggcaggtgaatggcggtgacccatgtggcgcctcatggcagggcattacctgctctggatcatcagtcacagcaattaaattgccgagcttggggctttcggggaatctggcctacaatatgaacaccatggagtccctagttgagcttgacatgagccaaaataatcttgggggtggccgaaatattcaatacatgctctcaaataagaagcttgtaaggcttaatcttgct

SEQ ID NO: 2015 - DNA, 150 bp, Oryza sativa
  Clone ID: uC-osflcyp037d12b1
gcggtacatggatctcgcgatgaggaggatggagagcgtcagatcttccttcgtcgcgaggagggaattagcaacgtctacggcggcgagctcgtcgcgggtgtaccacgtgacggactacggcgccgacccgaccggcggcgccgacgc

SEQ ID NO: 2016 - DNA, 482 bp, Oryza sativa
  unsure (1)..(482): unsure at all n locations
  Clone ID: uC-osflcyp037e01b1
gtgaatcgaaatgcctatataatgatcgccattaccgggaaagggttcttcaaagcttctgttcttgcaactggtttgatcatgaataacatactgcgcattggaaaagttaacgtcattggagatgtcatcctctttctggggaagctctgtgtgagcttgttctgtgcgctctttgcgttccttatgttagacacacacaaatacaagtccgcacataacaagatatcatctcctcttgttcctgtagtggtatcatgggcccttggtttcatagttgccaagcttttcttccaggtcgtcgagatgtcgattgacaccataatcctctcattctgccaagatgcagaagagcaccaagggaacgcgcagtacgctccccctctccttatggagacactggatgaacagagtgaacttcaaagactaactcanggaccttgatcttttctttatttttttttcctctggcaagtagaatt

SEQ ID NO: 2017 - DNA, 294 bp, Oryza sativa
  unsure (1)..(294): unsure at all n locations
  Clone ID: uC-osflcyp037e03b1
agggagacggtgccgtggggcccgagcatcgtgtgcagcacgcctgcggcgatcgagtgggtggagcagtggaaggcgtcncacgacccatccggtcggctgatcgcctcccacaatttcgtcttcgcctccgtcaaccacaccaaccacgcaatcgccagcgtcaacggctacagcaacggcttggccaatgatgcctattcgatggcagccaacgggacaaacggcgtcatcctgtttgagctcattgatgcatagaatgaggagcttcaagcgtaacgcttcaagcttgct

SEQ ID NO: 2018 - DNA, 80 bp, Oryza sativa
  Clone ID: uC-osflcyp037e06b1
catcttttcttggcttgtgctctgttttaatttctttgcaatgatggggaggcagagctcgtcggcggctaggagggtgg

SEQ ID NO: 2019 - DNA, 211 bp, Oryza sativa
  Clone ID: uC-osflcyp037e07b1
ttctcgccgccgtcgaaacccaaaatcttctcttcccgtacgtgagaagcgccaggtcgtcgtcgccgccatgggcgtggaggtgtgcgtcaaggccgccgtcggccacccggacacgctcggcgactgtccattctcgcagagggtgctgctgactctggaggtgaagacggagccctacgagatgaagctcattgtcgttcttaacaag

SEQ ID NO: 2020 - DNA, 283 bp, Oryza sativa
  Clone ID: uC-osflcyp037e08b1
tttcaactgatattcttgtttcccacactgttctttttttgttttgtttttttttgcctctattaatagcctaagccagttttaaatggcttatcaatatgtatatgtaagttgtatgtccagattgttaccttgtaaatatgacaagttgtatcaaaatgtaatttttttactacaacaaaaagaattaaaaaaaaattaaaaaaaaaaaaaaaaaaaaataaaaatatacctaacatagggtgggctttctaaaggacttctgccttctttctcttgcatt

SEQ ID NO: 2021 - DNA, 509 bp, Oryza sativa
  unsure (1)..(509): unsure at all n locations
  Clone ID: uC-osflcyp037e09b1
tatagggaagaaatacaaaggattaaatcggatttggagaaggaaaaggctttctttgaagaggagaaacgggaagcaattcaagcccaacaagatctagcaataacacaagcagatagagatgagttgcttactctgcagatgaaacttaaagaagaaattgacagcctcagagcccaaaaaagggaactcatggctgatgcagataggctgcaagccgaaaaggaaaggtttgagattgaatgggagctgattgatgaaaagaaagaggagctacaaaaggaagcgatcagaattgctgaagaacgaagagcaataactgagtatctgaagaatgaatctgatatcatcaaacaggagaaggataatctccgtgttcagttcaaaagtaattcagaaacactctctcgtgaacacaaagagttcatgagtaagatgcagcangaacatgcaagttggctgagtaagattcaacatgaaaggcatgatctgaagagagacattgatat

SEQ ID NO: 2022 - DNA, 505 bp, Oryza sativa
  Clone ID: uC-osflcyp037e10b1
tttggtgaaggaagtaacaggcttggtgtgcggacaaccgttgctattatttttgcacggctcatcttggttcctcttgctggggttggcatcattgtgttggttgataaacttggtttcattcctaaagatgacaaaatgttcaagtttgtcttgctactgcagcattctatgcccacatctgtgctgtcaggtgctgttgcaaacctgaggggctgtggaaaagaatctgctgctatcttgttctgggtgcacatctttgctgtgttctccatggcaggatggattattttgtatttgagcttactcttctaagtacgtcataccctgatgctatactgcacaggaacgtccataagatcaaaatatcaccagatttaccagaaaaagattgttccatgacatgtacattagccagttaaccatggcgacagcctgaaggtactagtcgtatcagttttcaatttagatatggttctcttgccctagtgcccaatcgcttaag

SEQ ID NO: 2023 - DNA, 530 bp, Oryza sativa
  unsure (1)..(530): unsure at all n locations
  Clone ID: uC-osflcyp037e11b1
tcaaccagcagctgcggcggcgcgatcacacgaagaggaggcggagcagccggagccacctacgccgccgccgacaccatgggtatctcgcgtgactccatgcacaagcgccgggccaccggtgggaagcagaaagcgtggaggaagaagcgaaagtatgagcttgggcgccagccggcaaacaccaagttgtcgagcaacaagacagtgaggagggtccgtgttcgcggaggaaatctgaagtggagggctcttcgcctggatactggtaactattcttggggaagtgaggctgtcactcgcaagacccgtattcttgatgtggtctacaatgcgtcaaacaatgagcttgtgaggacccagacccttgtgaagagtgccattgtgcaagttgatgctgccccattcaagcagagggatctcactcactatggcgtcgagatcggtaggaagaagaaagctnctgctgctaagaggatgctgctgagggacatgagtgtgaggctgccacggacgaagcaaaaagagca

SEQ ID NO: 2024 - DNA, 420 bp, Oryza sativa
  Clone ID: uC-osflcyp037e12b1
tcattacctggccgtatagggaagcaatgtcgagagaggtggcacaatcatctaaatccagaaataaggaaagatgcttggactactgaggaggaacaggcactcataaatgctcatcggatttatgggaataaatgggcagagatagcaaaagttcttcctggaaggactgataattctataaagaatcattggaatagttctctcagaaagaagcaagatatgtacaataccagcaataatatggtagttccgaaactgcttgttcatgataagttcaaggataaaccaaagctgatggctatggagggtcatcttgatttgaacaaggcacccattatcaattcaaaagaccaacctggaacagcttatcggtctaattgctcacggatactatctcgctcctcataccaactgctc

SEQ ID NO: 2025 - DNA, 279 bp, Oryza sativa
  Clone ID: uC-osflcyp037f01b1
gttcttaaccctactccatcccacttcgttgtcatctctgatgaatcttttctctcctgctgcaggctgcgtgtgcgcggaggaaaggaatctttatggagccaaaatttcgcagagataggaatggaatccttacgaagccaaaatttcgcagagaggaggatatctgtttgaggaaaaaaaggaccgagtctgccttcctgcaacagaaccgcgtgatgatgttaccgattgatgagacggaccatagtttgtcccctagttatcaacaagatgaag

SEQ ID NO: 2026 - DNA, 322 bp, Oryza sativa
  Clone ID: uC-osflcyp037f08b1
tgtgatgtggattcaattaaggctgtcatggccaaatccaatgtggtcattaacctaataggacgcgagtatgaaacaagaaactatggatttgacgaagtaaatcatcatatggctgaacaacttgcaatgatttcaaaggagcatgggggtatcatgagatttatccaggtttcttccctaggagcatcggcctcttctccttctagaatgctgagggccaaggctgctggggaggaatctgtgttgaaagaatttcctgtggctacatttatgaggcctgctactatgatttggacagaagatcgtattttgtatagat

SEQ ID NO: 2027 - DNA, 479 bp, Oryza sativa
  Clone ID: uC-osflcyp037f09b1
ttcaaacacaaccaatccacctccgattccttcatccgccgccaccgccgccgtcgccgtcgccgggatcccgcccgcaaccgcaccgcggcggctccttcccttcctccaggtaccaaccagattgtgggatcttcctagagagcgctgttgtcctgcacgagtagaatagcagatggcgaggataaagccgaagcaattgctaattcaaagcaagacgaagaaggccccaacacggatcagttactccactatcgttacttggaacctaattgttatcttggttgcgctatccctctatgctacctacaggcattggcatcacaggccaatgctcgagactgaaatggatctccctcgtgctgagcatgttggaagatctgaggattccacgaagactagtataccaagctatgcggttattgatactgccaaaggctcaattactatcgaaatttacaaagatgcttctgctgatg

SEQ ID NO: 2028 - DNA, 456 bp, Oryza sativa
  Clone ID: uC-osflcyp037f10b1
tttaatgttcagcagggaacctgcctcatggctaaggacagtccactggcagtgaaggctctgaagcgtaccctggcaaagccaaacttgtctttcttgtttggcaacggcaagaagagcagcgcttgagcaatttcagaaccgtatcagaccgtccagagccagcgtggttgcatcatcaaatgatcagctggtaactgacgaagacgattgcgcagctcggcggcgaaccctgcgcactaagtatatctgcttttataatagatttctcgtgtacataaaatctaaaaaaacgggttcagttggttacagaactgccaaatttgcttctgaatgtatatgtaaaattcagctaggtttgctcctaagctcctagatgccagttcgacggaactgcaaattgatattggaacaagataaggtcattgccatattaatccatcattcatgtattcc

SEQ ID NO: 2029 - DNA, 466 bp, Oryza sativa
  Clone ID: uC-osflcyp037f12b1
ttctccaccttgtgctcaggctcaggggtggtatgcagatcttcgtcaagaccctgaccggcaagaccatcacgcttgaggtcgagtcctcggacacgatcgacaacgtgaaggccaagatccaggacaaggagggtatccccccggaccagcagcgcctcatcttcgccggcaagcagctggaggatggccgcaccttggctgactacaacatccagaaggagtccacccttcacctggttctcaggctcaggggtgggatgcagatcttcgtgaagaccctgactggcaagaccattacccttgaggttgagtcgtccgacactattgacaacgtgaaggcgaagatccaggacaaggagggcatccttccggaccagcagcgtctgatctttgctggttagcagcttgaggatggccgcacccttgcggattacaacatccagaagggggtcacactccacct

SEQ ID NO: 2030 - DNA, 524 bp, Oryza sativa
  unsure (1)..(524): unsure at all n locations
  Clone ID: uC-osflcyp037g02b1
cattatcgactggggtctcgagctggggtggatctacgggtcgatcacggaggacatcctaacggggttcaagatgcactgccgcgggtggaggtcggtgtactgcatgccgaagagggcggcgttcaaggggtcagcgccgatcaacctatctgaccgtctcaaccaggtgctccggtgggcgctcggctccgtcgagatcttcttcagccggcacagcccgctcctctacggctacaagaacggcaacctcaagtggctcgagcgcttctcctacatcaacaccaccatctaccccttcacctctctccccctcctcgcctactgcaccctacccgccgtctgcctcctcaccggcaagttcatcatgcctccgattagcacgtttgcgagtttgttcttcatcgcgctcttcatctccatcttcgcgacgggcatcctggagatgaggtggagcggngtgagcatctaggagtggtggagggacgagtagttctgggtcatcggcggcgtgtcggcgcacc

SEQ ID NO: 2031 - DNA, 504 bp, Oryza sativa
  unsure (1)..(504): unsure at all n locations
  Clone ID: uC-osflcyp037g03b1
cccttatggtgagcacgggcctgtcgctgacggcgtcggcgcgccacccaacggagcccccttcaaaccaaatgtacagcagcagcggcagcaggagcagcgccgcggcagcggaggaggagagggagacgggcggcgtggacaggtcatggcctttcatgttcgagggcatggccgccttcaggacgacgacgagcagagctcctcctctggtggcgcctttctcggcgaggacgacgaccaccggcgagctggcagggttggccgatgttggtcctgacctgagcagatacgagttcagagcaacaaattatttcagtgccaatgcaaattattcagactggacatctgactttgctcactgcaaaagcagcaaggagaacggccgtgccagagaccctgcctttctcaccttgagctcacagcctccacacctcatcaagcagccttatgtggtgccatcatacaacgacttcagtgccatggcatctcanggaagcaaca

SEQ ID NO: 2032 - DNA, 519 bp, Oryza sativa
  Clone ID: uC-osflcyp037g04b1
ctcccctccccttccgcccgcatcgccgccgcgccgcgccgcgtgcgaatctccggcgaggatcgagggcgcctctggtcccgtctggtggtcggtcagccatgtcgctccgcgtgctgaacccgaacgcggaggtgctcaacaagtcggcggcgctgcacatgaacatcaacgccgccaagggcctccaggacgtgctcaagaccaaccttggccccaagggcaccatcaagatgcttgtgggtggagctggcgacatcaagctgaccaaggatgggaacactctcttgaaggaaatgcaaatccagaacccaacagctatcatgatcgcaaggaccgcggttgcacaggacgataccagcggtgatggcacaacctccactgtgctttttattggggagcttatgaagcaatctgagcggtgcattgatgaaggcactcatccacgttttttggttgatggttttgatgttgcccagagagcaactcttgaatttctcgagaagttcaagacatcag

SEQ ID NO: 2033 - DNA, 573 bp, Oryza sativa
  Clone ID: uC-osflcyp037g05b1
catttcttgagctcaatcagcaacaacatctatctccttcttgcttagttaagtccttcgccctcccaagaagaagaagatgtcttgctgcggcggcaactgcggctgcggcagcggctgccagtgcggcggcggctgcggcggatgcaagatgttccctgatgtggaggccacagccaccaccaagaccttcgtcctcgctgctccatccaacaaggcgagctctggaggaatggagatggcggtggagagcggcgagaacggcggctgcggctgcaacacctgcaagtgtggcaccagctgcagcggctgctcctgctgctcctgcaactgaatctatcgtcgtcgtcgcccggctgcatgaggatttatcgtatggatgctgctactgtcgatcagagctttgatcgaggccttaatttgcttgcattagtacccagcttatatgtaggcaggccttgccttttgctctgacgcctaaataaaaccgtcgtcgtcgttgtcagtgtgtgcgtgtgtcgatcaatgtttgatggatccctagctagcttggatggatcatctatcatcatg

SEQ ID NO: 2034 - DNA, 331 bp, Oryza sativa
  Clone ID: uC-osflcyp037g06b1
gtgtaatgcttcgcaggcgacgatggcgagcggcggcgtggtgaagaaggagatcggcgggaaccacgacgtcctccgcttcggcgtcaacgacagcgtcaagggggacctggcgccgtcgtacccgctccaggccagcgttcacatggatgccaagttctgggcggacaagaagaggttcggcgcggaagccatctactgattcgtcttcaacatccgcaaggatcttgatgcccatttccttttcatgttccaaaggctctctggtgcattgctcgtatctttgtttggatatgaggttattttctgtttctcttgatgattttgggtt

SEQ ID NO: 2035 - DNA, 459 bp, Oryza sativa
  Clone ID: uC-osflcyp037g07b1
tccgctggggctgggcaaggacccggcgttcctcaagtggtacagggaggcggagctgatccacgggcggtgggcgatggcggcggtgctggggatcttcgtcgggcaggcgtggagcggcgtgccgtggttcgaggccggcgcgcagccggaggccatcgcgcccttctccttcggctccctcctcgggacgcagctgctgctcatgggctgggtagagtccaagcggtgggtcgacttcttcaacccggactcgcaggcggtggtagtgggccacgccgtggtcgcgcaccgacgagaacttctgcaacgccaccggcgagcagggctaccccggcggcaagttcttcgacccgctcggcctcggcggcgagaccagggacggcgtctacattctggacaccgacatgcttgaccggcttaagcttgccgagatcaagcacgcccgccttgccatgc

SEQ ID NO: 2036 - DNA, 354 bp, Oryza sativa
  Clone ID: uC-osflcyp037g12b1
tttatgaggacgccttctttgcggattacgccgaggcccacctcaagctctctgaactgggatttgctgaggaataagaagcctttagagagcgggatatccgcaaaagattaatgccgatttgtattttgcgccttagagtcagtacgatcaagactgtcgtggcggttgtaataaaaattagtgtgctttgggccatctttttatgtgattccaattgtctttctcttcattcttgctttgatgctctttgtctggacctctagaacgccgtattgtactgtggagtttcaaagataccaaactatttgctgtcaagataactatggattgaattccccttgatggatgaac

SEQ ID NO: 2037 - DNA, 370 bp, Oryza sativa
  Clone ID: uC-osflcyp037h01b1
cttgatagaaaaagaaagaaattaaaaagaagatcatcgtgagattcgcaagtaccagaagagtactgagcttttgatcaggaagctgcccttccagaggcttgttagggaaattgcacaggacttcaagaccgatctgcgtttccagagccatgctgtccttgccctccaggaggctgcggaggcataccttgttggtctcttcgaggacaccaacctgtgcgctattcatgccaagcgtgtgaccatcatgcctaaggacattcagctggctaggaggattcgtggtgagagggcttaaattcccctcggcgactcctttgacaaatgaagcatgcgtcgtagtgttagtagtgggtttaatcttttg

SEQ ID NO: 2038 - DNA, 463 bp, Oryza sativa
  Clone ID: uC-osflcyp037h03b1
gtggaggtggtggtggtggcggcggcggcggcggcgcctgctacaactgcggcgagaccggccacctcgcgagggactgctacaacggcggcggtggaggcggaggcgggcgattcggcggtggaggcgaccgctcctgctacaactgcggcgaggctggacacatcgcccgcgactgccacaagtgatggattcacaacaccatcttcccccccccctccttttagatctcgcctaaatcttcatcactcctaagtcgaattattgctttagttttgccgccgatctgggtcacatggagagcgcgttgcctgctataaaggaaccgcttgccttttggttttacctcttaatttttttttgctattgggattacggtttagttttaacttctgctgctgctgctcgtgtgatgaagcctttgcctgtttgagttgggtctggtctcttgggttaggtaaga

SEQ ID NO: 2039 - DNA, 565 bp, Oryza sativa
  Clone ID: uC-osflcyp037h04b1
gcgatctccagcctacatgccaccacctccctgcactccccatgcaccaccaacacaagcttcaggcagaatcaggtcatcttcttcaccaccagaagcaacaggaggggtagcacaaggtacggaggagcaagaacctttcaggtttcatgctcagtcgacaagccagtggtgattggccttgcagcagactcaggatgcgggaagagcacctttatgcgccggctcaccagtgtgtttggtggtgctgcagagccacccaagggtggcaacccagactcaaacacactcatcagtgacacgacaacggtgatatgcctcgatgactaccattccttggacaggactggcaggaaggagaaaggtgtgactgccctggaccctagggcaaacgattttgatctcatgtatgagcaggtgaaggcaatcaaagaaggcaaggcaattgagaagccaatctacaaccatgttactggtctcctagacccaccggagcttatccagccccccagatttttgtcattgagggcttacatcccatgtttgatgaacgtgtgagggacct

SEQ ID NO: 2040 - DNA, 360 bp, Oryza sativa
  Clone ID: uC-osflcyp037h05b1
acttcttcatggtcggattcgccccgctgacatcacgtggctcccagcagtaccgtgcccttactgttcctgagctcacacagcagatgtgggatgccaagaacatgatgtgcgctgctgatcctcgccatggccgttacctcaccgcctctgccatgttccgtggaaagatgagcaccaaggaggttgatgagcagatgatcaatgtccagaacaagaactcatcctacttcgtcgagtggatccccaacaatgtgaagtccagtgtctgtgacattccaccgagaggcctttccatggcatcgaccttcattggcaactcaacattcattcaggagatgcttcggtgggtgagcgagc

SEQ ID NO: 2041 - DNA, 152 bp, Oryza sativa
  Clone ID: uC-osflcyp037h07b1
ttcgatagaaaaagaaagaaattaaaaagaaaatgcacggcgcgtgagcttgcagagacagcaatggtgagagttgctgccgccgcggcggtgctcgtgctggcggcggcggcggcgtcggaggctcgaggagaatgggagggagcatagcc

SEQ ID NO: 2042 - DNA, 355 bp, Oryza sativa
  unsure (1)..(355): unsure at all n locations
  Clone ID: uC-osflcyp037h09b1
acaagccacagctctctcacacgagagctcgagtctctctcgtcggcgacaatggcgagcggcggcggcggaggaggggagggggagacggtgctggtcaccggcgcgagcggcttcatcggctcgtgtctcgttcgccgcctcctcgcccgcggctactccgtccacgccgccgtcctcaaccccgatgacaaggccgagacggaccacctccacgcgctcgccgccgccgcggtngttnagggcctccgccttcgcgtgttcccgggcgacctgctggacggcgcctgccttctcgtcgtcgtgcggngctgcttcggcgtcttccaccttcgctccctttgcattgtggacc

SEQ ID NO: 2043 - DNA, 514 bp, Oryza sativa
  unsure (1)..(514): unsure at all n locations
  Clone ID: uC-osflcyp037h11b1
ctctgaacgtggatgtcaatgagttccagaccaaccttgtgccctacccaaggatccacttcatgctttcgtcctacgctccagtgatctctgcggagaaggcctaccatgagcaactctctgttgccgagatcaccaacagtgccttcgagccatcctccatgatggccaagtgcgaccctcgccacggcaagtacatggcctgctgcctcatgtaccgcggcgatgtcgtgcccaaggacgtgaacgccgccgtcgccaccatcaagaccaagcgcaccatccagttcgtggactggtgcccgacggggttcaagtgcggcatcaactaccagccgcccagcgtcgtccccagcggcgacctcgccaaggtgcagagggccgtgtgcatgatctccaactccaccagcgtcgtggaggtgttctcccgcatcgaccacaagttcgacctcatgtactccaagcgcgccttcgtccactggtacgtnggtgagggcatggaggagggtgagtt

SEQ ID NO: 2044 - DNA, 241 bp, Oryza sativa
  Clone ID: uC-osflcyp037h12b1
atcgcgccggcgcacttcgacggcaggtacagctggaaccaccgtgacgcgtgctcgcgccagaggccgtacgacggcgacgtcgacggggaggcgaaggtgggggacaccgaggccgtgctaaggaaggccgtgctggaggaggtggcggcggtggccacggcggcgaggcggcgccgccctgggctgcggttcgaggtgctcgacgtgactaggctgggcgccatgcggtcctacgggc

SEQ ID NO: 2045 - DNA, 550 bp, Oryza sativa
  Clone ID: uC-osflcyp039a01b1
gtgattagtggccaacatagcacgatgaagatcttattggagcatcatgctgatcctaacagggttttcaatcttgatggtaccccgttgattatgtccatagtttctggatcattggaatgcgtgaagctattaatcaaagttggtgctgacatgaattttagagactccaatggcgttacttgtgtaatggttgcagcaaatcatggctcttctgtcatcatgaagtgcttactagatgctggtgctaatccaaacattccagatgaagtgagtaatattctttcctctatagcctgtgactggatgttgttgcgacaggctgtatggtcttgagagattaggataatctactcacttattctttttatcaactgtaccaatggataagtctgcatgagaagaaggcagtgcttctatgctgctctaaaggaatgcaattgttgaaatgtcatctcaaaggaaattgctcacattccactccaaagggtggatatatggttggattttcaatactgtttgaagcttcttgatataggaatgatgagaa

SEQ ID NO: 2046 - DNA, 177 bp, Oryza sativa
  Clone ID: uC-osflcyp039a02b1
attatttacagagagagagtgagagtgagagagagagagtgtgagagagagagagagagcaaccaatcgaagaggcatatggatccaagagactgagaggaaaggagatgagcggcagaaattgctgcactctatcgaggccaagaaagccacccgagtcttcttttttccattaga

SEQ ID NO: 2047 - DNA, 550 bp, Oryza sativa
  Clone ID: uC-osflcyp039a03b1
ggactgtcagaaattggattgctgtcatcaaccaaagccattggtctgccaaccatcattctcatcaggccgtttcatgtggagtaggggtttctcttctcaggccggtgcaagttctggtgataagcaggatgagttggaggaagggttttctgatctggaggttccaccagaagctcataaaaaggatttagatttgacatccgatgagagttctgatgaggacaccattgatgcaattggcttgtctgaagtggaggctgatgcaaaacctgaggagccgataaagaagtcacaatccactcttcttaaggctttgctggaatctccaagggttgatgtcgctggagcattgaaaaaatggcttaatgatggcaatacattggatagaagtgagctcttttatgtccttcttattcttcggaggcggaagctctacatcaaagccttgcagcttctggagtatgttgaagaatccaaactaattgatcttggagaacgtgattatgcttcacgcgtggatttggtagctaaaacccacagtatttac

SEQ ID NO: 2048 - DNA, 416 bp, Oryza sativa
  Clone ID: uC-osflcyp039a06b1
cttttcggccgctgcttcacaccatccgcatcctccccgctcgccgccgcgccgctccaagtttctttcgtgaggagttgatcgaggagttggggttgagatgggccagatccagtactccgagaagtactacgacgacacctacgagtacaggcacgtcgaccttccgccggaggtcgccaagctcctccccaagaatcgccttctctccgagaacgagtggcgcgcgatcggagtgcagcagagccgcgggtgggtgcactacgcgatccaccggccggagccgcacataatgctgttccgccggccgctcaacttccagcagcaagaggaggcagccgcggatgcagcggagcagatgctgaccaagcgactgccccctccacacggggatggcggcgaccccgggttgaaat

SEQ ID NO: 2049 - DNA, 364 bp, Oryza sativa
  Clone ID: uC-osflcyp039a09b1
gtcatttctcccccccatctcctctctgctggcgagcttgtcaaccgcgcaaaggttcatatatacaccgatcggtgtagagccacactcttggagtcgatcgttcgctggttagctaactaagctaagctgagctgccttgctctcttcgacgatcaggttgcttggtttgacgagctgacgatcgaggagaagaggacggcgaacgttttttttgcaggatcagtactagggttcatcttggagaaccaatttgattcgatagaacgagcgagtcgaagaagatggtgctcgcgagcacgccgaaggtggtgctgggatgcgtggcgttcacgatcttctgggtgctggccgtgttcccgtt

SEQ ID NO: 2050 - DNA, 92 bp, Oryza sativa
  Clone ID: uC-osflcyp039a11b1
gataccaccggcgaggaggacgaggaggcgggggtcgacatgaagtcgaagctgtactgatattactaggaggggaaccaatggacggagag

SEQ ID NO: 2051 - DNA, 244 bp, Oryza sativa
  Clone ID: uC-osflcyp039a12b1
cttatcgccatctctctcagctctcacaggggactgcatcaatggccgcggccaccatggcgctctcctccccggtgatggcccgcgcggcgccgtcgacctcctccgcgctcttcggcgaggcgcggatcaccatgcgcaagaccgccgcgaagcccaagccggcggcgtcgtcggggagcccgtggtacggtgccgaccgcgtcccttaccttggcccgctctccggcgagtcgccgagcta

SEQ ID NO: 2052 - DNA, 468 bp, Oryza sativa
  Clone ID: uC-osflcyp039b03b1
gccatagctatgcccaagatgcttatagatggagctgttgaatatgaagatggtactcctgccactgaagcccagatgggcaaggatgtcgtttcgttcttgtcatgggcagctgaacctgagatggaagagaggaaactgatgggagtgaaatggatcttcctactgtcacttgcacttctccaagccgcatactaccgtcgcatgaggtggtccgtcctgaagtcacgcaagctggtccttgatgttgtcaactgagggaccactgttccttactttcattaaaatgttttgagcatttaagcggaagcatttcaaataatgagtatgacgtacattttgccactggggtttccatgccttagaattttctgctttctttctctgctgcaaaagcatttttttcatgggagtacttgcaatctttgttaatgatacctgataggtaccagcaagcttctaacagaa

SEQ ID NO: 2053 - DNA, 389 bp, Oryza sativa
  Clone ID: uC-osflcyp039b04b1
cgactcgcaccaccaccagcagctcaagcagcaacagctcaaacggaggaagatctcatcgccatgacgaccggcaatggcgacgcaccggtgatcaagaacgcccacagcgacatcgacagcaccaacaagacgctgctcaagagcgacgccctgtacaagtatgtcctggacacgacggtgctgccacgggagccggagtgcatgcgcgatctgcgcctcatcacggacaagcaccagtgggggttcatgcagtcgtcggcggatgaggcgcagctgctggggatgctgctgaagatggccggagcgaagaggacaatcgaggtgggtgtctttaccggctactcgctgctggcgacggcgcttgcgctgccggaggacgggaaggt

SEQ ID NO: 2054 - DNA, 256 bp, Oryza sativa
  Clone ID: uC-osflcyp039b05b1
cccacgcgtccgcccacgcgtccgcccacgcgtccgcccacgcgtccgcccacgcgtccgaataaattgggctgagaaggagtctcatgtagatgaggacgaaatggccaaggttaagacagctttcgttggaaatttaccagcaaatgttacagaggagtatttaagaaagctttttgaacattgtggagaggtagtacgggctgcagtcttatggaaaggacaatatccagttggattttgttactttgttcag

SEQ ID NO: 2055 - DNA, 434 bp, Oryza sativa
  Clone ID: uC-osflcyp039b09b1
tggacgcgtgggagacgattgcttccatcaagagcaagcttgatacagctttaattccagctgcaagaaaagctgatcttaaaggccgggtgtcgaagttggaggatgaacttaggaaggccaagaagaaaatgggcgaggagaacatccagaaggccgtgaagtttgcaatagatgccgcccaaactgctctttctgaaggaaagcgcttctgtgttgctcatgtagatgtgggtcttgacacaagtgctattcgggaagcagttatcaaagtcaaggaccagaaggatttgccaatcatgctattcagcacggatgaagccacgaataaggcagtcatttatgctggtgtgccttccagcgctgctaacagcttgaaggtgttggattggttgacaccatcgattgcgccccttaaaggaaagggaggtggt

SEQ ID NO: 2056 - DNA, 499 bp, Oryza sativa
  Clone ID: uC-osflcyp039b12b1
ttttaccagatgcgcccgccggcgatgctccgagggcccgccgccgcggcggcgctcgcgctcgtcttcctcctcctcatcgccgccgcgccccccgccgcggccttctaccttcccggcgtcgcgcccaacgacttccagaagaaagatccacttcaagtgaaggtgaacaagctgtcatccacaaagacacaactcccctattcatattactcccttcctttctgcaagccagatacgatagttgacagtgcagaaaatcttggagaagttctacgtggcgatcgcattgagaattctccttatgtgtttgagatgagagagcccaagatgtgtcagatcgtctgcaaagctaccattagcgatcaacaagccatggagctaatggtaaagatagaggatgagtaccgggtgaccatgactcttgacaaccctccgctagttgcgccttttgcaaggccagatagggatgatgctgtctttcgggtggctttctgtt

SEQ ID NO: 2057 - DNA, 482 bp, Oryza sativa
  Clone ID: uC-osflcyp039c01b1
cagttttcatgagagagctgatagcttgctgcagtgcttacctggttgcctgacagtgaccatcttacgtgggaataacttaaagcagacaatggggagtacaaatgcattttgctgcctgcaaataggaaatgggcccccaaggcaaactaaggtggttaacaacagcatctgcccagtatggaatgagggtttcacttggttatttgacattccaccaaaggggcagaagctatacatcttgtgcaaaagcaaaaacacgtttggaaagtcgacactcggtcgagtcaccatccagatcgacaacgttgtcaccgagggtgtatacagtggtttcttcagccttaaacatgatggtggcaaggatggctcgagaacactagagatagagattgtatggtctaataggccattcaatgacattatgtagcagtgctgatttgctctcaccaatgttatagttttggccttaatgtaattag

SEQ ID NO: 2058 - DNA, 582 bp, Oryza sativa
  unsure (1)..(582): unsure at all n locations
  Clone ID: uC-osflcyp039c02b1
ttcgcgtccgcttttctccctctccgcccatttctcctctccacctgcgttctttttgtgtttgtgtggtggtgggtgttcttttttcttttttttgtgtgtttgtttgtgttggtgtggtggagttctcntttcttttttctctttttttttttttttcttcttttcttttttttttttttttttttttcttttttttttttttttttttttttttttttttctctttttttcctttttttttttttttcttttttttcntttcttttttttttttttttttttttcttttttttttttttttcttttttttttttttctttttttttttttttttttttttttttttttttttttttttttttttttttttttttctttttttttttttttttttttttttctctttttttttttttttttttttttttttttttcttttttttttctttttttctttttttttttttttttttttctttttttttttttttttttttttctttcttttttttttttttttcttntnttttttttcttttttttttttttcttttttttttctttttttttttttttttt

SEQ ID NO: 2059 - DNA, 255 bp, Oryza sativa
  Clone ID: uC-osflcyp039c03b1
gccgtatcgcgtctctcccatcctctcgcgcatcctcctccgactacctcggttgggttttgggggcggctggagatgtcggactccgaggagcaccacttcgagtcgaaggccgacgccggcgcgtacaagacctacccgcagcaggttggcactatacgcaagaacggtcatattgtcatcaagaaccgcccatgcaaggttgtcgaggaatccacctccaagactgggaagcatggacatgcaaaatgccac

SEQ ID NO: 2060 - DNA, 247 bp, Oryza sativa
  Clone ID: uC-osflcyp039c04b1
agaaaaaaaaaaagcagagacatcttctcgaaggcctgagcaccaatggcacggtatcttctccgtcctcccaccgccgccgccgccgccgctgccgccgcctcttcacaccgcaggaatggcacaacctcgccgcggggaccggttcttggcctccgggcgcttgcctccagggccggcaaagctcgccccgtgatggcggtggcgtcggagcagcccgccgcgaggggtatgtgccttaaggtgg

SEQ ID NO: 2061 - DNA, 217 bp, Oryza sativa
  Clone ID: uC-osflcyp039c06b1
gttcctgtcggtgccgatcatgccggtgggccgcacggcggggtccctcctgggcgccatgctgatggtgctcatcctggtgatgacaccggacgaggcctacgcctcaatccaagggctcatgattcactccctatttagcgccagggccggctccatcaacctggagtgcgccgacatgagcaatgaccttaggaacaagctgctgcggaagagt

SEQ ID NO: 2062 - DNA, 311 bp, Oryza sativa
  Clone ID: uC-osflcyp039c08b1
gtcgcgtgcgcatacgggaggtgctcgacggggtgccatggattcccaagaacagcttcctccgccacttcaatctgtggctgcgtgacatcgacgccggccgcaccgggaaggtgttcattggcaccttaggctatggcatcttctcttacgacctcaacaccggcaagctggagaacctggcaactgaggatggaatgcagtacggccaccccatcttgccctacttctctgctccggtggatgctggctctgactgaacttctggggtgggaggtctctgattcgtgggaattgcgggaataactgtt

SEQ ID NO: 2063 - DNA, 538 bp, Oryza sativa
  Clone ID: uC-osflcyp039c10b1
aatttacctgctccacctcctcctcctccccccgatcggatcggcccggctcctcctcctccgccgccgccaccgccgccgcagataggagaagatggccgcacttgataccttcctctttacctcggagtctgtgaacgagggccaccctgacaagctctgcgaccaagtctcagatgctgtgcttgatgcctgcctcgccgaggaccctgacagcaaggtcgcttgtgagacctgcaccaagacaaacatggtcatggtctttggtgagatcaccaccaaggctaacgttgactatgagaagattgtcagggagacatgccgtaacatcggctttgtgtcagctgatgtcggtctcgatgctgaccactgcaaggtgcttgtgaacatcgagcagcagtcccctgacattgcacagggtgtgcacggtcacttcaccaagcgccctgaggagattggtgcctgtgaccagggacacatgcttggatatgcaactgatgagacccctgagttgatgcccctcagccatgtccttgct

SEQ ID NO: 2064 - DNA, 113 bp, Oryza sativa
  Clone ID: uC-osflcyp039c11b1
gtctccgaggcggaacaattccgcggggagggggctgtttaatccggccgaattctgaaattccccttgagcaatcgggattaggcgtaggaatattgcgcggtaagggttaa

SEQ ID NO: 2065 - DNA, 79 bp, Oryza sativa
  Clone ID: uC-osflcyp039d02b1
gttgtcttctcctccccctctttaccttttcctcctgggttcggttccgtggttcgtctagggtttagtgggttgagat

SEQ ID NO: 2066 - DNA, 564 bp, Oryza sativa
  Clone ID: uC-osflcyp039d03b1
tgctagctagctgcgtctttggcctccagagcggttgtggtcgccgttctcctcctttctttgttagtttccctcttttttcttcttctttttcttttttctttctctcatctttacttccttattctttttctattttttttttctcatttttttttttttatttttttttttcttttttctttttctttccctttttttttctctttctctcctcttttctttttttcttctcttttctcctatttttttctttcttttttttcttttatctttttcttttttccctattttttctttttttttatccctttattctcttttcttattccctctctcttcttttcaccttcttttttttcttattctcttctcctttttattttccttttcttctttcttcatccttcttactcttcctctcttttttattcttcctttcttttttttctcttcttcctttttttcctcttctttcctcttttcttttatcctcctctctttttcttctcttattctattacctttttctttattttcttcttttttctcttcctttctctt

SEQ ID NO: 2067 - DNA, 67 bp, Oryza sativa
  Clone ID: uC-osflcyp039d04b1
gatgttgggagctcaactgatcaagacgagatagagttgttttcctctactggggattttttagagg

SEQ ID NO: 2068 - DNA, 125 bp, Oryza sativa
  Clone ID: uC-osflcyp039d06b1
ctgtcgttccagctatagctttccccgccggcggtggcgatcgatcgatcctctcctcgtcggttgattagggtcaagaatttttccctctcccagctggggtgaattttttggtttgttcatgg

SEQ ID NO: 2069 - DNA, 140 bp, Oryza sativa
  Clone ID: uC-osflcyp039d11b1
cacaatcaaggcccccgccgcacctcctcccggactccggcggcctcgacctcctcacggaggcacttggggccgagagcttcgatccggacgacgacgacgacgccaccgccgcctcccccgccatggaggacgtcggc

SEQ ID NO: 2070 - DNA, 196 bp, Oryza sativa
  Clone ID: uC-osflcyp039d12b1
gatcgatccggacccaccgcgacaaacgctgtggccttccctacccctacgcccttcgctcccatccgctccgccccctcgccgcgcagcgccggcggcgagaaggttgagttcgtggggggtgtgaccgaacgatggcgtaccgggcggacgacgactacgactaccttttcatggtggtgctcttaggggacta

SEQ ID NO: 2071 - DNA, 267 bp, Oryza sativa
  Clone ID: uC-osflcyp039e01b1
ctcccccacccttccccctccccccacttctacccctccccccttcccctcccccacaccccccctcccttccccctccctcccctccctttcctcccccccctccccccctcctccccactccccctcccccttctctaccctccccccaccccccttcactccccctactccctctcttccccctacccaccccccctcctcccccccccccccccccctccctcacccttctcccccctcccctccccacccctccccctccct

SEQ ID NO: 2072 - DNA, 244 bp, Oryza sativa
  Clone ID: uC-osflcyp039e04b1
aaagaaaagcatcacaaatctcacgcactgtctgtggttcgcgcaaagcacgctgcttttctccgctttgcgagcaccatagcctagcccaccatgtgcggcggcgccatcctctccgacctcatcccgccgccgcggcgggtcaccgccggcgacctctggctggagaagaccaagaagcagcagcagcagaagaagaagaaccagggcgcgaggaggctgccacttgcgccaagaggaggag

SEQ ID NO: 2073 - DNA, 328 bp, Oryza sativa
  Clone ID: uC-osflcyp039e07b1
tttcagggtcctaacattctcttagatgacaccctttcagtcgaggtggataaaaacttgctcaatgcagtcaaagattcaattgttcaagggtttcaatggggtgctagagaaggtccgctgtgtgatgaaccaattagaaatgtgaaattcaagatcttaaatgcaaacatagctcctgaaccgttgcaccgtggtggtggtcagataatttcaacagcttgttgcgtggcttactcagcgtttctaatggttaatccacgccttatggagcttgtctattatattgcgattcatacacctattgactgtgtctctgccatatcta

SEQ ID NO: 2074 - DNA, 324 bp, Oryza sativa
  Clone ID: uC-osflcyp039e12b1
tggttttaggaggcaacacgccgccctgcgccggcgtcgttgtcgccgtcaccgtctccgccaccgtcagattcttctaagcggcgatggccatggcacggcgtttccgccttccgtcttctttcctcgttctgtcccttctcgctccttcttcaaccgttcgatgacgcctctttgctcttggtcgtggtggttgtagttttggtccgtctgggtatgtcttttgttttattcctctttttcttttcttttttttttctctctctttctttttcattttttcttcttcttttcttctctgctttttttcttttttactttttt

SEQ ID NO: 2075 - DNA, 88 bp, Oryza sativa
  Clone ID: uC-osflcyp039f02b1
aataatacaagtttgctcgtaggaagtggtgctaagggtgtgtttatatgctattatgatctagacaacaactggtggattagtaagg

SEQ ID NO: 2076 - DNA, 200 bp, Oryza sativa
  Clone ID: uC-osflcyp039f04b1
cctgtatccatgagcatggaaaggaggatcattcgtgaggccttcggtgccgagttggttcttaccgatccacttctgggcatgaaaggtgcaatccaaatggcagatgagctggcagtaaagatgcctaactcttacatactacagcaggttgagaactttgaaaacccaaagatccactatgagacaactggacctga

SEQ ID NO: 2077 - DNA, 86 bp, Oryza sativa
  Clone ID: uC-osflcyp039f05b1
gtgatctgccgcagcggcggcatcagcatccgggggggttatagctatgtgatccgtgcaccatacgatctcccgtggctcgagag

SEQ ID NO: 2078 - DNA, 95 bp, Oryza sativa
  Clone ID: uC-osflcyp039f08b1
atttctcagcttatagtcaggtgtggtctgagctgtggttgtgagatggctcaggctttggcgtccatgaccgggctgtcgcagggcgtgcagtt

SEQ ID NO: 2079 - DNA, 181 bp, Oryza sativa
  Clone ID: uC-osflcyp039f09b1
aatctccttctccagctctcaaccgtatatccggtcccttctcccgtcgtcactgccgtagtgctgctcctcctcctcggtggaggcccacgcggtgccgcgggaagcccggtgtcacggaagttgtagccgagaaggagactttttcgcatggcgaagaggaggaggttcactctaacat

SEQ ID NO: 2080 - DNA, 211 bp, Oryza sativa
  Clone ID: uC-osflcyp039f12b1
gttaatcaaaacccacctcctcctcctcctgctgcggccaccgctcgccgtcgcccgcgccgccatggccggccgccgcctcgccctgctcctcctcgccgtagcctccgtgtccctcctcgccgcctcccccgccgcggcggctcgcccgtgccacactttcttcgtctccttcgcggccaaccccaaccccatcgtcggcgacggcgag

SEQ ID NO: 2081 - DNA, 310 bp, Oryza sativa
  Clone ID: uC-osflcyp039g01b1
gtgactttgaactacctgcagctgatatttatgagcgtcaggacgtgtgtgggaatcgaacagaatattgtcagccttgcaggaagtatgtcagactgcgggaacagattggacatgacatccagtttcattctcaacccattgttgcttcagaatcttcaagtgacagaagcacgctggaagaagaagagagttatccagcagaagaacaaccagtacgacccaagcacactcatggcttacaacgcaagcaatttcttgtcacaattgtgatagctggaatttcaattctggttggatcagttctgct

SEQ ID NO: 2082 - DNA, 302 bp, Oryza sativa
  Clone ID: uC-osflcyp039g03b1
cgcaaaataaaagaagaattatccagcatactgcagaaattgagcactgaatgctgtatatacattggagactgaacaaaagacaaagcagatcggttcaggattcagagaaattgttctcgttttgcgaatgttgtagcattgcagagagatcaggtaaactaggactgtagacaagttatgtgtactgaacgactgatgccgtatatatatgtatatcaaagtgttgccgaattcattccttgcatatctactggttactgcttgcactagctaataaccaatggagtgcttctgtcagt

SEQ ID NO: 2083 - DNA, 445 bp, Oryza sativa
  Clone ID: uC-osflcyp039g05b1
cgtctcatccgcaacgtcaactccgccctggcctcgtcggtcctcggcgccatcaaggcgtccaccgcggtgaagttcgacgtcatctccaactcctacccaccctccgccggcgtcttcagggacgcctacatgaaggacatcgcgcgctacctggcgtgcttttgtcttttctatgcttcttcacattttcttctcactatatcctcttatttttatttcttcttttttttttttttttttttatcactttttaattctttttctacttattttattcattactaaatcctttttctcactttaatattttttttttctaatttctttttcctacttctatcttatctctttacttattcctattctctttcctttttcttctctttctcccatttttttccttttccttttttctcattacattttaatatttttcctttac

SEQ ID NO: 2084 - DNA, 353 bp, Oryza sativa
  Clone ID: uC-osflcyp039g07b1
gtttaccgctctttggcaagctcttctttgccttctgggtgattgtccacttgtaccccttcctcaagggtcttatgggtcggcaaaaccgcactccgaccatcgttgttgtttgggcaatccttttggcttcgatcttctcattgctgtgggttcgcatcgatccattcaccacccgtgtcaccggcccagatacccaaacatgtggtatcaactgctaagaaagcaggggattgtagagacagaaatactgccagttgtgttttttcagaatacaaagtgccactgccaccaattgtgttttaagttattaggaggtggttttattttactgctacctacagactagaaat

SEQ ID NO: 2085 - DNA, 453 bp, Oryza sativa
  Clone ID: uC-osflcyp039g09b1
tcagaactaccacaacggtcagcaccacaatgaccacgccaacaaccaccaccaccaaggtggcaaccgtggtggcgctcatcatgttgggactccgcccaatcaacagcaaaccaagcctgagcagcacccgcagctgccaattggagccaccaagcagcctcccggccctcgcatgccagatggcacgcggggtttcaccttgggcagagggaagccgcaaccgttgctaccggttctgtgtgcagccgtcgagccttgaaccctattcatcgtcacgatagggtatgcggcggcgagtgctggtgttgatagagatggttgggaggtcttctcttttcggaacatggtttacttgattttgatgggtgtgtgcctaggccaagtgttttggaaccgtttttatggtattgtatgtgttttgaagccaaacattgctgttttggttggttc

SEQ ID NO: 2086 - DNA, 105 bp, Oryza sativa
  Clone ID: uC-osflcyp039h02b1
gataatgttaggtgaaagtcccacacacttcagggtattgttatcgcaagagggcgtgtagtccttggtcgacccacggtgaccatggacgcatactttgaggtt

SEQ ID NO: 2087 - DNA, 104 bp, Oryza sativa
  Clone ID: uC-osflcyp039h03b1
gtttcatactgagaagcaaaacgagcaccgtgcacaactactctctgaagaacactgttatggctttagatgtgttgattatgatggttgctgattggaagatt

SEQ ID NO: 2088 - DNA, 563 bp, Oryza sativa
  Clone ID: uC-osflcyp039h04b1
gggcaaatgcgtctttttacaatgaagttaacggtcaactgacggtggactgacggcaatggcataaaagggaggagaaacttgaaccggtggcataaaaaggagaagccaatttaaagtggcatataagggagccggttaatttagagtggcatataagggattctctctttttgttttggagtgaaagaatctactgtattttcttatgtacatattttctttgtgttgttctaaagtcttctcatattgcttagcataatttgttggtggcaagcttttgtttccaaataattgtttccgtccaagatcgtgcactcacacatgatctgaggacatactaatctggtccagtttgttccccaaataattgtttggtggttcattctctgaagtaccccctccattcttaacccggcccagattattccccaaataagatgttgctttagaaattgtgcaggcaaaccatgaaatcttagctcactaatatatgccaaaaatatatataattcaagatttgatatgtgaagatgccatcgatagatttacaatgatttttt

SEQ ID NO: 2089 - DNA, 331 bp, Oryza sativa
  Clone ID: uC-osflcyp039h05b1
gttagtgctgcagacaagccacccccttcctcgcggagactgctccccccacaaacaaaagcaatcctaatctcggattcgaggcgaacgagcggcggcgagggagggggactagcggcgatcgcgattggagtcgggtggacaccgatcgcggcggcgctctgggggatcggggtgtggactttagggtctgtgtttcaaatgacttatgtaaccatctatcttgttgaagttgaatatgttgatctggttgatgtacaggctgtttttgacaatattgaggacaagtacgtttctgagcaagtgactcataatgatggtggccctcttg

SEQ ID NO: 2090 - DNA, 142 bp, Oryza sativa
  Clone ID: uC-osflcyp039h06b1
ggtggttacgccttccacgagcaccacgagaagaggggggtctcacaagagcgccgaggagtccaccggcgagaagaagcaccacctcttcggctgatcgaccttatcacaacgtcgtcgtgttatttatttcttttttttt

SEQ ID NO: 2091 - DNA, 411 bp, Oryza sativa
  Clone ID: uC-osflcyp039h07b1
gaccgacccacgcgttttgtttataggagagagacatacacagtgatatggatagatgtgggtagtgcgttcgctggcattgctgccgacaacgctctcaggaatgcatcatttgaggttgttcttctagaatctcgtgacaggataggtggtagaattcacactgattactcttttggctttcctgttgatctgggagcatcctggcttcatggtgtttgtgaggaaaatcccctggcaccaattattggaaggcttggacttccactgtatcgcacaagtggagatgactctgtgctgtttgatcatgaccttgagagttatgctctctatgacactaagggccatcaagttccccaagagctggtagaaaagatagggaaggtctttgagactttattggtagagact

SEQ ID NO: 2092 - DNA, 473 bp, Oryza sativa
  Clone ID: uC-osflcyp039h09b1
gacgttttgaagtatgttgcttcgcaatcaccaggtcagaggtcaagtcaacaaccttctcaggagccgcaacaaccaaaacaacagcaggcaccagtacagcagcagccgacacaaaaacaagcaccaactgttttgcgcagatcagcatctattgctgctcggcaagctgcaatggcacagcagtctcaggatgccaagacggttccatcttcccccaagatcaagcgccaagcatcaacaaaagctgcacctgtggcatcaacaaagttgaccggagctgcagctccgtcaacaccaaaatctgatgccgacgcaccaaagaaaaatgaggcggcgccagcttccttgcaagtggcaactccagcaacaaaggccgatgtaccagcatctgaacctagtgctgcactccctgaagccgaagaagctgacaagatggccattgacgaggctgatgatgccgtatagggcac

SEQ ID NO: 2093 - DNA, 470 bp, Oryza sativa
  Clone ID: uC-osflcyp039h10b1
atcctgcaacctgcaggacatatcacgggggggttttttatgaaatattcaaccgttaactgcattaagcagggtgaaaaaagcattgcgcgtaactgcacttaaggagggaaagaataatggtacccaaagtaatgattggatgtctgattatagaacttgggaacagacaacagaaaggttattttcacgaatattacatccatcagaggttgacagggggcagtgatctccagatctggatagtgaatctcatgtaacttctggagctaacagagtttggactatccataattgaccatatgtctgaggaaactccaatccttcttgtgcaggtactagtatttagattacttatttggaatgggccatgggatcaatttgctgaaaatgaacatgcattggattcaagtgcgcaagaagatgctctttcgtgttatgcctgtgctgtatttgacgctaaagggtgg

SEQ ID NO: 2094 - DNA, 498 bp, Oryza sativa
  Clone ID: uC-osflcyp040a01b1
gtagtttattaatgctcaccaaactgactatgtctgagagggagaaatctatttgttcagagacgtataacttctggtggctaatgtgacaagtaatatgcaatcagtccatgtctcattcggaggaatctgtttattaatttactgtttatattgaataaaggtggtgatagtgatttaccatttttgtgtagttactcactcataaggatatacagtatatacttttactcccattcattagggttctgcaattactgcaaatgtgtatactgaatgtggatttcacattgcaatcactttgatacttctactttaaatttaggtgcttcgtggtttgggaaatcttattgccgctgatgactacatggttgattcagtcctaactgttggaaacaatatcattggtaaactccatgacccttttcctaccatatctgtttacaatgtttattcatcagttaacagttccttgtctttctggaaaatatatcttgc

SEQ ID NO: 2095 - DNA, 492 bp, Oryza sativa
  unsure (1)..(492): unsure at all n locations
  Clone ID: uC-osflcyp040a02b1
gttcgtctgctgctgctgctgctgcttggacggttctcctttatgctctgggcgcggcacgagctcgaatccatggaggccgagtcgagaaagctccttttggctctggccgtctcgctctgctgcttcgtcgccgcgtcgagagcgcaatcgtacatcggggtgaactacggcgaggtggcggacaacctgccggcgccggaggagacggcgaagctgctcaagtcgacgaccatctccaaggtcaggctgtacggcgttgatccggggatcatgcgcgcgctcgccggcacgggcatctcgctcgtggttggcgtggccaacggcgacatcccctcgctcgccgccgaccccgacgncgcgtcccggtggctcgccgccaacgtgctcccgttcgtgccggcgtcgaccatctccgtcgtggccgtcgggaacgaggtcctcgagtccggggacgcctccctcgccgncgcgctcctccccgccatgcag

SEQ ID NO: 2096 - DNA, 495 bp, Oryza sativa
  unsure (1)..(495): unsure at all n locations
  Clone ID: uC-osflcyp040a03b1
ggagtaataagaggcgggcagcgagganggaggaggtcggctttgaacaacaagaggggaggagaaagtaggttgcgatggcgtccgggtggggcatcaacgggaacaaggggcggtgctacgacttctggctggacttcagcgagtgtatgagccgctgccgccagcccaccgactgcggcctcctccgggaggactacctcgagtgcctccaccactccaaggagttccagcgcaggaacagaatctacaaggaggagcaacgtaagttaagagctgctattcgtcgtagggaggaggcggcaaatgagaaggctgagggagctcctgctgtttcagctcagcattagccactccgataaaattcatgtgtgctttttgtttgctgtcaaaactttgttctactgtgatgctaagagcaaggcaataattccccaccttcatgttggactacacaaactcttttcccctctcactccatgactttgatctgta

SEQ ID NO: 2097 - DNA, 490 bp, Oryza sativa
  unsure (1)..(490): unsure at all n locations
  Clone ID: uC-osflcyp040a04b1
ggattaataagaggccggcagcgagganggangaggtcggcgttgaacggaaagaggggaggagaaagtaagttgcnatggcgtccgggtggggcatcaacgggaacaaggggcggtgctacgacttctggctggacttcagcgagtgtatgagccgctgccgccagcccaccgactgcggcctcctccgggaggactacctcgagtgcctccaccactccaaggagttccagcgcaggaacagaatctacaaggaggagcaacgtaagttaagagctgctattcgtcctagggaggaggcggcaaaggagaaggctgagggagctcctgctgtttcagctcagcattagccactccgataaaattcatgtgtgctttttgtttgctggcaaaactttgttctactgtgatgctaacagcaaggcaataattccccaccttcatgttggactacacaaactcttttccccttttactccatgactttgat

SEQ ID NO: 2098 - DNA, 489 bp, Oryza sativa
  Clone ID: uC-osflcyp040a06b1
cattcttttattctccatgctttcctctactgctcgggggatcttattgaaaattgggcgggtggatatattggtcatcttggtggacctgcaatgctgccgctgcgatgccaagatcaggaaggtcctgggctgccttgaagaggagtactgcatcgagaaggtggagtacgacgtgaagaacaacagggtgatcgtgcgcgggaagttcgacccggagaagctgtgcaagaagatctggtgcaaggccggcaagatcatcaaggagatcctcatcgtcgacgtctggccgccgccgccgccgccgccgtgcaagccgccgccgtgcgagaagcctccggaggactgcaagcccaagccctgccattgctgcagctgcgagaagcccaagcccaagcccaagccctgccattgctgcagctgcgagaagcccaagcccaagcccaagcccttccactgcgagaagcccaagccctgtcactgcgagaa

SEQ ID NO: 2099 - DNA, 490 bp, Oryza sativa
  Clone ID: uC-osflcyp040a07b1
atgaatgtttgattgatgatggtttgcagatcgcacaaagccaattcaaaaggcttctctttagagctggatattacttttctactggtcctttcggcaaattctggatcagaagaggatatgatcctcgaaaagacccagactcacgaatgtttcagagaattgattttcgcatgccccctgagctgaggaatcttccaaggaaggagcgtagacctgaaaagtggacagagatgtgcaagcttgaagtgatgccatcgaagagtttcatcttcctgcaattatttgaactgaaggatgactttattcaagcggaaattcgaaaaccttctcatcaaccaacttgctcagttggttttgtaagccgatgattaaaaccttgagattgcaattgagcatacggttattctcattatgccctaatgaagatgccaaaaactttttgaggaatgcctatgaacttattgaaaggtctaagaagcaggaagca

SEQ ID NO: 2100 - DNA, 482 bp, Oryza sativa
  unsure (1)..(482): unsure at all n locations
  Clone ID: uC-osflcyp040a08b1
tcctcctttcttatcagcccaactctgccatccctaagtgtgggcttttatatattatgggggctgttaaaaaaattncttcctttntgcccaatgactgttgcctgaacttcattcacgaaaatgactattttttcattactccatttggtcctaagggccatgctatgggagatattcctggtgtccggttcaaggtcttcaacgtctctggtgtgtctctccttgctctcttcaacgagaagaacgagaatcccaggtcttacattactggtacatcttcgttggcaagcatggaatagacagaattaaatgctttagatgctcaagaatgaatgctttagatcctcaagaacatggttccttgctatctttaaagtgcgctctttatattcctaacttaagattgtgttggtaaaaaccatcccttgtcaatttttccttctttttaagggaaaacactgacctaagctattttctcc

SEQ ID NO: 2101 - DNA, 466 bp, Oryza sativa
  Clone ID: uC-osflcyp040a09b1
gtactcttccatctcacaatccctcgctgtgtttgtaccttacgcggggaacacaccgtcgtccatggacagctctaataacaacaacaacaagagggcgcgcgacgccgaggatgaggccgacgaggccaagaggctgcgggcggaggacctgctcgacatgctcgacgatgataccgacgccgggggcgccgccggcgacctggcgtccgtcatgcggagcttcgaggaggagattgttgctggggatgtcgccggggacgttgcccccacgacgcagcccgagctcgggttccttctcgaggcctccgacgacgagctcggcctgccgcccgccaccgcgtcctcgtcggaggaggaggccggggctggggagcccgaggatgccatcgggttcggcggacagatctgggggttcgaggacgagattggcggaggcggctacgctggcttcgccctcacctcg

SEQ ID NO: 2102 - DNA, 433 bp, Oryza sativa
  unsure (1)..(433): unsure at all n locations
  Clone ID: uC-osflcyp040a10b1
ttcttcttctcccctccgactccanccacctggggggggtttaatcaacctagggggtcgctcaaaactcnnccacggcgtacggagagggagggtgtaacacgcgcaggcctgcgccgtcgtcctgctctgggaacttccgcgtgcagcgagggatggactagtgggttcgccaggccgaggtgtgggtgggacaagccgagaggtggatcctgcagcagcctcccgagcaggtttacgtcgccttcgcggtggtcgccgtgacggttctgttgctggtcgcaatttcgtgcctgaaatccttcaaagcaaacaccatagtgctatctgggctcattggtagtggcaaaactattctcttctaccagctttgggatggatcaacacatcaaggaactgtgacttcaatggaacaaaacaaccattctttccc

SEQ ID NO: 2103 - DNA, 500 bp, Oryza sativa
  Clone ID: uC-osflcyp040a11b1
gagaatgagaacaatgttgaggaaggatttggggggggaggtaccaatatactgcggtgcgagaagagtagaagctcaagaaatggcaaaggataagaatggtgatgcagtcacagggtatgttaggatctcacaccaagtttacaatgtaacggaggattatgagaagctgagggatgctgtcaataagcttgttgctgatggattcaccagcagcaagttgcggccttcgcagaagcaggaaacgatggcctgatgaacattgcagccaaccagcactctgttggaagttatgttgtggccgactacttagatgtggatcgccgtgacagccagcgctgcggtgtgatctagatttagcccgccaatggcgttgccagttcatgtagtgtactttcagaaactgacagaagtgttgtatttgcaatccgtccgtcacaataatgcactggcatgtcttcccccttaccctcattttcaagctgtaatgtaagaacaac

SEQ ID NO: 2104 - DNA, 375 bp, Oryza sativa
  Clone ID: uC-osflcyp040a12b1
gttttagccaacaacaccaagaacttgttggggcggggacagatgaaccaagcggggggccggatccaatccatccatccatccatagtttccaatggctggcaagtacatcgccgctggtcttgttggttcctttgccatctcatatgtttgtgatcattttatcgctgagaagaagatatttggaggcaccacaccacataccgtgtccgacaaggaatggtggcaagcaactgacaagaagtttcaagcctggcctcgcactgctgggccaccggttgtcatgaaccccatcagtcgccagaacttcatcgtcaaggatctcgagtcctaagattgtagtgggagcatatatgctgaaagttgcgccgtgac

SEQ ID NO: 2105 - DNA, 493 bp, Oryza sativa
  unsure (1)..(493): unsure at all n locations
  Clone ID: uC-osflcyp040b02b1
tctttttttaccttgtgacagatctnaggttgaaggcggtcttatggaaaactgggggggcttgtactgcggctctttctcaacctgctttggtgggaaaaggccattttgggtgcatgagtgggaaactcatggaacatgtggttaccctgaaatacaggatgaatacgactacttctctacagcactgtacctttacagcaaatataatgtgacgaaagctctgaagaaagcacatatttatcctagaggaggcaggaaatacttagttggtcatatcgtctctgctattgaattttcctttggggcaatgccatctattgtgtgtaaaaacggctcagttcaagaactgaggctctgcttccacaaggattatcagcctcgcgattgcttagttgagggtgagaactctgttagaagaaaccattgccctcgatacgtcactttaccatcatataaaccacatgcatttggcaattctacagaaggaatc

SEQ ID NO: 2106 - DNA, 494 bp, Oryza sativa
  Clone ID: uC-osflcyp040b03b1
ctttagtatcgaatcctctcttctcctcgtgcccaccacgaccaccgtaacaatggcgggcggcgggccgatcaacaaggaggacccgctcaactggggcgcggcggcggtcgagatggccggcagccacctcgacgaggtgaagcgcatggtggcgcagttccgcgagccgctggtcaagatccagggcgccaccctccgcgtcggccaggtggccgccgtcgcccaggccaaggacgccgccggcgtcgccgtcgagctcgacgaggaggcccgcccccgcgtcaaggccagcagcgagtggatcctcaactgcatcgcccacggcggcgacatctacggcgtcaccaccggcttcggcggcaccttccaccgccgcaccaaggacggacccgccctccaagtcgagctcctcaggcatctcaacgccggaatcttcggcactggctccgatggccacacgctgccgtcggagacggtgcgggcggccatgc

SEQ ID NO: 2107 - DNA, 469 bp, Oryza sativa
  Clone ID: uC-osflcyp040b06b1
gcgttggggaaaattgtgatatgtgcaaaccatccttcgggtgaattcttcaaaaggtttcctaactgccacatgtacaatactgagaaagagtttgtgagattgactatgaaagcattggctgaagagccaatcccactgtcagaggaactgagacatgagctttcctgggaggcagcaacagagagatttgtcagggttgctgatattgcaccaatcatgtctatcaagcagcattctccctctccccagtatttcatgtatatatctccagatgaactgaagaagaacatggaggaggcgtcggcattttttcataatgcgatttctgggtttgaaacggcccgttgtgtttttggtgccataccgaatactctgcagcctgatgaacagcaatgcaaggaacttggctggaggcttcaggaatgacagtcatttttttccacgctgttgtcaatgacaatagaat

SEQ ID NO: 2108 - DNA, 456 bp, Oryza sativa
  Clone ID: uC-osflcyp040b07b1
ttttagtttgcacaagttcagtgttattctccgcagggtatgtttaactacgggggggggctctcaatatgtcaagtataaggatcctaagcagcccgtctctgttcgtgtcaaggatctgctcggccggatgactctcgctgagaagattggccagatgacccaaatcgagagggagaatgccacggcggagcagattgccaagtacttcataggtagtgtactgagtggtggaggcagtgtgcctgctcctcaggcatcagctcaggcttgggcttcaatggtgaatgaaatgcaaaagggtgccctttcgacccgactaggtattccgatgatctacggtattgatgccgtgcatgggcacaataacgtctacaaggctacaatcttcccccataatgtcgggctcggcgctaccagggacccctacctagtaaagaggataggagaagcaac

SEQ ID NO: 2109 - DNA, 493 bp, Oryza sativa
  Clone ID: uC-osflcyp040b08b1
tttttgttgcgctgaaacggaaccatggagcatggggagctttggtgaaccctacgtgagcagagcccatggtgtggccatccccacttaagttcatcagtgagcttgaaccagaagctaaggctctcctggaagcagctctgatggaagccaacagggagagggagaagaaaatcctgaatggcacaaagtactccctgccatccccttcgcccggtgatgacagtgccgatgacgatgcatgctcagaggtgagcgacacggagctttgctgcatctgcttcgaccaggcttgcaccattgaggtgcaagactgtggacatcaaatgtgtgcaccgtgcacgctggcactgtgctgtcacaacaaacccaatccgacgaccctgacaccgccctcaccggcctgcccattctgccggggcagcatctcacggctggtggtggcccaaacaaggtctgcttgtgatcctgacaagccgtcatccccgcagct

SEQ ID NO: 2110 - DNA, 481 bp, Oryza sativa
  Clone ID: uC-osflcyp040b09b1
ttcttctttgcatccatccatccatcagagatgagggtgttcattagaaagtgaggggggtaaaaaactgagctgacgctgacgacggcaccatccatgatcacctcgcctctggaggcgccggcccggcccaagggccttccgtccatctcccgccggggatcctccttcgccatcgtctgcagcggtgggatgacgatcaagaccgacaagccctactggattggaggtggcatgtcagctgctattgatgcatctgacaggaagagcacagggaagggtgtgcaccaattttgtgacaagtacacagcatacgtggacggttacagaccaatatactctcctgaggaatggtctcccaccggtgacacctacgttggtggaaccacccagcttctgatctgggccgtgaccctcgccggactcctcggttgcggtacccttctcgtatacaacaccagctctctcggcggctaaattt

SEQ ID NO: 2111 - DNA, 371 bp, Oryza sativa
  Clone ID: uC-osflcyp040b10b1
ttctttaccgcctcccctcctctcctctcctctctcgcgtctacttaaagaaagggggggttacaataacaaaaatcctctgcgatggcgaagaacaaggagagggcggtgaacgtgtctatgaatccgcgccactcgctccacgtcaaccgcgccaatgacaataacggcccgaaccgctgcaccccaggctggtcgcggcagcctttctgctgccacagtgcggcggctcaagatgtacaagatgaggcccctcagggacctaggccggaagatccttaatcacgaccttcaatccaaggagctacccaacacccgcatcgagtccaatctcccctggttcggaaatacaccagtccttcatcacaaag

SEQ ID NO: 2112 - DNA, 450 bp, Oryza sativa
  Clone ID: uC-osflcyp040b11b1
ttgatgaggaagatgacaaggtcactttcatgcacggggactgtgccacgtgtcctcctgctgccacgcgtacctcctcttcactctccagcagctcagctagtcagctctacagcgaaacggtgaaccttcgaccgagtctgctccattccctatcgtccacagcctctgatgaattcaacatccaaataccatcgcgactaccccttcttgccggccgcggcctccagctccgacggcgacggcgacggcgatggcttctacatcggcgagccaagaaacccagccgccggagctgactccaccgatgtcttcctgttcctcgccgttccggcagggtggctcgtcaggctggccgccttcgtcggcgagctcgtcgcctctgccatcctcggcctcgtctaccccgtcgccgctctcatcggctggctgcgcgccgtgccagcggcc

SEQ ID NO: 2113 - DNA, 491 bp, Oryza sativa
  Clone ID: uC-osflcyp040b12b1
ttggtgatggcgcccaagcgacttgtctgctgggtgggcgtggccgccgcgctggccaccacctgccacgggtggggcgccggcgccggcgatgtcgtgtcgtcgtcgtcggcggcgctctcgttcgtgaacaggctgaggcagatgatgatcccggcggccgtgggcgacggcgactactgcgacagctggcgcgtcggcgtggaggcgaacaacgtgcgggggtggacggcggcgccgcgcaagtgcgacaactacgtcgagaactacatgcgcggccaccactaccgccgcgacagcaaggtcgtcgtcgacgaggccgccgcctacgccgaggccgccgtcctctccggagaccccgccgccgacgccaacgccacctgggtgttcgacgtcgacgagaccgccctctcccacgttaagttctacaagaagcacgggttcgggtaccacagaaccgacgagccggcgttcatggagtggctgatcgc

SEQ ID NO: 2114 - DNA, 489 bp, Oryza sativa
  Clone ID: uC-osflcyp040c03b1
ctcatcccctccccagatctccagccccaggagctgcggggggttatcaatggcggtgaaggtctatgtcgcgtactactctatgtatggacatgttgctaaactagctgaagagatcaagaagggtgcttcatctattgaaggtgttgaggctaaaatatggcaggttcctgaaactctccatgaggaagtacttggaaagatgggcgcgcctcctaagccagatgtgccaacgatcacaccacaagaacttactgaggctgatggaatcctgtttgggttccctacaaggattggcatgatggctgcgcagatgaaagcattctttgatgcaaccggtggcctgtggagtgagcagagccttgcaggcaagcccgccggcatcttcttcagcactggtacccaaggcggcggtcaggagactacaccgttgacagcaataactcacttgactcaccacggcatggtgttcgttccggtcgggtacac

SEQ ID NO: 2115 - DNA, 375 bp, Oryza sativa
  Clone ID: uC-osflcyp040c04b1
ctcttcttttctccgcatcctcctcatcgcctccggtggggctttttttaaattttttctggggttgatcagtttgttcgatcagatcggttctttggagagatggagcagtccttcatcatgatcaagcctgacggtgtccagagaggcctgattggagacatcatcagcaggttcgagaagaaaggattctacctgagggggatgaagttcatgaatgtggagaggtcctttgcacagcatcactatgccgacctttccgacaagcccttcttccctgggttggtggagtacatcatctctggccccgtcgttgcgatggtttgggaagggaaggatgttgttgccactggccgcaggatcattggggccacc

SEQ ID NO: 2116 - DNA, 401 bp, Oryza sativa
  Clone ID: uC-osflcyp040c06b1
tttctcttcttttccatcaaagttcgttgccctctgagcgtgttctttgctacctcaagcttgttcctcgcatgcgtgtaaactgagaatttaccaagtttttgttcttctcacgatcgattgataatataattgcatgacgcgcatggaggagtcgagttcttgatcgatcgagcgagcgatcggtcaaaacattcggaagaaatcgttgacgaggcaaagcgatccaggagaagccattcgatcggatttgcgagagagatcatgcacaagcgatccaaatcctgcgagccgatcagcgagatggacgagcgccgccgccgcggtggcgtccgcggcaatggcgcgacgacctgcgacgactcgacgtgcggcgccagggcggcgccgtcgtctgcgtc

SEQ ID NO: 2117 - DNA, 431 bp, Oryza sativa
  Clone ID: uC-osflcyp040c07b1
tctttctgaatttctttctccccaaaccaaacgaggctttgacttacccatgcgtgtcgtgaaattcggagcaaggaagaacaaggcgccgcgccggatttagccccgcccccctctccggagtatcccccctcctctcctctggtcggttcttgcggtgaatcccccgctgatttgtcctgtcaattcttgtgagattatttttctttttttttttggggcggttggcttgggatttggattggcggggagtttttctgatctgtgtggtcgtgtgagcggtgactactacaagcaccgcggtgcactaacttattttaggagcgtgttccacccggggagcaacctcgccaccaagagcctcggtgccaacctattaaaccgcccctagaccaactcctccaccgtctacaactgggtgtacagcgacg

SEQ ID NO: 2118 - DNA, 490 bp, Oryza sativa
  Clone ID: uC-osflcyp040c08b1
tgaacacacacagagatagaggtgaagagcgggggagggttataaacagttgtgggtcagtgaaggagggaatgatgtccgaaggcgaggagcacgggtcgctgctggagaagatcaacgacaagatccatgagttcaagaagggatcgtcgtcatcctcgtcctcggactccgacgacgacaagaagcaccaccacaagtccaagtccaagaagaagcggctcttcggccggacgaacccgctacatcacgtcctaggaggaggcaaagctgctgatcttgtgctgcggagggacaagcagacgtcagggagcatcctggcgggagtgaccgtgatctggttgctgttcgaggggatcggctaccacctcctcaccttcttctgccactcgctcatggtcttcctcaccgtctgcttcgtctgggccaatgccgactccttcatcaacaggggtcctccaaagttcccagatgcaattctgtctgaagt

SEQ ID NO: 2119 - DNA, 489 bp, Oryza sativa
  Clone ID: uC-osflcyp040c10b1
cgagtcgcgacacgagaccgtaccgtggaaagaagagagcgaggcgaggacaccactgcgctccgctccaccgccgggtcgccgcgccgcgcgcggcccgagctcgccgatcgagagccatgagcctgatcctttcccggcggcgcctcgccgccgccgtccggcggtcaggccccgccgcgctcgcctccaggtggatgcacacgccgccattcgcgacggtgtctcctcaggaaatttcaggttcgagcccggcggaagtgcataattttgtgcagggcagttggacaacatctggtaactggaattggctaggtgatcctttaaatggtgaaaaatttatcaaagttgctggggttcacgaagcagaaataaagccatttgtagagagtttatctaattgcccaaagcatggacttcacaacccacttaaagctccagagaggtatctcatgtttggagatatatctgccaaagctgcaaacatgc

SEQ ID NO: 2120 - DNA, 314 bp, Oryza sativa
  Clone ID: uC-osflcyp040c12b1
ttattctttaataaaatccaatcttatcacatggttggtttttttgaaaaattcgggggctccaaaaaaaatcttatttctaaaacatgctttctgattttcataacttctgcttctactttaatatttaacatatatatccctatcactaatcttatccttcatataagacaaaacctttacatacagttctctcgggtttttacttactttatctccctttaatggatattcacactccaacatccttaccatgacatatctaatcactataagatctactcattacttctacatttattgtcttaaaaatt

SEQ ID NO: 2121 - DNA, 480 bp, Oryza sativa
  unsure (1)..(480): unsure at all n locations
  Clone ID: uC-osflcyp040d01b1
gccttcctgccagcgaagcagctccggtgctacttgttggctatagatagcaactgcggtcatggaagcngcngggaaggagcctagcagggttctggtcatcggcggcacgggctacatcggccggtacatcgtcgccgccagcgcccgggaggaccacctcacctccgtcctcgtccgtgacccggcgccggcggaccctgccaaggctgccgtcctccagggcttccgggactccggagccaccctcgtcaagggagatctttatggccatcaaagtttggtggcagccatcaaatctgctgatgtggttatctcggctgtgggttacgcgcaactagcagatcaaacccgtattatttctgctattaaagaagcagggaatgtgaagagattcttcccttcagagtatggtaatgatgtggaccatgtacatgcagttgagcctgtgaaatcagtgtatgctacacaagctcgtat

SEQ ID NO: 2122 - DNA, 496 bp, Oryza sativa
  Clone ID: uC-osflcyp040d03b1
cattatattcctggatttactttaaattgcttgagtgagcgtatttattattatcattggcaattaatatccctgataaacagcagtattatcatccctagaagtgcatctcacatattgactcaagttgattaaagttacgcttggtaattggtttaagagcagctggaatactacgcaattgttctaacgaatatctagtacttgctttgtatacttaaatatatccataagtcggtgtagtggtaatatttgcttccgagattatgtgctcagctatactccgaactgtcaactatcagtttggaagtatgttatgttggtcaaatactattatgatgtttccagcatacgattggagaactcttgtccaatttaagtgaaataagctcttgttcttgcccagaatttacagcgctcctgcgccttaatatcaactaattgtgtatgatttaaccgctcaactctttcactttgccctttctgtatttatgca

SEQ ID NO: 2123 - DNA, 468 bp, Oryza sativa
  unsure (1)..(468): unsure at all n locations
  Clone ID: uC-osflcyp040d04b1
gctttatcgtacagcctgaagtcctaatccgccaattgggcgccttcatacagcagcatggtggttccgccagctcaacaagtataactgaacacttcaagaaccggatactgtccaaggatatgctgctgtttaagaatctgctgaaggaaatagctacgttgcaaagaggtgcaaatggtgcaacgtgggtgctgaaacctgactaccagtaatattagctatagctgcaaagttttggctaggtgtagcgaacagcataaattaatttcattcagattggagatgcaaaaatcgatgagggaaatgcctctaatgcctttttgatgaagactgaattctttttgtaggcaatatacaacttttgtagggtagatatacaaatctgaaacaaaaacatgtangtgacaggttgtaaatgcatgaatacagacatttgtcgcttgaagcattttttgtggatttttt

SEQ ID NO: 2124 - DNA, 326 bp, Oryza sativa
  unsure (1)..(326): unsure at all n locations
  Clone ID: uC-osflcyp040d05b1
actttacttactctactactactagccntaaggggctggctaaatacaaagctaggggccgcaccgtgatggcctcctcggccacctccgtggctccattccaagggctcaagtccaccgccggcctccccgtcagccgccgctccaccaactcgggcttcgggaacgtcagcaatggcggaaggatcaagtgcatgcaggtgtggccaattgagggcatcaagaagttcgagaccctatcgtacctgccaccactcaccgtggaggatcttttgaagcagatcgagtacctgcttcgatccaagtgggtgccttgtctcgaggtc

SEQ ID NO: 2125 - DNA, 483 bp, Oryza sativa
  Clone ID: uC-osflcyp040d07b1
tttgttgttgtaaagttgcgagagagagagagggagatctttaaattagatgaggggtagcaaatcaggaagatgctggagaagctgtgggacgacgtggtggccggtcctcgaccggagaccggcctcgagaagctccgcaaggccgctacaacccgcccccttgtcatcaacaaagatggcgacggcgaggcgagcggagtggcgtacaagcggacgcagtcgatgccgacgaccccgacgacgccggtgacgccgtcgtcttcgtccccgacgacggctacgacgacaacgccgcggggcagcaacgtgtggaggagcgtgttccacccggggagcaacctcgccaccaagagcctcggcgccaacctcttcgaccgtccccagcccaactgccccaccgtctacgactggctgtacagcgacgagaccaggagcagccatcgctgaactgaataatcccattgatcggaggctggtcga

SEQ ID NO: 2126 - DNA, 483 bp, Oryza sativa
  Clone ID: uC-osflcyp040d08b1
ttctccacaacgacaaggacagagagaaaaacgccggatttcaatcccaaacccggatccccactcgccatgccgagggggcgcgtgcccggcggctcgaccgccaacttcagcgcccacctcatcgcggcccagctcgggatgcagtgccgcatgggtcccgcggcggcggagcagatgaggcgcgtcatcgcgtcgtcggactgcgacaccggccgcgtcatgaggatgtttggtgccatggaaggtggcgacagtgattctgattctgatgactctgcggagacggagaaagttgggccactgcatgaggcagcaagcgcagggaaaatggatacttgcaaacatttggtggagcagcttgggtttgacatcaatgctgaagcaagtgatgatttgggtatgacacctttggcttgtgcggtgtccaagggaaaagcaattgctgtgaggtattttcttgacaaaggtgctgatccaaat

SEQ ID NO: 2127 - DNA, 479 bp, Oryza sativa
  Clone ID: uC-osflcyp040d10b1
tgggtgaacttcaagaacaacccgatgttcgagatgggtacagtccacccccaagcctactacgaggacatgcagcgtgcagtcttctgcctgtgcccgctgggctgggcgccatggagccctcgtctggtggaggccgtggtgttcggctgcatcccggtgatcatcgcagacgacatcgtcctccccttctccgacgcgatcccgtgggaggagatcgccgtgttcgtggccgaggacgatgtcccgcagctggacaccatcctgacctccataccaacggaggtgatcctccggaagcaggcgatgctcgcggagccgtcgatgaagcagaccatgctgttcccgcagcctgcggagcccggggatggcttccaccaggtgatgaacgcgctggcgaggaagctgccccatggcagggatgggttcctcaagcccgggcagaagtgctcaactggaccgaggggacccgggaagac

SEQ ID NO: 2128 - DNA, 486 bp, Oryza sativa
  Clone ID: uC-osflcyp040d11b1
tgagttctcttgactcctctctcttcgtctcaggttggagctctggatttgattttgggtcttcttgttgtttgtgcaattgtgcatcgttgttagctgggaacaagcagaagaatggcggacagcacggcgacctgcatcgacatcatcctcgccatcatcctgccgccgctcggcgtcttcttcaagttcggctgcgggattgagttctggatctgcttgctgctcaccttcttcggctacctccccggcatcatctacgctgtctgggtcatcaccaagtaggaggagaattactacccttccaaggtgatggtgaattggtgatccggagcctatgattggttgtgcctggtgtaagcggcagttgtcaaagctgtgattttctggttctttggacggatgtgctcgctgtggtgatgtgtatgctgtacatctggtttggtgtttgtgcttaagtgcctcttctggtacaacaattgtttt

SEQ ID NO: 2129 - DNA, 253 bp, Oryza sativa
  unsure (1)..(253): unsure at all n locations
  Clone ID: uC-osflcyp040e01b1
ccatcctttcgagccaagctaccattctcctcctcgggggggtttgattataaactggcggttctataaacacncgcccnaccaccaccaccacttacttctctcacgctgccctcctacctcaccaccctcattctcacccccaccctcacccttactagcacccacatccgtactaccccattgcacatgccctgacattcatccctccttaccccacttccatccctcccattgttgcccttccaccccc

SEQ ID NO: 2130 - DNA, 495 bp, Oryza sativa
  unsure (1)..(495): unsure at all n locations
  Clone ID: uC-osflcyp040e03b1
gttttcccgctcggcgacgccgacgcgatttcctcgcctcgctcgatactgaattggaggcgaaattgtagatcatatagcanagagagagagagagagagagagagagaggaagcanactcggaccccttgatttctcggctagatctgagatatcatcgcatcatgggactgctggggttgaatcggctcatgtccatacagcgggagcagcgctgtcgccaaatcgaagccaatcgtcttcttgcatccactgataaaagaaaggggtctccctgcaaacaagataattcccgatgcagcaaaagagagagatattctcagccagaccttccggaggacatttggcgccatatacattccttactgtcacttcaagatgctgcccgtgctgcttgcgtgtctcgggcttttctatgtttatggaggtgccgtccccacctcaccttcagtttgcaaactctgggcttgagtgaaatggcatgtaaaaagggt

SEQ ID NO: 2131 - DNA, 411 bp, Oryza sativa
  Clone ID: uC-osflcyp040e04b1
ccccccaacgccgccgccaccgccgcgggcggcgtcgatgaaaccgaggcgggcgatctcggattcacctctcccgcctccggcctccgtcaccgtctccccacgcgcgtcagtcatggcgggaatggcaccagagggatcccagtttgatgctaagcactatgattctaaaatgcaggagcttctgaaccaaggtgaaaccgaggagttcttcacatcttatgatgaagttcatgagagttttgatgacatgggtctccaagagaaccttctcagaggcatctatgcctatggtttcgagaagccttcagccattcagcaaaggggtattgtccctttctgcaagggtcttgatgtgattcagccagctcagtcaggaacaggaaagactgccaccttttgttctggaat

SEQ ID NO: 2132 - DNA, 329 bp, Oryza sativa
  unsure (1)..(329): unsure at all n locations
  Clone ID: uC-osflcyp040e06b1
cagtcatcaaccgcctactcggagatgatagacgaggcgggtttaatatacctaggcggtccttaaacacccacgngcaccttattcaccttataaccctcagcatctcaacccagcgcggagatgtccaaaacgcacacctctcactgtcctaccgcagaccagtgctctcacctgctcataccactcaacaagtgccgggacgccgagtactacctcccctggaagggcgagccctagcgccacgcctacaagaagagccaacacgagctcatgatcgatcggatgctccagatccactacatcccctatgcccatgaggccaaatc

SEQ ID NO: 2133 - DNA, 394 bp, Oryza sativa
  Clone ID: uC-osflcyp040e07b1
ttattatcttaaattctggactaatccttacaggggggattatattaaacttgggggtcatctaaaatgctcatctagcttgctgtaactatggcctcatattgctgcaggacgagcacttgaatcacttcacgcaacgctgaatcaagactccaggccatcccgagaacttccagacgcccagagttgaatttaccactggacctcttggtcagggtattccaaatgcaataggcctggcccttgctgagaagcaccttgctgctcgtttaaacaatccctacaacaagattcttgatcactacacctactgtattttgcgagattggtgccacatcgccggtatctccaatgaatcttgctccttagctggccatttgggtcttggcaagct

SEQ ID NO: 2134 - DNA, 392 bp, Oryza sativa
  Clone ID: uC-osflcyp040e09b1
gctcctgcagaaaaccatcatagacgtgctggcttctaaaaacctcggggtgctctcaaagagctgaaactttcttcaaccacatctcatgtaaagtctttaacgagagctttttccaactattacactcatgagaggctattgtaacacaaaaaatcaagctctaacactctatctattccaatgatgatactcatctaaacaaatattgcaagttgaggatttcatgattttgcatattgattctacaaataactgataacataatgcctcccatcataagcttccatgaaatacaacttcagatttgtacttcactatctaagatttatctaaactggctgctaatatgatttcttactcaactttagtaaattaacataacccacttt

SEQ ID NO: 2135 - DNA, 308 bp, Oryza sativa
  unsure (1)..(308): unsure at all n locations
  Clone ID: uC-osflcyp040e11b1
tgctctgcccgccgaggaggccaaagagcaaggggggggtttgattataaaaggcgttggccaaaaacgccanccagttagagcattccaagcaaggctagctcgccttcgcctgtacaccttgaagtacatgcatgatctgccctctccgaccccttcggcgactttcctaagctgcactaaacagtgcttgcagccagtgatgagtctactgagcatggactggtactactcgactccgtacgtgtgtgtgcttactcaagacgtggtgctaaataaaatagtatgtcatcaagggccgaggggcc

SEQ ID NO: 2136 - DNA, 498 bp, Oryza sativa
  Clone ID: uC-osflcyp040f02b1
gtgtgtttagatggccctgaataatcgagcgatggacattctcgatgtagagctggtaacagagcttgaaaacgcgccgactgcaacatccatggatggtccgtcagaaagggtgaactacctgatttcgctacttaaactcgggctgctctgctctggggaaatgccattgagtagaatgtcaaccaaagatatcatcaaggagctgcttgtaatcaaaagggcactcgcttaagaaagcttttttttaagaggaaggtcacaacttaagaaggcttttgagaagcaaaacatgccaaattatgtgctcttttttattattcctgatgtatgtgcgattctctttaatttctaagacaaactcatgaatgcatgggtttcaaagaacaaaagaattgtactggtgtaatatgcgatatagattttctggatcacggtgaaaagatgttgccgctgatactctctttttcctgattgaatatttgtaaagctacagta

SEQ ID NO: 2137 - DNA, 470 bp, Oryza sativa
  Clone ID: uC-osflcyp040f04b1
gcttcatgtcagtttcatctgctcaaatagaggaggggggatttgagactgccactgtggcagatattttgaagtctaaggggaagagtgctgatggatcttggctctggtgcactactgatgactctgtctatgatgctgtcaaatctatgacgcaacacaatgttggagctctggtggttgttaaacctggacaggataaatcaattgctggtattgttactgagagagattacctcaggaaaatcatagtgcagggacgatcttccaagtcaactaaagttggagacatcatgactgaagagaaccagctgatcacggtgaagcctgataccagagtcctgcaagcaatgcagctgatgacagagaagcgcatcaggcacatcccggtgatcgacggcacgggcatggttgggatggtctccattggagacattgtccgcgccgtggtcagcgagcaccgggaagag

SEQ ID NO: 2138 - DNA, 491 bp, Oryza sativa
  Clone ID: uC-osflcyp040f05b1
cggttttatgaaagttgatccagataggtgggagggtgcgaactaaagaaatcttagggggcaaaagcatctactgaagaccatcaacagaaggaaaccaactcatggaaacaaccaagttcagcagcctcagttgccagctgctcctgtacctgcttgcgtagaagtggggaagtttgggatggaagaagagattgagatgctcaaaagggataaaaatgttttaatgcaggaacttgtcaggctgagacaacaacagcagacaacagatcatcagctgcagactttgggcaagcgtcttcaaggaatggagcaacggcaacaacaaatgatgtctttcctggctaaggcaatgcatagtcctggcttcctagcacaatttgtacagcaaaacgaaaacagcagaagaagaatagttgctagtaacaaaaagaggaggctaccaaaccaggatggttcgttggactctgaaagtgctttattggatggac

SEQ ID NO: 2139 - DNA, 497 bp, Oryza sativa
  Clone ID: uC-osflcyp040f07b1
ttctatatttgacaaatttgagtgttgtcttagtggggatggactccatgttgcaactagttcatatggtaatttatttcgggtttttggctgtactcctgggagcacagaagcgaccactttggaggcaagcagaaaccccatgaggcgtcagattgtaaacccaacaaggcccacacgcacactaacctctctggcccgtggtgtgcggagaggtggggaaaatcaaggcgttgatgccaatggaaattcatttgacttttcgacaaagttgctccatcttgcatggcacccaactgagaattctatcgcatgtgctgctgcaaatagtttgtatatgtattatgcgtagagaaggtgcttgagaaaatttattgtttttggttcgctcttggaggccgcgtgccttcacatgcaaccagagatatggtgcaggatgttgtcgtcaattcctcccttggggccaaaagaaggccgtgatgcccacaagatggctt

SEQ ID NO: 2140 - DNA, 459 bp, Oryza sativa
  Clone ID: uC-osflcyp040f08b1
caaatccattcacaatatctcagaagagggtttttaataagaagaggggcggttaacaaatcctaattggaagatgcaaatttcagactattctgttcctgtaggattgagattgctaaagctgcttttagcaaccgttgaggcttcagttccagctgaagctctcgaaccattctggacagatgtttatcggaaatcttggggtgtgaagttgtattccacatcgtctacaaaagaagtctttgagatgctaaccattctggaaggtgccataagacgggatttcttgtcatctgactttgagacaacaactgagttacttaatttaagcacgcaagattcagcttctcgaaatactgttccacgttctggatctgctgatgtacttccatgggttcctgacactgttgctgctgttgtcttaagattgttagacctagattctgccatttcatacac

SEQ ID NO: 2141 - DNA, 490 bp, Oryza sativa
  Clone ID: uC-osflcyp040f09b1
ttctacctccggtgatcgccgccgccgccgccgcgggcgatggactacgcttccgggctggtcaacgccgccctcccggacgacctgctcgcggaggtgttccgccgcgtcgccgccgcggggggcaaggccgacctcgacagctgcgcgctcgtgtgccgccgctggcgcggcgtcgagcgcgcgtcccgccgcgccgccagggtccccgtcgacgggcccgacggcgacgccgtcgtccgctgcgtcgccgaccggttcccgggcctcgccgatgtcttcctcgaccacggcctctacatcgccgccggcgcctccgccgccgccgcggagcggagcagggcacagggttgggataacgaaaaccccaagttagatgagcaacatatgcagtgttccacactaagcgaagatacgcaaaaagaaaatggcagtgatggtgtcaacccaacctcatttactgatgctgggctacttcatctcattgagg

SEQ ID NO: 2142 - DNA, 473 bp, Oryza sativa
  Clone ID: uC-osflcyp040f10b1
ttttgtccatgagttgccaaaccagggctcccggcagaggtagatagacagttggggtggtgaccttgatctctgtgatggaaggtatgacactcagtaccattctttgtttaggacacttgacagtacccatcatgatgacttccaccagccaaactttgccactgcatcaatcaaaaagggtggacctagagagccatggcatgatattcactcacggctggaagggccaatcgcatgggatgttctttacaatttcgagcagagatggagaaagcagggtggtaaggatctccttctgcagctcagggatctgtctgacactattattccaccttctcctgttatgtttccagaggacagagaaacatggaatgttcagctatttagatccattgatggtggtgctgcttttgggttccctgatacccctgaggaggctgaaaagctgggctttgtaggcgaaaggatca

SEQ ID NO: 2143 - DNA, 401 bp, Oryza sativa
  Clone ID: uC-osflcyp040f11b1
ttcttgaaggagggaatggaaaggaaggatgggtggcaaaaattgaatccatctgggggtcccaaacttctgctcttgaggctcatgcagcccctaactgcaaggttctggtagttgccaatccagcaaacaccaacgctctcatcttaaaagaattcgctccatccatccctgagaagaacattacttgcctcacccgtcttgaccacaacagggcacttggccagatctctgaaaaacttaatgtccaagttactgatgtgaagaatgcgatcatctggggcaaccactcatccacccagtaccctgatgttaaccacgccactgtgaagactcccagtggagagaagcctgtcagggaacttcttgctgatgatgagtggttaaataccgaattcatc

SEQ ID NO: 2144 - DNA, 493 bp, Oryza sativa
  unsure (1)..(493): unsure at all n locations
  Clone ID: uC-osflcyp040g01b1
aaaccacggcgacccgccgccatccatccccctagagccctagctagggtttccaaccgccatggcgaccacgccggcggcagcggcagcggcggcggcggcggggggcgcggcgatcctcgacactctcggggacttcacctcgcgggagaactgggacaagttcttcgcgctccgcggcaccggcgacagcttcgagtggtacgcggagtgggacgacctccgcgccccgctcctctccctcctccgtggcggcggcggcggcgcggagggcggaggcaaggccccggagatcctggtgcccgggtgcgggagctcggtgccctcggagaggctctacgacgccgggttccgccgcgtcaccaacgtcgacttctcccgcgtcctcgtagccgacatgctccgncgncacgcccgngcgcgcccggagatgcgctggcgcgtcatggacatgaccgacatgcagttcacagatggatcatttgatgtcata

SEQ ID NO: 2145 - DNA, 498 bp, Oryza sativa
  Clone ID: uC-osflcyp040g02b1
gccttaatccctaggtctcccacgcggcggcggcggcgggcgggggtttctcgccatgtcgcacttcgggaggtcggggccgccggacatccgcgacaccttctcgctcctcgtcctcaacatcagcttccgtaccacagccgacgacctcttcccgctcttcgaccgctacggcaaggtcgtcgacgtcttcatcccgagggatcggaggactggggactcgaggggattcgcgttcgtgcgctacaagtacgctgaagaggcgcagaaggctatagatcggcttgatgggcgtaatgtggatgggaggaacatcatggtgcagtttgccaagtatgggcccaatgcggagccaatacgaaaaggaaggatcatagaagaggttgagaaatcacgggacaggtcaagaagccgtagcccaaggcgaaggcacagagatgaccacagagatagagaacgcatgggcccgagtcgcagcagaagccagagaaggcatgg

SEQ ID NO: 2146 - DNA, 418 bp, Oryza sativa
  Clone ID: uC-osflcyp040g03b1
caattactagcaagaacgcgaaccatgtttacgcgaaagggaggcctgggatgatgtgacctacacctatggagacatggattataatcataatgcccacaggcggactgttgctgattgtattaatgctacaaatggaactagtggtgcatttgatgttagcaccaatggaatactagattgtgcactggaaagatctgagtactggcgagtgtgtcatgaaaaaggaatactccctggagtgttaggttgacggccttcgcgtgctgagacatttattgaaaatgatgacactcattatactcagggtgattggagattgcactacggtatggtgttgcaagggtatgtctacctattaactcacccatgcactcctgcaatattctatgatcatatattgttgcattaacagcca

SEQ ID NO: 2147 - DNA, 463 bp, Oryza sativa
  unsure (1)..(463): unsure at all n locations
  Clone ID: uC-osflcyp040g05b1
gcttttcgtattcttatggactgtggtgtgcggaagctaacattaattgacagtgggggagttgtaatgtcnaatttggcaagacagtcactctacacatctgatgatcgtgacagcccaaaagcatcagcaatactagggcgtttgagagagagatgtccttcagtggatgcaaaaggaattaaaatggaaataccaatgccaggccatcctgtatcacctaatgaagcagtcagtgtgcttgaagattgcaaacgcctccaggagttggtatcttctcatgatgctgtcttcttgctgaccgacacaagggaaagtaggtggcttccaacacttctctgcgcanatgaaaacaagattgctattactgcagcattaggatatgacagttaccttgtcatgcgacatggggctggtccaggcacgaattgtggaagtccaaatgtggttgctgctgctgata

SEQ ID NO: 2148 - DNA, 403 bp, Oryza sativa
  unsure (1)..(403): unsure at all n locations
  Clone ID: uC-osflcyp040g06b1
gatttcttttgctgaagagcaaggtgtctcntcgtggagaatttaaaactcaaggggccttgaataactacacaaggacagagtgaagaacgttgatttgtttgagaatggcacgattgccattgtacaggctatttctcctgagctcggcaaccgtgtgcagagagttcgtgtgcagcttcctggtctaagccaggagcttctccagaagttgagggaaaagaatatcgattttgctgcacacagcaaccaggaggactctggttctcttctgttcaacctgatcggaaacttggctttcccacttatccttattggtggtctatttttgctgtcaagaagagcacaaggtggccttggtggacctaacggtcctggcttttcccttggttttgggcaatct

SEQ ID NO: 2149 - DNA, 484 bp, Oryza sativa
  Clone ID: uC-osflcyp040g07b1
tttatatgcaacagtggtagcgatctttgctggccatcctcaaattctgaagacatgcttagccctgcagagctcccatttatgattgatcttgattatcacactcaaattgagtaccgttggggtggagaaggtttaaggaagacactaatttgttgggcagcagaaaaaagcgagggtggtcaagtggtacttgtagaagatgaagaatgttcatccacttattgtatttcatttagagtgaagaatgctgaggctgtacctcctgtgaaagagcttaggaagacaatgagaattcaagcactgcgctgtcatgttttgtacagtcatgatggtagcaagttgaatgttattcctgttttagcatcacgatcgcaggctctaaggtacttgtatataagatggggggtagagctgtcaaatatgacagtggttgttggtgaaagtggtgatactgattatgaaggactattaggaggcgtgc

SEQ ID NO: 2150 - DNA, 357 bp, Oryza sativa
  Clone ID: uC-osflcyp040g10b1
tttcttcaactgcttctctcgccgccgccgccggcgccgctggagctcaccgtcgccttagaaaagggcaggaggaggaggaggaggaggaggggggagccatgtctccggagcccgaggactacatcatgaactagaagaacccgcgcccgctctacgaggacgacatcgtcctcctcatgacctacggtcttggaccttactcgaccatcattaagaaggtttagaaggaaatcaaatagatggcgaagaagataaatgatctctgtggaattaaagagtctgacactggattggctccacctagccagtgggaccttgtattcgttaagtatattatgcaggaggagcaacccc

SEQ ID NO: 2151 - DNA, 489 bp, Oryza sativa
  Clone ID: uC-osflcyp040h01b1
cttctatttctcctccaccgactcgccaacccctgggtgtgtctctactatcccattgggtgcccctaccgctcccctccccgtccgacccccgtatctgccgccaccggggctgggcacggatctggttgatctcccccggccaacttcttgcggcggcggcgatctccgtgcgtggcttcgcgccccggttcttggaacaatatatgggttcaagaccagttgatgaggttcttgatgctgccgcggctggggtccactactccacgctccgtttggatgagcttaacatcaatggctccatgacaggggaggaacaaccaacgacctcaggggtggagaatgggcaccaggagccattagtcattggtgttgccgggggtgcatcttcaggcaaaagtactgtatgcaaaatgataatcgatcagctacgcgatcagcgtgtagttgttgttactcacgagtctttttattatgggttgtctgatg

SEQ ID NO: 2152 - DNA, 334 bp, Oryza sativa
  Clone ID: uC-osflcyp040h03b1
gcttttctttgtctgcaggctcctaagccccataggggggctttttaaaatactatgcggggctcactgctaccatccggctacgcctaataggcgccggagccccgcatggaccacccggcctgatccatgcatggcacgcaggacaagaccagagtgctgctccacgaacggcggaattactgactgccacacagcgggtctaaacaacctacagatcaccatgaactgcgcacatctggatcagtcccaaggacctactacctcttagtcggaatcacaccatgtgaacatcccaacgacatacatttccattgaagcgaccctggatatt

SEQ ID NO: 2153 - DNA, 499 bp, Oryza sativa
  Clone ID: uC-osflcyp040h05b1
caatttactgagttggaatctttgagagagaatattatggaattacagtcagagatcaggcagagagatgaggaaattttgtcaatgcgcagaaatttgagtttgctttatgaagcatgcactagttcagtttctgagattgaagggatgactggtattgagtctggtgaccatagttgttctgttgtgcagaaccatttatctgcagatgaccatataaaatcagtagttaatcaattagttgcggccataaagactactcagaacagtaacgaaggcaacacaaaggaactaaaggccactgttcttgaattgcagcaggagcttcaagaaaaacatatccaaataagtacaatcagtgcagaacttgcatctcaggtaaaggaagctgaatcttctgcgaagcagctatctgttgagcttgaaaatgctagaatggaaatccacaacttagagaaacactctgaaatgttgcttaatcagaagaagaatttagagg

SEQ ID NO: 2154 - DNA, 398 bp, Oryza sativa
  Clone ID: uC-osflcyp040h08b1
ccctcctttttttaatacgtttaagtgccttaacacataggggggttttttatgaagcaggtggggtttaaaaaattaactatggaatatcctgtgacagaacaactggagcacactctccagttcctgttaaacctgatgattctgaggagcttgtattcaagattgcggtgaacatgaatcgccctgtcctggacccatgtgtggcaattgggttccttacgttttcttcggactgcttgagggttggccacctggtcaacatgagatggagggttgaaaggctgaagaacccggaggatgcctctctgttagcccctaatctccatatgagccttgtttaaaatcacattcattaattttaccagtactttaatggttatgatcttgtgagtaca

SEQ ID NO: 2155 - DNA, 470 bp, Oryza sativa
  unsure (1)..(470): unsure at all n locations
  Clone ID: uC-osflcyp040h10b1
tttgtagagagagagcacacagacaacagggggattgttagtactgggggcctttcaaaaaccacctgcanaggaagagggagaagaacaatggcctacgatggaagaggacaggagaacgccctggacttggtggcggcgaataaccccaagcagggaggcttcacgaccatgccgttcatcctagcgaacgacttctgcgaccggctcacgaatgtggggttcagctccaacctgatcacgtacctgaccctgcacctgcacctccccctcgtcgacgcctccaacacgctgaccaacttacacggcaccgacaacctaaccccgctcgtccgcggcctcatcgccgactccttcgccggcaggttctggaccatcaccttaggcttcctcatctaccagctcggcatggtctttctcaccctatccgccgcgctccccttcgttcgacccccggcctgcgccaagca

SEQ ID NO: 2156 - DNA, 381 bp, Oryza sativa
  Clone ID: uC-osflcyp040h11b1
tccttccactgcatccgggtcggcgacctcctgctgctctgaataaaaacagggggctgcttaacaaaccaagctatcgggtcacatggcagtctcctcaagtctgctgttctgcgacacatcagtgctccaaaaccatctattttacctgctgtatattcacgctccatgtcagtttcatctgctcaaatagaggagagtggatttgagactgccactgtggcagatattttgaagtctaacgggaagagtgctgatggatcttggctctggtgcactactgatgactctgtctatgatgctgtcaaatctatgacccaacacaatgttggaactcttgtggctgttaaacctggacaggataaatcaattgctggtatt

SEQ ID NO: 2157 - DNA, 520 bp, Oryza sativa
  Clone ID: uC-osflcyp041a01b1
gctcgtgtggcccaggggctggctcgtgcgggcgggggtccgcctcgcgaaaggccgcgtgccaccatttctccccacatctcatccctctctctctcctcgcttctctctctatcgcaggcgaaggcgaaggcgaaggattcgggctcagctcctccgcctccgccgatctctcgccggagatgtgtcagccctaggagaggagaagctttctttttttggaaaatcgagtcaacaaaaggtcttgccaattaacacagtgaaggataattctggcttgagtgtttgtcaatggagagaataagcaccaatcagctctacaattctggaattccggtgactgtgccatcgcctctgcctgctataccagctaccctggatgaaaacattcccaggattccagatgggcagaatgttccgcgggagagagaattgagaagcacacctatgccacctcatcagaatcagagtactggtgctcctcttcatgggcattttcagtccagtaccccggtctgtg

SEQ ID NO: 2158 - DNA, 516 bp, Oryza sativa
  Clone ID: uC-osflcyp041a02b1
ggatgtttgtgtacgagtatgtcaataatggaaactgagagcattgactccatggtggtgttggtcccgtaagccctctcacatgggatatgagaatgaagattatactaggaacagcaaaaggcttaatgtatctgcatgagggacttgagccaaaggtggttcatcgtgatgtcaagtcgagcaacatcctccttgacaagacctggaatgctaagctttctgattttgggctagcaaagcttttgggctcagagaggagttatgtaacaaccagagttatggggacatttgggtacgtagctccagagtatgctggtactggcatgttaaatgaaactagtgatgtctatagttttggaattcttatcatggaaataatatctggtcgggtaccagtggattacaacagaccaccaggggaggttaatcttgctgaatggctgaagacaatggtgagcaaccgaaactctgaaaggggtttggatccaaagatgactgagaagcctacttcta

SEQ ID NO: 2159 - DNA, 382 bp, Oryza sativa
  Clone ID: uC-osflcyp041a05b1
cgcctttcatatccgccgccgccgacgtcgagagagaagggacttagagcgagtgctgggccgtccccgccgccgcgatgagggccaagtggaagaagaagagaatgaggaggctcaagaggaagcgccgaaagatgaggcagagatccaagtagtcgttatcagtagtgtggatgtcttcttacatcatgttgaccggtgcatttggattgatggtgccttcggattcttgatgttccagttattggtgcaggaatgtgaaaccttttctggctttggttaattctagctgttgaaatgtctctggctatgttcctagactggagtattatgtaatgggaagaccataattcgctttatgaaagtttatgagatttgaagt

SEQ ID NO: 2160 - DNA, 346 bp, Oryza sativa
  Clone ID: uC-osflcyp041a06b1
cgtcgttcgccccaggcgacacgggcggcgacaccaggtggccttagaaagcttgctgggtctccctcccgcctcgccgccgccagagcagccgccggcaaagccgcgcggcggcaaggacggtggcggcggggcctccttttcctctctcaaggagcacgctggggcaccggcggttctcgagcgactgaaggcggcggcggtggagcccgccagatccacgccgctccggccggatctggcggggaggcggctggcggcggggaaggtgacggcggcgggggtgacgacggcgtcggagatgggccgtcggcgacagggatgaaaatggcggcggggatggaga

SEQ ID NO: 2161 - DNA, 448 bp, Oryza sativa
  Clone ID: uC-osflcyp041a07b1
catgttttgtttgtagatgctctggatgcacaaattgacgacattcaaaatgaaacagggcattgcatattgagtcttcacagggaccaacactgttactcccgtgttcttgagttaatcgtaaacgtttgggcattccacagttcatggaggatggtttatgtagaccccgagactggtgcgatgcaggagcaacatctgctcaacggcaggagaggtcagatgtcaatccaatggttctccctcgccactctgaagagcatggacgaggacctggcagaatagttcgactaggatcatcctgaccggaggtggctctggccgaaaaccggcaaagtgtcctggcaaggcgtttactatcggaagcggaacatgaggcatcaggagaaggagcggaggaagcatcacagcatagacacgatccagagaatcaagaagagagctcgac

SEQ ID NO: 2162 - DNA, 333 bp, Oryza sativa
  Clone ID: uC-osflcyp041a08b1
cagtttcgtgtagcctcgtctcacctctcctaggtgaggctgttttcaactccggggggttccccacccgcatccactgatacacactcacctcgtgctcatcgtaccgccaccctctcaaggctcaccgtctcgtgattcggcactcgagacagccaccaagatctccgacgaccggcgccagcaccctgacaaggtacttgaacatgccatgctatattccatatgggtaaagatacacaactctaaacttcagacacggtctgtatggcgcccatggatgaagagacaatgtccaacgaggctacacatcttacgattaacagcaaggac

SEQ ID NO: 2163 - DNA, 482 bp, Oryza sativa
  Clone ID: uC-osflcyp041a09b1
gccttctctgctcctagctcacgcaagcatcgaggtgcctccttcgaaaccggccggagcggctttcctccaccttgatgagccgaaggtactcgtctccctctgtgacggctccagcaacgacaaggctgatgggtggtacctcgacaccggcgccacccatcacatgaccggccgacgggagttcttcaccgagttcgactccagcgtccgaggcaccgtcaagttcggggacgcctccggcgtggagatcaagggtgttggctccgtcaccttcaccgccaagtccggtgagcacaggctgctcaccggagtctactacatccccgcgttgaggaattctatcatcagcgtgggacagctggatgagaacggctcacgcgtgttggtcgaggacggactcatgaggatttgggatcgccgtcgtcgccttcttgccaaggtaaccagaggcactaatcgactctacatcctcagcgcgc

SEQ ID NO: 2164 - DNA, 492 bp, Oryza sativa
  unsure (1)..(492): unsure at all n locations
  Clone ID: uC-osflcyp041a10b1
gaaggatgctggtgctgccaagaaccctgaggttgagactagctcatcaatacacagagctgaaaatccaggcctgagaactactgaacctggcttggtttatcctccaatagctccacttggtcatgatgatgccttccctggccctggcgcaggcttctatcctcatagtggtattggcgggcggtggcagcatgcatgttggtccaaacgatccacgcttctttccttctaatcccttccctgtgccctttggtggccctgggagtgttccaccaggtggtcgttatgatccaattggtccaccagatgttccaggaattggacccttctcgctttgtgaggcggccgaggcctncagctgggactactcacccagacctgagttcttccagccgggcccgacgggcccttttgagattcagaggcccacctcctccccaccgtttctgaataacccttgcttgcttctcatgctgatccaaagagcag

SEQ ID NO: 2165 - DNA, 371 bp, Oryza sativa
  Clone ID: uC-osflcyp041a11b1
ttctttatctgatcgtcggacatggcgtccccgaggctcttcgttaacaccgtgcgggtccagggaggcggcttgtcggagttctccggcctgaggagctcgtcgtcgctgcccctgcggcggaatgccacctccgacgacttcatgaacgcggtctccttcaggacccacgcggttggcacgagctgcggggcgcggcgggcgccgacggaggcgacgctgaaggtggcgatcaacgggttcggccgcatcgggcgcaacttcctgcggtgctggcacgggcgcggcgacagctcgcccctcgacgtcatcgccatcaacgacaccggaggcgtgaagcaggcgtcgcacctcctcaagtacgactccac

SEQ ID NO: 2166 - DNA, 513 bp, Oryza sativa
  Clone ID: uC-osflcyp041b01b1
attgttgccgcggcggcggcggcggcgatttgaggggggatccttaaagatggcggagggtttaggacggcgggaggcggatccgctcttccccgccaccgagtgcgtgcaggactgcgccgacaggatggagggtgtgtaccgattgctcttgcatgaaaaaaaactgatacaagatgatacctcacatacaaaacgtcgtgtatcaatgcaatatgagagagatgtgtgcactgctcttggaacaacaaagagacagatggagcaatttgagcgagaagtgaatgcagcggcattgtctaataaggcaaattcaagggaaaatgccatcttgcaatttaggcaatttattagagctatagcggagcaaatttctcaggtggaagatagtttggagagtcttaggaatgattccattagaacaccaaaacattcatacttgactgaacatgatggagatgaattggcatcttttctttctgatagaatagaaaggataatcatgtgatttat

SEQ ID NO: 2167 - DNA, 521 bp, Oryza sativa
  Clone ID: uC-osflcyp041b02b1
gctctttcagtgaagaagagaagcagctgtccaaacgactcatgtgtgagttgcaagctgaacaatgctgcatgtaagctgaagcttaaagactacaaggaagcaaaggaactgtgtactgaggtcctggagcttgacagcatgaatgtgaaggctttttacagaagggcacaggcacacatgtatcttgttgactttgatttggcagaactggatatcaagaaagcactagaaatagatccagacaacagggatgtgaagatggggtacaggaggctgaaggagaaggtcaaggagcagaagaggaaggaaacgaaattgtacggcaacatgatttcgaagctaagcaagcttgaagactcggaaaccgaaggaggcacaactcaggcgccaagcaagaagcatggcctatggccactcaccgcgctgctgagaaggctgttcacgaggagtgacggtagcaaggagtcgatgctgtggctggtgctgaggctgctcatctccgtggtgctgctggtggc

SEQ ID NO: 2168 - DNA, 238 bp, Oryza sativa
  Clone ID: uC-osflcyp041b03b1
atgtgtgtatattataggtcatcttctatctccaaggggtcttttatacatccatttggggctccaaaacacatgtgaatattgcttcagcattctataatgcaccccaggaggtgctagccttatgacctcttcacaatatttttaattttggtatgccgtgtacactatgaactacccgcttgttgcttgaaagataccctgcggtctgaattttaatggcaactcgtcatagatg

SEQ ID NO: 2169 - DNA, 349 bp, Oryza sativa
  Clone ID: uC-osflcyp041b05b1
gttattaagaggcaattgaagaaatcactaggctagggggagctggaatggcaaaatttatctgcaaggaggttgaaactgttgatgactacaatgagtactgtcactatgtagcagggctagtggggtatgggctttccaggctctttcatgctggtgggacggaagatctggcttcagattcactttcaaattcaatgggcttgtttctgcagaaaatcaatataattagggattatttggaggacataaacgagataccaaagtcacgtatgttctggcctcgagaaatatggagtaaatatgtcaataaactcgaggatttgaaatacgaggaaaattcagaaaa

SEQ ID NO: 2170 - DNA, 405 bp, Oryza sativa
  Clone ID: uC-osflcyp041b06b1
ggctttggctcggcgcggatcagaggaggacgaagggggaagttttgaaggcagagcggggttacctaccccgacctcgcaaccatggcaaggggtttgacgaagcctctgaagaggctcactgcgcccaaccattggatgctcgacaagcttggaggagctcttgcccccaaggcatcttctggtcctcacaagcccagggagtgcctgcctctgatcctcattatcaggaacaggctcaagtatgctttgacataccgtgaggttattcctatcctcatgcagcgccatgtcttggttgatggcaaagtcatgactgacaagacctacccagctggttccatggatgtcatttccatccccaagactggtgagaactactggcttctgtacgacaccaaggga

SEQ ID NO: 2171 - DNA, 536 bp, Oryza sativa
  unsure (1)..(536): unsure at all n locations
  Clone ID: uC-osflcyp041b10b1
ctctttctcttcttcttcttccactagctagttcgtggtcctttttcagctagcttggggcagctaaggttaggtcggatcgagatcgggatcggccgccggcgagcggcgagcggcgaggatggggcgggggaaggtgcagctgaagcggatagagaacaagatcaacaggcaggtgacgttctccaagaggaggaatggattgctgaagaaggcgcacgagatctccgtcctctgcgacgccgaggtcgccgccatcgtcttctcccccaagggcaagctctacgagtacgccactgactccaggatggacaaaatccttgaacgttatgagcgctattcatatgctgaaaaggctcttatttcagctgaatccgagagtgagggaaattggtgccatgaatacaggacacttaaggcaaagattgagaccatacaaaaatgtcacaaacacctcatgggagaggatctagaatccctgaatctcaaagaactncaacagctagagcagcagctggagaggtcattgaagcaca

SEQ ID NO: 2172 - DNA, 396 bp, Oryza sativa
  Clone ID: uC-osflcyp041b11b1
tttgtagctaacaagacctatcctgaggctgtgtggggcacatatgcagagttcccagagcacttcacttggcatgctgatggaaagcattgggattatcgacgtggtactggtaacgtcggaagactagccaatgtaggccctaaccagggggattcctactatcttcgtatgttgctgcatatagtgaagggggcaaggtcgtactcagagatcagaacaattgaaggccaacagtatccaacattccaggctgcttgccaggctcctggtctcctaggtgatgatcgtgagtggtcgtccgctatagttgatgcagcgcattgggctcttccataccagctccgatacttgcttttgccacctgaatcaagaaatatttcatcactggtatct

SEQ ID NO: 2173 - DNA, 352 bp, Oryza sativa
  Clone ID: uC-osflcyp041b12b1
cccgtccggctttttggttgagccgattgccaacgctatcagggggatatttaaactcaccatcgggtcctgcgccgcatatcccaaaaggtctgacgccaaggtcgctagtgctcctggtctatcagatggcgaacaacaggggcttttacattaccatccatgggcgccatctctaaccgcacgacatatggaaccaacgacgcccacgatgcctagaacgccgcctgcgggtagtccgcgacacagaacttggtgattccaacaggagaatacatgaacgaccacctaaacttcaggggggcgtgcaagggctacatcaggctcgatatggatcgcaccatgtttggct

SEQ ID NO: 2174 - DNA, 179 bp, Oryza sativa
  Clone ID: uC-osflcyp041c01b1
tccttctccgcgagtgtgagcctagaaactgcggcgggtttgtgttgcgatttggtttgcaaccacctcgattggagtgcgccggcggtgatccggttggtccatggccggtggtggaggtaggtgagggggagggcggcggcggcggaggaggaggggtttggggggtcgtggaatgt

SEQ ID NO: 2175 - DNA, 518 bp, Oryza sativa
  Clone ID: uC-osflcyp041c02b1
agacctggaagggaattgctattcacagtcgtctcacaggatgagaagtacaaagcgaaggtaaaagatatgcggctacctatttgaatttagtgaccaataagaaacgaaagaatacatttgcttgaatgcgatagatgagttgtgccagtagtacacatcatcattcaccgcagagaactaacaaaatttctaatccctggattgctcaccaattttcatcaatttgcattgtgttatacatgtctctggtagatatcaaacatatacacatcaacacgtggtgtgttctatcttccatgctgttgtttcacagacacacacacacacacacgcactgcacagggaagcacaatggtattccttagaaaaattggccattcaatattggctctgttttgaattcacctagacacatcagagttagccttgtctcttaaaatggagagtgggtgattaacagcgaaatttgaagttgaatttccagattaagtaggctatcaatagaaaaatagtca

SEQ ID NO: 2176 - DNA, 454 bp, Oryza sativa
  Clone ID: uC-osflcyp041c04b1
cagacaaccaaatacaggacagaaagagagatcaccgagaatcacccgagccttctcctgcagatacactcaaaaggctcagggtgaatgggcgcatagctctaaacagagtcatggatcgtcgaacattgagttcccaaccaatctcaagggaaggattagttgatatacaagtgtcaggtcctacagtactgacgagaagcaaatgctgtagttggcaacatttcaggtgatgaatgtgcatgttttgtatgcagcgaagagttcccaacggggtgatttgtggcgctccatatcatttgttttaagcaacaggaagcggcaccttttcgttttaagcaacacttgttaacaaaagtgcgcagctttgggtttcttgcgaggtgtagctaacgagtaacctggtaccaccaaatatcaacgaaaccatttgctatatcatttaatagtatta

SEQ ID NO: 2177 - DNA, 347 bp, Oryza sativa
  Clone ID: uC-osflcyp041c05b1
gccggacccggtgaccgggtactaccggccggccgggggcgcattggaggtggacgcggcggagctgcgcgccaagctgctctccaactccaagaggatggctgccaactgagacagatcgtcgacgtatcggtcggtcgaggctagctatgtactctgctttgagatgcgcgctacctagttgatcgctgtcgctggcctccttttgagagcttgtgaggcctaatttgagttgcttcgttgaggacgactgcttctttgggttcggcttctcggagctctctaatatgaaacgagctaccctttgctcaaaaggcatgaagattgataatagtactaatagagga

SEQ ID NO: 2178 - DNA, 401 bp, Oryza sativa
  Clone ID: uC-osflcyp041c07b1
gcctttttgcgtcagtgggcccactatcccttttgggggaagtttagctcaaagggggggacaataagagcgaagttcccctgacaaactgctgactagtgaggacatgaagtcccacattgaaagtatgctattatacggactatccaaccaagcagcataggatccatctcagaactaccactactatctgactgcacttaatggataccaaatgacatcaccccagactaactgctagcctttcttaacttatataatgcagcttctcagttatccatgtgcgtatggcttgttcacagctgctgatgtgcaatgactcagcacgacatcacgaacggtacatgcaagcataatggctgtacataatgtaataaggcattatatgattatacactgtc

SEQ ID NO: 2179 - DNA, 412 bp, Oryza sativa
  Clone ID: uC-osflcyp041c08b1
tcattatcaggaaccaattcgcaccgatcgatcgagggatcgatccagcaactagatcagcagtactagctaggaagcatggcccgagcacaggtggtgttggtcgccctggtggcagttctgttgctcgccagcccgacgccggcgaggccatcacctgcggacaggtcaactacgacgacgggccctgcctgacctacgcccgctgaggagccggaccgacgggggtctgcgtgcagcggggcgaggagcctcatggcggatgcacgcacgaccgcagaccggggcaccgcctgcaactgtctgaagaacgaggcccgcggcatcaaggggctcatggccggcgacgccgacagcatcccctccaagagcggggtcagcgaaccctacaccatgagcgcttccatcgact

SEQ ID NO: 2180 - DNA, 284 bp, Oryza sativa
  Clone ID: uC-osflcyp041c10b1
ggtttaccctaccacggcctcaagctggaagcatgggcgacattagagggccatgcgggccagacacacagagaggaaactgcacctggccgccaaggagaggccatacggcacagaggcgtgaaccatatgaagctccaaccagatgaagagtgaaggagtagctgatgatcaggacgcagaccgcaaaggaccacctagaagaaagcgccgaccttgtcaagaatctaggcgagcacctggcaaagggcgaaggcatcaaagagatgccaacggtgagcttc

SEQ ID NO: 2181 - DNA, 279 bp, Oryza sativa
  Clone ID: uC-osflcyp041d01b1
gcatgtcactcatgtcaggcatcgacgccatttccatggacatttcgtcgcgcaagatgactgtgatcggcacggttgacccggtgaacgtggtgagcaagctgcgcaaggcgtcctggccggcctacatcgagtccctcggcccggccaaggagccggagaagaagaaggagggcggcggcgatgccaagaaggatggcggcgatggcaagaaggagggaggaggagacggcaagaaggaaggcggcgatgggaagaaggaaggtgacggcaagaagg

SEQ ID NO: 2182 - DNA, 529 bp, Oryza sativa
  Clone ID: uC-osflcyp041d06b1
gctctccctcccatggcgctctccctcaccaccgcggtctcccacctctccctcccctgcacctccaagttccacccgctccccctcctccacctccgcttcccctcctcctcctcctcccgccgcgccgcgcgcctcgcgctcgccgcctccgccgccgaggccgccgagcctgtcgaggtggaggaggcgcccgccgaggacggggcggatgaggtggtggccgtggaggacgagctgtccggaccggcgctgcgaaagtacgtgaagcagcggcttcccgggggcttcgcggcgcagcggatcaccgccacgggccgccgcaagacggccatcgcccgcgtcgtgctccaggagggcaccggaagggtgttcatcaacttccgcgatgccaaggagtatttgcaaggaaatccaatgcggatggagtactgcaaggtacccctggtgaccctagggttcgagaacagctacgacgtcttcgtcaaagttcacgggggtggtctctcgggccaagcccaggccattt

SEQ ID NO: 2183 - DNA, 491 bp, Oryza sativa
  Clone ID: uC-osflcyp041d11b1
tgcttattttgatttcctttttcttggccgcctctggctctctttatctctctctcggtttcttggttcgattgctcctggttcttggcctgattggttgaacctgcttcttctggaatcaattaggggagaaatatttgcaggagaggggcggtggcgatggcggagctggttgggccgcgggtgtacagctgctgccattgccggaaccacgtctgcctccacgacgacatcatctccaaggcctttcaggggaggaacggccgtgcgtttcttttctctcatgctatgaacatatctatgggtccaaaggaggacaggcagcttatgacagggcttcacacagctgctgatatctactgccgtgattgccgtgaggtattgggttggaagtatgaaagagcatttgaagaatcccagaagtacaaggaaggaaaactcatatttgagaaggcaaagattgacaaagacaattggtaatgactggaaag

SEQ ID NO: 2184 - DNA, 300 bp, Oryza sativa
  Clone ID: uC-osflcyp041d12b1
gcttttctctccaccattgcttgcaaagctggtcgggtcactcttaccgttaagctggccgcggcggcgagagcaagctaagctaggtcgggcatggggaaggacgaggtgatggagagcggcggcccccgcctcgcgctcgccgccatggactacacggacgccgagcctgtgccggtggaagaggcgcccgccgtggacaggtcgtatgaggtggtggccgtagaggacgagctgtccggaccggcgctgtgaaagaacttgccgcagccgcttcccgggggctcagcgaccaaacgg

SEQ ID NO: 2185 - DNA, 167 bp, Oryza sativa
  Clone ID: uC-osflcyp041e01b1
ggaattgacagatgcgcagccgtagcgcgcgggaagggggacattacgattccctctatgtgtagtccccaagatgttcttgctatctgagacctgaacaactcaatcgtgtaatccagtactcagtcactggatgttttatatggtgactggagatcttaactttt

SEQ ID NO: 2186 - DNA, 514 bp, Oryza sativa
  Clone ID: uC-osflcyp041e02b1
ctctctcccgccgccgccgtccgaccatccgaccagggccgcctggaacctcgacggggagcacccctccggccgaagccacctccactacttcccgccggcatggcgtcggaggagggggaagaagcgaacgccgcgtcgtcggcggaggaggtggggaggaagaagccgccgcggcacaaggggaagcacgacaagccgaagccgtgggacgacgaccccaacatcgaccactggaagatcgagaagttcgacccctcgtggaacgagggcggcatgctcgaagtcagctccttctccaccctcttcccccagtaccgagagaagtacctgcaggaggcgtggccgattgtgaagggcgcgctgaaggagtttggggtcgcttgcgagctcaatctggtggaaggatccatgaccgtttcgaccacgcgcaagaccagggatccctacattatcgataagggcaaggagctgataaaattggtgtcgaggagcgtccccgctccacaggcga

SEQ ID NO: 2187 - DNA, 523 bp, Oryza sativa
  Clone ID: uC-osflcyp041e04b1
ccttttcaggaacgcgtctcctctcctctcttctctggtctctttggcggcggcggcgggggaatccgatccgaaccaagcaaaaatgacggccggatacattgctgggtccttggttggatccttcgccattgcttacctgtgtgacacatttgtttctgacaagaaggcatttggaggttccattccaaagactgtctctgacaaggagtggtggcaagccactgacaccaagttccaggcctggcctcgcaccgctggaccaccagtcatcatgaaccccatcagccgccaaaacttcatcgttaagtccacttagacgagagaaactggttcagtgtcgtgattttaccatgaatatgaagtttgttttctaggccttgagattgtaataagatgcaacagtcaggatacgttttgcatttttcacttcacctgtgagcaaacattggagcttacattatactcacatttgatgaattctgttcctcggtgaaaaatttccactgggcagtcaagaatt

SEQ ID NO: 2188 - DNA, 471 bp, Oryza sativa
  Clone ID: uC-osflcyp041e06b1
gtcgtttccatgggctgcgctggatccactcccagggttgcttttaacagtaagatggggataaagccaaaaccttggaagcacactcaggcaataacaccaacacaactctgaaagatgcgtgaagaattctgggacacggctccacactatggaggccagaaagagatttgagatgcacttagggctgctgctgaagctgaattacctcttgcacaaaccatagtgaacagtgctgggattgtcgtttcaaattatgacatgacgctctgctatgaccagagaggcgccaagtatgaactgcccaagtacgttttgagtgagccaacagatatgatccgtgaaccgtgatggttgagtgaagatttatgctatgtgaatagaaaaacagatcctgtaaatgatgtaaatcgttcattgatcgctgactcaggactgtatttctcagaacataaatgaaggttaagttac

SEQ ID NO: 2189 - DNA, 514 bp, Oryza sativa
  Clone ID: uC-osflcyp041e09b1
tgtttctgtttgtacaggaaaataaacaattgctgggcacctttatagaaggctgagggtaccaaatgttacgcagacagacatggtgtatgagtggctactgacatcaacagatgcccctcttacttcggagcccgtgtgggctcgggattttgattctcctgaagagcttatcacagagttctgcagagaatgcagagttgttcgcaaaggtttggctggtgatttgaagaaggccatgaaagatgggaagccaattatcatcgagggaattcatttggatccaagtatttatttgatggacgaggaaaagagagatgataattccaaaatggagaagaaggtagctgaatctgaaaattcaccagcaactgtaaagagcaagacagaaaagcaacaagaaaacgaactacatgagaagagaatggatgacagtcaggagtgcatgtctgaggagggtagaataagtgaagggctatcttgtgctaaaagccacgttattagctcttctgat

SEQ ID NO: 2190 - DNA, 512 bp, Oryza sativa
  Clone ID: uC-osflcyp041e10b1
ggcttccatggcgctctcctccccggtgatggccggggcggctccgtcgacctcctgggtgctcttcggcgaggcgcggatcaccatgcgcaagaccgccgcgaagcccaagccggcggcgtcgtcggggagcccgtggtacggcgccgaccgcgtcctgtacctcggcccgctctccggcgagccgccgagctacctcaccggcgagttcccgggcgactacgggtgggacaccgcggggctctccgtcgacccggagacgttcgccaagaaccgggagctggaggcgatccactcccggtgggcgatgctgggcgcgctcggctgcgtgttcccggagctcctcgcccggaacggcgtcaagttcggcgaggccgcgtggttcaaggcgggctcgcagatcttcagcgagggcgggctcgactacctcggcaacccgagcctgatccacgcgcagagcatactcgccatctgggcggtgcaggtggtgctcatgggcgccgacaggggta

SEQ ID NO: 2191 - DNA, 521 bp, Oryza sativa
  Clone ID: uC-osflcyp041e11b1
cggttcggtgcagtgcgatcttgagctgcagggggggtaccactagtcgatccatggggggcacggcgacctccggcacgcgccgtggtggccgccgctctccacgccggtggacctggcgtccatcctgacgacgctggtctggctcgcgtcggcgcagcacgcggcgctcaacttcgggcagtacccgctgggcgggtacgtcccgaaccggccgccgctgatacggcggctgctgccggacctggagcgcgacgcggcggagtacgccgcgttcctcgccgacccgcaccgcttcttcctgaacgcgatgcccggggtgctggaggcgaccaagttcatggcggtggtggacacgctgtcgacgcactcgcccgacgaggagtacctcggcgaggggcgggacgagggcggcgtgccgtggacggcggacgaggcggccgtggcggcgcacggcatgttcgcggccgatgtgcgacgcgccgaggagaccatcgagaggcggaacgccgaccacggcc

SEQ ID NO: 2192 - DNA, 509 bp, Oryza sativa
  Clone ID: uC-osflcyp041e12b1
gagtgatcgatgacgtggtgcaacagcttcagcgaggtccgttccgccgtggacaggggcttgtcgccggccgccgccgtggctgccgccgcggggaagaaggcggcggcgtcgctcgccgtcctcgtcaagatgtgcccctcctgcggccaccgcgcgcggtatgaacaggagacgacgacgatccaggacctgccggggctgccggccggagtgaagttcgatccgacggaccaggagcttcttgagcatttggaagggaaggcgaggccagactcgaggaagctccaccctctcgtcgacgagttcatccccaccatcgagggcgagaatggcatctgctacacccatcccgagaggcttcccggtgtgagcaaggacgggctggtgaggcacttcttccaccggccgtcgaaggcgtacacgacggggacgaggaagcggcggaaggtgcacagcgactaggtcgacggcggcgagacgcggtggcacaagaccggcaagacgag

SEQ ID NO: 2193 - DNA, 290 bp, Oryza sativa
  Clone ID: uC-osflcyp041f01b1
cagatttatagaaagaagagatggaccacacacgggggagaggttggatctggatctgagtctcacggggtcgcgtgtcgctacctgtgtccttggactactcctcgtgctttcgttgcgatgcacatactggcgaagcgcctgctggagtcgcaggcaacctgactgcagccgtggagcatctgcacgaggagctgcatgcacaagacccgctgggctgccacgacacctgccaagggcgccttgagaggggtgagcaggtgtgattcggcgagcactttctgcacccc

SEQ ID NO: 2194 - DNA, 519 bp, Oryza sativa
  Clone ID: uC-osflcyp041f02b1
gcgagtagtagataggagcacagtatggcacatcgagaggttgttcccttgactagtaaccccatcccagctctttggtaataaaaaggatctcatcttattatcaagaatcaaatcttatcccagctgcaaggagtcccaattgctcgatgatgttagtgccatgattaggtcgcgtgtttgagactgtgagtgcctgaagctctgctttttgacatgcccttcacacatctgatgttctctgaagcacagagtggatgaatccatgaaggcccttctcttggtcataagatttttctgtaaatgccattaaattttaaccgtcctgtagaaagaattatgatgagaatctcattatctcagcctggagaagactgttggacataggtcgacatcgtagtatatcgaagaaataatgttctgggaggaaataagtatttatcagcatcaagcatataagtcaataaagttgtgtgctgcaatggcattgtctgctttaccagtttgctgctagctaat

SEQ ID NO: 2195 - DNA, 163 bp, Oryza sativa
  Clone ID: uC-osflcyp041f03b1
gttgtttatcggctccatctcgtctgactgatcctgggtgttttttcgaaaaacaagagcttgatataaccgcgcactatattgatgccactgaatgatacaagagagctagtctgcataacaccgctcatataataaaagctgtactgcatactgcataggc

SEQ ID NO: 2196 - DNA, 516 bp, Oryza sativa
  Clone ID: uC-osflcyp041f05b1
gcaatttctcctcatacgacagagagagcgtgacagggcgagtttgttcggaggcgggggcgggccacggcggcggcggcgggcgccagcgagcggcgaagggcgcgctggagatgaaggagaaggggtcgagggcggcggtggacgagcgctacgcgcagtggaagtcgctcatcccggtgctctacgactggttcgccaaccacaacctcgtctggccgtccctctcctgccggtggggaccccagtttgagaaggctacctacaagaatcgtcagcgtctttacctttcagagcagacggatgggactgtccctaatactctggttattgcaaattgtgaagttgtcaaaccaagggttgcagctgctgaacatatatctcagttcaatgaggaagcacgatcaccttttgtaaagaagtacaagactataattcatccaggcgaggtgaacaggattagggagctttcgcagaacagtaagatcattgccactcataccgacagcccagatg

SEQ ID NO: 2197 - DNA, 464 bp, Oryza sativa
  Clone ID: uC-osflcyp041f06b1
ccctcttgttcattgctcagtatgtatcatcgagaagggtcagttgtattgtcaggtgcggattcccaataaactgatgttgggtgatctaataactgaaggcaaaatgaagtaatataatcgcatcaatttgtaatgttgtggggagttgattttgtttttgattatctgaactgatgaggtgcaggctagcagcgcccgccaaccgacactgaggtaaggagttccacaacctcagcactcagatgcaaatcatgggcattgcctctgtctaagctactaatcagagaatcacactgcaaataagagctgattgagctgagagctgccaatctctgtcttctctttttgttgcattgcaatttttgattttagattgaatttttgagagaatgcataggaaagggaaaggacacgggacagggatgcctttacattgcacttatgttgtcttacgataccta

SEQ ID NO: 2198 - DNA, 398 bp, Oryza sativa
  Clone ID: uC-osflcyp041f09b1
agccgcgtcgtcgagaaggttctagagggggcgagtttgggtgggagggacggtgaaagcgacggacgatggcgctgcagtggatgatcctggcgtgcgtggtggcggcggaggcggcggtggccgtgatgctcactctcccggcgccccgcgccgtgcggaagcagatcgtcgggctcacctcgatgctcctccagccattcgccgggatactccccttcgcggccttccagcttctggatatctactggaagaacgagcacaggttgatgtgcacctccgagatttgcaccgctgacgagcgtatccgctttgagaaatccatcttcaaggcccagaggaatgtcattctttgtgtttcagcatgcctcctttactggtgcattttccgtatttgc

SEQ ID NO: 2199 - DNA, 463 bp, Oryza sativa
  Clone ID: uC-osflcyp041f10b1
tctttccaagcaagaaagaaatcaaagcttctctgggtgaatttaattcaattcagtggctcatctccgatcgaatcaatcttggttagttgttaagcacctcttatctacttaattatcttcctctccggagaagctcgagctcgagatcaagtccatggcgttgacgctgcgttcatccacgtcgttcctgtcgccgctcgacccgtcctccaagcgcgaggacgcgccgccgtgctgcgtcgtccccatgccggcgccggggagcggcggcaggctgcggctcgccagggcggcgccggtggagcacgcgacgatggaggagatggcgtcaccggaggcggcgacgctgctgcaccacgggggcgggggcggtcaggggcagcggcgggggaaggggacggcggtgtacgtgatgctgccgctggagacggcgggggcgggggggaaggttgctcttacc

SEQ ID NO: 2200 - DNA, 511 bp, Oryza sativa
  Clone ID: uC-osflcyp041f11b1
caagtttcttggagaagtaccagaccaattccggggagatactgtgagatgagaagcagaagagccttagcgcggagattgatcgaatcaagaaagagaacgataatatgcagattgagctcaggcacttgaaaggtgaagatctaaactctctgcagcccaaagagctcatcatgattgaggaggcacttgacaatgggatagtgaacgtgaatgataaactgatggaccactgggaaaggcacgtgagaactgataagatgctggaagacgagaacaagctgctggctttcaaactgcaccagcaagatatagcgctgagcgggagcatgagggatcttgagcttgggtaccatccagacagggactttgcggcccagatgccgatcaccttccgcgtgcagcccagccaccccaacctgcaggagaacaattaagctgctaggttgccccgccacttcgatcagttatctcatccactgatccaccactggattgaatgtcctagtgc

SEQ ID NO: 2201 - DNA, 520 bp, Oryza sativa
  Clone ID: uC-osflcyp041f12b1
ctactttctcctccggctcttcttcagtatcgaatgctctcttttactcgtgcccacgggcaccaccgtagcaatggcgggcaacgggccgatcaacaaggaggacccgctcaactggggcgcggcggcggccgagatggccggcagccacctcgacgaggtgaagcgcatggtggcgcagttccgcgagccgctggtcaagatccagggcgccaccctccgcgtcggccaggtggccgccgtcgcccaggccaaggacgccgccggcgtcgccgtcgagctcgacgaggaggcccgcccccgcgtcaaggccagcagcgagtggatcctcaactgcatcgcccacggcggcgacatctacggcgtcaccaccggcttcggcggcacctcccaccgccgcaccaaggacggccccgccctccaagtcgagctcctcaggcatctcaacgccggaatcttcggcactggctccgatggccacacgctgccgtcggagacggtgcgggcggccatgctcgtg

SEQ ID NO: 2202 - DNA, 452 bp, Oryza sativa
  Clone ID: uC-osflcyp041g01b1
aggattgcaactcaggactcaggagcggcgtctgaggggtttcatagatggagaaccaggtccaggatggcaaggaggaggtcatcgaagcttggtacatggatgacagtgaagaggaccagaggcttcctcatcatcgtgagcccaaagaattcattcctcttagcaaactttcagagttaggaatattaagctggcgcctgaatgctgatgactgggagaatgatgagaacctcaagaaaatccgtgaggccaggggatactcttacatggatatttgggatgtgtgtccagaaaagctgccaaactatgaggctaagctgaaaaatttctttgaagaacacttgcatactgatgaagagatacgctattgtcttgagggaagtggatacttcgatgtcagggaccaaaatgatcagtggatccgtgtagcaatgaagaaagggggcatg

SEQ ID NO: 2203 - DNA, 483 bp, Oryza sativa
  Clone ID: uC-osflcyp041g02b1
gcggttgccctttttttttttttttttagggaaacaggcggcagtatttacacatggaggatgtttacacacaaacacacttctttgggttgtcgctagcccttgataggagccagcaggctagctgacacgtaccggtctctggtagtactaacagagacagcaagctactaggaacagagtaacaagataagatagcaacatactagataattaattacgtattagataaccacaaggaccagcaaacatggcgtgacagagagatcgaccagcctccgatcaatgggattattcagttcagcgatggctgctcctggtctcgtcgctgtacagccagtcgtagacggtgggggagttgggctgggggcggtcgaagaggttggcgccgaggctcttggtggcgaggttgctccccgggtggaacacgctcctccacacgttgctgcccccgggcgtcgtcgtcggtcgcggtcgtcggga

SEQ ID NO: 2204 - DNA, 447 bp, Oryza sativa
  Clone ID: uC-osflcyp041g04b1
gcggattgggaaaccccaaaacccccacgtcctcctggtgcgctttcaccgccgccacggttgccgacgacgagccatgccgccgcggaagcgcccgccgccgccggccaaggcgccggaagccccaccggaaaccaagcccaagatctctccgtccgctaaacccatcgccgcggcgccgccgccgccgaaggcggtcctctcggacaccgtcctcgccgccttgtcgcagcacgagcgccccatctacaagctcgtgttcgccggcggggacaagggcatgtcgcagacggagatccggatcaagaccgggatgccgactagcaccctcaccaagcacctccgaggcctcacctccaagggcgtcctcaaggtggtcaacagcgtccacaagcgcgccgagaagatctacatggacgtccgcatcgacccgtcgtcggagatcac

SEQ ID NO: 2205 - DNA, 520 bp, Oryza sativa
  Clone ID: uC-osflcyp041g05b1
caactttataggcctatgaggacagaagggggaaaaggcacatgtgcattctaccgagaggcacacgagctgcaagaagccacctaattctcctattgaattaggcacattttcgcccccacattgcctctcattgtaaaatcgtatcaactgataatccacaggaactaaacaacaattaaatccaattatggacggattggtaggcctcttgaaaatacgggtggtgcgtgggattaaccttgcctaccgcgacacaagaggcagtgatccatatgtcgaccttctcctcggcaagcacaaagtgaagactagtgtaaagaagaaatctgtgaatcctatttggcatgaagagctaactttgtcgatcatgaaccctattgcaccgattaagcttggggtgtttgacaaagacactttcagtagagacgacccaatgggagatgcagaaatagacctggagcccttcatggaagttctgaacatggacccggagaacattcgtgatggttccatcata

SEQ ID NO: 2206 - DNA, 281 bp, Oryza sativa
  Clone ID: uC-osflcyp041g08b1
gagctgtggaacgcgcacttacccacaagataggggggggcctttgaaccaatcatggcggtgcgccacgccaccgctactcacgctggccctgctcgcgtcgtgcggtgcccttctcgccaccttcatgctcccggcgcgtgcgacggcagacagctgcttggacgtcggtgacatggtgatgatagacagggaccgcgcttggcagggagctcacaaccgatctgtacccgcacgcagaacaggcacttcagcgggtcgatggggaccgtcgcaactcg

SEQ ID NO: 2207 - DNA, 505 bp, Oryza sativa
  unsure (1)..(505): unsure at all n locations
  Clone ID: uC-osflcyp041g09b1
ccattgctcatcaccatcactcccaccaaccgccaggcagggtttgaaacgcctccggcgtcgactaccccgccgccgccgccgctcgccaccacgacgaccccaccctgcccgcattcgcctccttctcgctctccctctccctccgcacccccgcctccccctccccgggggggctcgcctccgtcccttccaccatccacctccccacccaaatctccacgctcgccggctgcctccacccctccgcctccgcctccgcgtgaccctcctcccgccgccgactcaacgccgccgccggcgcgtggtcgctcctcgccccgctcccgggctccacgccgggcctctcccgctccttcccttcgggcgcgcccgcggcggccgggcggcgccgcacgctcgtgtggatccgtgccgacctncgcctccacgaccacgagcccctccacgccgtccgcggggcgtcatcatgctgctgccgggcttcgcgttcgacccgcgcgac

SEQ ID NO: 2208 - DNA, 508 bp, Oryza sativa
  Clone ID: uC-osflcyp041g10b1
gactttatatgagagatgctcaacagagctattgggggacttttacatggataatgagtatagaatggagtgggataacactgtgataaagcatgagcagctacagtttgatgaaaatagtggaatagagatagggcgtacaatcaagaagtttccgctcttaacaccaagggagtacatattggcatggcgagtttgggaaggaaatgacaagtctttctactgtttggtgaaggaatgtgagcatcctgttgcaccaagacagcggaaatttgttcgagtgcaacttttgagatcaggatggtgcattaggaaaatccctggaagggatgcatgccgaattacagtgctgcatcatgaagacaacggcatgaacatagagatggcaaaactggcatttgccaagggcatttggaattacatttgtaaaatgaacagtgcactacgtcgctatcctcaacgtaacatttcatcaatatcaattctgaccatgcatagacttaccaag

SEQ ID NO: 2209 - DNA, 460 bp, Oryza sativa
  Clone ID: uC-osflcyp041g11b1
tgctttataagctgccatctccttcctgaaaagtggggctcatttaaagggacgggggggtagcaaatcactccaaaccttgcttctcctcctcctcctcctcctcccccatctccggcgccgcgcgccgccgcccggaggagagcttctcgccggtgctgctactgctactaatccccacacccacctgctctcagctcagctcagctcagcttcccagctcggcgaagaagatgaagacgaggagctcggggaggggaggaggggagcccaggaggaggctgaggaatgcggctgtcatggcgctcatgctctcctccctcgtcgctctctccctcgtccgcgccaggttctcccccatcgctagtgatggaggcgaggccctcaagctcaaggccgacgaatccaagctcgtcgtcaccaccaatcacgccgtcgtcaacaccgaatccggcgactc

SEQ ID NO: 2210 - DNA, 362 bp, Oryza sativa
  unsure (1)..(362): unsure at all n locations
  Clone ID: uC-osflcyp041g12b1
actggcacagcancctcgtggattgccatactctgaccgcctacaacatccaaacagagtccaccctccaccttgagctcaagctcaggggaggcatgcatatcttcgtcaagaccttgactggcaagaccatcacccttgaagccaagcctgctgacaccattgacaatgccaaggccaagacccacgacaaggaaggcataccccctgaccaacagcgtctcatcttcactagcaagcagctcgtggatggacgaaccctgggcgactacaacatccataaggagtctaccctccaccttgtgctcacgctcacgggaagcatgcacatcttcgtcaagaccttgactggcaagaccatc

SEQ ID NO: 2211 - DNA, 533 bp, Oryza sativa
  unsure (1)..(533): unsure at all n locations
  Clone ID: uC-osflcyp041h01b1
gacgtttaggaatatatctgagtagtggagtccaaggaaaggatctcaactgaccttagggtagcttaccttagctcaaccccaagcttgaagcttccactataagaactcacccagccacacggctacttggacgacgaagcagcagcagcagcagtaaacagcatcgctcgctcgtcttcgtcgtcgtcgatcggctccggtgagggtgatcggtcgccggcagaggcttctgatgctggagaggccgccgatcctgaagagataccgcgcaccggggtgggcagtggtggctcgctggaaatgtcgtcgcagcagcagcacgccggtgaggcccccgcctccgccgccgccgctgcccgggcgcggctcaggtggaccgggcagctgcacgagcggttcgtcctcgccgtggcggagctcggcggcgcggacagggcgacgcccaagtccgtgctgagggccatggccgtgccggngctcaccttgtaccacctcaagagccacctccagaagtaccggcaggcggtgag

SEQ ID NO: 2212 - DNA, 455 bp, Oryza sativa
  Clone ID: uC-osflcyp041h02b1
gaccatcttgtggaaatcatcaaggtccttggaacagctacatttgaggaaattaaatgcatgaatccaaactataccgagttcaagtttccacagattaaagcacacccatggcacaaggtattccataaaaggttgcctccagaagctgttgatcttgtctctaggctgctccagtactcacccaacctaagatgcactgctgtggaagcacttgttcacccattctttgatgagcttcgagaccctaatgctcgccttccgaatggccgctttttgcctcctctcttcaacttcaagcctcatgaactgaaaggaatcccatcagatattatggcgaaattgatcccagaacatgtgaagaagcaatgctcctatgcaggagtatgagacagcttccgcacgacccccctggaaatttccatgacaagtgcccatttcctcccccctggacg

SEQ ID NO: 2213 - DNA, 535 bp, Oryza sativa
  Clone ID: uC-osflcyp041h03b1
ctttgttggcaacaaaaacagcaatggcatgcaaccgagtgaaccaagtcaatcgtctaaagccgtaaagagttcagaaacttctgaagtaaaaggatcgctaccagaaggtttctttgataacaaagatgcagatctccgtgctcgtggtatccaacctccgaaaatcgatatcaatgatgcttacaaagaatttgagaaggaaattcaggaggacttgcaggaagttgatgatcgccttgaagaagaggagattgatgctgctgctgagagagaagagtacttgacattagagcaagaggagtataggcagcgggtggatatgctgaagaaacagcttaccgagtcaaaagccgcccgtaccactaaagcaaacagcaaacctgttggtatggacatgttgtcaagcagcgactcatctagtgacgaggaagatgacagcacggattttgctgttgattggagagcacaacatttgaaatgatgtggagatttttgtgattggctacccaccgacgatgacaacatagatctg

SEQ ID NO: 2214 - DNA, 387 bp, Oryza sativa
  Clone ID: uC-osflcyp041h04b1
cgggactcttgggctcaaccataggcaggaccgccggggtctcctttaaactcgtccgtggtttgctaaatctactcctgcaccgcccaactcaccggcctccatctgatacgcgtccagccatcccacaacaaacaggcggcacctaggaagccgtgccagcaatcacattacccggccaccaatgccctcgaccgaggtggactccagatcccgaccatcccggaagttcggagactcccccggatgggcgaccaaatgggctggttcaaccaccctcacatgcactgccggtgggacagaggtgacaccacgccctactacatgcactcgctcaggaattcgatcatgaccacggtacagctctatgacaacggcccacgctac

SEQ ID NO: 2215 - DNA, 526 bp, Oryza sativa
  Clone ID: uC-osflcyp041h05b1
ggacttacaacctcagccgcctcgaggcccagcggagcgtcctttaatcccaagttgtggcgctgggggaagagttgaaggtgctccatgaaccgggctcatatgttggtgaggttgtcaaggttatgggcaagtccaaggttctagtgaaggtgcacccagaaggaaaatatgttgttgatgtcgataaaagtattgatattacaaagctctcgccttcaacaagagttgctcttcgaaatgacagctatatgcttcatcttatcctgcccagcaaagttgatccattggttaatcttatgaaggttgagaaggttcctgattctacttatgatatgattggcggccttgatcagcagattaaggagatcaaagaggttattgagcttcccattaagcatcctgagctgtttgaaagtcttggaattgcccagccaaagggtgtccttctttacgggcctccgggtacaggaaaaacgctactagctcgggcagttgctcatcacaccgactgtacctttattag

SEQ ID NO: 2216 - DNA, 361 bp, Oryza sativa
  Clone ID: uC-osflcyp041h08b1
cttatctatgaacaagctgcaaggaacactacagggggcgtttttaactggatctgggggtactgtaagaaggagtacaagcctattcaaaacatgcttgttgatttgccggctttcagctgtgatgactgagggttgcagaatgatgctgcttatgagtggagaattacccaatgcctgatcaatggagattcgttggacttcaaggtttatgaccaaaatcgtaaaccacactgtaccctatatttagttgctgccacaattgacgccactcgtagggtacaatgggccaagaaaggattgataatcttcactgcacttgacgtaccatagatggctaaatcatctgagcaagtcactg

SEQ ID NO: 2217 - DNA, 492 bp, Oryza sativa
  Clone ID: uC-osflcyp041h10b1
cgcttttccatggctggagaagctgatggaaaaggggcacttttagtaaagataccggggtgctgctctcaacgagcgcatcctttcttccatgtctcaaaaacatgttgctgctcatccatggcacgatctggagataggtccaggagctccagcagttttcaactgtgtggttgaaattcctagaggcagcaaggttaagtatgagttggataaggcaactggtctaattaagggtgatcgtgttctttactcatctgttgtttacccacacaactatggtttcattccacgcacactttgtgaggacggtgaccccatggacgtcctcgtcctgatgcaggaacaagttgtccctggatgtttcctgcgagctcgtgctattgggctcatgcctatgattgatcagggtgagaaagatgacaagatcatagctgtttgtgctgatgaccctgaataccgccacttcagggacatcaaggaatcccccct

SEQ ID NO: 2218 - DNA, 518 bp, Oryza sativa
  Clone ID: uC-osflcyp041h11b1
gccttttctcttttatgtgcttcaggctgagaagtgcatcttttaaactccgttggtggttcccaaccatatacgaggctcataagtgtatattacaagaaaatctcgctaggagagctgagcactacttctctgagatgaagcgagttgtcaagggaagagatgcgtgggctcgtggagatcttcgtgagtttggccagctgatctctgcatctggtcgcagctccatactgaactatgaatgcgggagcaaggagatgatccagctgtacgagatcctcctcaaggcacccggcgtcctcggcgcgcgggtcaccggcgccggcttcagaggctgctgcctccccgtcgcggagagcggccacaccgaggcggcggctgcgttcgtccgggccgagtacgagaaggcgcaaccggagctggtgagcaagatcccgccgggccgtctcgtgctggtctgcgagcccggtgacggcgcccgagtcatatagcttaccgcccaccgcctttttgccgtc

SEQ ID NO: 2219 - DNA, 523 bp, Oryza sativa
  Clone ID: uC-osflcyp041h12b1
agatttcttgtttgatgacagttccaatgataaggagggtcctttacatggcagagggggtggacatggtggcagagggcgagggcgtggctaccatcagcataacaacaaccatttcaacaaccagaactaccacaacggtcagcaccacaatcaccacgccaacaaccaccaccaccaaggtggcaaccgtggtggcgctcatcatgttgggactccgcccaatcaacagcaaaccaagcctgagcagcacccgcagctgccaattggagccaccaagcagcctcccggccctcgcatgccagatggcacgcggggtttcaccttgggcagagggaagccgcaaccgttgctaccggttctgtgtgcagccgtcgagccttgaaccctattcatcgtcacgatagggtatgcggcggcgagtgctggtgttgatagagatggttggaggtcttctcttttcggaacatggtttacttgattctgatgggtgtgtgcctaggccaagtgttttggaaccgtc

SEQ ID NO: 2220 - DNA, 454 bp, Oryza sativa
  Clone ID: uC-osflcyp042a03b1
ctaggcagatatagaccttacacaggggggctctggtctgcatcaaggctttgcataactgctccgagctgaagggagcaaagatcaatggcaccaagatcggaggagggatgggatgaccaacctaccaccgcctggcttagaccgtcatggacagctgcctccagatagagatcgacaagatcattaaagccatgatgaccggtaagtgaccggagaacttctccctgatcatctactacgatctgcgcacctacctccagcaacaggaggtcaatggtcaggccctcaaccagcgtgatgatgctcctgagtgaagccatgtccgcgcctgtgctggtaggcactgcgcgataataccctgaggtgatgacgaataccagtttgagacgggctcacgtctgctactacgccggcaaggccacctacttcgcgtagtgattcgacactagtt

SEQ ID NO: 2221 - DNA, 585 bp, Oryza sativa
  unsure (1)..(585): unsure at all n locations
  Clone ID: uC-osflcyp042a04b1
catgatgtcgcctaattctcctattgaattaggcacagcttcgcccccacattgcctctcattgtaaaatagtatcaactgataatccacaggaactaaacaacaattaaatccaattatggacggattggtaggcctcttgaaaatacgggtggtgcgtgggattaaccttgcctaccgcgacacaagaggcagtgatccatatgtcgtccttcgcctcggcaagcaaaaagtgaagactagtgtaaagaagaaatctgtgaatcctatttggcatgaagagctaactttgtcgatcatgaaccctattgcaccgattaagcttggggtgtttgacaaagacactttcagtagagacgacccaatgggagatgcagaaatagacctggagcccatcatggaagttctgaacatggacccggagaacattcggaatggttccatcataaaaacaattcgaccatccaaccagaactgccttgctgatgagagtcacctattctggaggaatggntaaattgtccaggacattattctccgacttagaaacgtcgagagtggtgagctgcaagtgcaaactgcatg

SEQ ID NO: 2222 - DNA, 337 bp, Oryza sativa
  Clone ID: uC-osflcyp042a05b1
ggcgtttgaggaggcacagcaagacgaggcagagggagctggatgcagtccctagttcttgagctggtgagcgttgtagttcagagttactgctcttttgcttcagagacccggatctgagaaaaaagagatgaaaaaaaaatgttgtcttgctaccttttttagtttgtacgtaggagatctgcaggaagttcataggaaacagtaatttcctaccaaattgtaatgttacttagccagtcctactcagcaatgcaatcggttcactcgaatgctcggactttttacattacattaatcatgaatgtatatgttgtagaaggatcaggttcatttc

SEQ ID NO: 2223 - DNA, 475 bp, Oryza sativa
  unsure (1)..(475): unsure at all n locations
  Clone ID: uC-osflcyp042a07b1
ggtcgaggtccgccatgtcgacaacttcgtcatgtccggcaagggcaagctcgacggccagggccccggcgtctggagcaagaactcctgcgccaagaactacaactgcaagctcctccccaacacgctggtgctgaacacggtgaacaacggggtggtgagcgggatcacgctgctgaacgccaagttcttccacatgaacatctaccggtgcaaggacataaagatcagcggcgtgaccatcagcgccccgggggacagccccaacaccgacggcatccacatgggcgactcctccaagatcaccatcgccgccaccaccatcggcaccggcgacgactgcatctccatcggccccggcaccgacggcgtcaacatcaccggcgtcacctgcggccccggccacggcatcagcatcggcagccttcgccggtacaaggacgagcgggacgtncgtgacgtctncgtcacccgc

SEQ ID NO: 2224 - DNA, 533 bp, Oryza sativa
  unsure (1)..(533): unsure at all n locations
  Clone ID: uC-osflcyp042a10b1
ttgttatgaaaggccttcaataaaaataccagggggtgttatgatgccagtggctggtatggtaaaatggacttataagacgttcgctcgctatggaatgaaaattcctcagcttactccttcaaggatccggctcctgtcttgcaatagaacattcagctgctcaagagcaaaagatcagcttggttatgaacccattgtgtcactcaaggatggacttaagagaacaatagagtcgtatccccatctgcaagcacaaaatcaaaggagcatatcaaaagcctcaattttccttggcaatggaaatcttgcgaagacagttctctgggaagacatgaagcaaacaatgactgtactactgctactggctgntatctactatcatttatttacatgtggttacaccttcattacagcaatggcaaagcttttctcactaaccgcactgtttttattcattcatgggattctgcctgcaaatgggtatggacacaaaggtgagaagctcgagccttcatattttcacatcacac

SEQ ID NO: 2225 - DNA, 172 bp, Oryza sativa
  Clone ID: uC-osflcyp042a12b1
cccgacccttcttaacctcctgtagcaggagagcctcaagtgggtgttcgtccgggatcttggactggggtgtcgagaaacgacgcgcgattagggccctgattcctcctcagctgctggcctccgaccgggtccgcgccgccggcggccaccagctcgccaaggagctctc

SEQ ID NO: 2226 - DNA, 560 bp, Oryza sativa
  unsure (1)..(560): unsure at all n locations
  Clone ID: uC-osflcyp042b03b1
cgctctcagctcgtgctcccctcgccgccgccgccggcgccgtttcgcctcctcggagatcttcgctgcccttccgccaacatggggaagacacgtggtatgggagctgggcgcaagctcaagacccaccgcaggaaccagagatgggcagacaaggcctacaagaagagccacttgggtaatgagtggaagaaaccctttgctgggtcatctcatgccaagggcatcgttctggagaagattggtattgaggccaagcagcccaactctgccatccgtaagtgtgctcgtgtgcagcttgtgaagaatgggaagaagattgctgcctttgtgcccaatgacggttgcctgaacttcattgaggaaaatgatgaggtgttgattgctggatttggtcgtaagggccatgctgtgggagatattcctggtgtccgattcaaggtcgtcaaggtctctggtgtgtctctccttgctctcttcaggaagaagaggagaagcccangtctagaatactggacatctggttggcagcatgcacagacagatgaagcttagatgct

SEQ ID NO: 2227 - DNA, 219 bp, Oryza sativa
  Clone ID: uC-osflcyp042b05b1
aagtggtttcgtggcactccaggccaggaggcgtaggcgcggcttgccagaggcgcaggatgctgaggtggttgttctcctccatgtctctactcgttcttccctccctctcttttctccatttcctttgtccgttcttgctttcctaatcttctcttctcctgattgtatgtcttttctttcttttcttcctccttgtatcttcatgctcctttttct

SEQ ID NO: 2228 - DNA, 552 bp, Oryza sativa
  Clone ID: uC-osflcyp042b06b1
gccgtcgcgtcgcgccgatctccacatcaccggcggcgacttgcgagcaccgtgccgggcgcctactgcttccggcgcgtactcgactccttgcgccaaagtcaatctcccctcgcaccgtcttctcggcctcagactcccttctccgactcgctagttcgccccgccccgccgcgcctcgccctcgcctcgccgcctgcgccggtttccatccatcccgcgacggacgggagcatccgtcgggtgccgtcgtcctgctgcctccgcctccggttcggaagatgatgagaaacaaccaaaacacacaagtagaaggagcaagcgcaactaagaagcggaagacctcatactctaactccaacagagaagattcgcaccagttgtggatggcctcacacgcatattgcgcagaaatcttctccccgtggttatcctatgccatctgagttcactgatggtatgcacatggtgaataactctgaagaatcttttggagacttggatgactgcaatgaagaatacagcaaagttaatttagttgctctaagaata

SEQ ID NO: 2229 - DNA, 486 bp, Oryza sativa
  Clone ID: uC-osflcyp042b07b1
cccaaatatcttgcagtgaaaaaggttaggaatttgagggttcttggtaatcttgaagtgaaaaaggtgggatatttgaggggctttgtggctgtattatttgggggaggtgtttgcgtcatggatgtgtctgtcccaccaaccaattatccgaaatctttatcctcgattatcaaatgccatcgtcgtcgtgcggcaataaacaattgccattcagtcgtctcgcatccgccgctctcgcactcgaaccaccaccaccgctcgctgcgtgtgagatccagcgccgccgtcgcgccgccgctgccgccgccgctggtggtgccgatgacgacgccgaagccgagcccgacgatccggaggctggacgtggcgtcgccggtgccggcggacatcgacatcgccaacgccgtctcgccgctccccatcgccgacatcgccgcggagctcggcctgcgccccgagcacttcgatctctacggcaagtac

SEQ ID NO: 2230 - DNA, 533 bp, Oryza sativa
  Clone ID: uC-osflcyp042b09b1
gttgcaggcggaggcgggtcttccggtcgacaggaaaatcccactgatcgcgttcatcggcaggctggaggaacagaagggccctgacgtcatggccgccgccatcccggagctcatgcaggaggacgtccagatcgttcttctgggtactggaaagaagaagttcgagaagctgctcaagagcatggaggagaagtatccgggcaaggtgagggccgtggtgaagttcaacgcgccgcttgctcatctcatcatggccggagccgacgtgctcgccgtccccagccgcttcgagccctgtggactcatccagctgcaggggatgagatacggaacgccctgtgcttgcgcgtccaccggtgggctcgtggacacggtcatcgaaggcaagactggtttccacatgggccgtctcagcgtcgactgcaaggtggtggagccaagcgacgtgaagaggtggcggccacccttgagcgcgccatcaaggtcgtcggcacgccggcgtacgaggagatggtcaggaactgcatgac

SEQ ID NO: 2231 - DNA, 469 bp, Oryza sativa
  Clone ID: uC-osflcyp042b11b1
gccatctccaaggtgttgtccatcgggatctgaatccagataattcccttttcacctcaaaggatgaaaactctgccttgaaggtcatagactttggcttgtctgactttgtgaagccagatgaaagacttaatgacattgccggaagtgcatattatgttgctcctgaggtgcttcatcgatcttatggcactgaggcagatatgtggagcattggagtgattgcctacattttgctttgcgggagccgtcctttctgggcacgcaccgaatcaggaatatttcgagctgtgctgaaggcataaccaagttttgatgaggctccatggcctactctcactgccgaagcaaaagactttgtaaaacgactgcttaataaggattaccgcaagaggatgactgctgcacacgctctcagtcatccgtggatccgaaattctcaacaagtgaaaatacctttagatatgat

SEQ ID NO: 2232 - DNA, 565 bp, Oryza sativa
  Clone ID: uC-osflcyp042b12b1
tttggagtggaagctgatcagacagattctacggatgctcaagatgatgctcgtggaactatagagagagggcatgcagatgcagatccggcgtccttggaaacttcttgttccacagcacctggagatggagcggacaaatctggtagggagaacgagcaacaaggtggtgctggtgtgagtgaaagcaacacagagaaggcacctgcagttgatgctagagacaacgctttggcttcaaacaccagtgcgctcgaagctggctgtatacttgtagagttcttgcgcaaagaggctgcatgcattgcagctcattcactacatggacggcgttttggcagcaggattgtctctgcaggatatgctccacatgatctttacttacagaagtatccgaggtgatttccagtgctgagattcagatgtactctttctggggggaaagattgcagtgtactgatggaagctaaagctctcgttgtcccagtgagtcttcatcatggggaaaagattctgatgaactagcctcgtagttttggtcttttggatgcataggctgacaatc

SEQ ID NO: 2233 - DNA, 563 bp, Oryza sativa
  unsure (1)..(563): unsure at all n locations
  Clone ID: uC-osflcyp042c01b1
gcagtcaatcatcgcagatcactcaacactcgagagcttggacctgacggatgctgatgggcagggcgtcctcactatggacaagaggcagctgcaggagctgcgtgtgcggcctgtgtcagcttctgggaactcgcaccgcacactcatgccagcacttagtatgcggctatggtacgctccgcatattgagcttcctgggggccaactgcttaagggtgctacactggtagcaatcagaccaagcgaggatgttctaagggaagggggaggaattgaggttgctggcctgacaggtgctacctggattttagatgcctttgaggagccatatcgaacagcagcacaggtgcttctcaagcggcggacatatagtcttgaaatgaactcattctgaccatcagagaggcagcttcagagagctctacactttggggaggatatgatgggatgctattgagacgtatctaggagtcatggtggacatcaggcatctgtaagtatatacancctgttatgctgggctgtttggcatagagttggaaatgaaatgtgtatctgca

SEQ ID NO: 2234 - DNA, 565 bp, Oryza sativa
  Clone ID: uC-osflcyp042c02b1
ctcacccccagcagccgccgccgcagcctcctctcggctgctcccatcctctccttcgagttagcttcctccttatttaaccatgggtaaggagaagacgcacatcaacattgtggtcattggccacgtcgactccggcaagtcgaccaccacgggccatctgatctacaagcttggaggtatcgacaagcgtgtgattgagaggttcgagaaggaagccgctgagatgaacaagaggtccttcaagtacgcgtgggtgcttgataagctcaaggccgagcgtgagagaggtatcaccatcgatatcgccctgtggaagttcgagaccaccaagtactactgcacggtcattgatgcccctggtcaccgtgacttcatcaagaacatgatcacgggtacctcccaggctgactgtgccgtgctcatcattgactccaccactggtggctctgaggctggtatctccaggatggccagacccgtgagcacgctcttcttgctttcactcttggagtgaagcagatgatctgctgctgcaacaagatggatgccaccacttccaagt

SEQ ID NO: 2235 - DNA, 552 bp, Oryza sativa
  Clone ID: uC-osflcyp042c03b1
aggttgtggaggaggaaatcctcgatgactccgatgaggattgggacccacgcaagaagggtgccactgactccgattccgaagtcgatttcgaccgcaagagggtctccaagggcggcaggggcagcggtgcaccacgcgggaggccacgcgggaggcctaggaaaaacaatgctgggaggcctgcacacctcaaggacgaggacgaggtgatccaagaaacagtggagtatcaatatcccccagccgctgacatgtttctacagcttacatccgttgctgctgatccattcaacttcaagggctatgactctgtgcctgtcattcttagcttcttctcaaaatacaaggactcagaagtgccggccacatacgacgacaaggagctgctgcagacattgggtggcaagaaaggtagaaaaaatacggccagaagcttgtacccagctgcaaaagaagaaggtgacttaaaggtggcggatggccataggggtcggaggaagtcagcaaggagtatctactcagcaagataggcagaagactcatattggt

SEQ ID NO: 2236 - DNA, 568 bp, Oryza sativa
  Clone ID: uC-osflcyp042c04b1
ctctctccactccatttctgagctcttctagtttgagtgagagtgcagcagaagggagtagtgcaagatgccgatccgcaatatcgccgtggggagccaccaggaggtgtaccacccgggtgcactcaaggcggcgttggccgagttcatctccaccctcatcttcgtcttcgccggccagggctccggcatggccttcagcaagctgaccggcggcggagcgacgacccccgccgggctgatcgcggcggcggtggcccacgccttcgccctgttcgtggcggtgtccgtcggcgccaacatctccggcggccacgtgaacccggccgtgaccttcggcgccttcgtcggcggcaacatcaccctgttccgcggcctcctctactggatcgcccagctcctgggctccaccgtggcgtgcttcctcctccgcttctccaccggcgggctcgccaccggcaccttcggcctgaccggcgtctccgtgtgggaggccctggtgctggagatcgtcatgaaccttcgcctcgtctacaccgtgtacgccaaccgcgttgaccccaagaag

SEQ ID NO: 2237 - DNA, 418 bp, Oryza sativa
  Clone ID: uC-osflcyp042c05b1
tttttgcggtggtgtacgcgctgtcgccgctccaggggaatgtgatgccggggctgtggtaggacatcaccaccaagatccaccacaaggtctccgagaactggatctccgccacgctcctcctcgcccccatcgtcggcacctacgagtacgcaatgtactacaaggagcaggagaagctatcccacagatattaaatgtgaagcatgcagagattgccacaacttttggaatttttatgatctaaaattatccaagaatgatataacatttttggttcagttatagttgtccatgtactgttttccatcgttccatgcatctccagtatgtatgacttgcaaacttatttttgcggcttgctacatatggtggcattccctgtcactgaagcaattgtttaataaagcaaattaac

SEQ ID NO: 2238 - DNA, 530 bp, Oryza sativa
  Clone ID: uC-osflcyp042c06b1
ctcccccgagaaaaccccaccccactactcctctccgccgccatcattgtcggcgcgagcgagagcccaagcccaagccgacccccgagggaaggggaagacggggccgagatggcggggcgctacgacagcaaccccttcgaggaggacgacgtgaaccctttctcggaacaagcgcgtggcaaggctggagggcagcccagctatggcggcggcgcgttctacatgccgaatccacggaatgtgccttctgtgtcgtcgaattcgcggctttcgcctcttccccctgagcccgcagcttttggggctacggtggatatccctcttgactcttccaaggacctgaagaatagggaaaaggagctgcaagctagggaagcggaattgaacaagagggagaaggagctcaaaaggagggaggaggctgcagcgcgagctggtattgtcattgaggagaaaaactggcctccatttctgccactcatccatcatgatatcaccaatgagataccgagtcaccttcaaagaat

SEQ ID NO: 2239 - DNA, 560 bp, Oryza sativa
  Clone ID: uC-osflcyp042c08b1
gatctatccatccatcccatcctcgatccttgattcctgctccggcggcgagcgagagagaggcggcggagatccgagatggcggggagcgggtggaggaggatcccggcggcgaggaggccgcccatgtcgcgcccggcctcggtctgcctctggatcgtgctcgtcgccgccaccctggcgctcgcccaggcgaagaaatcgaaggcggatttgactgaggtcacccacaaggtctacttcgacgtcgagattgatggcaagcccgcaggacgggttgtcatgggacttttcgggaagactgttcctaaaacggcagagaacttccgagcactttgcacaggagagaaaggaactggaaagagtggcaaagcactccacttcaagggaagtgcattccacagaattatacccagctttatgatccaaggaggtgacttcacacttggtgatggaaggggtggtgaatctatctatgggacgaagttcgccgatgaaaacttcaagatcaagcacaccggaccaggccttctgtccatggccaatgcttggagagacac

SEQ ID NO: 2240 - DNA, 464 bp, Oryza sativa
  Clone ID: uC-osflcyp042c10b1
gtctcgactccactactgtggttgcaggggctactttaatagcagttgggtgtagagcccgccccgcgactatactcgctccgccgcgccgtcgtttctcccgacttcggcgacaagcgagcgacgcaggccaccgcgcgcggttcgctttcgcgagggaggccgccgccgaccagccgacatggcctcgccggacaccatccgcacggccatcggcgtcgtaggcaatggaaccgtcctcgtgctcttcctctccccagtgccgacgttcatacggatctggaagaaggggtcggtggagcagtactcgtcggcgccgcacgtggcgacgctgctcaactgcatgatgtgggtgctgcacggcctccccgcggtgcacccgcacagcatgctggtcatcaccatcaacggcaccggcatggccatcgagctcacctacaacgtcctcttcctcgccttctccc

SEQ ID NO: 2241 - DNA, 480 bp, Oryza sativa
  Clone ID: uC-osflcyp042d01b1
gctgtgatcatgtattgggttgattcgagtttgtgagaattttgtgtggttttgagccagatgatcaaggaggcgatcatggcgctggacgggaacggcaaggcgggatcgagcccgtacgcgatcgccaagtacatgggggagcagcacatgggggttctcccggcgaactaccggaaggtgctcgccgtgcagctgcggaacttcgccgccaagggccggctcgtgaaggtgaaggcctcgttcaagctgtcggctgccgaggagaagaaggcgacggcggcgaaggcggccaggtccaaggcggccaagggcgtcgtcggcggcgccaagaggaagaggaccccgcgcccctccgccgccgccgccaagaagcccgcgtcgtcggcggaggcgaagaggcgggttccccccgcccgcccagcccgcgccaagagggcgaggaaggccgccctcgcgaagccgatgcagccgcccaaa

SEQ ID NO: 2242 - DNA, 531 bp, Oryza sativa
  Clone ID: uC-osflcyp042d02b1
cttttctctcgcgccgtttcgctccctgaccctggggcgccgttgccgccgatcatcatgagtaagttgcagagcgaggttctcaaggaagccatctcccaggttgttggggaatccaaggagaagggcaggaagttcaccgagaccgttgagcttcagattggtctcaagaactatgacccgcaaaaggacaagcgtttcagcggctccgtcaagctgccccatatcccccgccccaagatgaaggtctgcatgcttggtgatgcccagcatgtcgaggaggctgagaagattgggcttgactacatggatgttgaggctcttaagaaaatgaacaagaacaagaagctggttaagaagcttgccaagaagtaccatgctttcttagcatcagaggccatcatcaagcagattcctcgtctccttggtcctggtctcaacaaggcaggcaagttccctacattggttactcaccaggagtctctttgatccaaggtcaacgagacgaaagctacagtcaaagtccagctg

SEQ ID NO: 2243 - DNA, 497 bp, Oryza sativa
  Clone ID: uC-osflcyp042d03b1
gcgttgtctcccccctccatgacctcctcctctctgtagccattggcttcggccaaggctgatgagacattcctaaccaccatgggcaccctcccaccattcccgcccctcctcctcctcgtcgccgtcatcttctccttcctctcctcgtcgtgctttgctgtgaccagccatgaggcggcggccatcgcgcggcgccagctgctcaacttcgagaagcacggcgaccacgtccacatcgatatcgacatcgagatcaaggtgagcaacccgcggctggcggcggcgcacagggcgctgcacgcgctgaagcgggcgctctactccgaccccggcaacttcaccggcgactgggccggccccgacgtgtgcgcctacaacggcgtgctctgcgcgccgtcgccggacaacgcgtcggcgagcgccgtcgcgtcgctggacatgaacgccgccgacgtcgcgggctacctgcccagggagatcggcctcctgtccga

SEQ ID NO: 2244 - DNA, 561 bp, Oryza sativa
  Clone ID: uC-osflcyp042d04b1
ctttcccgctgcttctgttcgccgccgccgtgctccagcgcctagggttttcttcgccgccggcgagtgtcctagggtttcttcaccgccggcgagtgctccagctcccagccctgcgcgtcctcctcgccggacgctgccggtgacgtctgggccaagctaggtctgtagtgccctccgattccgtgttcccggaggtggagctggccgaggacgacgccgtggtgtgctcccgggtcaccccggatggcggcggggaggtggtcgcgtggtgcaagattaggcgcggcggcgacgtgtcggcggcgacgatttggaatctgagcttggatgcaattattgtcgatggaagagttatccagcaagaagcagttgacatcaaaccggggagtgaaattgttccagggccccagaaagatgggtatctgttgtacacctttgatataactggcctgaatgactaggacaaaaataatatcaagattgtgctaggtattgagaatgcaaagtgcagcatatgcttaaatttgtgggatgatgctgttactggtgcttcatgcc

SEQ ID NO: 2245 - DNA, 560 bp, Oryza sativa
  Clone ID: uC-osflcyp042d08b1
tgctgcacggaggaggaggagatggtgagggagctccagatggagcgcgaacgcagcgaccgcaaccgtgactaccgtgaccgcgatgttagacgtaggaaagatgacggtgcagagccagaagctgatccagaaagagatcaaaggactgtatttgccttccagctatctttgaaggcagatgaaagagacgtctatgagttcttctcaagagcagggaaggtccgtgatgttcgccttattatggacaggaactcgcggcgttccaaaggagttgggtacattgagttctatgatgctatgtctgttccaatggcgatagctctaactggtcaggtgcttcttgggcaacaagtgatggttaagccctcagaggctgaaaagaatctagttcagtcaaacgtggcatcaggtggaatagcttcaggtggagcaagacagttgtatgttggcaacctacattccaatatcactgaggatcaattgagacaggtattcgaaccatttgggcaagtggagcttgtccagctgccggtagatccactaaccgggctatgtaa

SEQ ID NO: 2246 - DNA, 554 bp, Oryza sativa
  Clone ID: uC-osflcyp042d09b1
cttatgttattcattctcagagcaataagctggggtcatttgttcatggatttacatactctggccatccagttgcatgtgctgtcgccatagaagccctgaaaatttatcaggaaaggaacattcctgatcatgtgaagcaaatttctccaaggttccaggagggagtcaaggcctttgcaggaagtccgattgttggagagatacgtggtgtagggttgatacttggaactgaattcgcagacaacaaatcgccaaatgatccattccctgctgaatggggcgtcggcgcgatctttggagcggagtgccagaagcgcggcatgctggctagagttgctggagacaacatcatgatgtcaccaccattgataatgacccctgatgaagtcgaggagctggtgagcatctatggagatgcactcaaggccaccgaggagagggtggctgagctgaaatccatgaagaacaattagaccgagttgacaactcctcatcttgcaactgcacgagacgacgatgactatgataatgctggcagcgatgatgatgat

SEQ ID NO: 2247 - DNA, 459 bp, Oryza sativa
  Clone ID: uC-osflcyp042d12b1
ttgtttcactcccttccggcgcggcggacatcgggggcggctttgatggcggcgaggactacaagacccctccccctcctgcttctgctgcttctgcctgctctgctgctgctgctgctctccttgcacgccgccgccgccgccgccgccgaggagttcccgcgcgacgggcgggtgatagagctggacgagagcagctccgaggcggcgctgggcgccatcgactacctcttcgtcgacttctacgcgccatggtgcggccactgcaagcgcctagcccccgagttagatgaagctgcaccggcgttggcaggactgagtgcgcccatcatagttgccacagcaaatgctgacaagtacaggaagcttggatcgaaatatggagtggacgggttccctacactgatgctttttatccacggagtccccatccgatacactgggtcaagaaaagctgac

SEQ ID NO: 2248 - DNA, 409 bp, Oryza sativa
  Clone ID: uC-osflcyp042e01b1
aatttattggagtattcactctatcggatgcctggcgaactgtatcagctgaggccatcaaggaactgagatcactgggcattaagtcagtgatgcttacaggtgatagtagcgctgctgccacatatgcacagaatcagctgggaaatatccttgctgaggttcatgctgaacttcttccagaggacaaagtgagaattgttggtgaactcaaggaaaaagatggccctacgctgatggttggtgatggcatgaatgatgccccggcattggctaaagctgatgttggagtctctatgggtgtatctggttcagctgttgcaatggagacaagccacgttgctctgatgtcaaatgacatccgcaggattccaaaggctgtccggctggcaaggaggacgcatcggac

SEQ ID NO: 2249 - DNA, 458 bp, Oryza sativa
  Clone ID: uC-osflcyp042e02b1
cttctcgtgggcgcaggcacacaaacacagagagcggcccataccgaccaaaatcactgcagagttcaggcacttcttcagatagttctccccctctgtttctttctctctttatttctttctcgagttcagtttgagagatggatttggcgtggtggttcgcggtggccgtggtggtgtgcggccttgtggggggcggcagcgccgggctgctggagaccaacccgggtttggcgtacaacttctaccagaagtcgtgccccaacgtggactccatcgtccgcagcgtcacctgggcgcaggtcgccgccaacccggcgctccccggccgcctcctccgcctccacttccatgactgcttcgtccaggggtgcgacgcgtcgatcttgctggacaacgccgggagcgagaagacggcggtgccgaacctatcggtggggggatacgaggtgatcgac

SEQ ID NO: 2250 - DNA, 519 bp, Oryza sativa
  Clone ID: uC-osflcyp042e03b1
gatcatcgtcggcacgtcggcgacgcccgaggccgggacgctcaactgcgccaacaacctgccgtgccagggcatccagctgcacaacgtcgacctcaagtacgccggccaagggaacaccaccctctccgtctgcaagaacgtcgccggcaagtccagcaacgtcgccaaggagctcgcctgcgtctgattttcatcttattatactactcttccgtttcatattacaaagtcatttgtttttttttaaagccaattttttcaaagtttgaccaaagttttttaaaaaatatagtagtattttcaatatgaaaagaacatattatcagaatatatttcatattggatttaattagactaatttaatattttatatgttgctatatttttttataaatttgtttaaactaaataaaaattgactagaaaaagtcaaacaacttataatatgaaatggagatagggggagtaattgtcgtctgatatatagttgaagttaatcatcgttcccttcgtaca

SEQ ID NO: 2251 - DNA, 558 bp, Oryza sativa
  Clone ID: uC-osflcyp042e05b1
atggtttcctcgatcgatcgatcgatcgaattgagggattaatctcctcctccaccaaccaataatataatccagttgtctctgttggccgctcgttgcgaccacgccactacagtcggggcaaccatgggtgcttgtgcaaccaagcccaagacgctcgagggaaaggctcccgaggaggccactcccattgaggcagcacccaaggttgcccttgagaccacaatgatctccaataaggaggttgtggctgatcaagcacctgagaaggtagtggaggaggccaccgcgatggcagagttaccaccaaatgatgatgccattgtcatgcaagacaaggaggaggaagttgaagaaaagatcgtcgaggaggagaagccttcagccccagctgcagaggtgaacaataccgaggtggtcgaggagaccatagaggtaaagaacaccgaggtggacaaggggaccacagaggtgaagaactccgaggaggagaagccaattcagagctgataaacgaccatgtaaattcgctccatgattatatatgctcatccttat

SEQ ID NO: 2252 - DNA, 136 bp, Oryza sativa
  Clone ID: uC-osflcyp042e06b1
cttattttaacgccgcaaaaaaaaaccaggagggggggactttaaaaagccaggggggtggcaaaggagaacaagcccggctacagcgacctgatggcgagcggcaaggccgaacgaggaggcaaccaaagacgga

SEQ ID NO: 2253 - DNA, 432 bp, Oryza sativa
  Clone ID: uC-osflcyp042e07b1
tttattcacgagactcagaagctgctggtgagtgctgctgttgctgaatggtcagacaccaacacggacacgttcctgtcagatacaccttcaagcagctctccatcaagcccgcagaagttcgatgaagattccatggaggctggaattgttgagatccagacacaaacagcagaacctcaaagatgttgaagctgcaaaattcttcctcctgtaaattggggcaacactgatcactggagctgcccagaatgtagtcacatatgtcgatacatatacacctgcacagtacattggtaaaaaagagtggtttatccagaccacgaagcatgtatagctgttctcttcggtaatggtaaacatgtacaaaaatttcagattgcctccaaattttggagaatatgagttcttgccgcgatgcaacttggatat

SEQ ID NO: 2254 - DNA, 569 bp, Oryza sativa
  Clone ID: uC-osflcyp042e08b1
gttacttcttccagcagcttatctcgggagtgaggtactgttcattcaatgcaagtatgccaccgtgatttgaagttggagaatacactgctggatggaagccctgctccacgcttgaaaatatgtgactttggctattctaagtcttcagttctccattcacaaccaaaatccactgtaggaacccctgcttatattgcacctgaagttctgttgaagaaagaatacgatggcaagactgctgatgtatggtcctgtggtgtgactctatatgttatggtagttggtgcatatcctttcgaggatccagaagagcctaagaacttccgtaaaacaattcagcgtatcttgaatgttcagtactcaattccagaaaacgtggacatatctccagaatgtaggcatctaatttcgaggattttttgtcggagatccgtctttgaggataacaatcccagaaatacggagccatggctggttcttgaagaaccttcctgcagatttgatggacgatgatagtatgagcagccagtatgaggaacctgatcagccaatgcaaaccatggatc

SEQ ID NO: 2255 - DNA, 536 bp, Oryza sativa
  Clone ID: uC-osflcyp042e09b1
tttgttccccttccttcctctcctcctctcgggggaccttttagaagcttggaggctcccaacctcgcctccaccaccaaccccccatggcggaccagctcaccgacgagcagatcgccgagttcaaggaggcgttcagcctcttcgacaaggacggcgacggttgcatcactactaaggagcttggaaccgtgatgcggtcccttggtcagaacccaactgaggcggagctgcaggacatgatcaacgaggttgatgctgatggcaatgggaccattgacttcccagagttcctgaacctgatggcgaagaagatgaaggataccgactctgaggaggagctcacggaggccttccgcgtgtttgacaaggaccagaacggtttcatctcggctgctgagctccgccacgtcatgaccaaccttggtgagaagctgaccgacgaggaagtcgacgagatgatccgtgaggctgacgtcgatggcgatggccagatcaactacgaggagttcgttacggtcatgatggccaagtga

SEQ ID NO: 2256 - DNA, 510 bp, Oryza sativa
  Clone ID: uC-osflcyp042e10b1
ttttaattatgtgtatattgttatggaattatgggaaggtttggagttacttgaccggatactagccaagaaagatagccgttatagcgagaaagatgctgcagtagttgtgcggcaaatgctcaaggttgctgctgagtgccatttgcatggtttggttcatcgggacatgaagcctgagaacttcctcttcaaatcaaccaaagaggactcatccctcaaggctacagattttggtctttcagattttataagaccagggaaacactttcgtgacattgttggaagtgcctactatgtagcaccagaagtgcttaagcgtaagtcaggcccagaatctgacgtttggagtattggcgtaataacctatattctactgtgtggaagacgacctttctgggacaaaactgaagatggaatatttaaagaggtgttgaaaaacatgccagattttcgtcgcaagccctggccaaatatcactccttgtgctaaagactttgtacaaaagtt

SEQ ID NO: 2257 - DNA, 567 bp, Oryza sativa
  Clone ID: uC-osflcyp042e12b1
gttttctattttgcaatctgtaggcgataatggtgttgatcctacaacagatgatgtgaaacagagcagtttgttaacagatgattacaaaagctcaatggatgaagccattaacctagctttggataatgatgaatttgatcctcttcttgagcttatttctgctgagcagaaccaagaaattttcaattaccagcactcagaaactggcgtgacacctttgatggttcttgctggaaaaggtcaggttggggacatttgcatgcttctatcatttggggtggattgttctacacgggatcatgatggaaaatctgcattagattgggcagaacaagggaatcagcaagaggtttgcgaagttattaagaaacatatggaatgtggttcagcaaagttaactgaagagaatgagctgctcaataaatacttggcaaccatcaatcctgagcacatcgatactgtgctaatagaacggttgctcagaaaaatttgtgttgattccaatgaaggagctatcttggtgtttctttctgggtggggagatataaatcaaacacgggaaag

SEQ ID NO: 2258 - DNA, 513 bp, Oryza sativa
  Clone ID: uC-osflcyp042f01b1
ggtttatactaaagagcgtggtgagtctgacagggagctcttttatatacccatgcagttagagagagtaagacaagaagcttatgaggagaaatgtaggcgtgagaaagcagagcaggagttatttgaggctctccagaaagtgcaggtatcagagaatttgtactttggagaactgaagcaaaagaatgaaatagaggtaaaattggcaacaacaatggaggaagttgacaggcttgcaagaacagctgatgaacttgctgcaaaatttcaagagcaatgtgagaagatattggtcctagagaagcgaagcgcccattctgaccgtattatcaaggatcttatgttgcagcgtgacaaagcagtaagagaggcagaagcaatacgtgtaaaaaatggagagtctactgcaattgcggatagaacatattccattacagagctatcgatatcagagattaaggaggcaaccagcaacttgatcactcatcgaaggttggggaaagtgttatg

SEQ ID NO: 2259 - DNA, 558 bp, Oryza sativa
  unsure (1)..(558): unsure at all n locations
  Clone ID: uC-osflcyp042f04b1
gccttacagggaatggagggtctccgagctgcagcggcaatttgaggggaagactgtgttgctcggtgtggatgacatggatatcttcaagggtatcaacttgaagcttcttgccttcgagaatatgttgaggacacatcccaagtggcaggggcgggcagtgttggtgcaaattgctaatccggcccgtggaaagggtaaggatcttgaagccatccaggctgagattcatgagagctgcaagaggattaatggagagtttggccagtcaggatacagccctgttgtcttcattgaccgtgatgtgtcaagtgtggagaagattgcctactacacaatagcagaatgtgtggtggcgactgctgtgagggatgggatgaacttgacaccatatgaatatattgtctgtaggcaggggtctgactccacatcagacgtgaatggaccaaagaagagcatgctggtggtatcagaattcattgggtgctcaccatctctgagtggtgctatccnggttaacccatggaatatagaggcaaccgcagaggcactgaatga

SEQ ID NO: 2260 - DNA, 504 bp, Oryza sativa
  Clone ID: uC-osflcyp042f07b1
ttttcctccacctaaacccccacatcgccctaggggcctgtttacccttcctacctggccgacgccgccaccgccgccgccatggccgccgccgccggcgccatccgccgcccgctcctccgctccgtcgccttctcctcctccaggtcccgctccctcctccacctcctctcccgccccctctcctactcctaccccccttccgcctcccccaaccatctccaccacccccaccagcagcagtggcagccatcgcctccgcctccgcctccgccgccgcaaggacctcctccccagtggtctcctcccggaaactaccaccagcagcaggcccctccccctccgcgccactactacggccccccgcagcatcaacctcgctacaactacggtcctacgcagccacaggcgccgccgtcgccgcgcaacgactacgggccacctgcgccgccgtcgcagcagcagcaagagcagcgggaggctgtggtggggccaggggagctg

SEQ ID NO: 2261 - DNA, 489 bp, Oryza sativa
  Clone ID: uC-osflcyp042f09b1
tttcgccggagctcttcctccgcccctacgaggggatcttcttcaacaacaaccggttcacctccggcatcccggacaccatcggcaggtccaccgcgtcggtcatcgtcctcgccaacaacgacctcggcggctgcatcccgcccaccatcggccaggccgccgccacgctcgaccagttcgtcttcctcaacaacagcctcaccggctgcctgcccctcgagtcgggcctcctcgccaacgccacggtgttcgacgtcagccacaacctgctgaccggcgccatccccgcgacgatgggtggcctggccaaggtcgagcagcttgacctgtcgcacaacagcttcaccgtcgttgtgccgggcgacgtctgcgggctgtcggcgttgacgaacctgtgggtctcgtacaacttcatcgacgaggagacgcccagtgcaacagagcgctgctggatgcgaagctcgacaagtcgttggaggacgaggc

SEQ ID NO: 2262 - DNA, 542 bp, Oryza sativa
  Clone ID: uC-osflcyp042f11b1
agtaaaatggcacctacatgacagttgataccggtctaaatgacgaaatacatacgaaggatggaacttctgattatgatttgcaggatacccaccgtgaaggaaaaggtatcacatcagtggaaactgatactgttccttgtgtggcgccttcaagttttgcctacagtggtgtaactgtggaaactgaagacgttggggagaacagcaagaagaatgatgagctgcaagaacttggaagcatcaatcctgaaagtgataacaataaagtacaatatcaatatcagttaggtgagtttatgagttcatgttgggaacctgttatgagacaggagccacaggatgcttgttctgattctgaatctgatcttactgagagttctcctgatgcatcaatgactgacattattccaatgcttgaagagttgcacccattaatagacttgcaaactggccacccttcattggtctccagagacaacttgaatacttcttcggatgatgatgaagatgatcttgaggaggaggatgctagcacagat

SEQ ID NO: 2263 - DNA, 552 bp, Oryza sativa
  unsure (1)..(552): unsure at all n locations
  Clone ID: uC-osflcyp042f12b1
ttttatttcatattctatgctgatcggttgatgggattggttgatgagcatgggcttggtcatcttccattcaaggaaaagcaggtcataactccaactggatcggtttacactggggtagagttctccaaaagattgtgtggtatctcagtgattagaagtggtgagagtatggagaatgcattgcgggcatgctgcaaaggtataaaaattgggaagattcttattcacagggaaggagacaatggcaaacagctaatctatcacaatttaccgaaagatattgcaaacaggcatgtgctgttgttggatcccatactgggaacaggaaattcagctgttcaagctatatctctactctngaaaaagggtgtacaggaaacaaatattatttttctgaatcttatatcagctccccaaggagtgcatgtggtcagcaagagatttccaagagtgaagatcgtgacatcagaaatcgagtttggtctgaatgatgatttccgcgtcatccctgggatgggtgagtttggggataggtactttgggacagat

SEQ ID NO: 2264 - DNA, 494 bp, Oryza sativa
  Clone ID: uC-osflcyp042g03b1
gttgctgtcaaacattgcaaggagggaactgagagctctgccttttggtttgctcttggtggaaagcagaattacacaagcagaaatgccacacatgatgttgttagagagcctcacttgtatacattctcattgaggaatgggaaactggaggtcactgaaattttcaacttttcacaagatgatttgctgactgaagacatgatggttcttgatacacatggggaagtctttgtttggatgggtcagtgtgtggatgctaaagagaagcagaaggcatttgaaattggccagaaatatgcagaacatgcggcggccttcgaatctctttctcctgatgtgcctctgtacaaagtcgttgaagggaatgaaccatgcttcttcagaacttacttctcctgggataacacaagatctgtgattcatggaaattcatttcagaagaagctttcacttctttttggaatgcgctcagagagtggatctaagagttc

SEQ ID NO: 2265 - DNA, 557 bp, Oryza sativa
  Clone ID: uC-osflcyp042g05b1
gtctccattttgattgtatattgtttgacaatttgctagagttgcaggctcaccgaaactattatctgttgtttgaaaggttttttaaattgaagaaataagaaatgtgatcattgaaacttcagaaagcacatttaactcttatctaaggctctgagctacatgcaattttttccccgttttatagtcgttctgacatcaatggaacctattcgtgcagtgtggttactctgggcatatccaaattagctcatccctagatctccacaattgccccaattcatttcttctgccccttagccatttattatagttgtgtcttcatccgagttgtttcgtggtggtgcttgaatggctagtcatacttgggagtagggaatgcagccgtgatgatttgcagtgttgctctacaaattagcagcaaacttagttttgcacaaaatggtttctggtatggaacagcactggcactattagattgcagaccattgctacctacatggcagatatgtataaaaagatatgaatgtgatatatcatatgaatataatttaatg

SEQ ID NO: 2266 - DNA, 503 bp, Oryza sativa
  Clone ID: uC-osflcyp042g06b1
cattttctcgtgtgaacacaaaaccccgtaaaaatctgcgtcttcgacaccgacaccgcctccgacgccgccatggccgccaccgccgtcgcggcccacaccctactccacctggcggccccgaggaagccctccgcggggcccccactcccggccgccaccctccgcctccccagccgacgtctcgcccgtctcacggccagctgcagcagcggctccgggaacaacagcgccgtcgacttccccaaccccaacgggatcctcgtcgcgcccccgtccgacgcggcggcggcggcggcgccgccgcatatcgatgttgacgtggcgacggaggccgacctgagggagaacgggttccggagcacgcggcgcaccaagctcgtctgcaccgaggggcctgccacctgcggcgccgacgagctggaggcgctcgccggcggctggatgaacgatgcgcgcgtcaacatgtgccacggagaccgggagcggcaccggtgcgtcat

SEQ ID NO: 2267 - DNA, 240 bp, Oryza sativa
  Clone ID: uC-osflcyp042g07b1
ggaaccacccccaccagaacccccgggacgacccacgcgcccttttttcacacggaggaggaagaagaagaaaggggggcctattaaaaaaagcctggggtctcaccacgcgcacgaaaacaaacaccgaggccggaaccaaaccaccacccaagccaacaacaccgaggcggacacggggaccacaaaacccaacagaccccgaggaggagaagccaacgcacagccggacaaacaacc

SEQ ID NO: 2268 - DNA, 567 bp, Oryza sativa
  unsure (1)..(567): unsure at all n locations
  Clone ID: uC-osflcyp042g08b1
ttttcaatcgaatcgatcccctctcatccgctgggggacacttaatctctcctctccctctcggcgcccaggtggtngccgacgcccgccccttccttctcttctcctgctatgtacgtaaataatccacctacgatagatacggnncgncccattatgagctctctatgcccctttgccaaactcgcctccgctggcgccacatgccccgtaaaatcatcatcagacaacaaaaccaccatcaatcacaccgacgacgacgacgacgacaatgaaaaaactggcaatgctaacaccgatcctcgtgtggtgccaccaaagtgcccctttggctatgactccaacaccttcaagcttggcccactcagctgcatggtctgccacgctctgctacatcaaagcagcaaatgcaccccgtgctcccacaagttctgcatggcatgcatattgcgctttaaggactggccattgcgtggtgctgacatccaaaggatcgagcccgatgatgagcatcaaggccttgcgaccgcttcattgatggccatgcccgattaagagatcacatgc

SEQ ID NO: 2269 - DNA, 526 bp, Oryza sativa
  Clone ID: uC-osflcyp042g09b1
tttttggcggaccagctcatctccacggcagacggacgactttctgccgggcaactacttgcgccccgaggcgcagcgcccgcgcctcgccgacgtgctctgcgacgcctccatccccgtcgtcgacctcgccaaccccgaccgcgccaagctcgtctcccaggtcggcgccgcctgccgctcccacggcttcttccaggtgctcaaccatggggtgccagtggagctgacactgtcggtgctggcggtggcgcacgacttcttccggctgccggcggaggagaaggccaagctctactccgacgacccggtcaagaagatccgcctctccaccagcttcaacgtccgcaaggagaccgtgcacaactggcgcgactacctccgactgcactgctacccgcttgaccgctacctccctgattggccattcaaccccccttgctttatggagaacataagcacatactgcacagatgttcgggagctcggattcagactgtacggagcgatatcccagagcctgggc

SEQ ID NO: 2270 - DNA, 442 bp, Oryza sativa
  Clone ID: uC-osflcyp042h02b1
cgcgtctcgactccactactgtggttgcatataggaggacacttgcagttgcatccagagcccgccccgcgtctctactcgctccgccgcgccgtcgtctctcccgacttcggcgacaagcgagcgacgcaggccaccgcgcgcggttcgttttcgcgagggaggccgccgccgaccagccgccatggtctcgccggacaccatccgcacggccatcggcgtcgtaggcaatggaaccgccctcgtgctcttcctctccccagtgccgacgttcatacggatctggaagaaggggtcggtggagcagtactcggcggtgccgtacgtggcgacgctgctcaactgcatgatgtgggtgctgtacggcctcccgcggtgcacccgcacagcatgctggtcatcaccatcaacggcaccggcatggccatggagctcacctaca

SEQ ID NO: 2271 - DNA, 567 bp, Oryza sativa
  unsure (1)..(567): unsure at all n locations
  Clone ID: uC-osflcyp042h04b1
cgttccattcgagtttaagactgatgaagaccaaggggttgaagggcttgacaaagcagtacttagcatgaagaaaggagaagttgcattggtgactattccaccagagtatgcgtttggatctgatgaaacaagacaagatttgtctgttgtccctcctaattcaactgtttattatgaggtggagcttgtgtccttcgataaggagaaagaatcatgggacatgaaggagaatactgagaagattgaagcggctgcaaagaagaaagatgaagggaatgcttggtttaagatggaaaagtatgccagggcttctaagagatatggaaaggctttaaacttcatccagtatgacagctccttcagtgaagaagagaagcagctgtccaaaccactcaaggtgagttgcaagctcaacaatgctgcatgtaagctgaagcttaaagactacaaggaagcaaaggaactgtgtactgaggtcctggagcttgacagcatgaatgtgaaggctttttacagaagggcacaggcacacatgtatncttgtgactttgatttggcagaact

SEQ ID NO: 2272 - DNA, 458 bp, Oryza sativa
  Clone ID: uC-osflcyp042h05b1
atatgtctgagccatattacgacgagggatactggggggcctatgacatgagtgctttccaggggacaagggaaagacaatttccctccttggatgcctattctaatggcctgtctgacatgagtccatcaaagccttggctgaatggctctcctaatccatcgatgaaccatgcagttggtacaaatggatacccccagcaaataccggactacaccaatttggctagtgagttgaatggagcctctctataccatcgccgctacgccaacggtcgctggtaacgtgatgacgcctgtatacagtcttgcaatcaaaaaaaataatgcttgttacctgtaatagatgttcagtctgggtctgagccgtgtcatggcctgtaattccaaacttttaattccaaaagggcaaagggttgcattctgtaaagcgttcgccgtgtttaggctggttaatgc

SEQ ID NO: 2273 - DNA, 524 bp, Oryza sativa
  Clone ID: uC-osflcyp042h06b1
cattttactccgtggaccacgtggagccatgatcttttacaggaagggggtgaaaggagtaaacaagcaaggcaaagaggttatgtatgactttgaggacaagatcaatgctgctgtcttcccaggtctgcaaggtggaccacataatcataccattactggcttagctgttgcgcttaagcaggcaactactccggagtacagagcttatcaagagcaagttatgagtaactgtgcaaaatttgcacagagcttgacagcaaaaggctacgaacttgtctctggtgggactgacaaccatttagtgttggtaaatctcaagagcaagggcatagatggttcaagagtggagaaggttttagaaaacgtgcacattgcagcaaacaagaacacagttcctggtgatgtttcagctatggtaccaggaggcatcaggatgggaaccccagcactgacctcaagaggatttgttgaggaggactctgctaaggttgctgatttcttcgatgcagcagtgaacttgg

SEQ ID NO: 2274 - DNA, 391 bp, Oryza sativa
  Clone ID: uC-osflcyp042h07b1
gcgttttccctccccctcctccctcccacgccatgggcctcctttttggtggagtcgagatccccggctcggttctctcctcttctttagatcagttaaaataaatggctgacgcagaggacattcagccccttgtctgtgacaatggaaccggaatggtcaaggctgggcttgctggagatgatgctccccgtgctgttttcccgagtattggtggccgtccgcgacatacaggcgttatggttgggatgggacaaaaagatgcttatgtcggtgatgaggcccaatccaagaggggtatcctaaccttgaaataccccattgagcatgggattgtaagcaactgggatgacatggcgaggatatggcaccacacattctacaatgagct

SEQ ID NO: 2275 - DNA, 381 bp, Oryza sativa
  Clone ID: uC-osflcyp042h09b1
gtttcttcttcctcattccaatctccccccaattggggttgtattcgtggaggcggattggggatttggatttggattggagagaggggggagatggaccaggtgctgaacaaggtggggagctactggttcagcaagagggcaagcaaggagatcgactccatcggcgacgacatcagctcaatctctacaagcattggaacaggagctaaatggatggtgaacaagatcaaagggaagatgcagaaagcattgccagaccttctcaaggaatatgacatgcccgcgggccttttcccaagggatgctactaactatgaattcaatgaagagacaagaagcttaccgtgtacattccttcagcttgtgatgtcgggtaca

SEQ ID NO: 2276 - DNA, 513 bp, Oryza sativa
  Clone ID: uC-osflcyp042h10b1
tttttgtgtctctagatacactcgtctctgatgggttctcttcagagagggtttgttctttgagctcgtgatctcttcgagatttgtagtagtactacgtcgacggttaggtggtcgtcgcagcaatggccggcggcgtggtggtgaacaacggaggggggaaggactaccccgggaagctcaccatgttcgtcctcttcgcctgcatcgtcgcagccaccggcggcctcatcttcggatatgacatcggcatctccgggggtgtgacgtcgatgaacccgttcctgatcaagttcttcccgtcggtgtaccggaaggagcaggcggcggagaagaaccagagcaaccagtactgcaagttcgacagcccgctgctgaccatgttcacctcgtcgctctacctcgccgcgctcgtcgcctccttcttcgcgtccaccgtcacccgcgtcgcggggcgcaagtggtccatgttcggcggcggcgtcaccttcctcgtcggcgccgagctcaacg

SEQ ID NO: 2277 - DNA, 515 bp, Oryza sativa
  Clone ID: uC-osflcyp042h12b1
gtttatagcagcagcagcagcaatggccgccctggccgccgcatccaccgccttcgccgccaagccgcgcctggcgcgcgcgccgtcgtccccggccgcgcggttctccgtgtcgtgctccgcgtcgggcaacaacggcggcgccggcgagatggcgcagtcgctggcggcgtcggccaagacgttctccgcggcgctggcgctgtcctcggtgctgctctcctcggcggcgacgtcgccgccccccgccgccgccgacatcgccgggctgacgccgtgcaaggagtccaaggcgttcgcgaagcgggagaagcagtccatcaagaagctccagtcgtcgctcaagaagtacgcgccggactccgcgccggcgctcgccatcaacgccaccatcgagaagacgaagcgccgcttcgagaactacggcaagttcggcctgctctgcggcgccgacggcctcccgcacctcatcgtcagcggcgaccagcggcactggggcgagttcatcaccccgg

SEQ ID NO: 2278 - DNA, 315 bp, Oryza sativa
  Clone ID: uC-osflcyp043a01b1
tcctcctgtttttttctccagccacctgattacccccaaagtgtgggtttttaaaaaataatgggggtttcaaaactaccacaaatgactgaacttctccgcatacatgtgactaaagcataataatttattgtaccatatgttgagaaattcctttctgaattcccaaatgtgagtgttttgctccttgaaaatgttaaatttaacaacgaacaggttaataatgccctacagtatgccaatacgccttgcctccttagcagacctatatctacataatgcattccaaacagcccacataatacatgcatcaac

SEQ ID NO: 2279 - DNA, 497 bp, Oryza sativa
  Clone ID: uC-osflcyp043a02b1
ccttttcacaggccaacagcaaagcagaggcggggggaattagaagaagaagaagcggtggcggcggcggccatggcgtggcgtgcgaacctctcccggggcgtgaaggagatccgcttcctcttctgccaatcctcccccgccagcgcccccgcgagggagttcgtgaagaagaactacggcgacatcaaggcgcgcaacccgtccctccccgtcctcatccgcgagtgctccggcgtcgagccccagctgtgggcgcgctacgatatgggcgttgagaggtgcgtgcgcttggatggcctgacagaagcacaaattgacagtaagctggaggagcttgccaaggctggggggtcgcttaaacctaaataatgtttgcttagccaacctgttcagctttaattatttccaaataagagaaacgcatgcggaggttgttctttatatgatctaagtactatgacatgtcaaattaagcgctgatcttaccacctact

SEQ ID NO: 2280 - DNA, 308 bp, Oryza sativa
  Clone ID: uC-osflcyp043a04b1
cacactttcttgtagaacgcaaacaaacccaggggggggcttatataatccagtgggcgggcaaagacagcacgctgcctctggactaggctcgccgacccctcctcctacagcgagacgatcgtcgcgaggctccgcttcgggccggacaagaagtccgtgcccaacaatgccgcgagggcgccttcccccactacggacactcctctatagccccccgggccagcagctccgtactacctgcacgggtcgttcaccatgcactactggtacgacccaatgggcctcactaagacgcgggagcacct

SEQ ID NO: 2281 - DNA, 265 bp, Oryza sativa
  Clone ID: uC-osflcyp043a07b1
agttgatgcagctagcacactcgagcttaggttggcttttgcaagaaagatcgagctagagatggacaagagcagcaagatgatggcagaggaggaagagctggtgctcgcggttgtcgctgcgcaggaggcgaggaacatcaaggcctcggtgtgaagcagcattggagagcacggacactgtggtacagccgacgaccttcctgccgttcgaccgcttaaggagcgcggggccagtaatagtgggcatgcccagcagcagcat

SEQ ID NO: 2282 - DNA, 467 bp, Oryza sativa
  Clone ID: uC-osflcyp043a08b1
tagttgatgaggcgatctcacacgagcttgtgtcgccttttgaaagaatgatcgatctggaaaatgccaagagcagcgagtagatcgcagatgaggaagatctagaggtaaactttggcgcttcccagaagaagaaaggacttttctcctcgatgtctaacagcattgcagaccacaatctccttgatacgtctgacatccaacctgcccttaaagcgcttaaagatcggcttaccactaatagtgtggatgcccaaaagccacataaactttgtgactctctcccagagtagccttgaaggcaaaaagctgcgatccttcataaggatattctctactgttcagacagctatggaggaggctatctttctatcttaaccaaacgcgatctattgacatctaagggatggacatgctgacacagagcgtgccacgccctatgctattgttttttgtgtagtgaatgg

SEQ ID NO: 2283 - DNA, 429 bp, Oryza sativa
  unsure (1)..(429): unsure at all n locations
  Clone ID: uC-osflcyp043a10b1
ccttcgccatcaaaccggattcgangacttatggatcaatggggggggagggggagggcctctgcgagatcacccggttgccggaggagctcctctcccccgctatctcacccgcctcgccgcgggacgcctgccacgccgccgccgtctccccggtgttccgcgccgtcgtccactccgacgccgtctgggctagcttcctgccgcgcgatctccccgatctcgcctacggcgagctctccccctcgccggcttacaagaaggagctcttcctccgcctctccgatggcccctacctcctatcagaccggctcatgagtatgtggttggacagggagactggggccaagtgctacatgctctcggccagaacgttggtgattatctggggcgatacaccgcactactggcgctggattcctctcaccg

SEQ ID NO: 2284 - DNA, 525 bp, Oryza sativa
  Clone ID: uC-osflcyp043a11b1
tatttgatgaggtgatagaccaggtggttggggggggttttttaagcatgatgggtgtggatgacgtcgtgagcagtgatagtgatgaataagaggaagatggagaggaaaattctggagcttcccaaaagaagaaaggatggttctcctcgatgttcaagagcattgcaggtaacaatgtgcttgataagtctgacatccaacctgcactcaaagcgcttaaagataggctgatgactaagaatgtggctgaagaaattgcatagaaactttgtgaatcagtggcagctagccttgagggcaaaaagttgggatccttcacaaggatatcctctactgttcagacagctatggaggaggctcttcttcgcatcttaaccccaaggcgatctattgacatattaagggatgtacatgctgccaaagagcgtgggaagccatatgttattgtttttgttggagtgaatggagttggcaaatctaccaatcttgcaaaggttgcttattggctctttcaacataacc

SEQ ID NO: 2285 - DNA, 527 bp, Oryza sativa
  Clone ID: uC-osflcyp043b06b1
gtttattgtacttccgtgcgcaggaggccatcgatggtgggcttgcagatacaatcttgcactctttggatggttccttcaaaccaaaggatctgaccgcgcagttggccaaagcacaggagatgcggcaatcggggaagcgcccagcagctggagctgggcgatggtcaactccaagtgtccctagatagactagaacgtcagatcaaaaccatacactagcttaatatcgacgatgatacgcgtggttgttctattcagagcagtctacctgttacatttgcatgcaagaagaaatcctgtcagggtttggaatagattcaggctgacgaaaacgttgcttactgcagtggcttttgtgttattgggtcatgtatgaatacgatgaatatgtagtttatgctgccttcctgccaaggttgttgtatttttcagatagaattcactagtggagatgggtatccagtaattcatgtgaccaagtattccttcttattcatggggatggctctgcatgaagcacacca

SEQ ID NO: 2286 - DNA, 393 bp, Oryza sativa
  Clone ID: uC-osflcyp043b09b1
tgtttccccgccgcccgtccaaaccctagctggggcgtttccgacgccttcaggagaggagaggtaagtcgaagatggtgtccggctccggcgtgtgcgcgccgcgcgtggtggtggacgcgcgccaccacatgctcggccgtctggcctccatcatcgccaaggagctcctcaacgggcagcgcgtggtggtcgtccgctgcgaggagatctgcatgtccggcggcctcgtccgccagaagatgaagtacctccgctttctccgcaagaggatgaacaccaagccctcccatggccccatccacttccgttcccccgccaagatcctctggcgcaccgttcgtggcatgatcccgcacaagaccaataggggagaggcggtgctggcaaggc

SEQ ID NO: 2287 - DNA, 531 bp, Oryza sativa
  Clone ID: uC-osflcyp043b11b1
tcttgggggaggacgccatacctcgcgttctgattgccgccgccggcttggctacgtaccacgtcctgctcactttccggtgagcggagtcggcggcggcttgcgcgggttcctccaccgcgcgccgccgggttctgcccggaacgacatgggctgcgcgaggcgccacaagacggcgtcgagttcggcgacgagcgcggaacccatggacgagggcgaggccgacctcctccagtttctcttcgtcacctccggtgtctcctggggaggcatcgtgggggtcgtcgtcgccgcgaacgcctccgtaccggctgcgcgggtgtggatgctccccggctgtcaccacgctggaccgggagctgtgcggcgacgactgctcgatgtgccagtacgacaaggatgccggagccgtccatcgcacgctctactgcgaccacgtcttccacaaggcgtgcatcgacgtgtggctccgcgagcacggcatggactgccgactttgccgtcgtaccgctagctgcgtgctgccctgga

SEQ ID NO: 2288 - DNA, 533 bp, Oryza sativa
  Clone ID: uC-osflcyp043c02b1
ccgccatggccgccgaagccaaggccggggggcttgtcgaggagtactcactttctccacaggaagccccagttgaaaaggcagttgaggataagccccaggaggctgaaagtattgctgtaacgaatgatgaaacccctcaagctgatgagactgcaacagctgtggaagtgaaccctgaaacttctgaagtgcaagaagttgctgacaagtcagaagttgaagacaccaaccctgctgcagaggaaacaactgagactgctgaggaagaggctgaggagaaaccagagattaagatcgaaacagctccagcagatttccgtttcccaacaacaaatcaaacaaggcactgtttcacacgctatgttgagtatcacaggtgcgtagctgccaaaggggaggatgctcctgagtgtgataagtgttgcaaaaactatcgatctctttgcccaggcgaatgggttgagcgtttgaatgagcaacggtaaacggcaccttcctggactttggagcatgggcaagggagacatacg

SEQ ID NO: 2289 - DNA, 417 bp, Oryza sativa
  Clone ID: uC-osflcyp043c04b1
cttcttcgcgcgcgcgaggcagatctcgacggggagcgcattcttcgacgccagatcccgccccgatcgcccccgcctcgtccccacggtcccgtggatacctctctctctctctctctctctctctctctctcggatcggtgcgattgcctttctttttgcgcggcggtgatcgggtgtgttttggggacggtgaaggagaggagtgaagtgtggaggctaatccaatcgatctggttaggagacctgccatttctgagcttgatttagtttcgatctgctccttgggctgtcaatctggaacggcttagtgggatctgctgctagagcttcttgagtcgtacaggaaagtgtggcgcttttgcggtcagttccaccaccttcaccttgttctcgggccatggcttgcttcgtgat

SEQ ID NO: 2290 - DNA, 416 bp, Oryza sativa
  Clone ID: uC-osflcyp043c07b1
tattagaacaaattgttgaaaacctattacgggggtaccagaaacattagaaaccgcgccggttgattattacatttcctgcagctatctggaatctggagttgtctgaaagagttgccagtgttgcatgagatgaagaccctgctctatttgagtgctgagcattgaacagtacagacgcacattgaatcattttttcaccttggaatgagtactgtgcttccagccaagggattgatatcttccatcatctgtttctttgttcaaatggcacatgttcctgctgcttctgctatccgggcagatatcaaccatctagattaggacatagtatcaaaagttgagaggtacatcatgttgtaacactagtggtacagacaggccttttgaattagaaggcgatcattcagagcctc

SEQ ID NO: 2291 - DNA, 435 bp, Oryza sativa
  Clone ID: uC-osflcyp043c11b1
tgtaggaggagggggtggggtggcgtcaccgggggcttttttggaggagggcggcggatgaagaggaggaggggggccggggatgccgatggcggagctggagcaggtgttccggcggtactacgcgaacggcgaccggaagatctcggcggaggagctggcgtccgtgctgcgggcactgggggcgcccctcggtcccggcgaggtgcggcgcatgatggacgagatggactccgaccgcgacggcttcgtcgacctctccgagttcgccgccttccactgcggtcccacgccggcgcacggcggcaagggcggcgacgccaaggaccaggaggccgcgtctgaggcggagctgagggaggcgttccggatgtccgacgccgacagcaacgggaagatcttcgcgcgggagctccaccgtgtgcttcgccagct

SEQ ID NO: 2292 - DNA, 544 bp, Oryza sativa
  unsure (1)..(544): unsure at all n locations
  Clone ID: uC-osflcyp043c12b1
tgtttccagagcccgccccgcgtctctactcgcggcgccgcgccgacgtctctccggacttcggcgacaagcgagcgacgcaggccaccgcgcgcggttcgttttcgcgagggaggccgccgccgaccagccgccatggtctcgccggacaccatccgcacggccatcggcgtcgtaggcaatggaaccgccctcgtgctcttcctctccccagtgccgacgttcatacggatctggaagaaggggtcggtggagcagtactcggcggtgccgtacgtggcgacgctgctcaactgcatgatgtgggtgctgtacggcctccccgcggtgcacccgcacagcatgctggtcatcaccatcaacggcaccggcatggccatcgagctcacctacatcgccctcttcctcgccttctccctcggcgccgtccgccgacgcgtnctcctcctcctcgccgccgaggtcgccttcgtcgccgccgtcgacgccctcgttcttaacctcggccacacccacgagcgacgctccatgatcgtcggtatcc

SEQ ID NO: 2293 - DNA, 519 bp, Oryza sativa
  Clone ID: uC-osflcyp043d03b1
ctgttagtatttcaagcccagtggtcgtcgtcggggtgtccaaactccaatcggtggtcgtcggccggagcctgcaccaccgccacgcacggcggctataaatacgaggcccccgcgggcgcgagcacgcaggggcgcagagggggagatggaaatggaggcggaggattggggggagagctcgtcgtcgccacggccacacccagaggcagacatggtgaataaagagaaggaccccgaggagatgaagaggaagctgaaggagcgaatcctggagctggagaaggaggaggtccccctacccgacgacgcctacgccttcgtccaccacctgtcgcgcctccccaaaaggtatcttttcgacctcggcgttgacaggggggacgacgtccttctccactggaggatccttaccccatgtgcccaccccagaatcgccccgttttcacgcccgcttcaaaagttcatcctttaccggatccgatttcgaccatgccaaggctatggaagacctcattt

SEQ ID NO: 2294 - DNA, 494 bp, Oryza sativa
  Clone ID: uC-osflcyp043d06b1
cttttctgtgagcgagagctgagttgaatgcaggggggattggtggacctgggctgccggtttccaaggataataaaaactacctcccccgctcgctgctacgcccacccggcgctctgtgccctcctccccgtgtttatttatacgctcccagctaccactcttcacaaagcgatagccggaggaagaagaagaagcaacagcagcagtcaagccaacccgtccggcgagcaagaagcaaccgaggcagcaaaaggaggaggagggaggactccactgttcgcttgtatcgtcttatgggggaagaggatatcagcaacgacagcaagagcagctgcggctgcgaggacggcacggtggaggctccggcggctgcggcgccgaaggagaacggccgagccgcggacccgcgcctacaggccatctccgacgccatccgcgtcgtcccgcacttccacaagccagggatcatgttcaacgacatcacggcgctg

SEQ ID NO: 2295 - DNA, 552 bp, Oryza sativa
  unsure (1)..(552): unsure at all n locations
  Clone ID: uC-osflcyp043d07b1
tgttatgtatctgttgatggctgggtgtgctgtttgaatgcctagtgtaactgttcctagaaactatggcatcggaagaattcatcagtcttggggaaccttgtgaggctgatgcaaaagatgaagaagagaccaaccttcagactataccccccaatttgaatgaagtcaacccattggcatctgaaggggagtctggtcctgtggataacaccaaggcttcggatgggatcatagatcttgaaggacaagatcaagtggatggggaacctactaccatggatagtaccaaggttcctgatgtaattatagatcttgaagaaggtcaagtggaagacatggatctttcagatgatgatgtagttgtaaaacatcagtatttggatgcttctatccagtccagcaccagtgtagcagatgtacagactctacatggtgtttcagttgaactagataagggtaatgggcttgagaatggcagtcatgcatcgaaagtatccttatcgatgaagcacantcagaggagttaaaagagcccgagtagaatcaact

SEQ ID NO: 2296 - DNA, 545 bp, Oryza sativa
  Clone ID: uC-osflcyp043d08b1
ttatgcatcctcctccgtttcgccggcgacggcgggggatttagaccgacggcggctgttccaccccctcaccggcggtgaagaaggccaacctcctcgacccctactccatcaagcatctcctcgacgagaccgtctccgaggtcgcgaagagcaaggggtacccagaggacgcgcggctgagcaaccggaggctggcggtcggcgcggcggtgatcgccgtcgcgctcctcgcgcagttctacccccgcaagttccccgagaacagggacgtcctcctcgcctgcatcgcgctgtacgcggcgctcaacgtggcgctgcagatcgttacctacaccaaggagaagaacgccatcctcttcacgtaccctcccgcgggatcatttaataggactgggcttgttatatcttcaaagttaccaagattgtcagacatgtttaccctcacaatagcaagtgcagatccacattctaaatctttcagtgaaccacgcccatttccactaagagtgttacaaaatggtcaacaaagatggtgatcttgt

SEQ ID NO: 2297 - DNA, 389 bp, Oryza sativa
  Clone ID: uC-osflcyp043d10b1
ttttaagttctggccaacaacatgtcacgtgggcggtgtttttggggatcgcaaccttatctgcactctgcaacagggatcccaagttgtagaagaagctgcagctgctaccgcatgacgatcttccgataatcacccatatttgtaaaacagcaccaacaagtcataatgctttctgtaggagggaagcatatgctctcttctcgttcagcttcccaacttgtatatagctttgtgacagctcctgattctctccttagctgccaccttctcctgtaatgctttactccattgcttccccattcccgttcaaaggtgaaattagctttattgactagcattgctacactgctgagtacaggaatagaagttatgatttcatcttgaaa

SEQ ID NO: 2298 - DNA, 445 bp, Oryza sativa
  Clone ID: uC-osflcyp043e04b1
gttttatatcgcgagctggacaaccaactacaggtggttatttttaaaaaaggtgcttggttacaacaactttaaatttgtgtacattcaacatgctgcttactcattttaacaaactgtgaattctaccactcgtcatattgggttcttcctctgaaacaatttgctgttacagtaatatgcaggatacattatgtcttttatcgcaccattctcattcttgcattgacgctaggttttacaaagcatgaactttgaatagtctgctgcctcgttgacaatcataccaaacctctatcttcatgccaccatcttcttcttttgtttgttcagggcactgcacaatattattcccagctactgcctatgttgccatcctacttaagaagtccatatttgatgtacattgaggattataatccctttgtaacactaactttttcca

SEQ ID NO: 2299 - DNA, 222 bp, Oryza sativa
  Clone ID: uC-osflcyp043e05b1
ggtattcgggagccgggagccaggaggaacggggtgcggtttttgaaacgggcacccggatcaccaccggggcggaggagaccgggcgccgggaggcggccgcccctgtggcgcaacggaggcccccgggaggcggacgcggccgcgccgccgaggaggccgggcgaggccacagcgaaccgcccgtccgctgaagccggggcccccggccaccgggcgggg

SEQ ID NO: 2300 - DNA, 539 bp, Oryza sativa
  Clone ID: uC-osflcyp043e07b1
tcgtgcaatcccacctccccaactccgccgcacgggtcctcttacccgccaccatggctcgccggagcggcctaatgctactactcctcgccgccgccgctgtcgcctccgcggccgtgccgccgtcgtgcgagcgcatcgagtgcccgtcgtacgaggtggtggacagcgccaacgggttcgagatccggcggtacagcgacgccatgtgggcttccaccgcccccatcgaggacatctccttcgtcgccgccacccgcaccggcttcctcccgttgttcaactacatccaggggaagaacgcgtacaacgagacgatcgagatgacggcgccggtgctgacgcaggtggcgccgagcgacgggccgttctgcgtctcctccttcgtggccagcttctacgtgccggcgaagaaccagccggacccgccgtcggcggaggggctgcacgtgcagaggtgggccggtgccaggtacgccgctgtgcgccgcttcggcggcttcctggcccacttcgacgtcggtgagcaggccgcgctg

SEQ ID NO: 2301 - DNA, 481 bp, Oryza sativa
  Clone ID: uC-osflcyp043e08b1
tttttgatccgaggcatccagctgaatcaaccgacgcttcatatgaatccgttttgaaggttgctcttgaccacggtaaagtttctggtgtgataaagtcgcatgatcgcgttgttgtctgccagaaggtgggagattcctcggttgtgaagatcattgagctggacgattagacaagcagcttgtgctcgtcgtcgatgatactatggcatgttttgccagattttgactaggccaaaaacgttgcttcttggctatgtataatcctatagcttcaaatgagcagtttttcctatggtgtattcataggatttgccttacagcttgaaaccattatgatttagttaaggaaattaaatttgcgcagtatttctgtatcgtatcacttagatgggcaaagggaataatgaattttggtactgaaacctttaaaggtcgatgcgacctatttttcatggatttttcgtaatgctacttgacg

SEQ ID NO: 2302 - DNA, 559 bp, Oryza sativa
  Clone ID: uC-osflcyp043e09b1
ttatttgatggctatggcaatggcggcttcggggggggttatctcaccacctcgccggcgtcggcctcctccccacgccacgagcgagcgggaggaacggccgcagcggcatcaccatatccatgagagcgcagagaaagcagagcggtgactctgggagtgggaagggagacggcggagacgggcgagtcagcggtcggcggcgagtgtggcgtcgccggaaactgaccaaagaggatgacatgttgcggtacaagttggaacgtgtccctttcttagaagagaaagtgagaaaagttagggaaaatgggaagatcatatgcttggacatcaaccagctgatgttatctgaagagaatagatttgctttcacaatagaggtggctgaggaagcttactcttatcttgaaaagaacaggcatgagtatggactgaaaaaacctatactacatgtgctcagtgaccgcatgaatgaagctgggtttcttggccggaagctacctttatcctattcctttaagcccggtcttatttaataaaaagaagggactgaaaaacc

SEQ ID NO: 2303 - DNA, 557 bp, Oryza sativa
  Clone ID: uC-osflcyp043e10b1
tttttgttttgcaggtggaaatgatacttcaagcggtagtttatgagaaaggtattacttttctgtaattttaaatttgtgtacattcaactagctgcttactcattttaacaaactgtgaagtctaccaggcggtagattgggtccttcctctgaaacaatttgctgttacagtaatatgcaggatacatcatgttttttatcgcaccattctgatgcgtgcattgatgcttggttttacaaagcaagaactttgaatagtctgctgccgtgttgacaatcataccaaaccgctttcttcatgccaccatcttcttcttttgtttgttcagggcactgtacaatataattccagctgcctgcctatgttgtcatcctactcaagtagtacatatctgatgtacattgaggattataatccgtttgtaacactaactcttcccatcttattctacagagcatggcaaagtgttagatgagttcttcctctctaccgctggcaagttccagacagagattggaaagaactgggctggtgaagtgaatgcgaggagaga

SEQ ID NO: 2304 - DNA, 555 bp, Oryza sativa
  unsure (1)..(555): unsure at all n locations
  Clone ID: uC-osflcyp043e12b1
cttcgccgctgccgccgccggtcgcacgcctcggcccaccgtcggcgcgagaagatgctcgacatcaacctcttccgcacggagaagggcggcgacccggagctgatccgcaagtcgcagcgcaaccgctccgcctccgtcgagctcgtcgacgaggtcatcgccctcgacgaccagtggcgccagaggcagttcgagctcgacaaaatccggcaggagctcaacaaaaccagcaaggaaatcggcaagctcaaggctaaaaaggaggatgcatcggctctgattcagagcacggaagaaattaagaagaggttggctgccaaggagacggaggtgcaggaggccaaaggcacgctggatgccaaactcgtgacgatcggaaacattgtgcacgaatccgtccctgtcagcgatgatgaggcaaacaatttaattgtacggacatggngagagaaagaggatggagggaatttgaagaacacgtggatcttgcagatgcttgacattgagctttggagaaggtgtgagtagcaggtgaggggtactattaaagga

SEQ ID NO: 2305 - DNA, 541 bp, Oryza sativa
  unsure (1)..(541): unsure at all n locations
  Clone ID: uC-osflcyp043f01b1
naatctcaaggatgcgaagcgcagaatactagcgggggtttgacaagaaagagcttttttaacggccccgcctttggaaccgcttcatcggcttatcagtatgaaggtgctgtcaaggaggacggaagggggccaaccatttgggacaaattcgcacatacatttggaaagatcattgacttcagcaatgctgatgttgcagtggatcagtaccaccgtttcgaggaagatattcagcttatggcagacatggggatggatgcatatagattctcaattgcatggtctaggattttcccaaatggcactggtgagggcaaccaggcaggcattgatcactacaacaagctaattaacccattactagctaaaggaattgaaccatatgtaacgctctatcactgggaccttccacaagctttgaggacaagtacactgggtggcttgacaggcagatcattaatgaatatgcggtatatgctcagactgcttccaggcaattggggacagggtgaagcaccggaccaactttaacgagccc

SEQ ID NO: 2306 - DNA, 426 bp, Oryza sativa
  Clone ID: uC-osflcyp043f05b1
tttgtattgcagctgctcgtcacggcaacggcgtcgaccaatttaaggacccacgcgatctagtcgccggtggccgcgccgcgcctgttccgcgccgccgccatggactgacacacccttgcccccaagatcgcctcccacatcgtggccagcgcccaccccgtcgacggtgacggcagcgttggcagcgtcaggcagctcaacttcacctcagccatgccattcagccacatgaaggagaggctggagttcctggacgtggacaagtgcgagtgcaagtcgacgctggtggagggcgtcggtatcggcaaggcgatcgagacggagacgtcgcacatcacggtggagccggcggcgaacggcgggagcgtcatgaatgtggatgccacgtacaagctccttcccggagcggatgtgacggacgag

SEQ ID NO: 2307 - DNA, 498 bp, Oryza sativa
  Clone ID: uC-osflcyp043f06b1
gttcttcgcacttaccccctccatggcgtgatcgggggatttcaacgagagcggcgctttccctctccctgacggcgtcggcctccggcctgtacggcgcgcgcaccaagaagaggaggaagctgctgctgatgccgcggctgccatgtcgcccaatctggagagccacatcaagagccaggtgccggcgctgctgctgaggcgcttcttcggcggggcggggcggcggcgggtgttcgtgcagacggagactgggagcgtgctgggcatggacctcgaccgcagcgacaacgcgcacacggtgaagcgccggctgcagctcgcgctcaacgtgcccaccggcgagacctcgctcaccttcggcgaccgcgtcctggagaatgacctctccttcatccgcccggactcgccgctgctgctcacccgcaacagcatcaaccggagctgctccacgccctgcctctgcccggtgtccaaggactttgagcacaaggatcg

SEQ ID NO: 2308 - DNA, 383 bp, Oryza sativa
  Clone ID: uC-osflcyp043f07b1
tttatttaccaacccaaccgccgccgcatcgggggggtttgattgatggccgcgtcggttctgcaccagaccaccagcttcctcgggaccggccctggacgggatgagctcgtccgccgcgtcggcgactccggtggccgtatcaccatgcgccgcaccgtcaagagcgcgccccagagcatctggtgtggacctgaccgtcccaagtacctgggcccgttctcggagcagacgccatcgtacctgaccggagagttcccgggagactacgggtgggacacggcggtgcgataggccgacccggagacgttcgcgaggaacagggagctggaggtgatccactcgcggtgggcgatgctgggggggctgggctgcgttttccc

SEQ ID NO: 2309 - DNA, 322 bp, Oryza sativa
  Clone ID: uC-osflcyp043f11b1
tttggcggcggcggcgagcgccacatccgcctgccggggcttgtctaacgcctgacacgctggtatcaccgagcccgtgagcacgtccgagcgcgtctgtctcgcactacgctgcacattgtcatctaacccgctcgcaccaacgcctacacctacgcctccgaccacacccacatagccaagctgactctgcttctggaacccagcgacgagagcgcttggactgacgagacgtgctagatgggccactacctagcaccggaccacatctgctactacgagcgagcacagcctgaacaccacactctgctaccgatcggat

SEQ ID NO: 2310 - DNA, 509 bp, Oryza sativa
  unsure (1)..(509): unsure at all n locations
  Clone ID: uC-osflcyp043f12b1
tattaaaaggaaaaaaaaacaaaacacaccaggcggaattaaagcgacaatggggtcgctcaccaccaacatcgtcctcgccgtcgccgtggtggcagcgctggtcggcggcgggtcgtgcggcccgcccaaggtgccacccggcccgaacatcacgaccaactacaacgccccgtggctccccgccagggccacctggtacggccagccctacggctccggctccaccgacaatggtggcgcgtgcgggatcaagaacgtcaacctgcctccctacaacggcatgatctcctgcggcaacgtcccaatcttcaaggacggcaggggatgcggctcatgctacgaggtgaagtgtgagcagccggcggcgtgctcgaagcagccggtgacggtgttcatcacggacatgaactacgagcccatctcggcgtaccacttcgacttctccggcaaggcgttcggcgccatggcttgcccggngaggagaccgagctccgcaaggccggcat

SEQ ID NO: 2311 - DNA, 471 bp, Oryza sativa
  Clone ID: uC-osflcyp043g06b1
catcgtcctcaccgtcgtctgcctcaacgtcacggcgggttgtttcaacgccggcgccactcgactcctccggctacttctccttcctcaccgtcaccatgcagaccaccctcgccgcccgcaacggcaacgagcgcgtgggcatctactacgaccgcgccgacgtgtacgccgagtacaagggcctccgcatcaccgtgccgacgtcgctgccgccggtgtaccagggccacccggacctcaccgtctggtcccctttcctctccggcaacaacgtccagctcccgccctacctcgccgtctccatcacccaggacgagaccgccggctacctgctcgtcaccatccgcgtcgacggatggatccgctacaaggccggcgccttcatcaccggacactaccaccttcgcgtcaggtgccccgccctgctcatcgtcaacgacggccggtgaagctacggctccaactccg

SEQ ID NO: 2312 - DNA, 356 bp, Oryza sativa
  Clone ID: uC-osflcyp043g07b1
ttctcttcctgccagttcctccaccgttgaggggggccttttattattgtacaggcctaaatgatccctcactcactccgtagtcagcacagaagtgacctttatttaaccttctcggcaccactcagctgttagtaagtatatacatatccatcagcacaggagtatgattaagttagcattttatgcttggaaaaacagccactgatgtacggccacgactgtagatccttctctttaggtgaatgatgcattttgattgatcctgttaggtttagtggaattatgagttcacccgctttaaaaaagaaaaatctttaataataatattttaaatttattctactaaaccaatg

SEQ ID NO: 2313 - DNA, 424 bp, Oryza sativa
  Clone ID: uC-osflcyp043g09b1
ttggttcaaattagtttgaatgtacaagctgatgtggatgtttatcatccctctatctctcacccatttttttcttgaattttcttgcgttaaccatagcttctcttctggatttggaatttttttttccgccgcctctccgacgactgcctgccgccgccgcctcaaccgacatcgccgatccggtctcccgtcgttgtccctcggccgctgaagtctcctcggactgtctcaaccggcatcaccgccgccaccgccgtccctccgccactcaaatcgtcacgcatcgccggtctcctccgacaaactgctttggcgacctcctcctcggcctccgcctcaaccgccgcctatacggagccacgccgccgttcctccgccgccgaaaggttaaactttttaattgcatctcagacttttgcat

SEQ ID NO: 2314 - DNA, 413 bp, Oryza sativa
  Clone ID: uC-osflcyp043h01b1
gtaagcatatcaagcggcggccatgacggtgggattttcgtactccagcggggtattgccacgcaacttccggttgctggaggagctggagcgtggcgagaagggcatcggcgacggcaccgtcagctacggcatggacgacgaccgcgacgacatcttcatgcgctcctggaccggcacaatcattggaccactcaacatctgtgcacgaggggctgcatctaccagctgaagctcttctgcgacaaggactaccccgacaagccgcccaccgtgcgcttacactccaggatcaacatgccctgcgtcaaccctgacaccggactggtcgaaagcaagaagatgcatatgctggcaaactggcagagggagtacaccatggagaatatcctgacacagctgaagaaggagat

SEQ ID NO: 2315 - DNA, 506 bp, Oryza sativa
  unsure (1)..(506): unsure at all n locations
  Clone ID: uC-osflcyp043h04b1
gtttgttaagaaaaaaaaaagagataaaaaaaaaggtggttttattgctcctcggcggcgtcgccatggacgcctccgccggaggcggggggaactcgctgccgacggtgggggccgacggggccaagcggcgggtgtgctacttctacgacgcggaggtggggaactactactacgggcaggggcacccgatgaagccccaccgcatccggatgacccacgcgctgctcgcccactacggcctcctcgaccagatgcaggtgctcaagccccacccggcgcgcgaccgcgacctctgccgcttccacgccgacgactacgtcgccttcctccgctccgtcacgccggagacccagcaggaccagatccgggcgctcaagcgcttcaacgtcggcgaggactgccccgtcttcgacggcctctacagcttctgccagacctacgccgngggatccgtcggcggcgccgtcaagctcaaccaccgccatgacatcgccatcaactgg

SEQ ID NO: 2316 - DNA, 469 bp, Oryza sativa
  Clone ID: uC-osflcyp043h05b1
ccccacccttccttcctcgaccacagcgggggctttttcggcaggagacggggagaggaatcgcgatggcggcggaaaaaggaagtccgttgccgaagtttggggaatgggatgtcaatgatcctgcttcagctgagggattcactgtaatctttaacaaagctagagacgagaagaagactggtggcaattcacagggacaagatttggccgcaaaaagtgaacagccatctggacaagggttgtatccagcaaaaccgaacagttccaagaaatggttctgctgcatgcaacctactgctgctgaatcttgaagatcatgggctgattggattgtggaagcgtctaccttgttaaaatcagaaaaaactccacgatatccatgggaacttgtttgtgggtttactgtgtggtgaagatgttatggcggaacatgttatattacttctatggtgtgtacattatttac

SEQ ID NO: 2317 - DNA, 426 bp, Oryza sativa
  Clone ID: uC-osflcyp043h10b1
cttatagagcagcgtcgcctctcctcctcctgccggacccctacgcttccagaaccttctcgaagctcccgctcccccccccttccgctccaatggcgaaggaaccgatgcgcgtgctcgtcaccggcgccgcaggacaaattggatatgctcttgtccccatgattgctaggggtgtgatgttgggtgctgaccagcctgttattctacacatgcttgacattccaccagctactgaatctcttaatggccttaagatggagctggttgatgctgcatttcctcttttgaagggaattgtcgcaacaactgatgttgtggaggcctgcactggtgtgaatgttgcggttatggttggtgggttccccaggaaggagggaatggaaaggaaggatgttatgtcaaaaaatgtctccatctacaaat

SEQ ID NO: 2318 - DNA, 519 bp, Oryza sativa
  unsure (1)..(519): unsure at all n locations
  Clone ID: uC-osflcyp043h11b1
tttgttaagcagcatcaccaccaccaccaccaccggcggttcttacccggcggcggggaggtccctcggggcgaagcggtcgctggagagcacggacagcatggcctccggcaccggaacttccgccgccggcgacgagcacgacgacgacaccgccgcaccggccaaggcacaggtggtaggatggccaccagtgagggcataccggaggaacaccttccatcaggccgccgccgccgccgccgcaaccaagaagggtggtgatgagaaacagaagcagcagcagcagggaggagggctgtatgtgaaggtgagcatggatggggcaccatacctgaggaaggttgatctcaagatgtgcaagggctacagggagctgagggaggcactggatctcctcttcaccaagtgcttctctgcaaccgcctctgacggatgcagcgatggccagttcgccattgcctacgaggacanggacggtgacctcatgcttgttgagatgggccctgggaaatgtca

SEQ ID NO: 2319 - DNA, 477 bp, Oryza sativa
  Clone ID: uC-osflcyp043h12b1
gttaagtcggcgctcgagtcgatcaagtcggcgggggagaagtcgaaggcgatcggcgaagccaagacgagcgacagcatgacggagagcgcgcgcgaggactgcaaggccctcctggaggactccgtggacgacctcaggggcatggtcgagatggccggcggcgacgtcaaggtgctgttcagccgctccgacgacctcgagcactggctcaccggcgtcatgacattcatggacacctgcgccgacgggttcgccgacgagaagctcaaggccgacatgcacagtgtgctgcgcaacgccagcgagctcagcagcaacgcgctcgccatcaccaacaccctcggcgccatcttcaagaagctcgacctcgacatgttcaagggtgagaatcccattcaccggagcctcatcgcggagcaggaaacggtgggcggctttccgtcgtggatgaaggcgcccgacaggaagctgctc

SEQ ID NO: 2320 - DNA, 401 bp, Oryza sativa
  Clone ID: uC-osflcyp044a01b1
ctagctctctacaggaaagagaagggagaaaaaaaaggtggggggatcggacccaaaccctcccaaaccccattcctctcaaccatggcttccctcctccgccggttctccgcgctccccgacgtcgatcacccgtctgcgcccgcctggacccccaccacccctgtctccacgcgctgctgcatactagacctccagctcgccgtccgcggcgaggccgacccggcccgcatccactccctcgcggccaccgcgctctaccgccccgacgactacccgtgcctccacggctcccgaccgctcttctccctgggcgcctcccgcctcgcgcgcctgcgccgaccggacctcgccgcctggctcctccgcgccctactggactccagcccggcgtccccggg

SEQ ID NO: 2321 - DNA, 397 bp, Oryza sativa
  Clone ID: uC-osflcyp044a02b1
gccattgggaggggcgagcaggaggcagcagccagggagggtttgagtagcatggaggagttctgggggttctacctgacccatcactccaagcgctggacccggcgaggagacttccttggcacgcctcccgtgctctcctgctcgctcctcaggggcggctactggcgcccttgccactacataacggcccgtgctgggtgactaggtcgtggggcacattcacttattaggggagggcaacctgccaatcacatgcggccacccccactggactttcctctgcgacctcacgatgctaagcctgattctcactggcacgcatagactgcgagctaagatgagtccaactccagaccactgacgactgcctgggtgcacttgcacaccgagactg

SEQ ID NO: 2322 - DNA, 509 bp, Oryza sativa
  unsure (1)..(509): unsure at all n locations
  Clone ID: uC-osflcyp044a03b1
cacccaccctctcgccgtcgcagatccgatccaggaagagctcgccgccgccgctgccatggcgctctccgtggagaagacctcgtcggggagggagtacaaggtgaaggacctctcccaggcggacttcggccgcctcgagatcgagctcgccgaggtcgagatgccggggctcatggcgtgccgcgccgagttcggcccctcccagccgttcaagggcgcccggatctccgggtccctccacatgaccatccagaccgccgtcctcatcgagaccctcaccgcccttggcgccgaggtccgctggtgctcctgcaacatcttctccacgcaggaccacgccgccgncgacatcgccagggactccgccgtcgtgttcgcctggaagggggagaccctcgaggagtactggtggtgcaccgagcgctgcctcgactggggcgtcggcggcggccccgacctcatcgtcgacgacggcggcgacgccacgctgctcatccacgagggcg

SEQ ID NO: 2323 - DNA, 479 bp, Oryza sativa
  Clone ID: uC-osflcyp044a04b1
ctattttttacctccacttctgctggttgaaggcctttgggtccctcctccctcgcgtcgtgcccggcggccggccgggcgtcattctcgtctctcggccaccatgacgacgatggacaagggccgggcgctgcccaagtttggggagtgggacgtgaagaatccggcgtcggcggagggcttcacggtgatattccagaaggctcgcgacgacaagaagacgaccggccccgggaacgccagggtggggataccgccggccttccggagcaccgacgacgacggcggatacaggcccgaattcaagcccgccgagagctaccagcaacacacgccgtccaagcgcgtcaagaagaagtgggcattctgcgccgggtgttgattatctggcttctgctgctgctttttcggatgaggcggatcgcaattattcacaattgccgcaccagaagtattcctgatgggagcaagagcaaaat

SEQ ID NO: 2324 - DNA, 221 bp, Oryza sativa
  Clone ID: uC-osflcyp044a05b1
gccatgatcaagagccccgaagaggcggagaagtactaggcgttgaccaaatctgctcttggcgatgtcctcgccaagctaggctaggatcggcataatggccatatggtgattgggtgtttttatgtttgatcatatggaaccggcaatgtaccctgcatgttgatattgtatcagcaagcacttacgtatgattcaatcttgagttgatgttgacggct

SEQ ID NO: 2325 - DNA, 494 bp, Oryza sativa
  Clone ID: uC-osflcyp044a06b1
gcggtcttgccaggttgaagtgcgacctgagaatgctgaagggagcaatgaacagatgaaggcacttgtggaagcactcggcatccccgtacttgtggagaatctcgatacaacctcagtgactgacaccccgatactaaatcagcagttcatgtaccccataccatatatagaagagggcacgacgttgggacctctgaatgcgcatgagattgcctgtcctgaaagcagtggttaccatgcagctagaggtgagcttcagaatcagcctagaaccagcggctgcagtacaaacatgctcacagaagcattgggactgcatacaattggcaccagatcaacttctagtgagcgagatggaaagggagacaggaccatcatcgagctatacccagcagaaagaaggcggttagcgatcctgctgctcaggcctgggcactatgacattgtttgaaccaagaagaccgacctttctctggagtctggaatacgta

SEQ ID NO: 2326 - DNA, 506 bp, Oryza sativa
  Clone ID: uC-osflcyp044a07b1
ttgatacacaggagtgagggagaagaacataggggaggatagagcgagagagagagagagaggggggtagcaaagcaacttagctagctttgctagccatggcgaggagctctccttgcctcgccgacgctgtgctcctccttggagtggcggcggcggcgattggagcctttgctgatgaagaagcggcgagcggttggggactagggcatggcgcccgtttcctcagcaggcgaggccgtgctgcgtatgagaagtcgtcggagccagaggcaaagcctgcgtcgcagcaggagccgaagtcggattcttactcgcaggcaaagcctgggccaaaagatgagcccaagccggagccagaggcaatgtctgcgtcgcagccggagtcgaagccggcaacttactcggagtctaagcccgaatcaaaggcagagcctgaatcataaccagagccaaaggcagagtccacgccacaaaccagagccaagtcagagcctaagtctgag

SEQ ID NO: 2327 - DNA, 239 bp, Oryza sativa
  Clone ID: uC-osflcyp044a08b1
cggacgcgtgggtaaaatttcgaacgcagccatggccgcatagcccttcgccccaagttcaaacacctcgctctctctctctctctctctgcccgtacactcggcgcatcgcctcctcaggcggcaacagcggcggcggcggcgatggagttccagcagggcggcgggggcggttgctgtgccctgccaggttcgggacaagttctcggtctaccggaccccgaacctcgtccgcgcgc

SEQ ID NO: 2328 - DNA, 280 bp, Oryza sativa
  Clone ID: uC-osflcyp044a10b1
atatatatgcaaggttgttatgaaatcataatcggggtaaattgcaacataaagaatgtcggttgtgaaaaaaaaaaaaaaaaaaaaaaaaaaaaaaaaaaaaaaaaaaaaaaacaaaaaaaaagaagcacaaaaagggcgggcagtttaacggtaccaaaataaaaaaacacaagcatgcaaaaacaaaactttcaaaaagggacacctaaataaaaataaaaaaaccaccgtttaacaaccctcgtgattgaaaaaacccagcctcctcccaactaaa

SEQ ID NO: 2329 - DNA, 452 bp, Oryza sativa
  Clone ID: uC-osflcyp044a11b1
ccatccttacttccctggccgacccacccctcccttttttattttaacaggctcacttattcctcctgggggaattttaaatacatcatgggggtcaacaacactcggtttccccattactttgttgaacaagcacaattctctctctatggatggctcatacaagtttactaaacttacaggctggttgctctagtcgcatggtagatatcaacatgacatcggcaatactggatgttgatattgcatcttgcttcttgataatgctctacaagcttatgtctcactggtttgtggagcttctggtggtcatcttttgcattggtggtgtacagggtctgcacacttgctttgtggctttattgtcaccattgttcaaacctgctgccgaatctttcgtgaaactgcccttctttggagcggtttcataccttacaatcgcagtctgtcca

SEQ ID NO: 2330 - DNA, 503 bp, Oryza sativa
  Clone ID: uC-osflcyp044a12b1
tattgggatgctcgcctgccgggaccggcccggactgactggctggacccacccacgcgtccggtgtggatcagatgcgctggctgtgcccgcttatgggggctctggacagatgaacgcactcgatatgcaggtgcatcatttcttatttatttccatatttttcgtgtacatcattgtttaattttaggaaacactttaactgcttcatgttgttactacctctattctgaaagagaggtacttacagtttcagcggggagattcatcttgcaggacaccattcatcttctttaccatggttcggttaacaaaagcttaattatattctaatgatcatatgtaattatgcctcacttctattaagggaatttttctttacttcagattatttcatatgaattcagttgtcaaaaaattccatgttaattattggttctactggtacattatatattgtacaatatagtgatgccactttacctagcttgatagaatgacat

SEQ ID NO: 2331 - DNA, 516 bp, Oryza sativa
  Clone ID: uC-osflcyp044b02b1
gtgtttttgttcattactgagtttttcaaagaatatctgaaggagaacactttagatgatcttattgcacttttgaagaaaggcaaaatggaggacaatttgctggaatttttcccatcggcaaaaagaaccttcgaggctttatctgaacatttcactaaagaaggtctgacaagtcttgttgagtacaatgaaaagaagatgtttgaggttaaacttaaggagataaagttaacactgacaacaatgatcaatgaagaggctgaaatatctgaagtcacagaagctgtcaagcaacaggtgaaagatgctaaatttcctgatatagaggttgttcgcatgctatgggatgtgctgatggaggctgttcagtggtctgggaagaaccagcaacaaaattctaattcagcacttcggcaggtgaaagcatgggctggccttttgaatgcattctgcacaagtggcaggcttgaactcgaactcatatacaaagttcagacacagtgctatgaggat

SEQ ID NO: 2332 - DNA, 450 bp, Oryza sativa
  Clone ID: uC-osflcyp044b06b1
atgagctgtctcagttacacgcctgggagatcgaacagaagcagaaatccccaacccaatcggtggaggaagagaagggcggcggcggcgagcggagatggtgaggaaggcgaaggtcgagttcgacgagagcccgacggatgacttcgacccgaagaacccgtacggagacccggtggcgatgctggagtacagggagcacctggtgagggagaagtggatccagatcgagaccgccaagatcatccgcgaccgtctgcgctggtgctaccgcatcgagggcgtcaaccaccaccagaagtgccgccaccttgtcgaccagtacctcgaggccacccgcggcgtccgatggggcaaggacgccctgcctccggagctgcacgatcctcaaaaggtggttgaggccgacgagtagctctgctgctgctgctgctcctgggctggagaggt

SEQ ID NO: 2333 - DNA, 328 bp, Oryza sativa
  Clone ID: uC-osflcyp044b07b1
gttcggacctggaggagcccgacggtaggaccgaatcggctgaggtatccgacggggatgatgctccaggagcaggaggaggagaacgcggtgctgccgcaagccgaggagggcaagccgctggagagcgctcgtctcgtggaccgacagctgcgccacctgccggaggcattcgaaaggatccaagggcttcgagtgctcaatgattggcgcaatcaggtacaggatattccatatgctctaggaggacttgatcatgtagaaaagcttcatgatgctaacaatgcacatgattcttattactgattccattgcactgctcttgaat

SEQ ID NO: 2334 - DNA, 511 bp, Oryza sativa
  Clone ID: uC-osflcyp044b09b1
atcctttcccaaaattagccccgatccgatcggttcctagccctgattcgaggtaaaaaaggggaggagaagatgagggagatcttgcacatccagggcgggcagtgcgggaaccagatcgggtccaagttctgggaggtggtgtgcgacgagcatggcatcgacccgacggggaggtacgccggcacgtcggacctgcagctggagcgcgtgaacgtctactacaacgaggcgtcgtgcggccggttcgtgccgcgcgccgtgctcatggacctggagccgggcaccatggactccgtccgcacggggccctacggccagatcttccgtcccgacaacttcgtcttcggccagtccggcgccggcaacaactgggccaagggccactacaccgagggcgccgagctcatcgactccgtcctcgacgtcgtccgcaaggaggccgagaattgcgactgcctccaggtttccaggtgtgccactcgctgggcggcggcacgggctccgcatg

SEQ ID NO: 2335 - DNA, 520 bp, Oryza sativa
  Clone ID: uC-osflcyp044b10b1
tttgttcaagggtcagactgtgggagtcatcggaggtggtcgaatcggctcagcttacgcaagaatgatgatcgagggcttcaagatgaacttgatctactacgacctgtatcagtccacgcgccttgagaaattcgtcacagcttacgggcagttcctgaaagcaaacggagagcagcctgtgacatggaagagagccgccaccatggaggatgtcctcagggaggccgacgtgattagtctgcaccctgtgttggacaagaccacttaccatctgataaacccggaaaggctggccatcatgaagaaggaagcggttcttgtgaatgcaagtcgaggaccggtgattgatgaggtagcactggtggagcacctcaaggccaaccccatgttccgcgccggtcttgatgtgtttgaggatgagccttacatgaagcccggcctcgctgacatgaagaatgccgtcgtcgtacctcacatcgcatctgccttcagtggacgcgcgaaggactgcaacact

SEQ ID NO: 2336 - DNA, 522 bp, Oryza sativa
  Clone ID: uC-osflcyp044b11b1
ttctctctctctcgcaccaccgctctcttccgccggtgcggctcacggctacgcagctctcttcccctcctcctcggctccgctctcttcgatcgatctagggtttggtcttctgttgggggattgttgttgctcttccgcgcgatcgatcgacgccgcgtcctgagggtttgaggggtttccgccctcccgccgcacgcccgcacccccgcgatgtccggccggagctcgccgatgtacgaggggctcgcgtcgcgtcccgacgagtgggacgtcgtcctcaaggtgaagtatggtgaaactcttaagaggttcggtgggtatgtgcaaggaccacaattcagcctgaacttatccgctctccggtccaagattgcatctgcttttaagtttggttcggatgtcgacttcattctgacttacactgatgaggatggggatattgtcatgctggatgatgatgatgatctgcatgatgctgctattcatcagaaactgaaccccctcaggattaatgtcagt

SEQ ID NO: 2337 - DNA, 514 bp, Oryza sativa
  unsure (1)..(514): unsure at all n locations
  Clone ID: uC-osflcyp044c03b1
agcgccactctctcctctcctctcctccctgccccccaggcatcctttgtgccccacgcgcccacgttggcggtgcggttgatccggcaacagcgggcgcctcctcctncttcgtccccaaccaccacccccacccccgcggcgcccatgggtgtccgttcctgagcacaccccacgcttccgctccgcgcatctccgtgggtgggttgggcatataccttgcttcagtcgctttcccatctcttgcttcgtcctgccttcttctttcttccgtgatcccggaacccggtggtcgccgccgcctcggtggatcttcctcggccctgcggggtgctcaggattaacagtgaggggacattctgtattcagtaatatcaagtttctacaaataaataggtgtaggaatacctttgatgccccatttacactgtttgtgcaatgtctttatattctattttctgtgggaacttccatcaactaaggaattcaataggaaagctgtctagtaccagtt

SEQ ID NO: 2338 - DNA, 359 bp, Oryza sativa
  Clone ID: uC-osflcyp044c04b1
tgagaattgagtctggatatcccaggacttcgatcctggattcctcattccctaaatgagggaagcttctgtaaaaagagatttgtacctgagcaataagccagcccgaccccccctctcttgtcttctgtggatgagatgagagagctgttcttagtcttcagtatccaccctgtaaatgtgtaatcgattaggttgcttcggatcgtgtcggtatctttcaggatttgctatgggtcgtggataaagtgttcattggttctttttaactcgggcttgcccatgtgcaaaattagaattcaagtcaaaaaaaaaaaaaaaaaaaaaaaaaaagaagaaaaaaaaaaaaaaaaaaaaga

SEQ ID NO: 2339 - DNA, 526 bp, Oryza sativa
  Clone ID: uC-osflcyp044c05b1
acggttgtgttcgccggtgagccgcgtattccattgcggcgatgttacacacaggtcttgtgggtctaacaatagtaccttaattgtggatgagggagagagtgatttgattacgatagtctggactggcagagatgctgtgtccctatctagtgacatcgatgagagggaggcagtgttcagcttctcacggggatagaaaaggagattgcgtactacttctaagacatgaactcggaaaagagattgaatggctagtgaactaattcctgaaagatcgagtttcaagttgactgacaaacgtatcttactcgttccctcaactgctcgactgaaagaactctgcatacgagtccgcatctccttatcgaaaagtaaagcctattgcataggtactccagcttcagaaaaaaggaaacccatctatgatactaatgcaggcctcaggattgatacagaaccacatcatatcgaagcacttactgcgcattagtttatgctgccataaaggataatcaatccaggg

SEQ ID NO: 2340 - DNA, 189 bp, Oryza sativa
  Clone ID: uC-osflcyp044c06b1
cccccccttcctacctccccgcacccccccaccctttcttaacctcccccccccccacccacaaaaagggggatttctttaccccaaacaggggccccccaccccccaccccctcccaggcccaccacgcccccgatccccccccccccccccaagcgtacaccgtggtcccccgataccgcctccccc

SEQ ID NO: 2341 - DNA, 514 bp, Oryza sativa
  unsure (1)..(514): unsure at all n locations
  Clone ID: uC-osflcyp044c07b1
ggaatccgatcgagcgtttcccgagcagtagcgacggaaaatggctgtgacgatggacaacgtcatcaggttcatgttcatccttagcgtcgtctacggcgccgcatatgccaaaaagtctgaggccaaggtcgctagtgctcctggcctagcagcggcggtcaacacggtcttcgacatcaccgagctcggcgccgtcgctgacggcaagacagatagcaccaaggcggtccaggatgcatgggacgcggcgtgcgggttggccgggtcacagaaggtggtgatccccaagggagaattcatgaccgggcccctcaacttcagcgggccgtgcaagggctacgtcaccgtccagatcgatggcaccatgtttggctccaacgacatccccaagtacaacaagggcaactggatcgagatcctccacatcgacaacgtcctcgtcaacggctccggcaccctcgacggccagngcgccgccgtctggaagacgaatgcagatcttgcccaacac

SEQ ID NO: 2342 - DNA, 514 bp, Oryza sativa
  Clone ID: uC-osflcyp044c08b1
gaaaacctcccgtctctcggctcctccgctccttgggccatcttgcggctgaacaggggaggtggcgagcagagcagcggagagcaggggaggggatcctgcaggttttctttagaatggcgacatctttggatatgtcactggacgatatgattaagaacaacagaaattctagggggagaggaaggggtaggtcacagggaggaggtcgaggcagaggtgatggccaaaggttcagctatggttcagggcgtggacgtggtgctggcaccttccgtggaaggggagtaggagtgccttcacgaaggccacttggtgttagtactcggtcatcatcgtatgctattgccaagtcattcaacaaaaccaaggatattgtatggaggcaagatctgtttgaggacagcatggttgctgctggcctttctgtgacagaatctagtacaaagctgtatatttcaaacttgcactatggagtgacaaaagaagatatacaggaactttttttcgagat

SEQ ID NO: 2343 - DNA, 519 bp, Oryza sativa
  Clone ID: uC-osflcyp044c12b1
aaccgaggcacaccgatcgatcgagcaacgggggtaggaaccatggcccgggcgcagttggtgttggtcgccgttgtggcagctctgctcctggccgccccgcacgccgccgtggccatcacctgcggccaggtcaactccgccgttgggccctgcctcacctacgcccgcggcggcgccggcccgtcggcggcctgctgcagcggcgtgaggagcctcaaggccgcagccagcagcaccgctgacaggcgcaccgcgtgcaactgcctcaagaacgcggcccgcggcatcaaggggctcaacgccggcaacgccgccagcatcccctctaagtgcggcgtcagcgtcccctacaccatcagcgcttccatcgactgctccagggtgagctgagctatcgatcggatggatcatttatatgcatacagaagcgcgacggtgggtcgatgtgtggagccgatcgaattctgtatccaatattagtagtatctgtacgtattctggaataaaaagatgagc

SEQ ID NO: 2344 - DNA, 380 bp, Oryza sativa
  Clone ID: uC-osflcyp044d01b1
ctgctactcctgggggggccacccctccattcccccctcgacccacccctccgccggtctctttacttctcgtctaacagatcgtaggggaggctttctaaaactattgggctgacaacaatccttgcaggatatcattagcgaacatgaacttctatgtgcacttcttccaaaaacagccacctgatgctgctccttctattggagcctcactttctgccatacattacccgtctacacccctgctcgtgtcgctgaacacctcctgccaagaacggtcaagattgccccacaatttgatctacccaatccatctcaaaagatgacagctcatctgatgacactgcctgtatgacttcgacacaatctaaaggctttgt

SEQ ID NO: 2345 - DNA, 516 bp, Oryza sativa
  Clone ID: uC-osflcyp044d02b1
atcgtttttcactgccaccgccgccgccgccgccgcctggtccatttacgccggccattcttgccttgtcctccgccaccacaccaccattgccgcgaatgcatgcctcttcttcgattgattgaattcaaagtgtgacctttttgttgtctcaaacgaacgacaaggggtggaaaggtagtcgacgcaagtcgccagttcgatcttgacctcgctcatcggaactagacagcccatgaagaacaagaagaagggtagtcgttgcaaccgcaacgtgagcagcattacatcttccttttccttaatttgcattgcatctctcaatcttctcttgtctgttgatccatggattgatgctcttgtctgttgatccatggattgatgctctagtgggttgctgcaatatcttgatgcagaaatcagatcccgtgatgctggatgggttcaccaagctacctgaagatgtcctgctcaacatcctggaccgtctcaacacccccgacgctgtcagaacct

SEQ ID NO: 2346 - DNA, 472 bp, Oryza sativa
  Clone ID: uC-osflcyp044d03b1
atcgaaacgggtcactgagtctcgcggggtgggcttgcgccggagagggaggcgacacgatcgatggcgatcgcgtccatggccgccgccgccgccgccgcgatcgtcggcgcggtgcgggagcacgtgcgggcgagcgacctggcggtggccggcgcggtgctgttcgcgttcagcgccgccgtgagcgcggtgcgggcgcggcgccgcggggcgccggtgctgtggccgctagtgggcatcgtgcccacgctgttcgtccaccgcgacgacatctacgagtggggctccgccgcgctgctgcgcgccggcggcgtgttcccgtaccgcggcacgtggggcgggggctcctccggcgtcataacctccgcgccggccaacgtcgagcacgtgcttagggccaactttcgcaactaccccaaggtgccctactaccgggagcgcttcttcgagctgctcgggggcggtatct

SEQ ID NO: 2347 - DNA, 464 bp, Oryza sativa
  Clone ID: uC-osflcyp044d04b1
cgtttcattggcggcattgttggtcgtcggctcaggcggcactgaggtcaccttcaggggcggtgagggctctagcggaaaaagtctagagctcgttaccaacgtcgccatctctgaggtggagatcaaggagaagggcggcaaggactgggtggcgctcaaggagtcgtcgactaacacctggtcgctcaagagtgaggcggcgctcaagggccccttctccgtccgcttccttgtcaagaacggtggctaccgtgtcgtcgacgacgtcatccccgaaagctttacggccggctctgaatacaagagtggtatcaacgtctaattaatagacatgcgtactcttgcattgggttgcatgataattattaacctctaaataattttgtcttgaaaaagatcacgctacgcgtgagcaagcaaacaattaatttcttgtggttattttgtggtaataagccagt

SEQ ID NO: 2348 - DNA, 465 bp, Oryza sativa
  Clone ID: uC-osflcyp044d05b1
cgtatctttcctcgcgcgtctcctcctcttcttctgcgggacgatttcgttcgtctggccggacagcaccccggatccctcgccccgcgccgcctcctcctcctgagctggaatggaaggtgttgttgtgaggagggtgatcccttcggacaacagttgcctcttcaatgctgctgggtatgtcatggagcataacaggaacaaggcttctgagctcagacaggttatagcagcagcagttgctagtgatcctgcaaagtacagtgaagtttttcttggaaaaccaaatgaagcgtactgtgcttggattttggattctgaaaagtggggaggtgccattgaactttctatcctatcggaatattatgggcgtgaaattgctgcatatgacatccagacaacccgctgagatctgtatggtcaggagaagaactacactgagcgaactatgctcatctatgatgg

SEQ ID NO: 2349 - DNA, 511 bp, Oryza sativa
  Clone ID: uC-osflcyp044d06b1
gtattatgcataaccagtgactatgccatgcaaaatgtgatcctgtagattggtctccgtgtcttggcaccaggtggcatgcaaatacgtcagttgcacaggtgggttctgaggtgtcatgcttgctataaggtgacccaagagattgggaaaatattttgcccaaaatgtggcaacggtggcaccttacggaaggtttcggtaacagttggtgaaaatgggatcactatggcctcacgacggccgcgtgtgacacttcgaggcacaaaattttccctcccaatgccccaaggtggaagagatgccataactaagaatcccattttgcgtgaagaccagctttcccagaaggttctgcaccctaaatcgaagaagtaaaccagcaggacgatgatttcttgggtgtcgaggacatattttcgcacagcggtgaaaagaaagtaccgctgaaacctccagtgaggaaggcctttgcaatgtcagtgggaaacgaatccgaatgacaaccact

SEQ ID NO: 2350 - DNA, 509 bp, Oryza sativa
  Clone ID: uC-osflcyp044d07b1
atcacaattcacaagtgtagactgtaggatgggcgcgctctcttcctgcagccgcctgagcaccggcggcggcgccgtccagcgccgtccccggcggccggcaagcgctgcgaccatcacctgccaccggagctcctcctcctcctcgtcggccagggtagtccgcacaggcgccgccgcggcgcctgccgcggccacggcgcccgccgtgccgcagaccaacgagtgctcgcttccgacatgggcggagttcgagctgggcaaggcgccggtctactggaagaccatgaacggtcttcctccatcggctggagagggcctgatccttttctacaacccggcagcgaccaagatgacccccaacgctcagtttggcatcgcgtttaatggtggttttaaccagccgatcatgtgcggtggtgagccgaggcagatgacgctgcaagagaggggatcagctgatcctcccatatacaccatcaggatacgtgtgccgcagcatgccatga

SEQ ID NO: 2351 - DNA, 517 bp, Oryza sativa
  Clone ID: uC-osflcyp044d09b1
ttcctcgcttcgctccggcctcccccacacagggcgtcctttcagccggcgaggaggccgccaaaacggagcggtaccatgaaggcgacggtggcggcggcggtgggagccgcgggcacagcgggagcttctccagtcggcggcggtccagcgggagatgcaagtgctgctgcggggaggagggttacccgccttcgatcgagggagctagggctggaggcgacgacgggcgctgggggggatgtcgcgtcggatgatccggggccggctcggaagaaggggaaggtccagccggcgacgaagggagccaagggtaaggccgcacgagcggatccccctaccccgccgccgcgtcctagattgccgccgttccctaaatccggcgatcccatggattttctcaagtgggataaagagttcaggaggatctgcgctcttccagaacctgcaggtactgtcatcccttgcactgtcaggaggaagcctacgggccctcgcaccgtcagcatcacgggcg

SEQ ID NO: 2352 - DNA, 514 bp, Oryza sativa
  Clone ID: uC-osflcyp044d10b1
ttattaaccaaggtgcatcacaatgacaatgggatgagatactgtggagcagccgttggcaagggaatttctgatgcatgcccgtggcgatcggtccgtgctggtgcgcggcaacctgcactggtatctgaggcacagagatggaggctgcaagataatggtgttcgatacagcgagcgagtcattccagtggatgcaccacccggcgatacctggttgggtgtctttgttggagatggatagcacccttgtcttctccgcggttgaatgtacgacgaggatcgatctttgggtgctgcaggactatgagaggagcacttgggcatgcaagcaccgcatcgaattgccgatggcgcagattaggcagttcccggagtgtaatcttgagcatcttggctggtctgcgatggttgtttctgtggagggggatgtgctggtcagatgctcgaatcggattttacactgtgataggaagggcaatgtgttggcttctttccagattgatggtcagctg

SEQ ID NO: 2353 - DNA, 312 bp, Oryza sativa
  Clone ID: uC-osflcyp044d11b1
aagggtggccactggcctaaacgtgcgggggattgtgtgaaaactatggcggtggccagaacaaggatctgtatgtgaagagtgggcagcgtactgatatctgtatgtgaaagaaacaacagacttttgagactgttcctggaggaacactgccttatggatgctgtggatcagtgtcatcacatagaatgctcaccctaacagatgaaacggaaggtgatgcctgctcaattagaacactactgttgtaagggtgctcagctgtgcatggagctgctcattgcaggggtgcatatgctcataccaaacttg

SEQ ID NO: 2354 - DNA, 516 bp, Oryza sativa
  Clone ID: uC-osflcyp044d12b1
ttcttcctagcagcagtaccagcactacctgagggggaacctttaaagcgaggtgggggtggccgacgccaccatggccctctcgtccccggcgctggccggcaaggccgccgcgaaggtgttcggcgaggggcgcatcaccatgcgcaagtcggcggcgaagcccaagcccgccgcgtcggggagcccgtggtacggcgcccaccgcgtgctctacctcggcccgctctccggcgagccgccgagctacctgaccggcgagttccccggcgactacgggtgggacaccgaggggctctccgccgacccggagacgttcgccaagaaccgggagctggaggtgatccactccaggtgggcgatgctcggcgcgctgggctgcgtgttcccggagctcctcgcccgcaacggcgtcaagttcggcgaggcggtgtggttcaaggcggtgtcccagatctttcacgagggcgggctcgactacctctgcaacccgagcctgatccacgcgcagagcat

SEQ ID NO: 2355 - DNA, 526 bp, Oryza sativa
  Clone ID: uC-osflcyp044e02b1
accttattttactacgggggcgggctcgatccaaatgtgcggccactttgagctgaggaaggcatttgccaaatatggtgatgctgcctctgtcaaaattcctctagggacagcatgtggctctgttcatttcgtcagcagaactgatgcggaagaagcactgcaaggattgaatggaacagaccttggaaagcaggcagttcgcctttcatggggccgcagcccatcacataaacagtctagggctgattctggcagccgaagaaacaatatgtactatgggacgccattctacggtggatacggttatgccttccccgtcccgcaccctaacatgtatgctgctgcatatggagcctaccctgtctatggcagtcagcagctagtgagctagagaagagagagagagagagcttcattccattccctccaatggaaaacaaggatttggtccggtcagcatggtagcgccagatgtgaggttatagaacgtcctacaagcgagtgaaacaggtaaaatgaatgt

SEQ ID NO: 2356 - DNA, 378 bp, Oryza sativa
  unsure (1)..(378): unsure at all n locations
  Clone ID: uC-osflcyp044e03b1
aaaaaaacccattcattttgtgtacacaatcggttggggggatcaggtctctcgtgcaatcaccggagcagcacgttgcttcgccatcatcagccggcggcggcgccgccggcacaggtcatcgccgtcgacgggtcgctgacggaggtcgccgtcgtcgccgtctcctgccctgtcagcgtatccgacgtgctcggcggcaatgccgggcggctcttcctgtgcagctccgacgcgctctacttcgacgtcgacgtccccgccctcgacggcggcgagctactccggccggngcagatatacttcctgctccccgtgtccatgctcgggcggcccctctccggcgtcgacatggccgcgctcgccgtgcgcgccagc

SEQ ID NO: 2357 - DNA, 469 bp, Oryza sativa
  unsure (1)..(469): unsure at all n locations
  Clone ID: uC-osflcyp044e04b1
cggttattctcaggctcgccgtccacgaggagggggagggatttggaggagatccgggatggctacaagggagacctcncgccacacgtcgctctgcctgtggctcgcgctcgtcgccgccaccctctctctcgcccaggcggtagaatcagaagccgaattgaccaaggtcaccaccaaggtcttgttcgacatcacaatcaatggcaagccggcaggtccgattgtcatggggctttttggaaacactgttcctaaaacagcagagaacttccgagcaatctgcacaggtgagaaaggacttggcaagagtggcaaacctctctcctacaaaggaacgccattccacaggatcatcccaggcttcatgatccaaggaggcgacaccgtgatcggcaatggaaccggctgtgattcgatctatggtggaatgttccctgatgagaacttcaagatcaaccactctgca

SEQ ID NO: 2358 - DNA, 511 bp, Oryza sativa
  Clone ID: uC-osflcyp044e05b1
ctcgtcttctcgtcttctcgccgccgccgcgagcggagggcccctctctccggctaagcctcgccgccgcggcgaagcaaaagcacctccctcttcgccgccgcccgccggcaatggcggggctgtcgctgcggtgcggcgactgcggcgtgctgctgcggagcgtggaggaggcgcaggcgcacgccgaggccaccaaccacgccaacttctccgagtccaccgaggccgtactcaacctcgtctgcgccgcctgcggcaagccctgccgctcccagaccgaggtggacctgcacaccaagcgcacgggccacacggagttcactgacaagaccatggaggcggccaagccaattgatctcgaggcggcgccgccgaagccggccggcgaggccatggatgtcgatgcctcggcaagcgccgagccacaagagatggtggcgccggaggttaacatggagatgctggcggacctcgaggcgatggggttcacgacggcgcgtgccactag

SEQ ID NO: 2359 - DNA, 514 bp, Oryza sativa
  Clone ID: uC-osflcyp044e06b1
tgatcatgtagaaaatcctgtatcgtccattccttgatttcatgggaaactgggtcgggctaattttagtctggaagacagtattccacttaagcatttgaagtcagtaccggatctatttcccaacttgtctttgggcactagcaatgaatatcttcgtaattgtgtcccagaattgccaaatagttcatttctaccaagctttatggcagatattgctggaacttcaaagcagaagaacaagttcatggcagatatatctggccttcttccaggtttggcaatcaacccagttcaacaaatccattcgtccatgcctgaaaatcataagaaggtcttggacaaattaatgatgcgtgctcagtactcctcaagcaagttcttgaagaatgcctcaaataaattcctgaagaagagtttaaaaccagactattggtcagaagatgaactcgatgctttgtggattggggttcgcaggcatggaagaggaaattgggaggccatgcttagagat

SEQ ID NO: 2360 - DNA, 406 bp, Oryza sativa
  Clone ID: uC-osflcyp044e07b1
gtttgtttgattccttggagaagaagaaggaggaggaggagatcgagcagccggtgacgctcgtcgtctacctcccgatctgatccgaggagcgaagcgaacaggggcaagatgcattcgacgaatctgctgctggaggagcccatcaggatggcatccatcctggagccatccaagccgagctttttcccggcgatgaccaagatcgtggggacgctgggtcccaagtcgcgcgccgtcgacaccatctcctcctgcctcaaggccggcatgtcggttgccaggttcgatttctcgtggggagacgctgagtaccaccaggaaaccctcgaaaacctcaagctcgccatcaagtccaccaagaagctctgtgctgtcatgctcgacactgtcggcccggagttgc

SEQ ID NO: 2361 - DNA, 517 bp, Oryza sativa
  Clone ID: uC-osflcyp044e08b1
ctgttctactactggtacctcactaatgatggcatggagcacctgaggaattaccttaacttgccgtctgagattgtacctgctacactcaagaagtctgcaaggccaccaggccgcccatttggctctggcccccctggtgatcgcccaaggggcccacctcggttcgaaggggacagaccaaggtttggagaccgggatggctaccgtggtggacctcgtggtgcgcctggtgattttggtggtgagatagggtggtgctcctgcagaattccagccatcattcaggagttctggtggtagacctggctttggacgcggtggcggcggtggtttcggtgctggtccaacctcttcctccatggagtgaaaggagctcaggattcttgtcgcaggagacattttagtattcaagttttgcagtggtgtttgcagtagagatcaatgcgtagcacctatgttgaaaccttaagagatgcaggtgtaattctcctggtgttgatggcttgagagttta

SEQ ID NO: 2362 - DNA, 525 bp, Oryza sativa
  Clone ID: uC-osflcyp044e09b1
gattgattgattcggattgggaagaagaagagggaggggttcatgggcagcaaggggtacccaacggtgagcgatgagtacctggcggccgtgggcaaggcgaagcgcaagctccgcggcctcatcgccgagaagaactgcgccccactcatgctccgcctcgcgtggcactctgctggcaccttcgatgtgtcgtcgaggaccggcgggcccttcggcaccatgaagaaccccggcgagcagtcccacgccgccaacgccggcctcgacatcgccgtcaggcttctcgaccccatcaaggaccaacttcccatcctctcctacgccgacttctaccagcttgctggcgttgtggccgtcgaggtcaccggcggacctgaggtccccttccatccgggcaggcaggacaagcctgagcctcctcctgaaggccgtcttcctgatgccacacaaggttctgaccacctaaggcaggtcttttctgcgcagatgggtttgagtgacaaggacatagttgctctttct

SEQ ID NO: 2363 - DNA, 510 bp, Oryza sativa
  Clone ID: uC-osflcyp044e10b1
tttttacaaaaacaccacaaaaagcagtcacgggggcattataacacctggtgcctggttgggctatttacgcattgactgttgctggagtccttttcattgcagcagtagctactgccatatatgtattcttctcccgtagaaagaaggataatactgtcatgccatgggctacagggctgagtggacagctaaagaaggcatttgtaacaggtgtgccttctcttgagaggacagagctggaggcggcatgcgagggttttatcaatgtgatcggcactttacctgaatgcacattgtataagggaactctgtcaagtggagttgaaatagctgttctgtccacttcacttaactctgcacaacaatggtctgctcggtctgaggagcaattcaggaacaagatctcggtgctatccagagtgaaccataagaacttcatgaacctgattggttactgcgcatgcgatgagccattcaccaggatgatggtgttcgagtatgctccat

SEQ ID NO: 2364 - DNA, 197 bp, Oryza sativa
  Clone ID: uC-osflcyp044e12b1
tttctaccacccccctatctccaagatcctcgccaccttcctcttcctatacaacaccatcctcacccatatatgggtctacaaatccccctccaacttcaccaccctctacctccaccacatcgcctatcccttctaatacataaacttcccgctcatctacttcaccccctccatctccctatgacacatcaacc

SEQ ID NO: 2365 - DNA, 486 bp, Oryza sativa
  Clone ID: uC-osflcyp044f03b1
cagctctcagttcttcattaaatctttctctcggtagaggcaaacaaagctttgtattgactgacccccatttgcctgacatgccgatcatctatgctagtgatgcttttctatcactaacaggttactcaagagaagaaatcttgggctgtaactgcagattcttgaatggtcctggcactagtgtggaggttttagaacagataaatcaacatatttgttctgagcaagcttgcacggttcatctactaaactacaggaaaggtggaagctcgttccgtgatcttctacatatatctcctatacgaaatgcatcgggcaaggtagcatttcacgtgtgggttcaccttgatgagggtgcaaagtatgattttaatgggctgacccccgaggtatggcagcttggtgctgctggtgcggtgagagtggcagtcagaagcttgtctgcgtcaggaagcctgttgagaccgtcccaatagcattatc

SEQ ID NO: 2366 - DNA, 476 bp, Oryza sativa
  Clone ID: uC-osflcyp044f04b1
gccacttttcattccttctgttccagttgctgctggagggattaacccgttggatttccagcaaaaggtgataaacaatgtggagcatgtcattacccgtatcaaattaatatcaccacattatcttgctgatgaggaggagaattcatctgagccacctcagtcggtctaaagaggcgtcacggatctcgtggaagcggcattatcttcgaggaacctgtgcatgatggatccgacatggcacccgtggttctgaaaagtgaaaacaaactcagcctattgtcgcctggccaaatatttaccatagccttttgtagcctgaccgagattgctcgtaggtgatgtaaatattaaccttatttggcaacaaccgtgaactagtcgtagtctcatcatgtagataagaaatatcggcttttagctttactcgtattagtgctctatttgatatttataaagagatttagtttcagagc

SEQ ID NO: 2367 - DNA, 316 bp, Oryza sativa
  Clone ID: uC-osflcyp044f05b1
aaaaatctgaatatggagtttctgtttggtagtttcagcgatttaaaagcacatgtatcacttgtatggaggtaacaactttacttatgcaagcccgtgttttctgttgcttgtaagcaaaaaaaaagaatcaaaaaaagaaaaaaaaaaaaaaaaaaaaaaaaaaaaaaaaaaaaaaaaaacaagaagaacaaaaaaaaaaaaaaaaaagaaaaagagccgggccttctaaatggaaagatcatagaaagattatggctgatcaaatttacttctccataggggcgacaccttgagaatgcactgacggggacca

SEQ ID NO: 2368 - DNA, 517 bp, Oryza sativa
  Clone ID: uC-osflcyp044f07b1
gttattacaagagaatgcgtgcagctattgagggacatgtaggtggcttggatgcattttctcatggttacgaaaagcttggattcacccgcagcgctgaaggcattacctaccgagaatgggcacctggagcacagtctgcagcattagtaggtgacttcaacaattggaacccaaatgcagatactatgaccagaaatgagtatggtgtttgggagatttccctgcctaacaatgctgatggatcccctgctattcctcatggctcacgtgtaaagattcggatggatacaccatctggcgtaaaggattcaattcctgcctggattaagtttgctgtgcaggctccaggtgaaataccgtacaacggtatatattatgatccacctgaagaagataaatatgtattccaacatcctcaacctaaacgaccaaattcgctgcggatatatgaatcacatattggaatgagtagcccggaaccgaagataaacacatatgctaattttagggatga

SEQ ID NO: 2369 - DNA, 491 bp, Oryza sativa
  unsure (1)..(491): unsure at all n locations
  Clone ID: uC-osflcyp044f12b1
ttcttacacccttaaaaaccctaatcccctnggtngggatttaaaacacatcggggtcggcatagactccgactccgcttcctagctccctgcctccgccggcttcggcgagaacctggtcctcatcctcgacttcggctcgcagtacacccacctcatcacccgccgcgtccgccagctgggggtcctctccctctgcgtctccggcacggcgccgctcgcctcgctcgcgggcctccgcccccgcgccgtcgtcctctccggggggccccactccgtacacgcctcgggggcgcccacgttccccgaggggttcctcgagttcgccgccggcgcgggcgcccacgtcctcggcgtctgctacgggatgcagctcctcgtgcagtccctcggcggcgccgtcgaggccggcgagaagcatgagtacgggaagatggaggtggaggtaaccgcccgctcctcggcgctgtacggngagggggaggtcggga

SEQ ID NO: 2370 - DNA, 349 bp, Oryza sativa
  Clone ID: uC-osflcyp044g01b1
gtgatccgtcagttaacaagatctgtgatggaaggggctgttggagaagccgaaacgggtttgagtacaaggaagctgagaaactgaaggatgattcgactgatatatacctgacaaacatgaaccaacccaagaagaaagaatcagccttatcaaagctctggaagtcgtcccgtgcaaagaacaatgacgtctgcaagaaagatgctgtggagacgatcaatggaagatcatctaatgttctgctatccgtcgggacccattctaccattgacagtggcattcaagaaataggcctcagctcgcctagcatagggcaatggagctccccggattcaatgagcatgca

SEQ ID NO: 2371 - DNA, 392 bp, Oryza sativa
  Clone ID: uC-osflcyp044g02b1
gtactcgttcaaagaaggagagagcttggtgagctgcagagatggccccctccgtgatggcgtagtcggccaccaccgtcgctcccttccaggggctcaagtgcaccgtcggcatgcccgtctcccgccgctccggcaactccagcttccgcaacgtcagcaatggccgcaggatcaggtgcatgcaggtgtggtcgactgagggcatcatgaagttggagaccctatcctacctgccaccgctcaccgtggaggacctgctgaagcacatcgagtacctgctccgttccatgtgggtgccctgcctcgagttcagcacggtcggattccactaccgcgagaaccacagagcccccggatactacgatggcatgtactggaccatgtggaag

SEQ ID NO: 2372 - DNA, 511 bp, Oryza sativa
  Clone ID: uC-osflcyp044g04b1
cagcttcgtctctcctactgctccctaacccctacgctgggagaacttgatcgaagctccggctcccccccccttccgctccaatggcgaaggaaccgatgcgcgtgctcgttaccggcgccgcaggacaaattggatatgctcttgtccccatgatagctaggggtgcgatgtcgggtgctgaccagcctgttattctacacatgcttgacattccaccagctactgaatctcttaatggccttaagatggagctggttgatgctgcatttactgttcagaagggaatcgtcacaacaactgatgttgtggaggcctgcactggagtgaatgtggcggatatggctggtgggttccccaggaaggagggcatggaacggaaggatgttatgtcaaaaaatgtctacatctacaaatcccaagcttctgctcgtgaggctcatgcagcccctaactgcaagggtctggtaggtgccaatccagcagacaccaacgctctcatcttaagaga

SEQ ID NO: 2373 - DNA, 510 bp, Oryza sativa
  Clone ID: uC-osflcyp044g05b1
aatagctttccgtcgtcgaaacccaaaatcttctcttggggtacgtgagaagcgccagggggtcgtcgccgccatgggcgtggaggtgtgcgtcaaggccgccgtcggccacccggacacgctcggcgactgtccattctcgcagagggtgctgctgactctggaggagaagaaggtgccctacgagatgaagctcatcgacgtccagaacaagcccgactggtttctgaagatcagcccagaggggaaggtgcctgtgtttaacggtggtgatggcaaatggattcctgattctgatgtgatcactcaagtcattgaggagaagtacccaaccccgtctcttgtcacccctcctgagtatgcatcagtgggatcaaaaattttctcatgcttcacaacgttcttgaagagcaaggatccaaatgatggttcagagaaggcacttcttactgaactgcaggcactcgaggagcatctgaaagctcatggcccctatatcaacgggcagaa

SEQ ID NO: 2374 - DNA, 514 bp, Oryza sativa
  Clone ID: uC-osflcyp044g06b1
cactttctagctagtgtgtaacacacctactagctagggagctacccgtctctgctaaccaccaagctcgagcaaattaagcaagtgacacagttcagaacaccagcattcgccatggcctcctccccctgcggcggcttcctcgagaaggccaagccctacttcgccatgatctgcctgcagttcggctacgccggcatgaacgtgatcaccaaggtctccctcaaccacggcatgagccactacgtgctcgtcgtctaccgccacgccttcgccaccatctccatcgcacccttcgccctcctcctcgagaggaaggtgaggcccaagatgacgtggtcggtgttcctccagatcttcgtcctggcactgctcgggcctgtgatcgatcagaacttctactacgccggcctcaagttcaccgggccaaccttcgcatgcgccatgagcaacatcctccccgccatgaccttcgtgatggccgtaatctttaggatggagaaggttgacctga

SEQ ID NO: 2375 - DNA, 469 bp, Oryza sativa
  Clone ID: uC-osflcyp044g07b1
cgccgtttattcctctaactacaccgccgactcccccgggtgctgttagaacctttgtggaatggaactacacagtagctatcctgctccggggagggctgaatgatatattcttgacagtccctattgtgattcagaggcaatgcacaaactcgcgcagttcttgctccccggcttggctgcggtatgcattgactgcacgacaggcgatctcttcaagaagccatcaaatgtcatctattacatgaggaaagaaatggtggactactacacgcaaagaagcgagacattaatatccgattcgcttatcgaatcaaaagcaagtcaagatcaagagaacgagatgccggaggaccctcttgagatcgagtgcatcttcatggatgatcttagtagcacgaagaggaacatcatcggccatgtctcatggtggttgatgagcgacagccgcgaagataatattgatgac

SEQ ID NO: 2376 - DNA, 530 bp, Oryza sativa
  unsure (1)..(530): unsure at all n locations
  Clone ID: uC-osflcyp044g08b1
caaattcgctactcgctatcctccttcctccatgattcccttctcgaatcttctcactttcttctgaagtgctccgctccgctccgctccgatccaatccactccgcccgagtcccccacccatcggcacccaccagcgcgagggtgggtggccatcgatcgatcggcccatcgccgattcccgcgggatctgcggcggcgcggggggatttgatcggagggtgaatatgtcgacgccagcaaggaagaggttgatgagggatttcaaacgactgatgcaggatcctccagctggcataagtggggccccacaggacaacaatataatgctttggaatgctgtaatttttggccctgatgatactccttgggatggaggtacgttcaagctgacacttcagtttactgaagattatcctaacaagccacctacagtgcgatttgtttctcggatggttcatcctaacatttatgctgatgggagcatatgnctagatatactacaaaaccagtggagccccatatatgat

SEQ ID NO: 2377 - DNA, 333 bp, Oryza sativa
  Clone ID: uC-osflcyp044g09b1
gtggtgaagaatgccaagccgttcctggagtgggtgcggagctcggatcctgaatgtgaggaagagagatgcgccgaatctcctcccaatcatcggctacttcggcttatcgtcttttcagtatttcgttcgtcatgagtatttccagctcgcgtcatgagtgcttctagtttgtttgtgctgggcgctctcttatctgtaatgttggtcaataaataaacccagagtcccagacagtcctcagagactatgtggtgtcacactccagctggagatctttttatttatcatataagaggcggacagaatggcagtagagctgacactggcgca

SEQ ID NO: 2378 - DNA, 501 bp, Oryza sativa
  Clone ID: uC-osflcyp044g10b1
ttgtttctcctccccctcccggttcggttcagttggggtctgttgacagttcgattggggtttttccttccgttcgggggttggtgggaaagcatggcggcgccggatgttgagtaccgctgcttcgtcggcggcctcgcctgggccaccgacgaccgctccctcgaagccgccttctccacctacggcgagatcctcgagtccaagatcatcaacgatcgggagacggggaggtcgcgcgggttcgggttcgtgacgttctcgagcgagcaggccatgcgcgacgccatcgaggggatgaacggcaaggagctcgacggccgcaacatcaccgtcaacgaggcccagtcgcgccgctccggaggcggaggcggcggtggctactgccagcgcggcggaggcggaggctacggtggcggcggctaccgtggtggtggcggccgctgtggctaccgccagcgccgtgaaggcggctactgcggtggcggcggctacggtggc

SEQ ID NO: 2379 - DNA, 479 bp, Oryza sativa
  Clone ID: uC-osflcyp044g11b1
gtcttgtctcgtctcttctcttctcttctcgtcggggggggattggacgccacctggggcgccgccgccggaggaggagagggcgctccctcgggggtgagcatccagccacctcggcccgttgcctcctcttcgcatctcggccccgcgagattggaagtgagggcagggcagggcggcaggggccatggcggtcccactcgtgctcgtcgtgctcccgctcggcctcctcttcctcctctccggcctcatcatcaacgccatccaggccgtcctgtttctctcgataaggccgttctcgaagagcttgtaccggcggatcaacaggttcttggccgagctgctgcggcttcagctggtctggcttgtggattggcgggcaggggttaagatacaactgcatgctgatgacgaaacttacaaggcaatggggaatgagcatgcacttgtcatatcaaatcatcggagcgatatcgatt

SEQ ID NO: 2380 - DNA, 510 bp, Oryza sativa
  Clone ID: uC-osflcyp044g12b1
ttttcgcgtgggcttgacaagagtagaacaacaggggcatcatcataatctatcacgcacactatcagggcaggtgatcgaatagctaggaagcaagcaagcagagagtagtagatcgagtgatcggaggatggggtcgcggtacgaggtggaggtgacggtgtcgtcggcgcgggacctcaagaacgtcaactggcgcaacggcgacctcaagccctacgccgtgctctgggtcgacgacggcgccaagtgctccacccgcgtcgacctcgacaacgccgacaaccccaactgggacgacaagctcaccctgcctctccccccctcctcccgcctggacgacgccctcctctacctcgacgtcgtccacgccaacgccgccgagggcgtcaagccgctcgtcggctccgcccgcctcccgctccgcgacgtcctcgacgacgccggcgtaggcgcccgcgtctcccgctccctccgactgaagcgcccctccggccggccccagggacg

SEQ ID NO: 2381 - DNA, 354 bp, Oryza sativa
  Clone ID: uC-osflcyp044h01b1
ccagttactaaatcgaacctaccaactcattcccgggggggcgttcttaaaaaaaaagctgggggtaacttctctctctctctcctatctttagaactagcaggtagcaactgcttcgagtgtagtgtggtgaacgtccgatctttcgttcgttcatcaagatgaccgtgatcgactgcgccgtctctgccgacgccggctgcgcagccgcggcggtggtgcagccggggaacgggcagaccgtgtgcgtgaccggcgcggccgggtacatcgcgtcgtggctcgtgaagctgctgcttgagaagggctacactgtccagggcaccgtcagggacccacatgacccgaagaacg

SEQ ID NO: 2382 - DNA, 483 bp, Oryza sativa
  Clone ID: uC-osflcyp044h02b1
acttgatcatgcctatattccccggggtcttttattgaaatccaggcggggtgtgaaaacatttcacaaaaacctgctcaggttgttggtgttctgcactgaaggggctgaaagattgcttgtttatgagtttatgccaaatggctcacttactggattcctttttgacactgtcaggccatcttggtatctacgagttcattctgcactaggaggggcgagctgattgctctatttgcatgaggaatgcaccacccagatcactcagctgacacatagacgatctgaatatccttcttgataacaacctcacagcaaaaatttctgacttctgtttagcaaagctgctcctgatggaccaaacacaaacgcacactggaatccggggaacccgaggatatgttgcacctgaatggttcaagaacattgctatcactgccaaggtggatgtctacagctttggggtgatcctactagagattc

SEQ ID NO: 2383 - DNA, 444 bp, Oryza sativa
  Clone ID: uC-osflcyp044h05b1
cgagatgaatctcacacgtttgtacagcccaatcaggatggttttagaagtactgagggtgtgggcctcccattgttcacttcctaagctgaacgaatccattctcggttaggtactccacaaattcatctattaggtagggccaagcaccttcttcgtcgtagttggataactgtggatcgatcgacttgacaaattccaacagttgagaccatgtgtccctagaaatggctttattatgcctcacctgtaaaaactggcaccaatggtccacaaggggccagtgccttttagcaaagccagcctaccaagggaggaaggaaggaacaagagcatgacgagcccaacgcccgcgaaaccctatgcctagcactcagccaccgccttactttcccctcctaccctaccactggctcgccaccccatccgatcgaacatgcataa

SEQ ID NO: 2384 - DNA, 476 bp, Oryza sativa
  unsure (1)..(476): unsure at all n locations
  Clone ID: uC-osflcyp044h07b1
gtggtagcataacttttcactttgggctaggtggtattaccataaattcacttaacgctagtggcccatatgtcagtcaatgtccgtaacccttatctctctcgaacactggtggccaacaattaacagatactcaacctaatcatagctacccatcatcaacttctctcctgaagcagcttgttggatggaggtttagcttgagagattgcaggactaggagggttgagcttgatgcagtgacgggtgtgggcgagatcgaccgagtggcctgagctgacaaaggtcgagctcaaacttgagctccaatgcacaagcagggattggaggaggtcaagctagattggtggcacgatcttgatggtctgctcaccgccgatggtgaagttcagtgcggagcaacgctcaatgcagctccagtgcaagggcgagcttgatgcantgtanggcaggggcttgatcaccggccagcggca

SEQ ID NO: 2385 - DNA, 496 bp, Oryza sativa
  Clone ID: uC-osflcyp044h08b1
ataaactgaaccgccgcagccgcactcctctggcgcgctcatacattcgtctgtggtctgttccggttgctttggcgggcagctagggtttaggcgcggggccctcccgaatccccgatgtacggcgtcggcgtcggcggcagcggcggcgggaactacgatggcgggggagggaacgccagctccctcttcggcggcggcggattcatgccctcgcaggcgaccaacgccgcggaggggaccagcggcggcggcggcggcttccccaagagtcggaacgcccaggcgctgctcccgctcaccgtgaagcagatcatggacgcgtcccagaccaacgacgacaagtcgaattttgctgtcaatggcatggaggtgtccacgggtaagcttgtaggacgcatgttaaataagcttgatcgggttacggatgtatcattcactcttgatgatggtacaggcagggtacctgtgaatcgctgggaaaacgatagcactg

SEQ ID NO: 2386 - DNA, 504 bp, Oryza sativa
  Clone ID: uC-osflcyp044h09b1
ttcgttcgcatcttccccggagatgccgccgggggggagtatgcatccaccaccgggggccaccactccctcctcggctcgcccacctgcttcgcgcgcccgcggcggcggtgctgccccgtgcgcgccgccgtcgccgtccaggccgaggcgcaggccaaggtctcgctcatccggattggcacccgcgggagtcctcttgcactggcacaagctcatgaaacccgagacaagctgaaggctgcacactcagagttagccgaggagggggccgttgagattgtcatcattaagaccacaggagacatgatcttggacaaacccctggcagatataggtggcaagggtttattcaccaaggagatcgatgatgcactcttgcagggaaggattgacattgccgtccactcgatgaaagatggtccaacatatttaccagaaggcacgatattgccttgtaatctcccacgggaagatgtgagagatgcattcatatgcttgact

SEQ ID NO: 2387 - DNA, 509 bp, Oryza sativa
  Clone ID: uC-osflcyp044h10b1
tttctccaagacaaacatggtcatggtctttggggggattttcaccaaggctagggttgactataaaaagattgtcagggagacatgccgtaacatcggttttgtgtcagctgatgtcggtctcgatgctgaccactgcaaggtgcttgtgaacatcgagcagcagtcccctgacattgcacagggtgtgcacggccacttcaccaagcgccctgaggagattggtgctggtgaccagggacacatgtttggatatgcaactgatgagacccctgagttgatgcccctcagccatgtccttgctaccaagcttggcgctcgtcttacggaggttcgcaagaatgggacctgcgcatggctcaggcctgacgggaagacccaagtgactgttgagtaccgcaatgagagcggtgccagggtccctgtccgtgtccacaccgtcctcatctctacccagcatgatgagacagtcaccaacgatgagattgctgctgacctgaaggagcatg

SEQ ID NO: 2388 - DNA, 493 bp, Oryza sativa
  unsure (1)..(493): unsure at all n locations
  Clone ID: uC-osflcyp044h12b1
ttcttttcgcgcgcgccgccgtcgacacaaccgngggccgttttgcacggcacgaggattgaggtcatcgtggcgaggcagccgaaggcgaagaagcagataaacctcttctactgctccgagtgcgaggagctcgcgctcaaggtcgccgctagctccgacaccatccatctccagtccatcaactggaggagcttcgacaacgggttccccaacctgttcatcaacaacgcgcacgacatccgggggcagcacgtggcgttcctggcgtcgttcagctcgccgtcggtcatcttcgagcagatctccgtcatcttcgcgctgcccaagctgttcatcgcctccttcacgctcgtgctgcctttcttccccacgggctccttcgagcgcgtccaggaggagggcgacgtcgccaccgcgttcaccctcgcgcgcatcctctccatgattcccaagtcccggggcgggccgaccagcgtcgtcatctacgaca

SEQ ID NO: 2389 - DNA, 472 bp, Oryza sativa
  unsure (1)..(472): unsure at all n locations
  Clone ID: uC-osflcyp045a01b1
gtccaagtcgcgtcgcaccgaagcagagtagagaaggagaggagcggagcgccatcagccgtccgatcgagtgatccgatggctctcgctctctccacctctgctgctgctgccgctgccgccgcggcgcgggcgctcgcggcgagggtgacgacgacgaggggttacgccgcgtcggcggcgtcgtcggcgatgaggcgggcggcggcggcggtggaagggaagggcgctgcggggatgacgcaggcgaaggacgggtcgtcgtcgtcggcggcgagggaggtgtcgtgggtgcccgaccccgtgacgggccactaccggccctccaacttcgccggcggcgccgacgccgncgacctccgcgccgcccacctcgcccgcagctacgcccgcgcgtgatgcgcgcgacctcgccgtcgtccgaccgacgacgacgccattcatccatatatatctgctccgcgtcaactac

SEQ ID NO: 2390 - DNA, 532 bp, Oryza sativa
  Clone ID: uC-osflcyp045a02b1
tttacacattaattcctcgcgccccatccatggcatctctctgccatgggctggtcgacctacaagctcgagccgaaggaccagctggacgcctcggagctggcccaacaccgacgtcgagggtttggcagcgacctctatggccgcgccaccaggaagaaccaccacaatggtggcaagagcgggtgcgaaagaggcgacgccgccgaccccatggccggccggcaacatgaggaggagcagccgcggcaagggaagaagggcggccgtggcaagcgcgaggtgcaagcggggtcgccaagcttccggtactactgcgagaatgccgccgtcgcctgcttctgcgaacatcgaggtcaagcaccaacaacgcaaatatgatctgtggatgaactcctggaacttatatcaatgcagtgcgggcctacaaaagaacaaattatacccctaaggaatgagagatgaatcagatgggttattaatcaggagctgcaagcaaattaggcgttaaatgcacgacctttttcgcctg

SEQ ID NO: 2391 - DNA, 497 bp, Oryza sativa
  Clone ID: uC-osflcyp045a03b1
tttgccagtaagctagctaactaactacgtggctatggcccccaccgtgatggcctcctcggccacctccgtggctccattccaagggctcaagtccaccgccggcctccccgtcagccgccgctccaccaactcgggcttcggcaacgtcagcaatggcggaaggatcaagtgcatgcaggtgtggccaattgagggcatcaagaagttcgagaccctatcgtacctgccaccactcaccgtggaggatcttttgaagcagatcgagtacctgcttcgatccaagtgggtgccttgtctcgagttcagcaaggttgggttcgtctaccgtgagaaccacaggtctcccggatactacgatggcaggtattggaccatgtggaagctgcccatgttcggctgcaccgatgccacccaggtgctcaaggagctcgaggaggccaagaaggcctaccccgatgcctttgtccgtatcatcggctttgacaacgtcaggc

SEQ ID NO: 2392 - DNA, 174 bp, Oryza sativa
  Clone ID: uC-osflcyp045a06b1
tctttacctggtcgcggtcccaggtcatcacgttaatgttcgccgtttctgggggcgacgagtagagtgatggcgccagggacggacaaggagagaagagagaatgagcttcttctgggtaattgcctctggagaatctgtgctctggtcgactgatccagccaagacatgggg

SEQ ID NO: 2393 - DNA, 534 bp, Oryza sativa
  unsure (1)..(534): unsure at all n locations
  Clone ID: uC-osflcyp045a07b1
tctctccctcctcccgcgcgcggggtctcgccttaacgtttgccgcatatgggggcgacgagcaaagcgtaggccggagggagggacagggagagagagagagagaggctttctggctcgctctctctgcacgatctctcgtcttgttggattatacagccatgacatggtgcaacagcttcaacgacgtgcgcgccgtggagaacaacctggccaccgccgccgccgtggccgcggccaagaagcagcagcagcagcagcaggtctcccagcacgtcaacctcatcaagacctgcccctcctgcggccaccgcgcgcagtatgagcagagtcagttgcaggcagcggcggcggcgacgatccaggacctgccggggctgccggccggggtgaagttcgacccgacggaccaggagctgctggagcacctggaagggaaggcgaggcctgacgcgcggaagctccacccnctcatcgacgagttcatccccaccatcgagggcgagaacggcatctgctacacccatcccgaga

SEQ ID NO: 2394 - DNA, 554 bp, Oryza sativa
  Clone ID: uC-osflcyp045a08b1
tttttcccccattaagcagaagaggccaggttacttctcttcgctttgtgggggacgaaagaagacaaaaaagtcgaaggagaagagcacggaaaagaaaaagtcacacaaacatgtggacagttctgtgccagtttttaatcttgaagatatagaggaagggattgaaggttctggatttgatgatgagaaatcactactgatgtctcaaatgagcttagagaaaagatttggtcaatctagtgtttttgtagcctccactctgatggaatatggtggtgttcctcaatccgcaactccagaatctcttctgaaagaggccatacatgttatcagctgtggctatgaagacaaaagtgactggggaactgagattggatggatctatggttctgttacagaagatattctcactggattcaagatgcatgcacgtggctggcggtcaatctactgcatgcctaagcgaccagcattcaaggggtctgccccaattaatctttcggatcgtctgaaccaggtgcttcggtgggctcttggttctgtggaaattc

SEQ ID NO: 2395 - DNA, 469 bp, Oryza sativa
  Clone ID: uC-osflcyp045a10b1
ccccaaaccaagccaaccccctcggcggccgtaacacatcggggggacgcagccatggtgctcaaggcgacaaggaccggcatagacgactcggataggaagcggaacggcgactactcgaccgcagaaattccaggctcaggccaacgccgtgaacctgatctgtggcgccaagacccagtccaacgccggagaacacggtgggcgtcatgacgatggccggaaagggcgtgcgcgtgctcgacactcccaccagcgacctcggtaagatcctctcttgcatgcacggactggaagttggcgctgaagcaaaattggctgcagcaattcaagttgctcagctggctctgaagcatcgccagaataagaggcagcagcagcggattatagcttctattggaagccctgtgaaatacgacaagaaagttttggaaacaatcgggaaaaagctgaagaagaataatgtggt

SEQ ID NO: 2396 - DNA, 305 bp, Oryza sativa
  Clone ID: uC-osflcyp045a11b1
tcttaggcccccgtcatccgagacaacctggtcgccctctactaccccccggcgcagggggcccccttaacctgctacgctccctgcacgtatcgactgcctctccagctgcgcctccgacggcgctggtgagcacttgtgctcccaaacacagcagcagcaccagtcggagacgttcctgacggcgtcggagcaccaccagccgatcccgcaggacgaaggggcgcatttgcagagggtggatcagaaggagcatcaccagcagcagtaccatcagcgatcagcacccagcacgatggcggcgg

SEQ ID NO: 2397 - DNA, 546 bp, Oryza sativa
  unsure (1)..(546): unsure at all n locations
  Clone ID: uC-osflcyp045b01b1
tttttgatcttcccaagcttgttgaaggtttaaagcgtctggcaaagtctgatcctatggtcctctgtaccattgaggagtccggtgaacatatcattgctggagctggagagcttcaccttgaaatctgcttgaaggatctacaggaagacttcatgggtggtgctgagattattgtttcccctcctgttgtctccttccgtgagactgttcttgagaagtcctgccgtacagttatgagcaaatccccgaacaagcacaaccgtctttacatggaagctcgccccttggaggagggactggccgaggccatcgacgatggacgtattggcccacgtgacgatcccaaggtgcggtccaagatcctgtctgaggagtttgggtgggacaaggacctcgccaagaagatttggtgctttggacctgagaccactggccccaacatggtggtcgacatgtgtaagggagttcagtatcttaatgaaatcaaggactctgttgtggctgggttccagtgggcatcanaagaaggtgcattggctgagg

SEQ ID NO: 2398 - DNA, 529 bp, Oryza sativa
  Clone ID: uC-osflcyp045b03b1
tgtgtcatatggactcacctgctgaggaactgggagttcgagctggtctccccctgcccggagaccaactggaaagccatggtcgtcggcatcaaggacgaggtgatggtcaacttcaagcggcggaagctcgtcgtcgacaactaggatgccaccttcaaccttaggagtcgatgcttgtcgcgcttttcgccttttttctcttcttttccctttctgtcagtatttgatccgtgtaagtttctgccagctttgtattagggtgtttcagtcgctttaggatcctgtgattggcttcctgccatgaaaaatcaagctcgatctctgcaacttatgcacctctgggtcgcttggcaacgatttgtgtttgtgttattagacttgaagcattctggattgtacctgaatctttgcatcgcacgttatttcatatggctttggacataatgtctgaagtctgaacaaataatacttatatgtaatggaatggaaatgaaaataaaactatggcaatgtgagttgtctctgc

SEQ ID NO: 2399 - DNA, 538 bp, Oryza sativa
  Clone ID: uC-osflcyp045b05b1
ttatgatctgctgctgcaacaagatggatgccaccactcccaagtactccaaggcccgttacgatgaaatcgtgaaggaagtctcatcctacctgaagaaggttggctacaaccctgacaagattcccttcgttcccatctctgggtttgagggtgacaacatgattgagaggtccaccaaccttgactggtacaagggccccaccttgcttgaggctcttgaccagatcaacgagcccaagaggccatcagacaagcccctgcgtcttccccttaggacgtgtacaagatcggtggtattggcaccgtgcctgtgggtcgtgttgactggagtcctcaagcctggatgggtggtgacctttggtcccagcggcctgaccactgaggtcaagtcggttgagatgcaccacgaggctctccaggaggctcttcctggtgacaacgtcgggttcaacgtgaagaacgtcgcggtgaaggatctgaagcgtgggtacgtggcctccaactccaggatgaccctgccaggaggctgccagct

SEQ ID NO: 2400 - DNA, 563 bp, Oryza sativa
  Clone ID: uC-osflcyp045b06b1
ttcttcttcccgctccgaacgcccctcccttcgccgccgcccccgaccatggcgcacgccctcggctgcggcgccgccaccgcccccgccggggtgggtctcctccaccaccacgagaaggctggggcgttgttcagtgccgcaggctccatcgttcgggttcagcagctcagcgggaaggggagcaaaagccaagctataagatgtgcaatgccaagtgcaagtgagcatggtggaatttcaaccgcaacagctagtagtagtgatcaaaagaaaggtggactgcgtggcaaactgaataaagttgttctagcttacagtggtggtttggatacatcagttattgttccatggctccgggagaactatggttgtgaagctgtctgtttcactgctgatgttggccagcgtgacattgaattgggagggctagagaagaacggcaaagctagtggtgcaagccaacttggtgtgaaggacttgaaagacgagttcgttagtgaatacatttacccctgcttgcgtgctggtgcagtttatgaaagaagtatctgctggggact

SEQ ID NO: 2401 - DNA, 550 bp, Oryza sativa
  Clone ID: uC-osflcyp045b07b1
ttcttcactcacacactcagcttaagcgagcgagcgagtgaacgagagagagagacagagatggcgagtgttgcctccttcccggtgatcaacatggagaacctggagaccgaggagaggggcgcagcaatggaggtcatccgcgacgcctgcgagaactggggcttcttcgagatgctgaaccatggcatcgcgcacgagctgatggacgaggtggagcgggtgagcaaggcgcactacgccaactgccgggaggagaagttcaaggagttcgcgcggcggatgctggaggccggcgagaagggcgccgacgtgaagggcatcgactgggagagcaccttcttcgtccgccaccgccccgtctccaacctcgccgacctccccgacgtcgacgaccactacaggcaggtgatgaagcaatttgcgtcggagatcgagaagctcttggagagggtgctggacctggtgtgcgagaatctgcgcctggaaaagggttacctgaagaaagccttcgccgggtcgaacgggccaacgttcggaaccaaggtga

SEQ ID NO: 2402 - DNA, 541 bp, Oryza sativa
  Clone ID: uC-osflcyp045b08b1
tctttcgatacgatacattcggacggtgagggaggcgagtggagtgcgtgtcgacgtgtcctactcatccacgccacgtaaccaattccatctccggccgccgccgatggcctcgcgctcccggtggtcggcgctggcggcgagcgcgctcatccagtgcttcgcggggagctcctactgcttcgccgtctactccccggcgctcaaggcctcccagtcctacgaccagtccgccctcgacaaggtcgccttcttcaaggacgtcggcgccaacgccggcatcctctccggcctcctcgccgcatgggcccccgccggccgccgccgcccctggctcgttctcctcgccggcgccgccctctgcgccgtcggctacctccccatctggctcgccgtcacgggggtcgccccggcgccgctccctctcctctgcctctacatgctgctcgccgcgcaggcgcagaccttcctcaacaccgccgatgtcgtcaccgccgtcgagaatttccccgatcgacgaggcaccgtcatcggcatcatg

SEQ ID NO: 2403 - DNA, 414 bp, Oryza sativa
  Clone ID: uC-osflcyp045b10b1
ttttgagttgttgtaaagttgcgagagagagagagagagatcagttagtttgttgagtggaagcagatcaggaagatgctggagaagctgtgggacgacgtggtggccggtcctcgaccggagaccggcctcgagaagctccgcaaggccgctacaacccgcccccttgtcatcaacaaagatggcgacggcgaggcgagcggagtggcgtacaagcggacgcagtcgatgccgacgaccccgacgacgccggtgacgccgtcgtcttcgtccccgacgacggcgacgacgacgacgccgcggggcagcaacgtgtggaggagcgtgttccacccggtgagcaacctcgccaccaagagccttcgcgccaacctctttgaccgcccacagcccaactcccccacctgctacgac

SEQ ID NO: 2404 - DNA, 499 bp, Oryza sativa
  unsure (1)..(499): unsure at all n locations
  Clone ID: uC-osflcyp045b11b1
tcgtgttgtcattaattgcagctagctatggaggcagcaggcagagcgcaggggggcggccgggcggcgagggaaccatgagcaaaggtgctatcatcggcgcttccaccgtgctggtggtggcggtggtggcagccgtgtgcgtggtgtcgttcaagaacggcggcggcggcaaggaggatggcgagctgtccacgtcggtgaagtcggtgaaggccttctgccagccgacggactaccagcagacgtgcgaggaggagctggggaaggccgccggcaatggcgccagctcgccgacggacctggccaaggccatgttcgccgtgacgtcggagaagatctccaaggccatcagcgagtcgtcgacgctggaggagctcaagaacgacaagcgcacgtcgggcgccctgcagaactgcaaggagctgctggagtatgccgtggacgacctaagacgtcgttcgagaagcttggngggttcgagatgaccaacttccac

SEQ ID NO: 2405 - DNA, 485 bp, Oryza sativa
  Clone ID: uC-osflcyp045b12b1
ttctatcagacaatttactgacatgtgaaatgctgaaatgtttgcaggctgcctatcctttgcgcatgttgagcaatcaatgatctctactgctcctgatgccagctagaatatgcatcacgtcgaagccgagtgtcagaacattgatcgttccgtggagacatattctgaaaacctaagtctcaagggatcaattgctgctataaagcttgatgaatactatggcagtgagaacaatgattcaaatcatccaaatcttgctgctgctttcttgaacaataatttttgcagagaagtgcaagcttctatgcctcaatctgtattagcttatcaagattaccatgaggaaacatgacgccggcataccaacaattcacatgacctcactaaggtcgaattgctaaacacgtttggcgagtgcgtattacactatgatgtcagctgctcaagtcaagatggcaacccacggagctcaacttcactat

SEQ ID NO: 2406 - DNA, 535 bp, Oryza sativa
  Clone ID: uC-osflcyp045c02b1
ttattgctcgcgtggacattggtcaggttcttctttctgttcgttgcaaggagagcaatgctaaacatgctgaagaggcactccgccgtgccaagttcaagttccctggccggcaaaagatcatccacagcaggaagtggggcttcaccaagttcacccgtgaggagtacgtcaagttgaaggctgagggcagaattatgtctgatggtgtcaatgctcagctgcttggttctcatggtcgtcttgcgaagcgtgcccctgggaaggcgtttctggctgagaccattcaagcttccgcctagatgcctcttgctgaatggaacttgagagattttgctttagctagtctaattttgcatgctagaactcatgttttaagaattggttgtcttcaggatgatctatttttctgtaatagttccttctgtaggccagcttgatatggaggttttgcatatcatcagtacctttgttgaatttttgcttcatattcgtattccaaagctatatctcagttggattgtgaagctttatt

SEQ ID NO: 2407 - DNA, 545 bp, Oryza sativa
  unsure (1)..(545): unsure at all n locations
  Clone ID: uC-osflcyp045c04b1
ttttctgggacaacctccttgagaacaagattgcattcaccaccaagaaggattacggtagggaggacagggaggcacaatgggccaccgcacaaagaacacttcacggccttcagccaccggaggtcgcctccaacacgctcttcaacgacaagagcagctaccgcgagctctctgagatcgctgagcaagccaagagacgagctgagatcgcgaggctgagagagctgaacactctcaagggccacgtcgaatcggtggtgaagctgaaggggctggacatcgacacgatccagcagaactacacagtgtgaggaaccccctcggcattcaacgagagaatcgtcatcagcgctggagcgggaattgcaaacggcgctctggttaaaggaaattttcgatgaatgattggaagaacaaaaaacaaaaaaacatggctgatctgaacagccctagttgtaaagtgctaccaaatatatggtccggtttccctctttagagaggttntacgttctagtggagtaccgtacgtacgtgttggagta

SEQ ID NO: 2408 - DNA, 507 bp, Oryza sativa
  Clone ID: uC-osflcyp045c07b1
tctgttgagatggcggcgccggatgtcgagtaccgctgcttcgtcggcggcctcgcctgggccaccgacgaccgctccctcgaggccgccttctccacctacggcgagatcctcgactccaagatcatcaacgacagggagacggggaggtcacgtgggtttggcttcgtcaccttctcctccgagcagtcgatgcgcgacgccatcgagggcatgaacggcaaggagctcgacggccgcaacatcaccgtcaatgaggcccagtcccgccgctccggcggcggaggcgggggctacggcggcggcggtggcggctacggcggcggtcgtggaggcggcggctacggaggaggtggcggcggcggctacgggcgccgtgagggcggctacggtggcggcggcggctacggcggcggccgtggcggcggcggcggcggctacggtggcagccgtggcggcggctacggcggcgacttcggcgggaactggaggaactgattggtgggg

SEQ ID NO: 2409 - DNA, 538 bp, Oryza sativa
  unsure (1)..(538): unsure at all n locations
  Clone ID: uC-osflcyp045c08b1
tcttgaccgtcgacgaggagaacagctcgctcttcttcgagatcggtccggtgaagctggcgatagagccgtacgacggcggcgtgccgcggctgcggtacaacccctacacgtggaccaaggtcgccagcgtcctctttgtcgactcgccggtcggcgccggcttctccttctcccgggaccccagggggtacgacgtcggcgacgtctcctccacgctgcagctcaccaaatttgtcaacaagtggttctctcaacatcgcgaattcctctcgaatccgttgtacgttggtggagaatcctacgctggaaagcttgtcccatttctcctgcagaaaatctcagaagatgttgaggctggagtcaagcctgtgcttaatctcaagggctatctggttggcaacccgggtaccggcgaaagcatcgattacgagtcgaaagtgccttatgctcacggagttggaatcatttcagatcaactatatgagactatactggaacattgcngnagagaggattatgccaatcccaagaatgc

SEQ ID NO: 2410 - DNA, 471 bp, Oryza sativa
  Clone ID: uC-osflcyp045c09b1
tttgcgcatggctacttagaccaatccaatgggttgggataccctgatactgggggtcaggttgcgtacattatggaccaagtccgcgctttggagaatgagatgctgacgaggatcaagcagcacggcctcgatatcacacctaacatcctcattgcaaccaggctgttgcctgatgctgttggtactacatgcggccagagtgtggtgaacgctattgtaactaagctcactgacattgttcgggttctattcaagagtgagaatggtctcctgcggaagcggatctaccgtttcgatgtctgcccattcctggactcatacactgtggattgtgaactcgaaattatgagggacatgcacgccttacctgatctcatcattgtcaatcacagtgatctgaaccttgctgccactatgctggctcacacattaggagttacccagcgtaccattgctcatgccttgtag

SEQ ID NO: 2411 - DNA, 403 bp, Oryza sativa
  Clone ID: uC-osflcyp045c10b1
tctatttccttctcctctccaaaccctagcaaaggctatctctctcttcgccgccatggaggatgacgacgcggggggcggaggcggaggcggcgaggcgtccccgccgcacgcgggctccgccgcggcgatggcgggggcggggagggacatcgcggcgtcgccgacgagctcgcggtcggtgacgcagacggtgaacgggtcgcacaggttcgtgatccaggggtactcgctggcgaaggggatgggggtggggaagcacatcgcgagcgagacgttcacggtgggagggtaccagtgggcgatctacttctaccccgacgggaagaaccccgaggacaactccgtctacgtttgcgtcttcatcgcgctcgcctccgagggcaccgaccgccggcccttt

SEQ ID NO: 2412 - DNA, 554 bp, Oryza sativa
  unsure (1)..(554): unsure at all n locations
  Clone ID: uC-osflcyp045c11b1
tcttctgagactagagctgaagcagacaatggaaatgtacaactccgcatgcaaggaagcaattgatgctaaacagaagcaggctgctcagatgcaccagatgaagatggaagagtccaagaagtaccaagaactcaggaatgctgaagaggaagcccttgctctggtccaaatggagaaggcaaagtgcagagccgcactggaagcagcagaggctgcacagagaattgcagagctggaagcttaaaaaaaaactgaaaacagaatggaaaggcaaaccccaaagccgaggagaggaagagagcaacagaagcaatgaacaacactgatttaaggtacaggaggtattccattgatgacattgaagctgccacccataagtttgacaaggcactcaagataggggaaggtggatatgggccggtgtataaagctgtcatggatcatactaatgtcgccattaaaatcttaaggccagatgcatcacangggaggaaacagtttcagcaagagatagaagtgcttagctgcatgaggcatncaaacatggtgct

SEQ ID NO: 2413 - DNA, 506 bp, Oryza sativa
  unsure (1)..(506): unsure at all n locations
  Clone ID: uC-osflcyp045c12b1
tcgttcggcctccgcctacgtctgcgggctacagacgcgtataggagggggtggggaggcccaaaactgcaccaggatgttcgccccgcagggtcccgacaggagagatagggagaaggctcctacgctcctcgagccgcgtgctttggactgggagtagctggtgctagaagtaatcaatggaaatggctagtgggaggtcagcaaatggggaattggatgcatgcttaagaagcctaatgctatcgatcagcagacgcagggggcatgctgcaggtggaggtgcactgccaaccttgtcaggctggaaggaccttcctatagagctgtttctgcggatcatgtcgataattggagatgaccggatgcttgtcgtggcatccggagttagcactggctggcgcgacgcgctgggatgggggcttactaatctttacctctcacggtgccagcacaacatgaatcacttaatgatatcacttgctcacaagntcacgaagcttgaa

SEQ ID NO: 2414 - DNA, 538 bp, Oryza sativa
  Clone ID: uC-osflcyp045d01b1
ttataccatcatccagcgccacagcctgcagggactgtggcaggcaattttggatatgactatggtgatcccacgcgagcacaggtcttctactcgcaggcagcggcaccaccaacattgccacctcagtatcagcccatgggctcgcccgatgctggccaggctgacctgaaacaggcccgggcttcatagctcaaggatttgtgaactctggtatgttgagaatcctagaagtgtagttatcctgccgttaattatcactattgttattacatgttacatgagtcagttggcaaccagtggatggatgatggcattaggcagctgtgcatttgggatcaaaataagatgaaaatgggatggtagttcttgtgttgggtgaaactcacgagggtgtttgtgattggttctggagatgccaatcgtcaatgctggaacaagtggcggaggagcggtttccaattccaattgcccgtttttttattttttttaaaaataaatatattagtgtctaaagaactccgtacaaattcttgat

SEQ ID NO: 2415 - DNA, 517 bp, Oryza sativa
  Clone ID: uC-osflcyp045d07b1
tctttcggatctaattaatttacctcctccacctcctcctcctccccccgatcggatcggcccggctcctcctcctccgccgccgccaccgccgccgcagataggagaagatggccgcacttgataccttcctctttacctcggagtctgtgaacgagggccaccctgacaagctctgcgaccaagtctcagatgctgtgcttgatgcctgcctcgccgaggaccctgacagcaaggtcgcttgtgagacctgcaccaagacaaacatggtcatggtctttggtgagatcaccaccaaggctaacgttgactatgagaagattgtcagggagacatgccgtaacatcggttttgtgtcagctgatgtcggtctcgatgctgaccactgcaaggtgcttgtgaacatcgagcagcagtcccctgacattgcacagggtgtgcacggccacttcaccaagcgccctgaggagattggggctggtgaccagtgacacatgtttggatatgcaactgatga

SEQ ID NO: 2416 - DNA, 550 bp, Oryza sativa
  Clone ID: uC-osflcyp045d08b1
tctggaaatgtcttcctgatcttccttgtgaaactgatatcatgggcaacgctgttaaccttcttgatgttcatgattttgtccctgaaagtgttgagagtgtggcagaatttgagcctcccccatccccagattctagctacagtatccaggcacccgaggaaaaggatttctcaaaagagccaccggttcttccatcccaactccatctgggtgttctcaactcacagaactctgatgaaagttgtgcacggccccagcacatagtcctcaaccacctcttcatcgagaaaggctggggtgcccatccgctggtggcccttggtctaacccacaggtttgagtccaaatatgtaaccgtcgtcctgtataagcccattgaacgatagcatagtcgcccccatgaagtcgaagttagcttgacaactcactgcggaaccaacaagggcgaggcctcgcttcctgtaaaagcacttcaggttcaggagtatttccgataacttgcaggaactttggttgtgttgtacatgatgtaccatcatgatgtctg

SEQ ID NO: 2417 - DNA, 555 bp, Oryza sativa
  Clone ID: uC-osflcyp045d09b1
tcttcgatcaggccagggctgcccctcttcctctacaactactccacccaccagctccacggcatcttcgaggctgcgagctttggcggaacaaacatcgatccgacggcgtgggaggacaagaagtgccccggcgagtcgcgcttccctgcacaggtgaaggttgcgacgaggaagatctatgacccgctggaggaggacgccttccggccgatcctccaccactacgacggccccaagttcaggctggagctcagcgtcgccgaggcgctctcccttcttgacatctttgcagacaaggatgacgcctgaggctactgcttccctgctgctgcttgctgaagaatatcaggggactgccggtgaaggacacaagtaataaagattcgacgtgtatccgttgtgagatatacatacataaatacataaatacaagtagtaagtaattaacggtgtgtgctgatgaatttggaacgattagtacaatttctgagggggtttcccatctcgcgggctaagagatgatgcgtcccattgtattttttttaatcatgt

SEQ ID NO: 2418 - DNA, 489 bp, Oryza sativa
  Clone ID: uC-osflcyp045d10b1
tgataaaaaaaaaaaaaaaaaaaaaaaaaggggaaatttataaaaaaaaaaaaagattaaaaaacaaaaaaaaaaaaaaaaaaaaaaaaaaaactacttactatggggcggccttttttgaggtcccaggcttgcgtgcccgtcctgccgtcttctgactccttcctttcggtccccctcccgttcagttccctgctccgttttttttcacctccattgcctggtaaacccctggcgttccccaccttaggggcttggcgggccttcccctttttcccttttggcgttttggctcctgggccccccccgttcttttttcctaacagtttcacagcttgccggtttggtggccccccccttgtccgggcccttttggggcggccgcttgtggtgttcccccccctttttgcccgttccggtggctaggtcctttccgcccggtcctttccttttttccccttcctttctccccacgggttcggtttttcc

SEQ ID NO: 2419 - DNA, 468 bp, Oryza sativa
  Clone ID: uC-osflcyp045d12b1
tttgtcgcggtggcggctccggtgggcgtcgtgcattaatgcattgatgcatttcggctgcttttgcgacgaactgtgaatagagcttttatttttctttttctttttcttttggtgtgtaataattaattaattgattgatttcttgatgtgagttttttggttgagatgttgagcaaattcctttgattatgccttgtcaattgctgcattggcatgagcagatgtcaagtaattatactagcttgtaataagctgataaatttagaagttttcaggtagaaaactggaaactgatctttgcattttttttttaaattttgactcctttttgtttagttttcatgctgtgatgacttgtgtatttgagctgtataattttgtcagagctctgttcttgaatctgatttactccctctggacggaggtagtattttgtattatgtgggaagccatggctcaagacac

SEQ ID NO: 2420 - DNA, 135 bp, Oryza sativa
  Clone ID: uC-osflcyp045e01b1
ttttttccagatcacttgttttgtagaaaagccaaatctgggtttcccgtaggaaagaagcatcccacaatccaaatgtaaaaacgaggaaaaatacagctgcaaccaacaaccgttttatcatttgctcgacat

SEQ ID NO: 2421 - DNA, 544 bp, Oryza sativa
  Clone ID: uC-osflcyp045e02b1
ttttaaattgaaacacatttttcaccttccacattgggatatctagaaaccaataggattttttattcataataatgtgttcttgaggggtgcatatctagagatgcaagtgaggactggagttccttagttttgagatgcatgaatattttctcgagaagtacagtaattttgcttttgcatttgtattttcttcatcattgagttctcccaggagctttttctacttgagatttagctcttgttctgaaactttgggatcaacagagcaatttaagtggaattgttctcgtgattttgatgccagcctatctaaaatacattttgttttctgagcagtacagatgcatgagcagtacatacttctgcggcagtaaacgcagatatgtccatgatgaattttcgggctctgattcattgatagtgctagaaatatcagaacttatttgatggactagctgttcacatctgatgcatttggtgcatttcttggccctttgtgttctcaatgaacaaatatgttgaatggattcctttatacatg

SEQ ID NO: 2422 - DNA, 546 bp, Oryza sativa
  Clone ID: uC-osflcyp045e04b1
ggaagagtccacaggctcaaaatccctgcctgcagagttgtatgtgacacttgctgagggagctatgattgggcatacaccaagaggaatgcaacttgctcaagaaaccatagagaagatgacttcgagaaatttcttcttaaacgcaaggatgggaactgatcttctacttgcagcttcaggtgaaaagactggtggatatacaatagcaaattatgtctgggatctcatgcaaaaccgcagaatcactccatcacttcctgctgttgaagcatattacaagggtttgaaggaacgtgaaattccttctgatgatccacggctcatgaatgttagccgtgtcttggacaatctgagcattcgttttggaccaaggagaaacagtaacgcacaggcataatggtcgtcgtcactaatccaatgcgagttagattttgtgttaataaaactgctggatacatcatcaatatgttagcacttgagaagatcaacgaactgaaattaggatagcacaaagcgaatatgaaaccatcaagagatgaaacc

SEQ ID NO: 2423 - DNA, 551 bp, Oryza sativa
  unsure (1)..(551): unsure at all n locations
  Clone ID: uC-osflcyp045e05b1
ttttgtcacgatgacaaacaagcaagattatcatttactcaagccagaaataccagaaactgtagctgacaatctttcgttttcgaaaacaggcaccgcaaaggtttggttaattggtgatggtctagattctgctgaacaattcagagcacagaaaggaactctgtttatcccatactcacaatttcctccaaagatggtacgcaaggacagctgcagctactcgacaactcctgcaatggctgtaccaaaaacgctgcagaatgtgcattcatgcgagaattggctgccaaggagggttatgagcgcatggcgaatcgcgggaattcttcatgcgttggagggatggaatgagncatgaatgtggtgacaaggtgcttgatatggacaaagtttggtctgctgcaattatgcatgggttctgcccagttgctcaaggttgatgattcagttgcaaagtatcagaataagttttagctggattatgctatgtggtcaccgtatcagaaagagagattgtctgttggcaagaagagatatagtatctgagt

SEQ ID NO: 2424 - DNA, 534 bp, Oryza sativa
  unsure (1)..(534): unsure at all n locations
  Clone ID: uC-osflcyp045e06b1
tctacacggacacggccacaccacccaccaactgagagctgagcaggcgagcgagcggacatggcagcatcgctccaagccgcggccaccctgatgcagccggccaagctcggcggccgggcctcctccgccgcgctgccatcgcgcccgtcttcgcacgtcgccagggcgttcggcgtcgacaccggtgccgccggcaggatcacgtgctccctgcagtccgacatccgggaggtcgccaacaagtgcgccgatgccgccaagctcgccggcttcgccctcgccacctcagctctgctcgtctcgggcgccagcgcggagggcgtgccgaggaggcttaccttcgacgagattcagagtaagacgtacatggaggtgaagggaaccggcacggcgaaccagtgcccgacggtggagggcggcgtcgactccttcgccttcaaggccggcaagtacaacatgaagaagttctgcctggagccgacgtncttcaccgttaaggcggagggcgtggccaagaacgcgccacccgag

SEQ ID NO: 2425 - DNA, 503 bp, Oryza sativa
  Clone ID: uC-osflcyp045e07b1
tgtaacacaccaagccaaataaaagcgacagtgggatcgctcaccaccaacatcgtcctcgccgtcgccgtggtggcagcgctggtcggcggcgggtcgtgcggcccgcccaaggtgccacccggcccgaacatcacgaccaactacaacgccccgtggctccccgccagggccacctggtacggccagccctacggctccggctccaccgacaatggtggcgcgtgcgggatcaagaacgtcaacctgcctccctacaacggcatgatctcctgcggcaacgtcccaatcttcaaggacggcaggggatgcggctcatgctacgaggtgaagtgtgagcagccggcggcgtgctcgaagcagccggtgacggtgttcatcacggacatgaactacgagcccatctcggcgtaccacttcgacttctccggcaaggcgttcggcgccatggcttgcccggtgaaggagaccgagctccgcaaggccggcatcatcgacatgca

SEQ ID NO: 2426 - DNA, 449 bp, Oryza sativa
  Clone ID: uC-osflcyp045e08b1
tctacaccactccatttctgagctcttctagtttgagtgagagagcagcagaagggagtagtgcaagatgccgatccgcaatatcgccgtggggagccaccaggaggtgtaccacccgggtgcactcaaggcggcgttggccgagttcatctccaccctcatcttcgtcttcgccggccagggctccggcatggccttcagcaagctgaccggcggcggagcgacgacccccgccgggctgatcgcggcggcggtggcccacgccttcgccctgttcgtggcggtgtccgtcggcgccaacatctccggcggccacgtgaacccggccgtgaccttcggcgccttcgtcggcggcaacatcaccctgttccgcggcctcctctactggatcgcccagctcctgggctccaccgtggcgtgcttcctcctccgcttctccaccggcgggc

SEQ ID NO: 2427 - DNA, 545 bp, Oryza sativa
  unsure (1)..(545): unsure at all n locations
  Clone ID: uC-osflcyp045e09b1
tctctcggaaagcaccaccaccagcacagagccagcgcgagagagagagagagggagaccaaaccccatcccggatctctcgtcgtcggcggcgtctgcgatggcgctctccgaccgctcccgcgagtcgctcctcccgagcttcctctacacctcctccgccgcgaggtccttcgccatcggcgccacccgcttcccctccccggtgtccccagcttccccggctccgggtgccgtcgggggcggcgcgcccatctcgatccaggctcccagggagaagatcgagatgtactcgccggcgttctacgccgcctgcactgccggtgggatcgccagctgcgggctcacccacatggccgtcacgccgctcgacctcgtcaagtgcaacatgcagattgatccagcaaaatacaagagcataacatctgggtttggcgtcctcttaaaggagcaaggacctagaggcttcttcaggggatgggtgcctaccttgcttggttacagtgctcanggcgcatgcaagttngggttttatgagttcttta

SEQ ID NO: 2428 - DNA, 526 bp, Oryza sativa
  Clone ID: uC-osflcyp045e11b1
cctgcctcgccgtattctctcggagcaaagcgaacgcgaagcgcggcggcgagaaatccggcgacgatgagccgcggcacgggcgccggctacgaccgccacatcaccatcttctccccggagggccgcctctaccaagtcgagtacgcgttcaaggcggtgaagtcggcgggggtgacgtcgatcggcgtccgcggcaaggactccgtctgcgtcgtcacacagaagaaagtgccggacaagttgctggaccatacgagcgtcacgcacttgttcccgatcaccaagtacatcggtctgctcgccactggcctcacagctgatgcaaggtccttagtctaccaagcaaggaatgaggcagctgaattccgtttcaaatggggctacgagatgcccgtagacgtattagcaaaatggatagcagacaaagcacaagtctacacgcagcatgcctacatgaggccccttggagtagttgctatggtcttgggctatgacgaagagaaaaacgctcaactattcaaat

SEQ ID NO: 2429 - DNA, 533 bp, Oryza sativa
  unsure (1)..(533): unsure at all n locations
  Clone ID: uC-osflcyp045e12b1
tctctcctcctactccgccgccgcctccggccgcgccgccgccacgacggcgtcggtcgccgccaacccctccggagatttcagctttgacaaggacgtgccagactccgccgatatggagccgccgttgctgggcctgccgaattatcatcaggatggttcttatgcagaataccttgctaattttcaagaacggagccacacagatgactggtttggcacggagaacatggatgtcctcgtaagctggacgaaaaacttatgttccaacaaggatttgcgtagctgcagtgtactcgacataggaactgggagcggtcgactctcgcaacagcttgcaaagcaagggttctctgatctgactgggatcgaccacagtgaaggtgcaattgaggttgctcgtaatcttgctatccgtgatgggtttgagcacattaatttcttggntgatgatgtgttagagtcaaagctggagaggagatttgaacttgtgatggatgaaggaactttggacacgattggtttgcaccccg

SEQ ID NO: 2430 - DNA, 531 bp, Oryza sativa
  Clone ID: uC-osflcyp045f02b1
ttcttcgcgtccgcccacgcgtccgaacagctggatgctctattaaaggcgtttaaagaagctcctggggcaaggcggtcctcgtcaccccccattcgctctaataataaatcctttgttttccaaccactggatgagtatccaacatcatcaccagcgccctttgatgatcctgatgtctgggcgccaccaagagatacaccaaatcgtagaccaacacgaggtcaatctagtacaagaaaatcctcccaagatggagcttgggcccggggtccatcaaagactggaacacctagtcgtggtgaaaaacctaatggaagtaaaggaaactctggggcaagatcatccactgcctctagcactggtgggaggaaagggaagtcaagttcaagcaaggctgattcagtgagtagcgatgctgaagaaggcaagtccaagaaggggcaatatgaaggaccagatatggacttggctgccatgcttgaaagggatgtcctggattctaccccaagtgttagatgggatgatgtc

SEQ ID NO: 2431 - DNA, 465 bp, Oryza sativa
  unsure (1)..(465): unsure at all n locations
  Clone ID: uC-osflcyp045f03b1
ttatcactcctctcctctcctctcctcagatcggatcgcgagagccccaatcccaccaccgatcgatccattcctgctgctcgcggccaccggagaaggagagagagagagagctcgacctcgtcggcgggtgaaggatcgcagcagcagcagcggcggtagagcaggaggagaggcgaagatgtcgtcggtgttcagcggcgatgagaccgcccccttcttcggcttcctcggcgccgcctccgccctcgtcttctcatgcatgggggcggcgtacgggacggcgaagagcggcgtcggggtggcgtcgatgggggtgatgcgcccggagctcgtgatgaagtccatcgtgcccgtggtcatggctggtgtgctgggtatctacggcctgatcatcgcagtcatcatcagcacggngatcaaccccaaggccaagccctactacctcttcgacggctacgcgca

SEQ ID NO: 2432 - DNA, 403 bp, Oryza sativa
  Clone ID: uC-osflcyp045f04b1
ttttagttctatgacaagaagccggagctcttcgagccgctcaaggccggccaggcacccaagtacatggtgttctcgtgcgccgactctcgcgtgtgcccgtcggtgaccatgggcctggagcccggcgaggccttcaccgtccgcaacatcgccaacatggtcccagcttactgcaagatcaagcacgctggcgtcgggtcggccatcgagtacgccgtctgcgccctcaaggtcgaactcatcgtggtgattggccacagccgctgcggtggaatcaaggccctcctctcactcaaggatggagcaccagactccttccacttcgtcgaggactgggtcaggaccggtttccccgccaagaagaaggttcagaccgagcacgcctcgctgcctttcgatg

SEQ ID NO: 2433 - DNA, 547 bp, Oryza sativa
  Clone ID: uC-osflcyp045f05b1
tttcgctccatggtcagtgctggtgtatctataggaagtgagatgtctggcggtgtttcaaatgtcttggtagagaatgtccatatctgggattcacggcgaggtgtgaggataaagactgcccctggaagaggggcctatgtaagcaacatcacgtaccggaacataaccctagaacacatccgagttggcattgtgatcaagaccgactacaatgagcacccggacgaaggcttcgaccccaaggcagttcccatcatagagaacatctcgtacagttcaatccatggacatggggtgcgtgtaccagtcaggatacaggggagcgcagagatccccgtgaagaatgttactttccatgatatgtcagtcggtttggtggacaggaagaaccacgttttccagtgctccttcgtccaggggcaggtcattggctatgttttccctgtaccgtgcaagaacctggatctgtacaacgagcggcgtgagctggttaaacaatcagcactgcagaatatctctgatatcgactacagtttttgacaag

SEQ ID NO: 2434 - DNA, 554 bp, Oryza sativa
  Clone ID: uC-osflcyp045f06b1
ccctcctttttgtgcagctcatttaccaggctgctaatgaggaactagatgaaacggaaacagcccaaatagcaaactttttgtgtcctgggaactatgcagattatggtggtgtgaacgggattgaagcagtcgaagccaaagcaaagccctttaaggccagaatgaccgtgcgcctagctgctgctgtggcttcgcatacctgcttcatgcaacctgctgtttcaagattggaatctgcattagctgacacagagataaaaacaccaagaatcccagttatctccaatgtggatgcatcaccccactcagatcctgacacaatcaagaagattttggcgcgacaggtaactttccctgtgcaatggcagagtaccgtgaagactctgatgggtaaaggacttgagaaaagctatgaacttggtcctggaaaggttatagcaggaattcttaaaaggattgacaaaggcgcaagcattgagaacattggtgcatgagtttggaggtatcaagagtcaaagactatagggataataacgttagggagagcctgc

SEQ ID NO: 2435 - DNA, 543 bp, Oryza sativa
  Clone ID: uC-osflcyp045f07b1
tctataccttgtagggcaggtgctgaaggcagccatggctatcaatgctgatgttcttacagagatggagatcccgggagagtacattgaaactctgcctaagaatggaaggtctagtcttggagactcgatatacaaaattataactgatgatcatttcgatcccaatgagctcttaagttctgtagacttgtcgacagagcacaagatcgtcgatctcaaagaccgaattgaggcctccgttgtaatttggcagaggaaaatttccaataagctttcctggggccccggtgttagcttggagaagcgagagcagtttgaagagcgggcgcaaactgtcctactcatcctcaagcaccagttccctggggttcctcagtcatcacttgacatcagcaagatacaatacaacaaggatgttgggtatgccatcttggagagctactccaggactcttgagagcttagcctttgcagttttatctcggatcgaggatgttcttcacgctgatgccattgctagagacccaaagcgcacgaaatc

SEQ ID NO: 2436 - DNA, 554 bp, Oryza sativa
  Clone ID: uC-osflcyp045f08b1
tctttcgccgatctccatctggcgagcagagcaggggaggtgatcctgaacattgtgagaatggcctggagtcagagtgctagaaagcccatgattgggcttctgtttcgcgcccaacaacattctgctcggggttactcttattcagcgttccaggctcacctttcgagcagcaatgtcgatcaaagcgccacacttctcaggagattcagctccgaagttcctgcgtcggagcaaatgaatctcatcaaacagctgagggagaggacgagcgctccaatcaaagatgtgaaggcttccttagttagttgcaactgggatattgatgttgcacagaaggacctaaggaagagaggggtggttcttgctgccaaaaagtcttcacggactgcagctgaaggtttgcttgctattgcacacgatgagaaaagggccgctgtggttgagcttaactgtgagacggattttgtggcaagaaatgattgttttccaatatctggctttttctttaacaaagtttgctttatcagcaagggatccttgtgaatggtttt

SEQ ID NO: 2437 - DNA, 483 bp, Oryza sativa
  Clone ID: uC-osflcyp045f09b1
tctttatacagaaaagggtcttgagatcctcaaagggaaatcaaagacattgaggatactggaggcgaagagaagtggaaaagggatgctatcactcaggcaagtcagtggtggctggttggctcaagagtctgatgatctaacccctgaagatatcaccttcacaacagtgtccgagagagctcctcaagacagtgagctctctgatgccaaatttgcctggctttgtgtaaagcacgtaaagagtaacgccattgtgatagccaagaataactgcatgttaggcatgggaagtggccagccaaacagactggagagtctgagaattgctttcaggaaagcaggagaggaggccaaaggagctgctttggccagtgatgcattcttcccattcgcttgaacgacgccgtggaagaggcgtgccagaacggcatcggcgtgatcgcggagccgagccgcagcatgagggacggcgacgccgtc

SEQ ID NO: 2438 - DNA, 518 bp, Oryza sativa
  Clone ID: uC-osflcyp045f12b1
ttgtcgctcttcactcaactgccccgccgcagtgaggcgcttggtgacgcacctccaccgactgtcccaccgtgccatgccttccccgccttcatcttgacccacaaccaccactagcctcccgttgctgctctcccggcgactcctctccgacgacgccgcgcctccgcccgccgccgacgttccaaacaaagagctgaagcggcggttggaaacttactatggggtggatgatgaggcagaactaccatctgtcacagaggctgttcttgagcggaagcttgcggatgtgcacagcgagacggacgatgaacttatcgaggagctgcgcagcaaaccactccctgaggttcgcgacagggatgttgagtccgactttgaggagacgcacgatactgatgaggagctggacaacttgtacaacgccagacagtatgtggagaaaaagatcaagagtgacgagttctttaatatggatgacgacaagtggaataagatgatcaagaggcttgggataa

SEQ ID NO: 2439 - DNA, 488 bp, Oryza sativa
  Clone ID: uC-osflcyp045g01b1
ttgtttttaagccgtgctttgcctttatgctagtggattttttaatggtattggcttggattctcgagatggtgtcagtcacacagttctaatatacgatggttatgcgcttcggaatgatatactatggctggatcttgctggtagggatctgactgattccctcatcaagatactgactgagaggggttactcattcaccacctctgccgagcgggaaattgtgcgtgacattaaagaaaagattgtataagtggtttttgaatacgagcagaaccttgagactgcacagagcagctcattagttgagaagaggtatgagctgtccgaaggacatgtgatcaccattgatgcggagcgcttcagacgcttagaggtcatgttccagccttctcttatcggcatggaagctccacgcgtccatgagaccacatacacctccattatgaagtgcgatgttgatatcagaaaggaccctgatggtaaca

SEQ ID NO: 2440 - DNA, 419 bp, Oryza sativa
  Clone ID: uC-osflcyp045g02b1
acaacggagcagctagcgagctgtagcaggagaccgaggataactatggaactaggccggtcgacacgatcgctgccaacgacccgaatgatgccaatccgaagaaacatgaacacggggacaaccgggattacataccatgtggcatcgcagttctattgaagggagagtacgagattgcgccgcaattgcattctgcacacccttcagcttcagagctgggagaagacaatggactgacatagaccaggacagggcttaatgcctgctagctacaaggtgcgaacaatgccactcgatggagatgaagatgcaactgaggaggtcttggatcctgattttggcgaggcagcactaggccgagtggcaccggttgattcaggtctatggtggatcatattacttagggcatatggaaa

SEQ ID NO: 2441 - DNA, 536 bp, Oryza sativa
  Clone ID: uC-osflcyp045g03b1
ttattaaaggagaggaaaggagggagtgaagaacaaatcttgattcgtcctcactgcgcactgcccccccgtccgtgtggttccagctgatcaccagcagcggccggcgtcttctcgtctcgatccctcctgcctctttggccgcggctcgatttgggcggtcaagatgaacaggatgatgttcatggcgtgctgctacaacgatccggacatgctcatcgatccggacacggtctaccccatccgccccgagtgccgcgaagacgccgccaagacgcgattcaagcccaggcctggcctcactctaagtccaaggagatggaagctgcttcacaatgaagaaggtgtcctagacatagctggaatgatcaaaagagtgcagcgtgggggtacccacccaaatatcaaaggagaagtttgggagtttttgctgggttgttatgaccctaaaagcaatactgaacaaaagagccaattaagacaacagcgaaggttagaatatgagaaactgaaaacaaagtgccgagaaatggaca

SEQ ID NO: 2442 - DNA, 527 bp, Oryza sativa
  Clone ID: uC-osflcyp045g05b1
ttttgagagaaaaaaaaatctcccctcgaagcgaagcgtcgaatcgccttctcaagatgcagatctttgtgaagaccctcaccggcaagaccatcaccctcgaggttgagtcctcggacaccattgacaatgtcaaggccaagatccaggacaaggagggcatccccccggaccagcagcgtctcatctttgctggcaagcagcttgaggatggccgcaccctggccgactacaacatccagaaggagtccaccctccaccttgtgctcaggctcaggggaggcatgcagatcttcgtcaagaccttgactggcaagaccatcacccttgaggtcgagtcgtctgacaccattgacaatgtcaaggccaagatccaggacaaggagggcatccccccggaccagcagcgtctcatcttcgctggcaagcagcttgaggatggccgcaccctggccgactacaacatccagaaggagtctaccctccaccttgtgctcaggctcaggggaggcatgcagatcttcgtc

SEQ ID NO: 2443 - DNA, 523 bp, Oryza sativa
  Clone ID: uC-osflcyp045g09b1
tcttttcagaagctcactcttgcaatggaggattacagtcatcagaaaaccataataagtcgagaaatagacatcacattgaccataacatggaaggaatcttcttgcatgtgctagctgacacaatgggaagcgttggtgttgtgatatcaaccttactaatcaagtacaagggatggcttatagcagatcccatatgctcagtatttatttcaataatgattgtttcttctgtccttcccctgttgaggaattctgctgaaattttgttgcaaagagttccaaggagcctcgagaaggacataaaggaagctttggatgatgttatgaagattaagggtgtcattggagtccataattttcatgtctggaacttaacaaatacagatattgtaggcacttttcaccttcatatcacaacagaagctgacaagtcttctataagagaaaaagcttcagatatatttcatgaggctgggattcaagatctgactatccagatcgaatgtgtcaagagatagca

SEQ ID NO: 2444 - DNA, 495 bp, Oryza sativa
  Clone ID: uC-osflcyp045g10b1
tgcacccccgccgcccgtccaaaccctagctccgcctcctccgccgcctccaggagaggagaggtaagtcgaagatggtgtccggctccggcgtgtgcgcgccgcgcgtggtggtggacgcgcgccaccacatgctcggccgcctggcctccatcatcgccaaggagctcctcaacgggcagcgcgtggtggtcgtccgctgcgaggagatctgcatgtccggcggcctcgtccgccagaagatgaagtacctccgcttcctccgcaagaggatgaacaccaagccctcccatggccccatccacttccgctcccccgccaagatcctctggcgcaccgtccgcggcatgatcccgcacaagaccaagaggggagaggcggcgctggcaaggctgaaggcgtacgagggcgtgccgccgccgtacgacaggaccaagcgcatggtcatccccgacgcgctcaaggttctgaggctgcagcctgggcacaagtact

SEQ ID NO: 2445 - DNA, 523 bp, Oryza sativa
  Clone ID: uC-osflcyp045g11b1
tgaggatcagttcttgggtgatggtggttggaggcatggaaggaggcagcagcggagcacagcacccatggcggcagctgctctgctctcccctactccctctgcctgtccctcccccacgccggtcctcgctccaccccaggcaagccctccgattcgcggttggcacaggaggaggagggcgcgcgcgcgccacgtcgacggggacgagacgccgcgcggcgctcgccccgtgctcctccagcgtgagcgcgtgcggccctgcttcgggaggcgacgggctggccctggagaggaggcgcctgctgctgtccggcctcgagtgttcgagcgtgctcgtcctcccgtattcacattcgcatgctgttgccgagatggatgaagatgtgaaaatggctacgctagtagacccgatcaatgcatattcttttctttacccacttgaattgccaggaaagaaattcacattcaaatgggtagaatccagacaaacagaacgatattcctctgcggcaccactatc

SEQ ID NO: 2446 - DNA, 196 bp, Oryza sativa
  Clone ID: uC-osflcyp045g12b1
ttgtcaagatgtcaaaacgtgctggctggggtgtgatgaccagtcacaggagtggtgaaactgaggatacattcattgctgatctggcagttggtttatccacgggccagatcaagactggagctgcttgcagatctgagcgccttgccaagtacaaccagcttcttacgatcgaggaggagcttggggctgctga

SEQ ID NO: 2447 - DNA, 419 bp, Oryza sativa
  Clone ID: uC-osflcyp045h01b1
atcgtttctcaccttgtcaacctctctctcggggtctttgcgatcctctcctgttgaataatgcggccgctcatcggcaagcagaaggggaattggtactctgctaaggcatctgaaagtagcatgtcgggcctgttcggttacaagtccttcatctgcattgcacttctcgttggagatggcttctacaacttcgacaaagtgatcgttgtcactctcaagagcgtacgcgaaagatcaaggcgcaggggtcttaacaacagagtggcggacgcggacaccatggcgatcgacgacatgcagcggaacgaggtgttcaaccgggacaacatcccgacctggatggcggacacccgggtacacgctgctcagcgtaatcgccgggggtctcattccggtgatgttccggcaggtgaagt

SEQ ID NO: 2448 - DNA, 268 bp, Oryza sativa
  Clone ID: uC-osflcyp045h02b1
tcgtgggtagcaaggatgaacaacaccaagggggggttttttttcctgcgcgccgtgttagccaagggggtcgcatacgcacccgagggcgagtccagcaccacccacggggagaagacgaccaccacccaagcggaggatggcgtcaagaagccagactgcgtgccggcggacgacccgcgctcgttgcccggacacggcgagagcaggactccgacgccgatcgccggaccaccacggcggcggaggctcattcgggaccacgccg

SEQ ID NO: 2449 - DNA, 457 bp, Oryza sativa
  unsure (1)..(457): unsure at all n locations
  Clone ID: uC-osflcyp045h03b1
gtgngcttttcgacgagatcgaaaaggcgcgtgcagttgtatttaacatgatgctccagatctcggaagatggaaggctgactgacagcaagggaagaacagtggacttcaagaacacacttctcataatgacttcgaacgtcggaagcagcgtcatcgagaagggtggtcggaagataggttttgatctcgattacgatgagaaggacagcagctacagcaggatcaagagccttgtcgtcgaggagatgaagcagtacttccgccccgagttcctcaaccgtctcgacgagatgatcgtcttcaggcaactcaccaagctggaggtcaaggagatcgctgagatcatgctcaaggaggtctttgacaggctcaaggccaaggacattgatctccaagtcaccgagaagttcaaggagcgtatcgtcgacaaagctttaacccgagctatggtgcg

SEQ ID NO: 2450 - DNA, 546 bp, Oryza sativa
  unsure (1)..(546): unsure at all n locations
  Clone ID: uC-osflcyp045h04b1
atcggaagcttctagaagtttccgtgggcgatggcgatccgcgcgaggtcctcctcctacgccgccgcggcggtcgcgctggcgctcgcgctggcgtccgtcgccgctgtcgccggcgaggtcttcttccaggagaagttcgaagatggatgggaaagtcggtgggtcaagtcagaatggaagaaggatgagaacatggctggtgaatggaaccacacatctgggaagtggaatggagatcctgaggacaaaggtatccaaacctctgaggactacaggttctacgctatttcagcggagtacccagaattcagcaacaaggataaaaccctggtgctgcagttctctgtaaagcatgagcaaaagctggactgtggtggtggatatgtcaagttgcttggtggtgatgttgaccagaagaaatttggtggngacacaccgtacagcattatgtttggaccagacatctgtgggtacagcaccaagaaggtccatactatctttactaagaatgacaagaaccatttgatcaagaggatgtcccct

SEQ ID NO: 2451 - DNA, 546 bp, Oryza sativa
  unsure (1)..(546): unsure at all n locations
  Clone ID: uC-osflcyp045h05b1
atcngtactgaccgcggcaacctctctctcttgttcgttgcgaccctctcctggggaataatgtggccgctcatcggcaagcagaaggggaattggtactctgctaaggcatctgaaagtagcatgtcgggcctgttcggttacaagtccttcatctgcattgcacttctcgttggagatggcttctacaacttcgtcaaagtgatcgttgtcactctcaagagcgtacgcgaaagatcaaggcgcaggggtcttaacaacagagtggcggacgcggacaccatggcgatcgacgacatgcagcggaacgaggtgttcaaccgggacaacatcccgacctggatggcgtacaccgggtacacgctgctcagcgtcatcgccgtggtcctcatcccggtgatgttccggcaggtgaagtggtactacgtgatcatcgcgtacctgctggcgccggcgctggggttctgcaacgcctacggcacggngctcaccgacatgaacatggngtacaactacggcaagatcgcgctcttcatcttcgcggcg

SEQ ID NO: 2452 - DNA, 544 bp, Oryza sativa
  Clone ID: uC-osflcyp045h06b1
tcttgctggggccttccatgatacagcagatgcagcagccttgcaatgagtgtaaggggactggagagagcattaatgagaaggatcgctgcccaggctgcaagggcgagaaggttattcaggagaagaaggttctggaggttcacgttgagaaggggatgcaacacaatcagaagatcactttccctggtgaagctgatgaggcgcctgataccgttacgggagacattgtattcgtcctccagcagaaggaccactccaagttcaaaaggaagggcgatgatctcttttatgagcacaccttatctctgactgaagcactttgtggtttccaatttgtcctgacacatctggacaacagacagctgctcattaagtcaaaccccggtgaagttgttaagcctgaccaattcaaggcaataaacgatgagggaatgccaatgtaccagaggcctttcatgaaggggaagctctacattcatttcacggtggagttccctgattccctggcgcctgaacaatgcaaggctctcgaggctgtgct

SEQ ID NO: 2453 - DNA, 495 bp, Oryza sativa
  Clone ID: uC-osflcyp045h07b1
cgctgctggagcaaggatgaagaacaccaccatgggttgcgccttcctgctcgccgcgttcgccatggccgccgccttcgtccccgtggccgagtccaggaccacccccgtggagaagacgaccaccacccaagcagaggatggtgtcaagaagccggactgcgtgccggcgttcgacccgcgctcgttccccggccacggcggcaccacgactccgacgccgatcccgggccaccacggcggcggcggctcatccgggaccacgccgtcgcacggcggcggcccctccgggggcgcgttgccttccccgtcccacggcggcgcggcgccgtcccacggaggagggtacggggcttccccgccggtgacgccctcccctggcggcggctacggcggcggctccccggcgccgtcccacggtggcggcgcctacgggagctccccttccacgcctttttgcggcggctccttcccgacgccgttccacggtggccg

SEQ ID NO: 2454 - DNA, 477 bp, Oryza sativa
  Clone ID: uC-osflcyp045h08b1
tcttccgcagcagccgccaacactcccgcacggggagatatctcaaatccacaccctttcaagccagccatggcggagcgcggcggcgagcgtggaggaaagcgcggcgggtacggccgaggcttcgggcgcggcggtcgcggcgaccgaggagggcgccgcggcgggcgccgcggcccgcgccaggaggaggagaagtgggtgcccgacaccaagctcggcctggctcgagaaggaaggcaggtactacaagatcgaggagatctacctccactacctccacgtcaaggagcaccagatcgcgtagaccctagtgccggggctcaaggacgaggagatgaagatcacacccgtgcaaaagcagacgcgcgccgggcaacgcacccgagacaaggcgttcgtcgacgtcggagacaacaacggccacgtcgggctgggggtcaagcgcgccaaggaggtggccaccgacatccggga

SEQ ID NO: 2455 - DNA, 410 bp, Oryza sativa
  Clone ID: uC-osflcyp045h09b1
tcgtccccaatcctcccaaggccgtgaaccacaaaccgacgagcacagcgggcgcgagggcggccggcgccgggcggagcacacgcctctttcacaccatcatcgccagcgccggatccatccacgatgggcggcggcaacgggcagaagtccaggatggcccgcgagcgcaacatggagaaggccaagggcgccaaggggagccagcttgagaccaacaagaaggccatgaacatccaggttttagtttttgattggcatataaaaatctgatgaactgtgttggcggatggcatgaggcccttcgaccaaatttgccgaaacccgtggcgaaggctatgaaccaaggatgatgcgaggcgaagggtcgcgtgagtacctgccgaagaaggacgacttcgccatagcca

SEQ ID NO: 2456 - DNA, 556 bp, Oryza sativa
  Clone ID: uC-osflcyp045h11b1
tggttttgttggcccccattcctcccccaccccggtgtcctcccctccgccgctcgcgtcgccgcctttttcccctatggcgctgccgaatcaggggaccgtggattaccccagcttcaagctggtcatcgtcggcgatggcgggactggtaaaactacatttgtgaagaggcatctcactggagagtttgaaaagaaatatgagccaaccattggtgtcgaagttcaccctctagattttaccaccaactgtggtaagatccgcttctactgctgggacactgctggacaagagaagtttggtggacttagggatggatactatatccatggtcaatgtgcgataattatgtttgatgtcacttcaaggctgacttacaagaatgttccaacatggcatagggacttgtgcagggtgtgtgaaaacatccccattgtcctgtgtggtaacaaggttgatgtgaagaacaggcaggttaaagccaagcaggtcacattccacaagaagaagaatctgcagtactatgaaatttctgccaagagcaactacaacttt

SEQ ID NO: 2457 - DNA, 553 bp, Oryza sativa
  Clone ID: uC-osflcyp045h12b1
tggtggtggtggggcggcatgggatacggatccggccatggccgcaccctgaccccgtcgaggtgatgcgggcgcaccggatcatggagcgcgtgcaggaggagcagcggaggtggtatggcgtcaaggagccgcgccatgtcctggtcgtgacgcccacctactcccgcgcgttccaggcgctccacctcaccggcctcctccactccctccgcaacgtgccctacccgctcacctggatcgtggtcgaggcaggcggcaccaccaacgccaccgcgtccctccttgcacgctccgaccttaccatcgttcacatccccttccctgaccgcatgcctcatgactgggctgaccgtcacgcaaccgagaatcgtatgcgcctccacgcactgcgggtgatccgggaaaggaagatggatggtgtgattgtgtttgcggatgacagcaatgttcatagcttggagctgtttgatgaggtgcataaggtccagtggatgggtgcggtgtctgtgggtatactcgtacatactggaacagcagaccagtcacgact

SEQ ID NO: 2458 - DNA, 490 bp, Oryza sativa
  Clone ID: uC-osflcyp046a07b1
gttaagtccggagttggaagcgatcgatggcgggtactacgacgggacgagttgttgcactcggcgcggtggccgtggtggtggcgctgacattcctcgccggcggcgcggacgccgactgctacgacttctgcttcaaggactgcatggccagggagaacaacatggtcgactactgcagctacgcctgcgacaagacgtgccagccggacaagcccacgctgtactcgtcgtcgtcgtcgtcccgcctcgccggcgacatggagtgccaactctcctgcgccttgggctcctgccaccgcctccttccggacggcaagggcgccgtggaggcctgcttcgggcagtgctacgacggctgcaagaccacggcggcggccagactgccgaggcctctccgcgccggccactacgtgctctctagtccccctgatgacgtagaccatgatccggaccaccgctacgtgttctctagcccccatgatgacgt

SEQ ID NO: 2459 - DNA, 445 bp, Oryza sativa
  Clone ID: uC-osflcyp046a08b1
atttctttgagcttgtcaagaccgccaaaaccagtgcatcactaataaggggtatccttgccatggatgaatccaacgcgacctgcggtaagaggcttgcgtcaattgaccttgagaacaccgaggccaaccgccaggcttaccggaccctccttgtcaccgcaccgggcttgggacagtacatctccggtgctatcctcttcgaggagactctgtaccagtcaactgtagatggcaagaagattgtcgacatccttactgagcagaaaatcgttccaggtatcaaggtcgacaagggtcttgtgccccttgctggctccaacaacgagtcatggtgccaaggtctagacagtcttgcctcgcgcgaggcgacatactaccagaagggcgctcgtttcgccaagaggctcacttgtgtcagcaatccaaacggcccatctgaact

SEQ ID NO: 2460 - DNA, 480 bp, Oryza sativa
  Clone ID: uC-osflcyp046a09b1
ctgtctttcaaggccgccgcgaaggtgttcggcggggggcgcatcaccatgcgcaagtggggggcgaagcccaagcccgccgcgtcggggagcccgtggtacggcgccgaccgcgtgctctacctcggcccgctctccggcgagccgccgagctacctgaccggcgagttccccggcgactacgggtgggacaccgcggggctctccgccgacccggagacgttcgccaagaaccgggagctggaggtgatccactccaggtgggcgatgctcggcgcgctgggctgcgtgttcccggagctcctcgcccgcaacggcgtcaagttcggcgaggcggtgtggttcaaggcggggtcgcagatcttcagcgagggcgggctcgactacctcggcaacccgagcctgatccacgcgcagagcatcctcgccatctgggcggtccaggtggtgctcatgggcgccgtcgaggggtaccgcatc

SEQ ID NO: 2461 - DNA, 353 bp, Oryza sativa
  Clone ID: uC-osflcyp046a11b1
tttatttacatgcctacgtataaattctctgaaatgcggtgacatttttatgtagacttgggctgtaatataaattctctgaaatttgtatgtcttgattcttaaattgctgtgataagctcttcttttctaggaagtacagtactgaattgtgggttgtacaatacttaaattataaaatcatccctagtatatttttgaattaatccatgagttgtttcgaagagctgtagctgtacaatctgacctatatagtaaaaaaatgttctactcttgatttagaccatatgctctgatatggatgacctaatatactgcctatatatgcatataagttcagaaacttctgtaga

SEQ ID NO: 2462 - DNA, 354 bp, Oryza sativa
  Clone ID: uC-osflcyp046b04b1
gctgattgttgacaaaatgagatggtccagtttttgtgctttctggtcagcaattgacccaagtactaggcatcggatgtctagagagaagactgatgtcatattaaaagtattagtgaagcatttttttgtggagaaagaggttacttcaacattagtgatggattctctgtatacgggcctgaaggtgcttgaataccagagcaagggcaagaaagggagaacgatagctgatttggatgaactgcctgcacccatgatccatgttgacatggacatgtttgttttggccagtgatgttatagatttgcttgagagagcagccttagaaccactgccttgtcaacctgtgtc

SEQ ID NO: 2463 - DNA, 466 bp, Oryza sativa
  Clone ID: uC-osflcyp046b05b1
ataagtgccaaacgatcgatcgatctctgcagtctgcagattagcccaccacctacagcgtcaggtgcacgaatgcacaccctgtcaactccactccacccgctgttgtgtccctctccccgccaccttcacatctcaacctttcctctccctctcgctctctctctgatctcgtcgttctccatggcctccaaacccgcggacgttacggctacaggtggcggcggcgtcgccgtcgtccgtgacaacaacaacaacgccggcggcggcgaggcggaggtgtaccgctccgagctgacgccgctgcagaagcacgtcgccttcttcgaccgcaacaaggacggtatcatctacccctccgagacctaccaagggttccgcgcaatcggggcaggagtcgtgctgtccgccgtcggcgccgtgttcatcaatggcggacctgggccccagacgataccgagaacac

SEQ ID NO: 2464 - DNA, 496 bp, Oryza sativa
  Clone ID: uC-osflcyp046b07b1
cctctctctctctcgcatcgcatccatgcgctggtgtctccgccggcggaggctgcggcgagccttcaccccccacccgcccaccgccggcgagccacggcgtgggcgacctcctctcctctcccgatcccctctcgcccttaggtaggggcttctccccagtccccaccacacgcgcgtgcgtggccgacgagcaccccaggttcggatcggatggaagaccagaagaaaaatgcaaaaccagaggggtcttctggctcgcaaaggggagctcccccggcacctgatgcaggccttcccaatccttttgatttttctcagtttagcaacttgctcaatgatccatctataaaggagatggcagagcagattgcaagcgaccctgtgttcacccagatggcagagcagctgcagaagagtgctcatgtgaccggggaacagggtggccctgcattggatcctcagcagtacatggaaacaatgacacatgtcatgc

SEQ ID NO: 2465 - DNA, 491 bp, Oryza sativa
  unsure (1)..(491): unsure at all n locations
  Clone ID: uC-osflcyp046b09b1
atctacttgaatatctatccacagggaagtcatcagagagaactgatgtttttggctacgggatcatgcttcttgagcttgtgactggccagcgtgccattgacttctcacgcttggaggaagaggacgatgttctattgctcgatcatgtaaagaagctacaaagagaagggcagctaggatccattgtggaccgcaacctgaaccagaattatgacgacgaggaagttgagatgatgatacagatagcattgctgtgcacacagtcatcgcccgaggatcggccatccatgtcagaggtggttcggatgctagaaggcgaggggctggcggagcggtgggaggagtggcagcaggtggaggtgacaaggaggcaagagtacgagcggatgcagcggcggttcgactggtgagaggactctgtctacaaccaggaagcaatagagtngtctggaggtagatgacaagggccgtgacaacagacatcaaac

SEQ ID NO: 2466 - DNA, 513 bp, Oryza sativa
  Clone ID: uC-osflcyp046b11b1
gttatttaccaaatttgatagtggtactgggtggccgtcatattatcaacccattggagataatgtaaagtgcaagcttgatatgtccatcatattcatgcctcggactgaggtgctgtgtgctgtctgtgacgctcatctggggcacgtgtttgatgatgggccacgaccaacagggaaaagatactgtatcaataggtatatgtgagattttcttcacttgttatcaattgttcataggcctcatttgaaatctgaacagaaacattgtctcccatatctacgaaattattttttttgaggggtatctacgaaattaactgtttgcttaattttcccactaacatttttcccattgttcaactccggtaagtcccagattagtttctaagtaaacttccgtgcatatatacatagtagtaccatagctaatatctgtctcatatgtgttgcattgcaccgaaggacctttctatacatgttcttttggttgatacatgactgcagagttgc

SEQ ID NO: 2467 - DNA, 398 bp, Oryza sativa
  Clone ID: uC-osflcyp046b12b1
agcgattgttcagccgccgccgatggcgaccaccaggagggggttaaattaacgcgtgggggccgccaagacccccttgctcggccatccccgcccctccaatgcccccctccgcgacattgccgtcgtcgccaccggccgcatcaccatgagcaaggagctgcggtacgggcctgacagggtgaagtacctggggccattctcggcgcagacgccgtcgtacctgaggggcgagttcccgggcgactacgggcgggacacggcggggctctccgaggacccggaggcgatcgccaggaacacggccctggaggcgatccacggccggagggcgatgctcggggcgctgggctgatcacgccggacgtgctcgagacgtgggtgcccgtcaacttcaa

SEQ ID NO: 2468 - DNA, 511 bp, Oryza sativa
  Clone ID: uC-osflcyp046c01b1
cgccgtttgttgtgggaatcgataggaagaaaggaaacagactgatgtcattccaagagctgtcttcaagagagagagggagcaagcactcctcaattgcaattcagaacataaaggtagacatttgtgtgtttgtttttgatatcatgttctgcaatggacaaagcctattgaactgctcacttcggcaaagaagaaagtacatccacgacttgttccaggagaagccaggacattttgagttagctcagcaacttactgtagaagcagatgaagcttctgtggatgattctaccactttggagagaatgaacacctttttcaaaatggcatgccagtcttcttgtgagggtattatgctgaaaatactggatgttgatgctggatattctgcttccaagcgctgtgattcatggttaaaggttaagcgtgactatgttggcttgggtgatagcctggacttggttccaattggcgcatggtatggaaatggtcggaaagctggatggta

SEQ ID NO: 2469 - DNA, 487 bp, Oryza sativa
  Clone ID: uC-osflcyp046c03b1
gattgttggaacctctaatgaaggttacaaagtagggtggttttgttaagatgggaatggggaagtctatgattctatgaagaatatgtggtcttgtccaggcacttttcctccaagcatcaaacttccgcttgctctaaattttaggtcacagcctgtggcggttggcagcatgctatacttcatgtgtgcagaaccagagggtgttttgtcgtatgatgtaagcactgggatatggagacaattcgtcatcccactgccacttcatctgactgaccacacacttgccgagttccagggaagggttatgctggtgggtctgctctgcaaaaatgcagcgacatgtgtctgcatttgggagttgcagaagatgactctcctctggaaggaggtggacagaatgccaaatatctggtgcttagaattctaccgtgagcacatgaagatgacatgcctgggcaacagtggtttgctcatgctctccttg

SEQ ID NO: 2470 - DNA, 478 bp, Oryza sativa
  Clone ID: uC-osflcyp046c06b1
gagaatttcagttacagctttccatgtcatcttttcaatgacaggaatggatcccactttaaggttcttcaacttgatactgttacttttggcccaactcctgacttttgtggctttgctaatcttacaatgcttactttgaagcatgtgcttgtattggacaacttccagtacttcttaccgaaatgccctgccctagaatggttggaaatcctaatgtgctcccagctacataatttgcatgtttctgaaccattgccgcggctggaatttttgcgtgtacaaggttgtgcgattaacaagattgagctccatgcccccaaactcaccacatttgagtatagaggttgttttaaagtgattattgcactccacacatgcttgaactctaagactgcaagcattgcgtctcatattgaggacaaccttgagtatgttttcacttggcttccaaatgggatacctcatgttgagagac

SEQ ID NO: 2471 - DNA, 510 bp, Oryza sativa
  unsure (1)..(510): unsure at all n locations
  Clone ID: uC-osflcyp046c07b1
cggtctcttgggctcggtggaggcccacgcggtgcggggggaagcctggtgtcacggaagttgtagccgagaaggagacttcgccggatggcgaagaggaggaggtgcgcgggcgcggatggttcatggttgatgagattggtatggacatcctcaccatcgccttgcctgctgtgctcgccctcgccgccaaccccatcacggctctcgtcgacaccgccttcgttggccatgtcggttcgactgaacttgctgccgttggagtatccatttctatcttcaatctggtatgcaagctgctcaatgtgccattgctcaatgtcaccacatcctttgttgccgagcagcaggcagtggatgcagctgaaatcctcgcataggaaatgaaatttcaataccccaagagaaagcaagtaaacaaaggaggtttcttccagcggtctcaacatccttggctctagctgctggcataggattgatggaaatggtggcactgatacttgngtctgg

SEQ ID NO: 2472 - DNA, 364 bp, Oryza sativa
  Clone ID: uC-osflcyp046c10b1
cttcatatcccgccgccgccgccgaggcggaggccaaggaggcctttccggcggcgcaggtggccgaggaggtgaaggaggaggaggcggcgccggcgccggccgccgaggaggtgaaggtggaggaggcggcgccggtcgcggagccggaggccgagaaggccagcgagtgagtgcatgccggggaaggctggctcgccgtcgtcgtacaccgtggagtacatgcatggcccgcgcgcgccgccgccgccggcgactcgccggagttgtacgtacgtgtgcgtgtagcgagtgatgagttgagtgagctggagtggtagtactcgactccgtaggtgtgtgtgggtacgcgtgacgtggggct

SEQ ID NO: 2473 - DNA, 453 bp, Oryza sativa
  Clone ID: uC-osflcyp046c11b1
cttactcttgggtcgagttcgacatccacgtcggcgtggccttcatcaacgaccgcctgcggcgcgcctacgtcggcctgcaggcgctccggcaggcgatctactccgaccccaagaacttcaccggcggctgggtcggcgccgatgtctgctcctacttcggcatcacgtgcgcggcggcgctcgacgacccggccggcacggcggcgacgggggtcaccctaacggggggggacattcgccgggtacctccccgccgagctcggcctcatgaccgacctggcgctgttccacgtcaactccaaccgcttgtgcggcgtcatccccaagagcttctcgcgggtggcgctgctgcacgagctcgacgtcagcaacaaccgactcgtcagcaggttcccggaggtggtgctcgacatggccgcgctcaagtacctcgacatcaggttcaacgac

SEQ ID NO: 2474 - DNA, 411 bp, Oryza sativa
  Clone ID: uC-osflcyp046d05b1
cacctcgcgccggccagctgctccgagtcgggcttcgaagctaaccttggtgcacccgctgatcgattgattcgttgttttttgggggggatttttttctggtgtgtgtgttttttttcccgatcggatcggtccagatcgggtcgatttgggcggggtggaggaggtggatggaagggggagatgcggatcgaggaacttcccgcagaatcctcgcgctgaagaggagatggaggatgtggaagaatcaaccacctcatatgaggccacttcctcagggctcagattatatcggattgtcgcctggaagctataatccatccagtgcacatttggttccgccttacaagttcggaaatgctccttcatatttagaatctgaattaactcctccaaagcatccacctgact

SEQ ID NO: 2475 - DNA, 138 bp, Oryza sativa
  Clone ID: uC-osflcyp046d07b1
atgtcttatcagatcgatagctggcaaatctggagggagggatggtttacttgtaaccctccctggtgcctcggtaattttcaagtaggctctgcacttggttgtcgttagaaatgcatggccgggcggaattgcaac

SEQ ID NO: 2476 - DNA, 502 bp, Oryza sativa
  Clone ID: uC-osflcyp046d09b1
gcgcttgcgcatgtacagttttacttgggcggtatttaatgaaattgggggctcgccggttcgttaaaaaaaaaattctcatcctagcttccaacacaaatcaaaccaaaggatcttaagacttaaccgagcttttaaaagggaagggaggatattacattcattcaagcatctaattaattagcacgaaccagcagcacacgagcacatctaaagaattttcctttgaagtcaagattcgattaacaacatctagatcacatcaaatcttccagacaatgccattctctccctctccgacgaccggctccagatcacgggcacgcgccctcgcttcgcgccaagctttgcccttacaaaaacggcagggaaggcaggcggatcgaagcagaggtatgtacgtgcgcgggccatggccttgacggcgccattggagagggagggagagctagaggacgagatgaatcgatggaagagtcgtagagagacagccgcacatgct

SEQ ID NO: 2477 - DNA, 468 bp, Oryza sativa
  Clone ID: uC-osflcyp046d11b1
attaattaccttggtgataagcagcgtgcaccagggggtattcttggaaaaaggagcatgttattccttgttccaccctcagacttctctgaacaagtactgagggttccaggtaaagtcagcatatctggagtcattctgaagtttgagcagtcagatccagaagtttcctcgccaactcgcaaaccagaaacatttgtgagtcatttgaaccatgatgttcgtgctcatgaggatctagatgcattgagaagaatcaacccaccagatatcaggccacttcctcagggttcagattatctcgagttgtcgcctggaagctataatccagcaagtgcacatttggttccgccttacaagtttggaaatgcctcttcatatttagaatctgaattagctcatcaaaagcatccacctgactcccacagggagatcgcacatgacatgcagcagcaacacccagatgta

SEQ ID NO: 2478 - DNA, 174 bp, Oryza sativa
  unsure (1)..(174): unsure at all n locations
  Clone ID: uC-osflcyp046e01b1
ccccaccagaacccccgcgcccacccacgcccccactttgttccataccatcaggacatcacaacacaccaangggccccctttgacaccaccaaggggtaccaaaaacaccccccccaggcacacaccctgcacaggacgacccccccccccagcccaccctgctcccacccc

SEQ ID NO: 2479 - DNA, 434 bp, Oryza sativa
  Clone ID: uC-osflcyp046e05b1
gatcgttctatctatagcagcagcctcggtagctctggggcggtttatatctagctagcgggctggctccagaagaaatggcaaagtcgtcgtcgtcgtcgatcaggagccttctcctcgccgccgccctcctcgtcgccgtcggcatctcgccgcacgccgcggaggctagtagtggcggcgccgtcatgggcctcgtcaccggcgtagtcccgtgcagcgccgggagctccatcaacgcggcgtccgttccgggattccccaacgccgccgtgcaactggagtgcgggggcagggcggtggccggcgcgacggcggacggcagccgcgcgttcgccatcaacctggggaagctcaccgcggcgacactcacgccgctgctcaacgacaggtgccgcgtggtcgtcaccacccccctggccgggtgcgacgcg

SEQ ID NO: 2480 - DNA, 501 bp, Oryza sativa
  Clone ID: uC-osflcyp046e07b1
gcttatttgattctgcaaagcaagcaaggattacgcaggtgcttattgataaataccagggggggcttaaccctgcaaatcttatacctacaagtactatgtcagatgttgaccgggccctggaaagactagattctaaggctgctgctgagacacttaaaaagggcagggaaaaaaaggctatggatcctttatcattgctggctatatctataataaatgagcaacacattgtatgatatactgaatcagagagatctatccctggaccagatgagaaatcaatttatccacaaagggaggaattcagaatggcgaccatcaccaatactgtgcaagctttttgacataggcaatcctttcatgggaaagccatttcatgttctaatggccaagaagtaagatggacagccttatgttcatgtcagaatccaccactaggacaaacgaagtggaaagaccgagtattgttccacatcatacttgtgtggtaagagcaac

SEQ ID NO: 2481 - DNA, 511 bp, Oryza sativa
  Clone ID: uC-osflcyp046e08b1
catgttgatgggagagcaccaaggacacgcgactagcggggccgatcgaccgcctcctggggccatatcttccggtcgagttcttggtcgatctcttccctcctccacctcctcctcacaggttcttggtgtagcttgccactttcaccagcaaagtttcatgtctgatctcgacattcagatcccaactgccttcgatccctttgctgaggccaatgctggagactctggtgcggctgcaggatcaaaggactacgttcatgtacgcatccagcagcgtaatggccgtaagagcctgaccactgtccagggattgaagaaggaattcagctacaacaagatcctcaaagatctcaagaaagagttttgctgcaatggtactgttgtccaggacccagagcttggccaggtcattcaacttcagggtgatcagaggaagaacgtatcaaattttcttgttcaggccggcattgtgaagaaggaacacatcaagattcatggtttctgagca

SEQ ID NO: 2482 - DNA, 509 bp, Oryza sativa
  Clone ID: uC-osflcyp046e09b1
gcgttttgtagttctggggctcttctttcactacgggggaccaactctctgtttacagcgccgttggtctctggatgacatcagtcatatgtgagatctggtttggattctcctggatcctggatcagttccccaagtggtgtcctatcaatcgcgaaacttatgttgataggctgattgcacgatatggagatggagaagattctgggttggcacctgtagatttctttgtcagtacagtggatccattgaaagagcctcctctaatcactgcgaatactgttctgtccattcttgccgtggactatccagttgagaagatttcgtgttacgtgtcagacgatggttcggctatgctcacatttgaatcacttgcggaaacagcagaatttgctaggagatgggttccattttgcaagaagtactccattgagccacgtgcccctgagttctacttctcacagaagattgactacttgaaggacaagatacacccatctttcgtcaag

SEQ ID NO: 2483 - DNA, 434 bp, Oryza sativa
  Clone ID: uC-osflcyp046e12b1
attgttattataattaacatccgaatagacaaggagtggtttgttagcgaccacgggcgcagtcccaagaacccgttcgatcgatggctgcttccgacgtgcaccacggcggcgccacgccggcggcggcggcgaccgccgtgccgtgcgtcacgctcaactcgggccacgcgatgccggtgctgggcttcggcaccggctcgtcgaccccgccggccgacctggcggcgaccatcgcgcacgccgtgcgcctcggctaccgccacctcgacaccgcggcggtgtacggcaccgagggcgcggtcggcgccgccgtcgccgaggccgtgcgctgcggcgccgtggcgtcccgcggcgagctgttcgtcaccaccaagctctacatggacgacgcgcacccgccgcgcgtggtcgtcgcgctccgggagtcgctg

SEQ ID NO: 2484 - DNA, 515 bp, Oryza sativa
  Clone ID: uC-osflcyp046f01b1
gcggtggacctacaattacaatggaactaacaagtggcttagaagtttcgatcagcgtgtgcgtgagagcattgactatgcaatttgcttgaacagcgttggttcctgggacaatgaactctggatgcatgtgtcaaagccaccagaaaacccctacattaaacaaatctttgaagatttctctgatgtctctaaagagatgggtgtttcagttggaatcaagcacaagaagattaatgtctcaaatcctagggttgcgtgggaacatgagcagttctcaagatttagggtgactgcactaacactttcggtatttgtcttttcttctgactttttagaaagcaccggtggcctttatgacactagagaatcagcagatgctgagtcagtaattagaactgtcagattagtttctgaaagtcttgcgagacacatctatggactaaaaggaaagaatattgatgtttttgcggagaacagcagtttagccatcaaccctgactacatccagtcct

SEQ ID NO: 2485 - DNA, 497 bp, Oryza sativa
  Clone ID: uC-osflcyp046f02b1
acaaagcacccaccaaatccaccggggggcattaaactgaggcagggagaagaacaagaacaagccgccgcggcgagatgcagcagcagatggccatgccggcgggggccgccgccgccgcggtgccgccggcggccggcatcaccaccgagcagatccaaaagtatttggatgaaaataaacagctaacttggggcatgctggaaaatcaaaacctagggaagttgggtgaatgtgctccacaccaagctcagcttcaaaagaatctctcgtatgtggctgccattgcagatgcccagccaccatcgaatgcaagagggcggcctcagacgatgcaccctggggctaccccaggtgctgggcatcacatgtgccatgtaccgatgttccctccaagaactcccttaaccccacaacagatgcgagagcagcagcagcagcaacttcagcaacagcaagctcaggctctagccttccccggcccgatgctaatgaga

SEQ ID NO: 2486 - DNA, 495 bp, Oryza sativa
  Clone ID: uC-osflcyp046f04b1
ggggccgggccggcatatcctgcctcgtcccacccgtccggcgatattatgcttgggagacttggaagcacttgagagcgactcatgtacacctttcctggggtgacactccgacattttacttgattccccagaccagaatgacatagttgagtactttgctgatgccatcaacgggccttcacaatcagacgaagagaagtaacagaagagagtttcagactaaaggcctggccggccgtgcccatctcatgtagtgtaaccttgcagagaaattgcgacagaattctaactgtagatgcgcatggtggtgcggcaatcggcatgtactgttgtcgctgctgaagaattttgtagggggtcaatcctaattctttccaataaacagtagggcagattatgcagctggctacaaggatcaaaagtttacagatgttaaacctcatgaactctctctggaattgctcaagaagtgaactgttcatgtggacctgc

SEQ ID NO: 2487 - DNA, 318 bp, Oryza sativa
  unsure (1)..(318): unsure at all n locations
  Clone ID: uC-osflcyp046f05b1
ttcttctcctcncaaaaacgaatggtaggccataatcgagacggtttctttcggccaaaccgagggtcgcaacaaagaggagtgtggggttgaggaagtcggaagtccgaaggcatggcagcggcggcggcgaggcagacggtgtgcgtcaccggcgccggggggttcatggcctcgtcgcacgtcgagctgctcctctcccgggggaactacgcggtccgcggcaccgtgcgggatccaggtgatgccaagaatgatcatctcagggcgctacaaggtgcccaggagaggttgcagctgctcaaggctgatctgttg

SEQ ID NO: 2488 - DNA, 390 bp, Oryza sativa
  Clone ID: uC-osflcyp046f08b1
atttattccattcatggatggtgggcatcacaggggaacaataacataaacggacagactgatctggttgcctactgtgacggtggcatcaaggataacacaaactcagaaggggagttcctttctgagctgtttactatgctgaagaagtctggagctaaatatacaattatttatgctattaatgcctatggcttgctagagagccctataaacctgccgatgggcatgtacctagaagagaagactaatactactaaacccggccgaggaaaatgagatggggagtgcttagtaaaaccaactctgctagaacgaaactctggcggaataacgctgataatcatcttgatatcaagactgatatgtatgacgggaattgattcccca

SEQ ID NO: 2489 - DNA, 505 bp, Oryza sativa
  Clone ID: uC-osflcyp046f09b1
cggactcttgggcgagctcctcgcctcgcctcgccgtcgccgccctcgcggcgctgccggcgagccgccgccggcctcctcctcctactccttcccggttcggatcgggcccaagagccggactgcagccatggcagatctgcaggagcccctcgttcgtccgaagaggaagaaggttttggtggactacttggtaaagttccgatggattctggtgatctttgtggtgctccccatttccgctctgatctacttcaatatctatttgggcgatgtctggtctgccatgaaatctgagaaacgtcgccagaaggaacatgatgacaatgtgcaaaaagttgtgaagcggctcaagcagaggaacccaaagaaggatggccttgtttgcacagctaggaagccctggattgctgttggcatgcgcaatgtagactacaagcgtgctaggcattttgaggttgacctttccgccttcaggaacattcttgagattgacagagagaga

SEQ ID NO: 2490 - DNA, 453 bp, Oryza sativa
  Clone ID: uC-osflcyp046f11b1
tcggttctcttcctccgagagggcctcgccaccattgccggctctcttggaatctcgcgggggcgccgccgccgccgccgccgccattagggcttagggctcaggaggctcgcggcgatgtggcggagggccgcgagggctcgccggcggatcgccggggcgcgggcggcgtccacgtcagcggcggcggcgggggagaagagctgccacgccgtggtggtgcctcggttcggagggccggaggtgctggaggtgatgcagggggtgccggcgcccgatctgaagccgggggatgtgcctatgcgcgcgcggagcgacttcatcaacccttttgacctgctaatgcggtctggttatgggcgtacaatatttgagccagtgctacctatgatcattgggccggatataagtcgtgaagttgcagctacagggacttgtgtggcggcctttact

SEQ ID NO: 2491 - DNA, 275 bp, Oryza sativa
  Clone ID: uC-osflcyp046f12b1
tcgcttactcttacactatcattggcaggactcaagggcgggcaacatttgaatcatcggggggagccactaccacaacaggtgaccgactcgctaggaggcctgcactcactagaataagatatcgcgtgaacggaagatgggctccaactaccaggcggaagagaccgtgtaccaggagcggcacctcaagcacctccagtagggcaagggctacctaacgccctacctgggcactgcgcacacgacggccccacgcgctccacccttgatcg

SEQ ID NO: 2492 - DNA, 220 bp, Oryza sativa
  Clone ID: uC-osflcyp046g02b1
gccgacttgttcaccgcgctgaaggccatcagcatggcgatgggcgacattaaaccggaacacaggggtgcaacacatatgctggattctgcgctgcgcggccgcgcgatgcctgatacgactatggaccagcgcctgcgcctgggcctacctgaggagtgcaaggaccacggctaccggctgcatcacctgagggcggacgacccagaggtgcacgcca

SEQ ID NO: 2493 - DNA, 337 bp, Oryza sativa
  Clone ID: uC-osflcyp046g03b1
gtcagttgcggcgggaggaagcacgacgacgacgggaggcacttattcggaggaatcccaggcggagcccaccccgccgcggcgccggccatgccgttcctctcgacgccgtcattcgacctctccgccggcgccgagcccaccctcggcccgcgctctccccctcctccccctgacgccgctcacccgccgaccccgcagcaggccgcgccggcgtcggaggcggcggcgcggaggctgcgggaggcggaggagcggctgcgggaggccatccaggagctccaccgacaccagcacgggggaggaggggatggggatggggacggaaagggggctt

SEQ ID NO: 2494 - DNA, 314 bp, Oryza sativa
  Clone ID: uC-osflcyp046g04b1
ccgggccccccgaattcccggtcgccacccgtccgccggctgttttgtctgccgtcaaacacgacccaaaggggggggtttgtactaaactgccggaggacaattccaatgaatcaagcactcacacaaaacctggaggcactgacttacaacaagactgaccatagttgcacctcacatctgaaacaaatccaccgatgatccggctggtaaacgacgaccttgactgatctgctgagggatcttcattctctgtcaagaccaggactcctgccacatgcctgtcttactataattcgattgaaagatgacac

SEQ ID NO: 2495 - DNA, 501 bp, Oryza sativa
  Clone ID: uC-osflcyp046g05b1
cgaggttaatggcgatggaggcggtggcgatctgatccgctggtcccgtttggacctcgcgctggtctccctccctcgcggtgtctcgggtaggaaatggcgatcatggtggatcctccaaatgggatgggtaaccaagggaagtattactactcgatgtggcaaactttgtttgagatagacactaagtatgtgccaatcaagcccatcgggcgaggagcttatgggattgtttgttcatccataaatcgtgagaccaacgagaaagtagcaataaagaagatacacaatgtttttgacaaccgtgttgatgcactaaggactttgcgggagctgaaacttctccggcatctccgccatgagaatgttattgctttgaaggatataatgatgccagtacacaggaggagttttaaagatgtgtacttagtttatgaactcatggatactgacctgcatcagataatcaagtcacctcagggtctttccaatgatcactgc

SEQ ID NO: 2496 - DNA, 501 bp, Oryza sativa
  Clone ID: uC-osflcyp046g06b1
ctccttttgtttctcctccacgccgccaccctcgcccgggggggtttcgtcgccgcgcggggggcgaccccgccctccatcgccggcgggccaccccgcgcttcgttggttcgggccgcgccacgacgctgcctcggctcccttctccctccaggctgcacgacttgaaattctgtgtatgaagtagcatttactggagaaagctcaagggaaactatcatggatgccaactccagtttaaatgagcaaaagtctgaagaactcaagcttaaagcaaatgatgcctttaaagcaaacaagttctccctggctatagagctctatagtcaagccattgagctaaacagttcaaatgcagtttactgggcaaaccgtgcatttgctcatacaaagttagaggaatatggaagtgcagtgcaagatgcttcaaaagcaattgaaattgatgctagatactcaaaaggttactaccgacgtggagcggcatatcttgccatgggt

SEQ ID NO: 2497 - DNA, 515 bp, Oryza sativa
  Clone ID: uC-osflcyp046g07b1
ggtttttgtctgcacgttggcgccgagaatcaggcggggggatgattgaacccaagcaagagctaagcaagcgcctgttattcctttcagctgggtttatgaccgcaaagtgcagctttgatcatgatcagtgagcaaccgagactgcatcctatatattggttctaagatatgaggttctctatatggaaaaaaatctaggttatctagctggggtagaatgcaattacctgtccatctgccctcacaaaatctgttgtcttttaagttgataacagtgtcgatgagtctggtgagaagctgatgtgagatgcaacagagtgaacttatgttgtattgatgtgagatgagtatggtgacatttatgtgtacttgcaggttttacatgacttgtataagttttaaagtaataatggagatttgtatacagacaagcgtgtgcactgtcgcatgattaagtagtctaaaatccagactatcttttgtgctctgaatttagcagtaataagattgat

SEQ ID NO: 2498 - DNA, 358 bp, Oryza sativa
  unsure (1)..(358): unsure at all n locations
  Clone ID: uC-osflcyp046g08b1
gcctgttgcggcgggaggaagcacgacgacgacgcgagccaccgaagcggaggaatcccaggcggggcccaccccgccgcggcgccggccatgccgttcctctcgacgccgtcattcgacctctccgccggcgccgagcccaccctcggcccgcgctctccccctcctccccctgacgccgctcacccgccgaccccgcagcaggccgcgccggcgtcggaggcggcggcgcggaggctgcgggaggcggaggagcggctgcgggaggccatccaggagctccaccgccaccagcacgggggaggaggggatggggatggggacggganngggggnggnnggnnangaggagggcggc

SEQ ID NO: 2499 - DNA, 486 bp, Oryza sativa
  Clone ID: uC-osflcyp046g09b1
gttctttatgccacaagagttaccccctaatgcatatcttgatacgagtaactgtggacaaaatgctggagatgttttcctccacatgtcagacttgctcaatacaatgtctccagtacctgctgcattcctgaggcccaaatgcgctctctgggactgccctcggcctgctcaaggatcagaaaggtggcaagattattgcagcatgtatcatgctgatttggccgtgaaggaagagggtccaccaggcacaatgcctgtgatccgtccaagaggtatcgatttaaaagatggccctctgtttgctgccctcagtgcaaaaatccaaggaaagcatgttggtattcctgtctgtgaaggggctgcaactgcgaagtccccatggaatgcacctgaactttttgatctgtacatttttgagggtgaatctattagagagtggctgttctttgacaagccaagacgagcatttgagagtggaaatcg

SEQ ID NO: 2500 - DNA, 498 bp, Oryza sativa
  Clone ID: uC-osflcyp046g10b1
ccttctttgtcgccgatccgatccgcctccgcctgcgcctcgcggcccggcctgcctgcctcgccgccggtggtcccgatccgaggttgctcttgctgggcatcaaacatgggtctggtgaaggatggcgccgccgatttggaggaggggaccctggagatcggcatggagtacaggactgtttctggtgtggcaggacctctggttatcttggataaagtaaagggcccaaagtaccaggaaattgtaaacatccgattgggagatggcaccactcgccgtggccaagttctggaagttgacggtgaaaaggctgttgtgcaggtctttgaaggcacttcaggaatagacaacaaatataccactgtgcagttcacaggagaggtcctgaaaactcctgtctcacttgatatgcttgggcgcatttttaatggatctggaaaacccattgataatggcccacctattttgccagaggcctacttggatatctctgga

SEQ ID NO: 2501 - DNA, 492 bp, Oryza sativa
  Clone ID: uC-osflcyp046g11b1
gatgatgttgccgccgccgcctcatttgctcccggtgtgcactacttgaagttggcggggggaccaataactcggtgtcgcccccaccgtccgggctgcgttgcaaaggcgtgacgcgagcttttatgctcgaggcagcttgcttcttggacgctagtagcagcagcatcggcgggagtggtacccgcgtgcacggaacttctgcaaaagaaagattctcggatggaggtcgagacgtcgtccgggacgggcgaacgcggggcgggcgcgggcgcgcagcatcagcctccgccggagccgcaggcgcagccggcggccaagaagaagcgtgcactccccggcatgccagatcctgatgcggaggtgatcgcgctgtcgcccaagacgctgctggcgactaacaggttcgtttgcgagatctgcaacaaggggttccagcgcgaccagaacctgcagctgcaccggcgcgggcacaacctgccttggaagctg

SEQ ID NO: 2502 - DNA, 489 bp, Oryza sativa
  Clone ID: uC-osflcyp046g12b1
ccttcttctcctccgccacccgtcgccggccggggtgtggctcggagccagcgcgccggggcggccggagcccggagggacaacgcaacgatctctctctagctagatcgagctagagctatagcttagctcagctaattataatatatagctaggaattgattaacaattaatggggaagcgcagcgcgccccggtaccccgacgacggcggcggcggcggcggcgggatttgctgcgtgctgtgctggtgctgctgcttcctgttcctgatcgtcgcggcgctcgccggcgcggcggcgtacgccctgttcctgtacaagcccaaggcgccgtcctactcggtgagcaacatgtcggtgtcgcagttcgacttcaactccaacgacctgacgctctacaccaagctggtggccaccgtgcgggccgagaaccccaacgagatgatcggcatcatctacggcgacggctcccggacggtcgactccta

SEQ ID NO: 2503 - DNA, 497 bp, Oryza sativa
  unsure (1)..(497): unsure at all n locations
  Clone ID: uC-osflcyp046h01b1
ttttattgacaccattcaaacaatttatgctaggatgggatgtacttgagagacgctctaggggtttctaaagtctcnagtaaacaggcgatgagtgaagaagctgctgaagctgctaaagagaaaggtaacattgcatttaaggagaaacaatggcaaaaggcaataaatttctatactgaagcaatcaaattaaataataaagtgggtacatactacagcaacagagctgctgcttttctagagctagctagttaccgccaagctgaggcagattgcacaagtgccatcgatattgatccaaagattgtaaaagcttatttgaggagaggcactgcaagggagatgctgggttactacaaggaggctgttgatgatttcagccacgcccttgttctagaacccatgaacaagacagctggtgtggccatcaataggttaaagaagctatttccgaaatactgggctgttggatttttcttctgcataaagatact

SEQ ID NO: 2504 - DNA, 314 bp, Oryza sativa
  Clone ID: uC-osflcyp046h02b1
cccgccccccccacacaccccccccccggccaacccaccccagcatacagacccacccccccccccccagatcccccaaaagacgcccccccccccaacccaccccccccccacaaccccccacaaacccaccccacccaacaacaccccccccacccccagaccccaaccatccccccgccaccccaacaccccccccccccccaaccaccccccgcaccccgacccccacccacggcccaccccccccccctcccccacccccccccgcacgccccccccccccccaaaggtggtcccaacccccccccccc

SEQ ID NO: 2505 - DNA, 451 bp, Oryza sativa
  unsure (1)..(451): unsure at all n locations
  Clone ID: uC-osflcyp046h03b1
actccatatcaaaggacatnaagggtggtgtcaattcaaagcaaggtgtggaagcatcaacatcggttggggcattgcttgcaaaacgtgcaataaaggatgatattcacaatgcgatttatacaccaaggaaaggagatcggattgcagggaagactgaggttgtgctgcgtgcacttattgataatggggtggaagttaaggtgaaactcaagccaaggaagccaacaaagaatgcactggctatgcagcattctacaatctcactgatggctaaactattcatccccatgactcctactagaaatgctcagaagtcatgagagtttctgttactacatggactggaagtctggaagagctggtgctactggagcaccaccctctgtgtgcaaactttgggtcaacacttttttgtcataagaagggagaaccagctctaccttatagc

SEQ ID NO: 2506 - DNA, 343 bp, Oryza sativa
  unsure (1)..(343): unsure at all n locations
  Clone ID: uC-osflcyp046h04b1
attcttttctcacccacgtgcttcttctccaagggggggttttcttgaacccaccctggggtccaaacacccatcactacctnaatcagacctcgataaaccatctctacctcctcatcaacctctttccagtctacctccagcactctcatttccaacacctcatgctactcagaaaaatctgatgttacatctgctccacacctcattctcacaatttatgtcctcctgaacacatcccatctggtttaaccacccctcatataccatcctcaaatatcaccccactcccatggcaacacttactttccactccagaatttcctcagatgcaccttcatcc

SEQ ID NO: 2507 - DNA, 472 bp, Oryza sativa
  unsure (1)..(472): unsure at all n locations
  Clone ID: uC-osflcyp046h05b1
gttgattctctcaatcagttgcttcttctncaagggggggttttttttgacacacccgggggtaaacacaaacatcaatacctcaatcanacatggataaatcatctctgggtgctcatcaaagtctttctagtcaacctccaagaatctcatttgcaacagtacatgctactgagaagaatatgatgtgtgatgtgctccaacctcattctcataatttatgtcctcctggacagatgccatctggtttgagaccacctcatataccatcctcaaatataaccccactcccagggcaacagttactttcgactccagaatttcctcagatgcacttccagcctaatgttatggcaccagctaatgagcttctgcagagtcatatgcaaacctattcttcaccagatctggcttatcctaagccattggatttccatccttatactctccagccagttgtcccttctcatca

SEQ ID NO: 2508 - DNA, 172 bp, Oryza sativa
  unsure (1)..(172): unsure at all n locations
  Clone ID: uC-osflcyp046h07b1
ttagataaccgcccaagcaccacaacannaaagggggggtttaatttgagtanaggtggggttttaacaccaacaacaccaacattgtcggcgtagtcatacccgtagcccccgtaccaaccgaggagggagagcgccacactgtgctgagcgccgtcaccgaccccgccta

SEQ ID NO: 2509 - DNA, 522 bp, Oryza sativa
  Clone ID: uC-osflcyp046h08b1
atatattttgctctacgaggaaattaaatttgaggcaaagtttatgtgagaacatattggcggaaaagccactttccgtgctagtcagcttgaagatggggacatcatctgtttccaaaaatcacctatacctgatagtgacactcaaatgcgttatccagatgtcccttcgtatctggagtatgttcataataggcaggttgtgcactttcggttattggagaaaccaaaggatgatgacttttctttggaattgtcaaaacttcatacctatgatgatgttgttgagagagttgcccgtcagcttggtgtggatgatccagcgaaaattcgtctaacatcccataactgctattcgcagtagcctaaaccgcaacctatcagatatcggggagtggagcatcttttggacatgctcattcattataatcagacatcagacatattgtattatgaggtgttggatattccactgccagaattgcagggcctgaaaaccctgaaagttgcattccaccatgc

SEQ ID NO: 2510 - DNA, 497 bp, Oryza sativa
  Clone ID: uC-osflcyp046h10b1
gttgatcttctcaatcagttgcttcttctgcaaatggtgctgatcctgataagatgcaggggtgaggccgtgcatcaatacctcaatcagacatggataaatcatctctgggtgctcatcaaagtctttcgagtcaacctccaggaatctcatttgcaacagtacatgctactgagaagaatatgatgtgtgatgtgctccaacctcattctcagaatttatgtcctcctggacagatgccatctggtttgagaccagctcatataccatcctcaaatataaccccactcccagggcaacagttactttcgactccagaatttcctcagatgcacttccagcctaatgttatggcaccagctaatgagtttctgcagagtcagatgcaaacctatcctgcaccagatctgcctcatcctaggccattggatttccatcctcatactctccagccagttgtccctcctcatcagcagcctgctgccatggttcactcc

SEQ ID NO: 2511 - DNA, 544 bp, Oryza sativa
  unsure (1)..(544): unsure at all n locations
  Clone ID: uC-osflcyp046h11b1
ccgggtcaccccgcgtccgtttactccccccccccacaccccccccccaggggggtcctaacttaccccccccggggggaaaacccccccccaaccccancgtgaccccggcccacccccccccggccgcccacccaccccctccaccacccccccccccacaccccacccccaaccccaccaccccccgccccaacccaccaaccctgcaccacccccccccccaccgcccagaaccccccgcccccccctaccccccccccccccccccgcccacccccccacaccccccccccccaacccaacccccccacccccaaccccccaccccccctccgagcccccccacaccccccccaccccccccccccccccaaccctaaccccccccccccaaccgacccccccccccccaccacaaccacacccccccccccccccgaacccgcccccccccccacccccccccgcccccccccccccaaaccccctcccccccccaacaccccccccacaaccccctccccgccccccccgccccccc

SEQ ID NO: 2512 - DNA, 92 bp, Oryza sativa
  Clone ID: uC-osflcyp046h12b1
attggtgagaaggtgagatctgtaccggtagtgggtatgtcttaattaaatctgagcgtggtcaatgaaatatggtgttgtgaattaattat

SEQ ID NO: 2513 - DNA, 404 bp, Oryza sativa
  Clone ID: uC-osflcyp047a01b1
atgataggaaaaagaaaatcgaaacgctctcacgggctcaccatcaattcgacgcatcggtgtactaaactcggctactttccccatctcctcctcgtcctcctctcccggtggtccgattagacgaggcgtcgtcgcctcgcttgccccccgcaaaccggatcggcagatccggccgcgcatcccgtccaccacccggatggcttgcgcctccccacccatcgcggccccggggatagcgtagcatgggccaatccccctcgactccccgcctcgccaaatccagctcctcctcttcctcttccacctccttcgcctcacccttccctgctcttcctacttctactcctaccgtggcgccgtccaaggcgcagcgtacgatgctggtggtggcggtggacgcg

SEQ ID NO: 2514 - DNA, 522 bp, Oryza sativa
  Clone ID: uC-osflcyp047a03b1
atctaaccctagctagctagctagctaagctagcacgcacccatggcgtcgtcttccacctcgagctcgctcgccgtggcagcgatggtggccgtcgtcctcctcctcctgggtgccaccgccacgtccacccaggcggcgcgcctcctcgacgaagaactccccaccgccgccatcccggcgatccccggcgtccccggagtgccggcggtcggccccgggatcccggtgatccccggcgtgcccggagtgccggtggttggccccgggatcccgttcgtgccggtgatccccggcgtgccggtggatcgtgccgatcatccccggcgtgccgatgatcgccggcatgacaaccctgccagtgccgccatttgtgccgccgattgatcccggcgccggcgccggatttctcggcgtgccgccggcgtcgtcgatcaccgtgcaggaagacccacagccgtcgatgccgtccgtcgttccacccgtgccataggtgttaatcaactccggcgagccaccatg

SEQ ID NO: 2515 - DNA, 540 bp, Oryza sativa
  unsure (1)..(540): unsure at all n locations
  Clone ID: uC-osflcyp047a04b1
cttattcgtgggccgccgccgcagcctcctctcggctgctcccatcctctccttcgagttagcttcctccttattcaaccatgggtaaggagaagacgcacatcaacatttgggtcattggccacgtcgactccggcaagtcgaccaccacgggccatctgatctacaagcttggaggtatcgacaagcgtgtgattgagaggttcgagaaggaagccgctgagatgaacaagaggtccttcaagtacgcgtgggtgcttgataagctcaaggccgagcgtgagagaggtatcaccatcgatatcgccctgtggaagttcgagaccaccaagtactactgcacggtcattgatgcccctggtcaccgtgacttcatcaagaacatgatcacgggtacctcccaggctgactgtgccgtgctcatcattgacttcaccactggtgngtttgaggctggtatcttcaagatggccagacccgtgagcaccctctttttgctttactcttggagtgaacaaatgatctgctgctgcaacagat

SEQ ID NO: 2516 - DNA, 344 bp, Oryza sativa
  Clone ID: uC-osflcyp047a05b1
cctgtttctgaacctagctcctttctatcgtggggggggtttgtgaggtatgtgcctgcgatcgatcgccgccgccagtagacgcattgagaccggggggaaagtggcttactttatcaatattaacatagtttgctatgtcgaagggccctaggggagcaaagttctcgcggtgaatgtgtcggacgaaaggaggtccctaagtgagactgtaagcaaggacctgcagcatgcacgtgctctacatgcagcatcagtactcagcaccaagcacgcatgtgccagctagacgaaacgttcagaagcagaggatgatgccgccataactatggaagctatgacat

SEQ ID NO: 2517 - DNA, 389 bp, Oryza sativa
  Clone ID: uC-osflcyp047a07b1
tttttgccccctctctgctcctggttagtattacccagtgaaattattagcagggttttaaatcttctgttatagctgctatctttcgctgttgctgtttgagaagtgttttaatttatttattctcatatacaatttagctgctaaaaaaaaaaaaaaaaaaaaaaaaaaaaaaaaaaaaaaaaaaaaaaaaaaaaaaaaaaaaaaaaaaaaaaaaaaaaaaaaaaaaaaaaaaaaaaaaaaaaaaaaaaaaaaaaaaaaagggggggccccttttaggggacccaattttacttccccgggcttgcaacgtaaaattttttttttggggcccccaaatttaaatcccctgcccgcgttttaaaaaccggggcacttggaaaaccctt

SEQ ID NO: 2518 - DNA, 475 bp, Oryza sativa
  Clone ID: uC-osflcyp047a09b1
tttttgaaggagaagaaggagaggagcagccatggcgttgttggtggcagcggcggcgagcacgttcctggggacgaggctggcggacccggcgccgcagagcgggaggatcgtggcgaggttcgggttcggcggcgggaagaaggcggcggcgaagaaggcggcgaggccgtcggcgccgacgacggacaggccgctgtggttccccggcgcggtggcgccggactacctggacgggtcgctcgtcggcgactacggcttcgacccgttcggcctcgggaagccggcggagtacctgcagttcgagctggactcgctggaccagaacctggccaagaacaacgccggcgagatcatcggcacccggttcgagaccggcgaggtgaagtccaccccgttccagccctacaccgaggtgttcggccttcagcgcttccgcgagtgcgagcttcatcacggcccgtgggccatgctc

SEQ ID NO: 2519 - DNA, 503 bp, Oryza sativa
  Clone ID: uC-osflcyp047a10b1
ttttgccttatagatgatatgggtgctgaggctatgatgatggaagcccttgagaaagttgagaaggagattaagaagccacttctgaggagtgacaagaagaatatgggtctccttcttggcagagtttgagaagataaacaaaaagcttggaatccgcaaggaggatcttcccaagattgaggaagagcttgaattggaaattgccaaaagtgagctgacggagcttaagaaggaatgtgttgaagcaatggaggttcaactaaagagggaggagttcaaagacgaggagatgcctgatgtcaagaagttggacatcagaaacttcctgtaggccataaatctctcaaggcattttgaaatgctcggacactccataatggttttcttttccagtgacagccggcgctgtaagcataccaatgaatgttattcttgctttttgtaataaaaactgcacctgagtacaaagacaagtcaacggttgagttggattgcttgtt

SEQ ID NO: 2520 - DNA, 485 bp, Oryza sativa
  unsure (1)..(485): unsure at all n locations
  Clone ID: uC-osflcyp047a11b1
ttgaacggatccgggcgcagggtgcgagtgcgtgaggcccaatccccaaatcccccccccccctcgccgccgccgccgcccgtctgcacgcaggcctcctcgtcgcttcacttcatcaacaatcaagatgagtcgtggtgggagtgccggtggtggccaaagttctctgggttacctttttggaggcaatgaggcccctaagccagctgctaaaccagcacctgcagctgcacctgcaccagcgccagcaccagcaccagctgcggctgtggctgctcctgctgagaaaccatcacctgcaaaggctgatgccaccaagcagattccagctgggattcagggcagccggagcaataacaactaccatagagctgatggccagaacactggaaactttcttacggatcgcccttcgacaaggtccatgctgctcctggtggtggatctntcctgggctacctctntggtggaaactgaaggagtga

SEQ ID NO: 2521 - DNA, 508 bp, Oryza sativa
  unsure (1)..(508): unsure at all n locations
  Clone ID: uC-osflcyp047a12b1
gtgtgaagcggagccagatttccctctcctctcctctcctcctacgcgacgcctcctagccgccaccgcttcaccaaatcaaaagctctcgctgctcctcgagagggagttggtggagagagaaagagagagagagagatggcgtcnccgtcgtcgtcgtcgtcgctgtgctcgaccttcgcctcgccgcgcgccgcctccctcggccgccgcctcgccttctcctcgcccaggaaagcattccgagtgagggcatcatccagggttgacaagttctcgaagaatgacatcatcgtgtccccttccattctttctgcaaacttttccaagcttggcgagcaggtaaaagctgtggaggtggcaggatgtgactggattcatgttgatgtcatggatggacgttttgtgccaaatatcacaatcggacctttggttgttgatgctctgcggccagtcactgatctttcgttggatgtgcatctgatgaatgtggaacctgagcaacgag

SEQ ID NO: 2522 - DNA, 526 bp, Oryza sativa
  Clone ID: uC-osflcyp047b03b1
gtgtatcgcacagcccactttaggccctgatgggaagataaaggagcctgagagcaatgtgcttttggcttcaatagagaacatgcagtatgctgtgacggtggatgttctacatactgtgttctctgcttttggtactgttcaaaagattgcaatgtttgagaagaatggtggaatgcaggccttaattcaatatccagacatcacaacggcagcagttgctaaacaagctttggaagggcactgcatatatgatggaggttactgtaagcttcatctgtcatactctcgtcatactgatctcaatgtaaaggcacatgatgagagaagcagagactacactgtttcatcagatcctagtgcacaaatgcaagctgcagcgcaagccccaggtcctagcactctaggagtggcatggcaaaacaccgcacccagtgcttccttttatggcagcactgcggcagcgactcctgttggacaagtgccagcttggaatccaaacatgcaggcaggtgcttttggatcg

SEQ ID NO: 2523 - DNA, 450 bp, Oryza sativa
  unsure (1)..(450): unsure at all n locations
  Clone ID: uC-osflcyp047b05b1
ggcgattcctcctgagcggtccatcacgccagtgcttcaggattttatggatcccaacatgttctacctgccagcatactactatggaggttacgacggatctgtgagcgagtgggatgattatcctagatatgtaaatccagatggagtggagattaccccagcagtatatggagatatttatggatatgggtatgctccttatggtgcatactcccctgctagttccccagttccaacggttgatggccaaatgtttggccagcactatcagtatccaacttcgtattatcagcctcctacaccagttccttctaccactcaaggcgacctgcagccttctgccaatcctgacaagccaacagctaaggcagatccagctaaaacaaccacanatggggcttctaatggtactggtcacagtaacagtggaactgtaccccttggatc

SEQ ID NO: 2524 - DNA, 461 bp, Oryza sativa
  Clone ID: uC-osflcyp047b06b1
tttttctccccctctttaccttttcctcctcggttcggttccgtggttcgtctagggtttagtgggttgagatggcggcgccggatgtcgagtaccgctgcttcgtcggcggcctcgcctgggccaccgacgaccgctccctcgaggccgccttctccacctacggcgagatcctcgactccaagatcatcaacgacagggagacggggaggtcacgtgggtttggcttcgtcaccttctcctccgagcagtcgatgcgcgacgccatcgagggcatgaacggcaaggagctcgacggccgcaacatcaccgtcaatgaggcccagtcccgccgctccggcggcggaggcgggggctacggcggcggcggtggcggctacggcggcggtcgtggaggcggcggctacggaggaggtggcggcggcggctacgggcgccgtgagggcggctacggtggcggc

SEQ ID NO: 2525 - DNA, 512 bp, Oryza sativa
  Clone ID: uC-osflcyp047b07b1
cttgcttggctcttcactctccccctgttcctgcaggggtcaggcactgcctgctacaagagtggtgtaggtgattcggctagctcagcgcgaagatgggggagatcaccaatgtcacggagtaccaggccatcgcgaagcagaagcttccgaagatgatctacgactactatgcatctggggccgaggacgagtggactctccaggagaacagggaggccttcgccaggatcctgtttcgcccacgcatactgatcgacgtatccaagattgacatggccacaacagtcctggggttcaagatttcaatgcccattatgattgctccctctgccatgcagaagatggctcacccagatggagagtatgcaactgcgcgtgctgcatcagcagcgggcactataatgacattgtcatcatgggctacttcaagcgttgaggaggttgcctcaactggaccagggattcgtttctttcagctttatgtttacaaagacaggagggtggtggag

SEQ ID NO: 2526 - DNA, 494 bp, Oryza sativa
  unsure (1)..(494): unsure at all n locations
  Clone ID: uC-osflcyp047b09b1
tccagcgcatgaagctcttcgaggaccacttcgtccaggaacgcaagagagtgatggagcagactggtgagatccggtgcgccatggaccacatcctcgaggccgagaggaagggcgagatcaaccacgacaacgtcctctacatcgtcgagaacatcaacgttgctgctatcgagacgacgctgtggtcgatcgaatggggaatcgcggagctggtgaaccacccgagcatccagtcgaaggtgcgggaggagatggcgtcggtgctgggcggcgcggcggtgacggagccggacctggagcggctgccgtacctgncaggcggtggtgaaggagacgctgcggttgcgcatggcgatcccgctgctggtgccgcacatgaacctcgccgacggcaagctcgccggctacgacatccccgccgagtccaagatccttggtgaacgcgtggttcctcgccaacgaccccaagcggtgggtgcgccccgacgagt

SEQ ID NO: 2527 - DNA, 443 bp, Oryza sativa
  Clone ID: uC-osflcyp047b10b1
ttgacgcgtgggcgagtatgttctaatcgatttcttgtctgatgttgatgtgaattatggcgttatttttttgggtgatttatggtttgtttgattgcgaacagcgctcttgccgtcgtggacgatgacgacggcggcgaccaccgagaggagctgagaggcgtgctgcggctgttcccgatatgggcgacgtgcatcatctacgcggtgatcttctcccagtcgtcgacgttcttcacgaagcaggcggcgacgctggaccggcggatcggcgagagcttcagggtgccgccggcggcgctgcagacgttcatcagcgtcaccatcatcgccttatcccggtgtacgaccgggcgttcgtgcccgtggcgcggcggttcacgtgcgcgtcctcggggatcaccatgctgcagcggatcggcacgggcctcgtgctggcgctc

SEQ ID NO: 2528 - DNA, 525 bp, Oryza sativa
  Clone ID: uC-osflcyp047b11b1
taaaaaatattccccatctgtgaaattcgcaaaaccctagcgcggcggcgatgtcgaacacgagggtgttcttcgacatgaccgtcggcggagctccggcggggcggatcgtgatggagctgtacgcgaaggacgtgccgcggacggcggagaacttccgcgcgctctgcaccggcgagaagggcgtgggcaagagcggcaagccgctgcactacaaggggagcaccttccaccgcgtgatcccggagttcatgtgccagggcggcgacttcacccgcggcaacggcacgggaggggagtcgatctacggcgagaagttcgccgacgaggtgttcaagttcaagcacgacagccccggcatcctgtccatggcgaacgccgggcccaacactaacgggtcccagttcttcatctgcaccgtgccctgcagctggctggacgggaagcacgtcgtgtttcgccgcgtcgtcgagggcatggacgtcgtcaaggccatcgagaaggtgggatcccgcggcgggagca

SEQ ID NO: 2529 - DNA, 525 bp, Oryza sativa
  Clone ID: uC-osflcyp047b12b1
ctctctctctcggtgtttccccttcggccttctcgtccgccccttctctcctccaccatccgcctcaccggcgtacggctccgacgagatggccgccccgctccggcggagcctcccctccctggggcgcacgctcctctcgccgtcccccgcgcccgcgcggatgctctccgcggcggcgtccgacgccctcgtcgagatcaagccaggcgagatcggcatggtctccggcatccccgaggagcacctccgccgcaaggttgtaatatattcacccgctaggactgcatctcagcagggttcaggcaaagtcgggaggtggaaaatcaactttgtgtcaacccaaaagtgggagaacccattaatgggatggacatctactggagatccatatgctaatgttggtgaagcagggcttacgtttgacagtgcagattcagcaaaggcatttgctgaaaagcatggatgggattatgtggttaggaaacgccatacacctcttttgaggccaaatcttatgcagag

SEQ ID NO: 2530 - DNA, 527 bp, Oryza sativa
  Clone ID: uC-osflcyp047c01b1
gtcttcccaggtctgcaaggtggaccacataatcataccattactggcttagctgttgcgcttaagcaggcaactactccggagtacagagcttatcaagagcaagttatgagtaactgtgcaaaatttgcacagagcttgacagcaaaaggctacgaacttgtctctggtgggactgacaaccatttagtgttggtaaatctcaagagcaagggcatagatggttcaagagtggagaaggttttagaaaacgtgcacattgcagcaaacaagaacacagttcctggtgatgtttcagctatggtaccaggaggcatcaggatgggaaccccagcactgacctcaagaggatttgttgaggaggactttgctaaggttgctgatttcttcgatgcagcagtgaacttggctttgaaggttaaggctgcagcaggtggaacaaaactgaaggactttgttgccactttgcaatctgatagcaacattcaatccgagattgcaaaacttcgccatgatgtggaggaata

SEQ ID NO: 2531 - DNA, 499 bp, Oryza sativa
  Clone ID: uC-osflcyp047c04b1
attctattcaaacccgccgtttccaagcttgctctcctctcccccccaatccttccctcccgagtggcagggtgctcgacgggatggcgcagaaggaggccaatggcagcagcaactgggagcacaccacccgcccgccgccgacgccctcgccgctccggttctccaagttcttccaggcgaacctgaggatcctcgtcaccggcggagctggcttcatcggctcgcacctcgtcgacaagctcatggagaacgagaagcacgaggtcattgtcgcagacaactttttcactggttcaaaagacaacctgaagaagtggatcggacacccaagatttgagctaatccgtcatgatgtcacccaacccctgcttgtggaggttgaccaaatctatcaccttgcttgccctgcttcaccaatcttctacaagcacaaccctgtcaagaccatcaagacaaacgttatcggaaccctgaacatgcttggacttgccaagag

SEQ ID NO: 2532 - DNA, 520 bp, Oryza sativa
  Clone ID: uC-osflcyp047c06b1
gagagatgctgcgggtgtcggaggacggcgggcggcggcggcggcgggaggcccacgcggcggggtacggcgagctcggccgcgccctgctcgacctgcaggctgccgccgaccaggtcttcgacgccgtcacggcgcggacggcggaggagcgggagaagctctcggccatttcccggcggatcagcgctgcaaaagctaagataaaaacattgtctcagtcagaggaaccgttgacaattgtatcaccagcgcagcatccttcaagttgtacaaaccaagaggacttcagaccgctgtttcatgacaaatatgatgacaatagtggtggaccgtccatagcaactatttcagtaaatggagggttcaacagagaatatggactagaaggcacacttgaactctttcagtttttctctgaggagaactgtgactatactccaaaagaaggcctgttaaaggtttaaaataaacctgctgaagctaaagatgacacatatttagggagtcttatggataa

SEQ ID NO: 2533 - DNA, 517 bp, Oryza sativa
  Clone ID: uC-osflcyp047c07b1
gaacttcgcttggaccaccacctgatcagagaagtagctagctgcaggagagaaaccgaccaacaatggcggagtactactcgaacaccgtggacgagtgctacgagaccaccggcaggcagcacggccacggccacggccacggccatggcggcatgagggtggagtcccacaccgacgactactactgcgagggcggcgagatcgaccgtgggaggaggaacaactccatgcactcgcaggagtacctgatgaggcagcagagcggccatggcggctacggccacggcggcggccagcagcaggagtactacaagcgggaggagcgcgagcacaagcagcgcgagcgcgtcggcgagatcggcgccctcgccagcggcgccttcgctctctatgaggggcaccaggcgaagaaggacccggcgaacgcgcagaggcactaggatcgagcagggcgtggcggcggtggcggcgggtggcgccggcggctactcctaccacgagcaccgcgagcaga

SEQ ID NO: 2534 - DNA, 426 bp, Oryza sativa
  Clone ID: uC-osflcyp047c08b1
ttctcgcctagattaggccaccgctcatctttggtctgttttttctcctctgctgcactgatcatgcaattgttgtccttctgattggccattctgattggctgggacatgtcgaacaaaatagtggtgaagctggacctgcatgacaacaaggacaagcagaaggccatgaaggccggctcctcggttgtcggaatcgacgccatttcgatggacatggcgtcgcgtaagatgacggtgatcggcacggtggatccggtggacgtggtgagcaagctccgcaaggcgtcgtgggcggcctacatcgagtcggtcggaccggccaaggagccggagaagaaggaggagaagaaggaggaggccaaaaagacgccccgccggcggcggcggcgacggcaagaaggaaggaggtgacggcaagaagga

SEQ ID NO: 2535 - DNA, 472 bp, Oryza sativa
  Clone ID: uC-osflcyp047c10b1
gtgttggcttctcctccccctcccggttcggttcggttcggttcgggtccggttcgatttcggtttttccttcggttcgggggttggtgggaaagcatggcggcgccggatgttgagtaccgctgcttcgtcggcggcctcgcctgggccaccgacgaccgctccctcgaagccgccttctccacctacggcgagatcctcgagtccaagatcatcaacgatcgggagacggggaggtcgcgcgggttcgggttcgtgacgttctcgagcgagcaggccatgcgcgacgccatcgaggggatgaacggcaaggagctcgacggccgcaacatcaccgtcaacgaggcccagtcgcgccgctccggaggcggaggctggcggtggctacggccagcgcggcggaggcggaggctacggtggcggcggctcggtggtggtggcggcggcggtggctaccgccagcgccgtgaag

SEQ ID NO: 2536 - DNA, 385 bp, Oryza sativa
  Clone ID: uC-osflcyp047c11b1
gttccttctgccgcgcctgcctcaagaaggtgaatccgagcagcctgtggttgtacaccgacgaccgcgatgttgtggatatggatacgttgactagggagaacattaggcgcctgttcatgttcataagtaagcttccacttgtagtgctccatgtggttgaccttgacatttacgagtaccgtatcaagtgaaactttactcttttgttcataccggtgggtctctgtacatatcaaattcatcggtgctgatctgtgatagctcaacctgaggctgcaaattagcagagttgtttgtagctcaacgagttgataatatttttgtgaaaagaagatgctgaagtgtactccaaaattgcatatgcactcgtctgtcagtttac

SEQ ID NO: 2537 - DNA, 522 bp, Oryza sativa
  unsure (1)..(522): unsure at all n locations
  Clone ID: uC-osflcyp047d01b1
ctgtattcaaggtagtgcgctatcactcacttgtaatagaaccagactctctatctgaggatcttatatcaatagcatggactgcttctccaaaaatgctctcattccttgaaagcgataagcctgatataactagcagtaccttgtggggatcattggataacttattcgtaacaaaccagtcagagtgcagtaccactgatggaaaaatgcccagcataaacgatgcaagtgagttagatggctacagggttctcatgggcgttaggcactctaccaggcctcactatggagtgcagtttcaccccgagagtgttgctactcattatggaagacagatatttcaaaacttcaagaagataacaactgactttggattacagacaccattgcttcaggaaagaaagatcagttctccagatctcaagaactttgttgcaaatgacttgttacattcgcaaggttgaaactttggattctgttggccttgtgctcttccaagcgagcagtgngacaatgctt

SEQ ID NO: 2538 - DNA, 494 bp, Oryza sativa
  Clone ID: uC-osflcyp047d02b1
atatggcaatggcggcatctgcaacctccaaggaggagatggaagatgaaccatcaatgcaattcgaggaatctgagagcatcagtaccccgtccattgaagaccacttacacgagcagcttcccgatccggttgatctgaaacccttggacatgtctgcttctgattcagctctatatggtcagcaggcaccatcgtctgacattccagagcaacaaagcaagaatgaagaagttaaggagagcttctctgaagataaagatgttgtggtaggcaatgagctgcataatggaggccaaggtgctgatgacattgcaaagaacataacaggcattgtcaaggctgatgatcaatcccagcttgcagagaaggaagaggcgaaagcgaaagtggacaaggtttggagaaaagatgaaccgaagagcaacgatgtgattgaggaaaccaaaagcaaactccttgaggagaggaagagcatggtgaaggctcttgta

SEQ ID NO: 2539 - DNA, 528 bp, Oryza sativa
  Clone ID: uC-osflcyp047d03b1
cgcagttctctgagctcgtgaacgacttctacaacaacgggcttccttccaacctgtccggtggacgcaaccccagcttggactatgggttcaagggcgcggagatcgccatggcgtcgtactgctccgagctccagttcttgggcaacccggtgaccaaccatgtccagagcgcggagcagcacaaccaggacgtgaactcgcttggtctcatctcctccaggaagaccgccgaggccatcgacatcctgaagctcatgtcctccacgttcttgatcgccctgtgccaggccatcgacctgcgccacctcgaggagaacatgaagaccgcggtgaagaactgcgtgatggcaggtggccaagaaatccctgagcatgaaccacatgggcggcctccacatcgctcgcttctgcgagaaggacctgctcaccgcgatcgaccgcgagggccgtgttcgcctacgccgacgacctctgcagcgccaactacccgttgatgcagaagctccgcgcggtgctcatcgagca

SEQ ID NO: 2540 - DNA, 231 bp, Oryza sativa
  Clone ID: uC-osflcyp047d04b1
gttgtgtctgatggcttgtctatgggtgtatctactctgattagcaaggattgatcctccaatccagacactgtacttcctctctggcggagcgacaaccttgatcttcatgctgcttggcgcgagcgcggtgatctccttgctcatgcggtccgcgatgccagggaacatggtggatccaccactgagaacaatgttaccatacaggtcctttctgatatcaacatcgca

SEQ ID NO: 2541 - DNA, 514 bp, Oryza sativa
  unsure (1)..(514): unsure at all n locations
  Clone ID: uC-osflcyp047d10b1
tatctgctctcatgcaagccagattaccataaagattgggtcataagcactgttgttagggtttctttcatgtagggaaaggaaaggtgatttcagttgcctgactgctgccagaatctgcgaagcatctacaagcgacgccgtcgttcaggcagccggcacggcaatgccggttccccttgctccatacccaaccccgcctgtgccatttacacctcccaatggggctcaaagccagctcgtgtgctctgggtgccgtaatctgctcatgtatccagccggagcaacgtcggtttgctgcgcagtttgcagtaccgtgactgctgtgcctgctcctggaaccgagatggcgcagttagtttgcggaggatgccacactctcctgatgtatatacgcggtgcgacgagtgtgcaatgttcttgctgtcacactgtcaacctggctatggangcaaatcaagttgcgcatgtaaactgcgggaactgccgtatgctgctcatgtaccagtatggc

SEQ ID NO: 2542 - DNA, 310 bp, Oryza sativa
  Clone ID: uC-osflcyp047d11b1
tgttgcattgatcgatgtgcttcgaagtattggcaggtgactaatttagttggacagctccttggaaatcagcctcaaatgtgagcttagagatgcaattgctcttattggtagtagaacatcattgtcttccttttttggcatggtagttcggcaaattattgagcacaatgagaggagaaaattgtcagttcctcccatttgtatctttgacatgagtctgcttgaccaacacataatgtttgagatacattccaacctgtatcagtactttcagcttgcagaaaggcggcatctgttggctgctgtc

SEQ ID NO: 2543 - DNA, 522 bp, Oryza sativa
  unsure (1)..(522): unsure at all n locations
  Clone ID: uC-osflcyp047d12b1
tttcaaatataaacacacaaatgtacttgtattgccattgatgacattagtacagtttctatgaataaagaatcttcagccacaaatattgatgtggttaaaactcttggaatgcggacttctccttccttcattccttcttacatttccattttgagattgtctagcaaacaatcacctgcaggagaaagcagaagctggattcagtcacttaagttaaatataaaagggactctttcaagctttaacactttcatcactcacaggtacaaaaacttggttaaggttcagcacaaagtaacctgcaagcttgattctcagaatcagttactcactctgtactgactgaaacggtgcatcaaatccactgaacaaaccgtgagagccaatgtcccaacctgcagctccattcacctgcagcagcatacagaagcccccctaagttcagaaatgcagttactagaaaaccacacaccccgtcaaggaggactnaattttacagccacctacgttgaggcatgg

SEQ ID NO: 2544 - DNA, 523 bp, Oryza sativa
  Clone ID: uC-osflcyp047e01b1
gtaagaacaattgacactactgttactggtgatttatctgctatcattagactcatggagacaggtcccaaaatatgccaaaaatatatcgaatgccctgcacttttccaggaaggaagtttgatctgcggtatattgttttcgtccgcagtatatgccctttagagatatttctttctgatgtgttttgggttaggttagcaaacaatcagtacactctggagaaaacaagcttttttgaatatgaaacccatttcaccgtgatgaattatattggaaggatgaaccatatgaacacaccagagtttgtcaaggagtttgagaaggagcaccaagttaaatggctggagatccatggacgcatacgggatatgatacgatgtgtctttgagtcagccacagctgttcatcctgagatgcaaaacccgttctctagggcttatttggggttgatgtcatgcttgatataaattaatccgaagatttgggagtgacatatttgtccgactgcacgagggcatgc

SEQ ID NO: 2545 - DNA, 498 bp, Oryza sativa
  unsure (1)..(498): unsure at all n locations
  Clone ID: uC-osflcyp047e02b1
ggttgagaagtaccacttcttggaagctatgtctacaataactccagctgcacatagggggtcgattgtgcattcaaggccgctgtcaccagttatcgctccttgtctaaaaggcatcatgaaaaaataatggaaagaattgctgatattttccctttcctatcatcagtagatgttagcaagttctctgccctttcctatggatcatccatccctcttgtttatagacctcgacttttgatgtgcggtggtgtgagtgttggactggatcatgttgggccagctgttttgcacgaacttgagaaattttctgttcactccttggggttgccgtctcttctgtctgatccaagtgcaaagacacctgaagaagctcttgtgcacatttttgnggaagctaggagaacaaccccgtcatactgtacttgcctcagtttcatctttggtgggatacggcacatgaacagcttagggctgtgctattgactttgttgaatg

SEQ ID NO: 2546 - DNA, 510 bp, Oryza sativa
  Clone ID: uC-osflcyp047e03b1
cttttctctagcttagctctagcttagcctgaggaagctaagagaggaagcaacagtggatattgagagagagtgcactgagagagggagcatcacctggagagcttaggcggcacatgagcaagatgccaagaagctcgacgcagatgatcagctgctaatgaaggagcctgcatggaaaaggtttcttgcccatgttggtcctggattcatggcgtctttagcctacttggatcctggcaattcggaaaccgatctggaagccggagccaaccacagatatgagctgctctgggtgattctgattggactcatcttcgcacttatcatacagtcgctagcagctaatctagcagtggttacagggaggcatctggctgagatctgcaagagtgagtaccccaagttcgtcaagattttcctatggctgctggcagagttggccgtcatcgctgcagatatcctagaagttatagggacggcctttgctatcaacatattgttccatat

SEQ ID NO: 2547 - DNA, 526 bp, Oryza sativa
  unsure (1)..(526): unsure at all n locations
  Clone ID: uC-osflcyp047e06b1
gttatttactgtaaagactggccttgtcaccggaatgatctttctaacggaaggagtggcagttggtaggacatttgcttcactcaaggactaccaggtagatggtaacaaagagatgatggccataggattgatgaacattgtgggctcatgtacatcatgctatgtaactacaggagcattctctcgttctgctgtgaaccacaatgctggttgcaagactgccatgtcaaatgtgatcatggcactgactgtcatggtcacactgttgttcctcatgccactgtttgtgtacacaccgaatgttgttcttggagcaatcataattgctgctgtgattgggctcattgatctccctgctgtatacaacatctggaagatggacaagatggatttccttgtgtgtctatgtgcatttgctggtgtaatcttcatctcagtccaacaaggccttgcaatagcggttggtatataatattagggtactgttgcanatcacacggccaaagatgatgattaagggaac

SEQ ID NO: 2548 - DNA, 354 bp, Oryza sativa
  Clone ID: uC-osflcyp047e07b1
cttataagcaaaaactgactgctagtgggatttttccatcacatccaatccagaaacttaaaaagccatataagttcaggcaacatataactgtgattgtatcacagcagaattataacggtggctcaggaggcagtcagatgacaactctgaaacaaaactcagatatttaacgagaactagccaccaagaggtgatcgattataggcgcgaagctctaagactcatagatccaagggtgaaggttgctcctccactcagctaaaccttcagggaaccagagagcgatctccttattgccgttgtacacggagtcgctcccatggatgacattcctgccaactgccacggcat

SEQ ID NO: 2549 - DNA, 515 bp, Oryza sativa
  Clone ID: uC-osflcyp047e08b1
tttttacgatggacgctcgacggcggcggctgtccccggtggtggtcgtagcggcttttcttttcttccccctgttcttcgggagccagccggcggcggcgtacggcgaggcttcaggcgccggcggcatgacggcactgcagaagcacgcggcgttcttcgacaaggacaatgacggcttcgtctccccgaccgagacatacgacgggttacgcgccctcggacttggagctggcttctccatcttaagcgctgcgttgatcaatggcgtactttcactcaagaccagacctcgcggatatctggacacagaggccacacgctcgcgagactcgagagattcaggaacagaaaccgccgagagagttcgtagcagtcaacgcgcgaggcagggccgagaagaaaccgccggcgacgcacgcgcgatggacgctcgtcggaggccggttgtccccggcggtggccgtggcggcggctcttcttttcttccccatgttcttcgggagccatacccc

SEQ ID NO: 2550 - DNA, 467 bp, Oryza sativa
  Clone ID: uC-osflcyp047e09b1
tgacgaaacaagtcggctcgtctctcctcggcggcgaaggaaaaaaaaaaaacgcgcgtcgccgccgccgctcgccgcgaagcttctcctcccccggccgccgctcgccgtcggctcgggcctgaccgcccttaacgccgcccgctggtcgtcgcgaggaaccgggaaccctagatcgctccgctctcttccagtccccccccctcaacctctcctcctctctcctctccaatctgtgcagggccggaggtagggtagggctctcgcctgctctcgcgcgcggcgcggcgcgggggcgagcgggcccgtgggcacggtggagggacggcgcacggccgggtctggagggggagcggccgacgcgtccgacctcgttccattcgattccgtctcgattcgggtcggattggagctgaaactccgtgttaggtctgcccctgcctggaatccctggatgctagctgctg

SEQ ID NO: 2551 - DNA, 478 bp, Oryza sativa
  Clone ID: uC-osflcyp047e12b1
gtgggtggttgccagaagcttccaaaccctaggcgagcgagagaggcgagacgccatggacgcggacgcggtggcgaaggcgttcgtggagcactactaccggacgttcgacacgaaccggtcggcgctggtgtcgctgtaccaggacgggtccatgctcaccttcgagggccagcagtttctcggcgccgccgccatcgccggcaagctcggctccctccccttcgcgcagtgccaccacgacatcaacaccgtcgactgccagccgtcggggccgcagggcggcatgctcgtcttcgtctccggatccctccgcaccggccccgacgagcactctctcaagttctcccagatgttccagctgcttcccgctggaggcaacttctatgtgcagaacgacatgttccgtctgaactatggttaaggaaagctggatagtcatccatcaacgtactgtgccagtgttttatgttgaaac

SEQ ID NO: 2552 - DNA, 346 bp, Oryza sativa
  unsure (1)..(346): unsure at all n locations
  Clone ID: uC-osflcyp047f02b1
caatatactacatgcagggctgcggtccagtttattaaatttcttgataaccagctgaatggagtactgcttcaactgcccagcgatgtactggaaagcttgaaagccttacaaaatcaggtgcaggcactgctgagggagcaaatacagcatccttctgagcttctaaatcctatgcagcatgatggtatccaactggctaatggtggaaatgcattacatgattattccaatcataagtcaggaagtacacgctacttgttcatgtcacaagatgccaggtctngcaagtggctctgtcatttcacttacaagtgaacccccttcccatcgtggcatggaacac

SEQ ID NO: 2553 - DNA, 303 bp, Oryza sativa
  Clone ID: uC-osflcyp047f03b1
agtcgacctctgcggaccacccacggtgccatgggggccgaagatgagtacaagatagggggaaatgtggctggaagccaaggacatctggcatgtctccggccagggtcgccgctctaatgacaacggtggatcctgcagctacagcgtgatgccgccaggctgcctagcaaccatgaactcctggtggagcgaccccattttacacgacggtaggggctggaggtcatgcatagggatcacctgctgcaaggcaaacgcctgatggaccaggacatgccttatccactgcaccgacatgaa

SEQ ID NO: 2554 - DNA, 524 bp, Oryza sativa
  Clone ID: uC-osflcyp047f04b1
gttatccaaaggcagcagcaatggcggcgaggtgcctctcttctctcgccctcctctccccctccccctccagctccgggaaggtgtcggccatggcctccccgcccgtcccctcctccgccgcccctcgccgccgtcccgggacccgcctttcggtggccaccggcggggagcaactcgtcacggcgcaggaggcgtcccaggaacctgcttatggagttgttagcattcaccatgttgggatcctatgtgaaaatcttgaaaggtcaatggccttctacaaagatctgcttggtcttaaggtgaatcctgctaggccaaccgacaagcttccttacagaggtgcttggctctgggttggttctgagatgattcacttgatggagctgccaaatcccgatccattgactgggcgcccagagcatgggggaccgtgatcgtcatacctgtatggcgatcaaagatgtgttgaagttaaaagaaatctttgacaaagccggaatcaatacacacttagcaaatca

SEQ ID NO: 2555 - DNA, 507 bp, Oryza sativa
  Clone ID: uC-osflcyp047f05b1
ctttctcctccccaaaccctagccgccgccgccggcgtactcgagagaaacatcagcatccatggcgggcaagggcgagggtccggccatcggcatcgaccttggcacgacctactcgtgcgtgggcgtttggcagcacgaccgcgtggagatcatcgccaacgaccagggcaaccgcaccaccccctcctacgtcggcttcaccgactccgagaggctcatcggagatgctgccaagaaccaggtcgccatgaaccccatcaacaccgtcttcgatgccaagcgtctcattggcaggaggtttagcgatgcttctgttcagagtgacattaagctctggcccttcaaggtgattgctggaccctggtgacaagcctatgattgttgtccagtcaagggtgaggagaagcagtttgctgccgaagagatctcctccatggtcctcatcaagatgcgtgagattgctgaggcctaccttggcaccaccatcaagaatgcccgtgtcac

SEQ ID NO: 2556 - DNA, 324 bp, Oryza sativa
  Clone ID: uC-osflcyp047f06b1
ggtctggattaaaacgctatgcggggaggggagttttaaagcaattctgggtctactacacctctgccaacactcaatgcaaaatagagagagagctaactcgatagaataggtttcagtgcttgcgctcgcgctaatccacatctcaacgccagagtttagcagccgtacaagacatgatttgacaagactgaagagaggtgctgtaagagccccatgtatcaaataagggctgtctgccattacagcggaggctggggaagcgaagcactgctgaacagggcacgagcacaggcaccaatgttgagctcagcttggacgact

SEQ ID NO: 2557 - DNA, 489 bp, Oryza sativa
  Clone ID: uC-osflcyp047f07b1
tttttacgcgtgggttgcactccatgaagctagggaactgttgcttcgagacatgatcaacatgctgttgcgccatggtgcttcagctaatgaacgcacagtaggacaaggtggcactgaggacctgcttccacgccgctattgcagcggacaatactagcgtgcttaagtatctggaggataatatatgtgctacccagattgatgaggattatgtgtacaagctcattcatctgatgagcttacctgagatgaagattttgttggatacaactagactgtttgccgaaaaaacagataattgttgggaggagttatggaattacatgaaggatggcatgcttgaacagtgagcaggaatactcctgacaggtcaaaaacagattgagaaggtcaagcctgaaggatctgatgatatcgtacagcgattatgctgggctgccatacactctagaaaggtgatactggaaaggcacagaagcaactgga

SEQ ID NO: 2558 - DNA, 535 bp, Oryza sativa
  Clone ID: uC-osflcyp047f08b1
tttctccgagcagtcgatgcgcgacgccatcgagggcatgaacggcaaggagctcgacggccgcaacatcaccgtcaatgaggcccagtcccgccgctccggcggcggaagcgggggctacggcggcggcggtggcggctacggcggcggtcgtggaggcggcggctacggaggaggtggcggcggcggctacgggcgccgtgagggcggctacggtggcggcggcggctacggcggcggccgtggcggcggcggcggcggctacggtggcagccgtggcggcggctacggcggcgactccggcgggaactggaggaactgattggtggggcccatcgtggccagttatccttagctatccgtgtcagaatcatcttatcatcgagtcgagtcgttatcgtgtccagtggctctctcgagtcgagaagccctctatccatccatccagtgttaggtgttcttcgtccgtgatgttaccatgaattgagttcgctttggtatgggtgttgaactgcttgttgctatctatcggaag

SEQ ID NO: 2559 - DNA, 420 bp, Oryza sativa
  Clone ID: uC-osflcyp047f09b1
acccggagtgccggcggtcggccccgggggccctgttgataccctgtgtgcccggagtgccggtggatggccccgggatcccgtttgtgccagtgatcccatgggtggccggaaattgtgtcgatcatcctcggctatgccgatgatcgcctggcatgacaaccttgccagtgccagcatttgtgccgcagattgatcctggagcggcgaccggattgcctggcgtgccgtcggctttttgagaccaccttgcaggaagacccacagtcgctgatgccgttcgttgttacacctgcgccataagtgtaaagcaaatcctgcgagtcactatgcctgtcgttaagatataccgctgattacgctgtcttgatgtgtgaactattgttgcttaatttaatgagcctgcttactgtgggttaa

SEQ ID NO: 2560 - DNA, 519 bp, Oryza sativa
  unsure (1)..(519): unsure at all n locations
  Clone ID: uC-osflcyp047f12b1
ggaagcgtgtgctcgtcgtcgggggcagcggctacctgggccagcacctcctcgccgcgctcgctgccggcggcgaggtcgacgtcgccttcacccaccaccgcgacaccccggccgcagccgctcctgcacgcgctccccgggcttcgcgccttcagagtagacctccgctccggcgatggcctccgcgccgtctccgagtccttcggccagccgcatgtgattgtgaactgtgctgcaatctcggtacctcggcaatgcgaaacggatcctgctgctgctatggctactaatgtaccttcatcacttgtcacttggttgttaagctttgggaatgacaacactcttcttatccatctctcaacagatcaagtttacgagggagtaaaatccttctcaaagaggatgatgagaccttgccagtgaacatgtacggaaaatctaaagttgctgcagagaagtttattattgaacaatgctcanactatgcaatcttgagaagcagtattatttatgggc

SEQ ID NO: 2561 - DNA, 535 bp, Oryza sativa
  Clone ID: uC-osflcyp047g01b1
gttaatcacaaggctctcaaggagagagagaaaaccctatctagctaggcgccgtggcaaccttgctcccgtgcgtccgtacgtcggaacgcagctatggcggctgggggctgcgctctctcgcaaggaaggccatgcccgccccggccaccctccgacgggcgccgccgccatcgcgctccctccaccgccacagcctcgaggataagctgcgtggcacgacatctcccaagactacagctcctactgatcaaggtcgagtcagttattttgaagaaaatcctgagctttttgctgaattggtgaaacgagatgcagctcggagggatgttcaccaggttggtgctggcgggtgctgcttcagcgtacgctggtgcccttttcgttgtgtcgtctatgcgcgatagcgtgaaggaagagcttcgcaaaaacatctacgactaggagctctatcgccagctggtggctacatatttctggctctgcgttatctatgactctgccctgcttatcatggcttggttaatgtaacatg

SEQ ID NO: 2562 - DNA, 520 bp, Oryza sativa
  Clone ID: uC-osflcyp047g02b1
ggtaattgtagctaaagagaaagcccaagcagcaggtgcaagctatgatgaagttgatcttgacgaattattggatgacccagagcttgagaagttgcatgcggagaagaattgctgctctcaagaaagaggtcgagaagcgtgaagtgctaaaaaggcaaggtcatggtgaatatagggagataactgaaggggacttcctaggagaggtcactggcagtgaaaaagtcatctgccatttctaccaccgtgaattttaccgttgcaagtaggacataagttgttctttaaaaaacaatacaaaatgttttatgattgaccctgatgataattcatggacacctatctaaatgttttctaggatcatggataagcatttgaaggcccttgcaccaatctatttgggaactaaattcatcaagcttgatgctgaagttagaatgcgatctctattagcattcagttaattgtattttataacaaagatgctgtctaatcttgtaaataactaatccagaat

SEQ ID NO: 2563 - DNA, 470 bp, Oryza sativa
  Clone ID: uC-osflcyp047g03b1
atcttttcctcccagaactagaatttcgccaccccgaatcccttccatggtaggacttccgtttgattccgggtcgaatccgtcgcctccgatgccggaacggtgaggtttttccctccctttatatggacaacacgcgtttgttttttctgttgcgcaggtttcagatcttggatggacttgctcatccttcggcggccatggatctatcggcggaagctgctgctgctgctcgtcctcgcgttcggcgagtcagatctggagccgatctgacctcttagaggtccggttggggcatgctccgtacgagctggcgtggatgaagcggcggggcgagggaggaggctggtcgtcgcctggatcctctccatcggggcctcgcgcgatgatgtctctttgtattgataattattcgatgaactttcgataattattagatctaagagatgttgttcgagggagccgtgtgc

SEQ ID NO: 2564 - DNA, 527 bp, Oryza sativa
  Clone ID: uC-osflcyp047g04b1
gtatctgctggggacttcaatggctaggcctgttattgccaaggcaatggttgatgttgcaaaggaagttggtgcagatgcagttgctcatggatgcactggaaaaggcaattgatcaggttcgttttgagcttacattctatgctttaaaccctgagcttaaagtggtggcaccttggagggagtgggatatcacaggacgtgaagatgctattgagtatgcaaagaaacacaatgtgccaattcctgttacaaagaaatcaatatacagccgtgatcgaaatttgtggcaccttagccatgagggtgacattttggaagatccagcaaatgagccaaaggaagatatgtatatgatgtcagttgcaccagaaaatgcaccttcaaaacctgagtatttggagattggtattattgcaggtgttcctgtttccatcaatgaaaaagatctctcaccagcatctttccttgccaagctcaatgaaatcggtggaaagcatggtattgggcgcattgatatggtggaa

SEQ ID NO: 2565 - DNA, 527 bp, Oryza sativa
  Clone ID: uC-osflcyp047g05b1
gaggtgcagaaaaatttgagctgaagctgaggatggcaacatccatgatcacctcgccgctggtggcgccggcccgggccaagggccttccgtccatctcccgccggggatcctccttcgccatcgtctgcagcggtgggaagaagatcaagaccgacaagccctacgggattggaggtggcatgtcagtcgatattgatgcatctggcaggaagagcacggggaagggtgtgtaccaattcgttgacaagtacggcgcaaacgtcgacggctacagcccaatctactcgccggaggaatggtctcccaccggtgacacctacgttggtggaaccaccgggcttctgatctgggccgtgaccctcgccgggctcctcggcggcggcgccctcctcgtctacaacaccagcgccctcgccggctaaatttcacccaaatccagtctatgtatgtaacaccaagctgggtgtctgcatattcatctgtaatctaagatagccttcctctgaatgcgatgtgatgatgcc

SEQ ID NO: 2566 - DNA, 461 bp, Oryza sativa
  Clone ID: uC-osflcyp047g06b1
agttatcttagctagcccgcctctgacgctgcgggggggttttagaaggcttgcgggtagcccaccactgcacgctatatttcaaggaatcagagatccatacagaacagaagacgttcagcccataaactctgaataggcatatccattccatggcatctatcgttcctgaactcctgcgcctgctgctcctgctgctcccgattgctctgatccgagaccacctctggccgagccaccgccggacaacgccgcatgacgatgcgggtgagctccatccgatcttcctggtgcccggggcgagctgcagcgacctggaggcgcggatcaccgaggcgtaccggtcgtcgacggcgcactgctgcgcgatgaatgcgaagggatggtttggcctgtgggagaacaacacggagctgctggttcacgactacccagactgctcactggagcagatgatcctg

SEQ ID NO: 2567 - DNA, 530 bp, Oryza sativa
  Clone ID: uC-osflcyp047g07b1
catcgatgtggcggcggcaagtgggtgccctgcttctccggcaccgatccacgccttcctccaccctccgccaccatctccccctccccgtccccgaccagagcccaccttcttgcttccaatcttctgctccgcctcttcacttctcaatctggagagggaggtgatggtgccaccaagcccttcattgctttcgtcttagggggtcccgggagtgggaaaggtacgcaatgtgtccggatcgcttctgattttgggtttgctcatttgagtgctggtgaccttctacggagtgaaatttcaactggcagtgagaaaggggaggttgatcttaaatataataaaagaagggaagattgttccatcagagattactgttgaactgattagaaaagctatggaatcgagcgatgctaaaagggttcttattgatggtttccaaggtgtgaggaaaacaggatcgccttcaaagaaaactggaacagaaccgaccttgtgattttctttgactgccctgacgatgagatggt

SEQ ID NO: 2568 - DNA, 414 bp, Oryza sativa
  Clone ID: uC-osflcyp047h02b1
ggtctatggatgggttaagcaagggttgatctttccgtttgtggagtacctagataggtttaagggccaaactttatataagatcaaggcaagcagattccgtgaagcaattgaggaggctttccttgctgagcgtggcctttttgagctcgaaacggatgaggggtgctcactagagaagtctgtcaatgaccagtccatccctgacgggttactggaagggtctggttctaataatgagcaggaatgccaatcggaggctcaggttgttggcaaatcacctggatgtgatatttgcggtaatcgtcttccatgcaagatagcaagcaaaaagaagcaagcgggagaacgattactctgtaggcactgtgataagctattacagtcaaagcagtactgtggcatatgcagaaa

SEQ ID NO: 2569 - DNA, 384 bp, Oryza sativa
  Clone ID: uC-osflcyp047h04b1
cttcttctccgcgagtgtgagcctagaaactgcggcggttttgggcgcgatttggtttccaaccacctcgattggagtgcgccggcggtgatccggttggtccatggccggtggtggaggtaggtgagggggagggcggcggcggcggaggaggaggggtttggggggtcttgcaatttgaagcgaatctatgtgtaatgctagcaggaaagatgacattgagacacttatggttggctgcgaccttaagaaggaagctgaagaaggatctctcctacatgactatatgttatctgataagacaaaggatgattttgtcttaggttggtagcaacaagagtgccagttaaaccaaaggaggctagcatcggtggctatttattt

SEQ ID NO: 2570 - DNA, 523 bp, Oryza sativa
  Clone ID: uC-osflcyp047h06b1
gtttgttaccagtccaaccaacaccaacaactgcgcgagtgatcgcgcggctattgcgtgccacggcgtgccgttgagcgatggctggaggtgggttccccgtggccggcggccgccccgccgggcgactatggcggcggcataaccttctccgtcgtcgtcacctgcctcatggccgcctccggcggcctcatcttcggctacgacatcggcatctccgggggagtgacggcgatggagtcgttcctggcggccttcttcccgggggtgctccggcggatggcggcggtgcggcgggacgagtactgcgtctacgacagccacgtgctgacggcgttcacgtcgtcgctgtacctggccgggctggccgcgtcgctggcggccggccgcgttaccagggcggtcgggaggcaggccgtcatgctcgcgggcggggcgctcttcttcgccggcgccgccgtcaacgccgccgtggtcaacatcgccagctcatggccgcccgatgctgtcggcttcggcattg

SEQ ID NO: 2571 - DNA, 424 bp, Oryza sativa
  Clone ID: uC-osflcyp047h08b1
tatttcaccgagcgagcagctagctagctgcggggatggccttcagagcggcggcggtcgccgtcctcctcctcgccgtggcggcggcgccgctcttcgccgcggcgaacccccatggccgaggctaccttggtgccaagtcctggcctactgacggcagcctgagctcatcaagctccggcgaggctgcagcggcggacgtcgacgacggccacacggactggaagtgctactcctcctgcatgagcaagtgctgtcaccgccacgacgacgacgacgacgacaaggccaatgccaaggccaacgccaccgccggcgccgccgccgtcgggctcgacgatgacttacaagtgcaagaagcagtgcctacgcaactgcttaaggacgtgccggccgtttgctaccacaagtgcgtcgacgactg

SEQ ID NO: 2572 - DNA, 505 bp, Oryza sativa
  Clone ID: uC-osflcyp047h09b1
gtttcttggttgattttcgaggatgaagaggaagactcggaacaagataatcctgacgacgctgctggtgtcggcggcggcgatcctgatcggcgggacggtggcgcttgatcctgacggcggggacatggaaggtgaagatgaaggagtcgcgcgagaagatctgcgacaaggggtgggagtgctcgggtagcaagtactgctgcaacgacaccatcaccgacttctttaaggtgtaccagttcgagaaccttctctccaagcgcaacaagcccggtggcccagcgcgggggttctgggaataacaagtctttataaaccgccgccgcccttttggagcccttgggtttttgcaccaccggcggcaagcagatgcagatgatggagctctgcgccttcctggccatgtcggctccaagacctcatgtggatttggtgtggcgacccgcgggccgacggcgtgggggctttgctacaccacgagatgagccctaaggagattact

SEQ ID NO: 2573 - DNA, 486 bp, Oryza sativa
  Clone ID: uC-osflcyp047h12b1
ttttccactagcaacgaaaccggagcgagcgacggtggaggtggaggacgctcgcctgcctccacccgccatggccttctgctccccgggcaccacggcgacggccatgggcatggagttcatgcgcaggaacgacggcagcatcgtcggcatcgaccacaccggccgcgccgtcctctacgaccccgccgcgcgcgccgtccgcacgctgcccgccctcgcggcgcccaagctcatgcccgtctcggccgccgtcggcgacgacctgtacgtcatggagacgacgcccctccccgacggcgccggctgcttcgaggcgctcgtacgcctcgaggataatcccgccgagtccgactccgacaagtgggaggtaggggacaactacctctggcaacctctgccgccgccgccgccgccgtcgtccctgtgcgtgaacgcctacgccgccggcttcgaggctcctccgcggcatgatctgcgggtacc

SEQ ID NO: 2574 - DNA, 580 bp, Oryza sativa
  Clone ID: uC-osflcyp048a03b1
caagatgtcaattcttgagctcaatcagcaacaacatctatctgcttcttgcttagttaagtccttcgccctcccaagaagaagaagatgtcttgctgcggcggcaactgcggctgcggcagcggctgccagtgcggcggcggctgcggcggatgcaagatgctccctgatgtggaggccacagccaccaccaagaccttcgtcctcgctgctccatccaacaaggcgagctctggaggaatggagatggcggtggagagcggcgagaacggcggctgcggctgcaacacctgcaagtgtggcaccagctgcagcggctgctcctgctgctcctgcaactgaatctatcgtcgtcgtcgcccggctgcatgaggatttatcgtatggatgctgctactgtcgatcagagctttgatcgaggccttaatttgcttgcattagtacccagcttatatgtaggcaggccttgccttttgctctgacgcctaaataaaaccgtcgtcgtcgttgtcagtgtgtgcgtgtgtcgatcaatgttggatggacccctagctagctcggatggatcatctatcatcat

SEQ ID NO: 2575 - DNA, 496 bp, Oryza sativa
  Clone ID: uC-osflcyp048a05b1
gtggttttgatttttgattgcttcgtgcttttcgtttgggggagggcagtggtcgccatggtattggggaacgaggggagctcgtcgtcgtcgcggctgctggatccggcgcctctgctggcgcaccacggtggagatggcgccgggaagctgtggtcggagcccaagaccttctggaacgtgttcatcgcggtggtcggcgccggcgtgctggggctgccgtacacgttctctgggaccgggtgggcggcggggtccatcctcctgctcttcgtcgcggcgctcaccttctactgcatgatgctgctcggcgcctgccgccgccggctcgccgacgagcacccgaagatcgcctcctttggggacttgggggacgccgtgttccgcggtccggggcgcctcgccatggacaccatgctggtgctcagccagtgcagcttttgcgtcgggtacctaatgttcatttcgaacaccatggcggacctttaccccgttt

SEQ ID NO: 2576 - DNA, 298 bp, Oryza sativa
  Clone ID: uC-osflcyp048a06b1
gtggcctctatttctgaaggactagtacttctggtttgggggagggtagttgacgacatgggactggggaacgaggcgagctagtcttctacacgtcagataacacctgcgtctgccttggcgaaccacagtggagagggggcaggcaagttgtagtctaagcgcaagaaacgaacgaacgtgttcacccagatgggcaaagcaaagatactaaggatggagtacacgcactcgaggacgggctggtatgtggagcacacaacaccgctatcaggccaggcccagatcacctactgca

SEQ ID NO: 2577 - DNA, 506 bp, Oryza sativa
  Clone ID: uC-osflcyp048a07b1
gctgctttcaaatatctacagcaagcaatccaaaaatgggatagagatgagcaagatcttgcacaggtatacaatgccctgggagtcagctacaagcgagataacaaacttgacaagtcgatccagcaatttgagaaggctgttgagcttcagccaggctatgtgacagcttggaacaacctcggggacgcatatgagcaaaagaaagatctgaagtctgcgctcaaggcattcgaggaggtactcctatttgatccaaacaacacggtcgccaggccacgccgagatgacctaaagcagcgtgtgggcatgtacaagggagtcccagtgaagtcagaaaaacgataggtcctgtgagtatgtgttaaggggggcgcgcttgtgtgtgttagtgtggtgtgcatttgtgcataattgtgcgcgcaacatgtaattggggaaaagtagaaaagcagtaggctcagatctcaaatttgtgcaaaatctttggttcctcaatttgaacg

SEQ ID NO: 2578 - DNA, 390 bp, Oryza sativa
  Clone ID: uC-osflcyp048a08b1
ccaagaccggcagggattcgcaggatgccgtggctcctatggttgatgttgcactgaagctgacaaagatgcaagagtacactggccgatctgctaccaccgtgataacataaacttttcaagagccattctagaatgcttttgaggctacccatgaactttctttatggccttctgtttgatagcctttctacatatctacccgaataaacgtgtatgtatcaactgttctcgtcttcttgccaatactgcgtttatgctgcaggtccgagaaagtgtgcagcgataatgttgtcagttctgaaactgaagagggcactttatgtcagaaaaacgacaggtactgtgagtatgtgataaggcaggcacgcttgtgtgtcttggtgtggg

SEQ ID NO: 2579 - DNA, 421 bp, Oryza sativa
  Clone ID: uC-osflcyp048a09b1
gttttgttttaagacctggcacgacagctgctgtgagagggatcgtatcaggaaggatcctctcaaggtggaaaggaaaacggagtgccgtttgagccatcacacaccattgacaaaatcatctattagagcgtgatagaagaatgctacaatcacagaagccatggttagtatatggacggagcaccgacgaggtgttccactctcaccgccgatgtacgctctacatatagagggagctaggtgaggtgataatgcttggtcaggcactgacgaccaccaggatgctccaccatgtcgtcaccagctgcagtgccaagaagaggactctgtccaagcagctgtccatgaaggagacaacccggtaggtcaagtgggagaagcggtgcatgcagatacacgggctgaggatcagaatgtc

SEQ ID NO: 2580 - DNA, 313 bp, Oryza sativa
  Clone ID: uC-osflcyp048a10b1
acaattcacaagtgtagactagaagggggggggtctgttttactgaagccggctgaaaaccagcggaggcaccttccagccccgccagctggatccggcgcctgccgaaaccatcaccagtggccggtgcttactatactcctgattggacagggtaggccgtacaaacgccttcactgcggatgtcgatgccacgcgtgctgacgtggcgcaaaccaacaaaggctcgcttcggacaggggcggaaacagagccggctacgggacggggcgaccacctgacactgcacgatgctcctacatcgctgggagag

SEQ ID NO: 2581 - DNA, 501 bp, Oryza sativa
  Clone ID: uC-osflcyp048a11b1
gcttgatgtatttgagaagtcacttggcctgcgcctgcagaagatgtatcccaacactgattatcattgcttgaaaacttttggttcttacttcaatgaagacattcctattcctgcgggtacaaagatcgacttctgccaaacttctgatggccagctaataacagaaattgatggcagacaaattggtgctgttaagagcaaagacctctgcagggctctgttcggtatgtacattggcgattcaccggtctcattgcaggccaaaaaagatattgcccaaaacgtagccggtctcataggtaaatgctgaagaaactggaaaccaaacgcagctagtcggccaattatttcattcttctatacagtaagaagaggaagcacacattgaagagattaggcgaggatcatagtatgtatatacatcgagagatctgtaacttgtaaagtgaaaaaagaaaaagcaaaatcgtaatgtacatatggaagattagcatctgt

SEQ ID NO: 2582 - DNA, 100 bp, Oryza sativa
  Clone ID: uC-osflcyp048b01b1
caagattctgagaatcaaaggtgggggtgggttttttttaggaccggccggcatttcaccacccttgtgtgtctgacagacgaagaaggtgttcgtcaag

SEQ ID NO: 2583 - DNA, 383 bp, Oryza sativa
  unsure (1)..(383): unsure at all n locations
  Clone ID: uC-osflcyp048b03b1
gcaggaggagcagcggaggtggtatggcgtcaaggagccgcgccatgtcctggtcgtgacgcccacctactcccgcgcgttccaggcgctccacctcaccggcctcctccactccctccgcaacgtgccctacccgctcacctggatcgtggtcgaggcaggcggcaccaccaacgccaccgcgttcctccttgcacgctccgaccttaccatcgttcacatccncttccctgaccgcatgcctcatgactgggctgaccgtcacgcaaccgaaaatcgtatgcgcctccacgcactgcgggtgatccgggaaaggaagatggatggtgtgacttgtgtctgccgatgacagcaatgttcatagcttggagctgtttgatgag

SEQ ID NO: 2584 - DNA, 330 bp, Oryza sativa
  Clone ID: uC-osflcyp048b06b1
gctccccccttcctcctctgcacctcacctctcctctcatggagttcgcctagttgtgtgctctgctcctccttgaagaagccttcagatctgtggttcctagcctttctcagcttcctcaacacagccgtccagatggcgtccctgacacccgaagctgaagctcccggaggaggagccctgctcgccgccggcgacgacgtcgccgccgcgaatctgctcgccgccgccgtagccaccgagggtcctgtatttgatatgcctgacttcaagatgggtgggaagaagagtgatgatgctgctcccactgatgccggggatgaagatggc

SEQ ID NO: 2585 - DNA, 526 bp, Oryza sativa
  Clone ID: uC-osflcyp048b09b1
gtttcattacaccaaaaaactagctagctagccagtggggttcatgttctccttccgacttgccgtgccggtggctgcactattggtcatcggctcacatgccacagagctcaccttcaaggttgctgagggctctagcgccactagcgtagagctcgctaccaacatcgccatctctgaggtggaggcccaggagacaggcggcatggactgggtggggctcaaggtgacgtgctctaacacctggacactcataagtgatgcaccactcatgggccccttcaacgttaggttgctttgcaagaacggtggctaccgtgtcttcgatgatgccacccctgaaggctttactgccggctctgaatataagagtggcatccaactctaagttacaggcatgcatactcttgtgttgggtcatattggaaatatgaacctctaaataattatgttctaaaagagaacgctccattgtcgagcggaccattatttaatttctattaattaattttctgtggctattttt

SEQ ID NO: 2586 - DNA, 321 bp, Oryza sativa
  Clone ID: uC-osflcyp048b10b1
tcgttttactttacccgcggccggtaccgctcgtcctgggtcgcttccgtgcgccatggcgcgtgcgcgtgcgtctgccatgggcgccgctcctcctccgcacctgcgtagccatgacctcgttgtcgtcgtcgccgtcgtcgcagcggcgctatgtctcgcgtgccgaggtgcgtcggcgggcggcggcggcggcgtccacgtgctcgatcgggcgaggcggccggagttcgcggcgtggatggtgggcgtcaggtgggccattcacgagcggccagagctgtcgttcgaggagatcgagaccagcatgctggtgagggc

SEQ ID NO: 2587 - DNA, 380 bp, Oryza sativa
  Clone ID: uC-osflcyp048b11b1
gtcaacggagaggtttgatttgtttaggtggcatgtgcttgcatgtgtagtctactctgtccaagcatttgctgccatgaacaatacaagaacattatgatgatagcttgtagatccagaggaacaacgcaggaagtttctcggagcatttcccaggacaaatataagaaaatagacaaggtggattgcagatcaaatgaagatatcctgtttgagttctctataatacagatcaaatggttatctgctgaagaagtaagcagaatattcttgtttactatgcaaaatgcccttgtaatggccactattggatagttggggtagggctcttataaagactattgttctgagctcacatgctgtaagaaaattgaggacac

SEQ ID NO: 2588 - DNA, 486 bp, Oryza sativa
  Clone ID: uC-osflcyp048c03b1
atacttttcttctactagccagtaagctagctaactaactacggggttattgtccccaccgtgatggcctcctcggccacctccgtggctccattccaagggctcaagtccaccgccggcctccccgtcagccgccgctccaccaactcgggcttcggcaacgacagcaatggcggaaggatcaagtgcatgcaggtgtggccaacttgagggcatcaagaagttcgagaccctatcgtacctgccaccactcaccgtggaggatcttttgaagcagatcgagtacctgcttcgatccaagtgggtgccttgtctcgagttcagcaaggctgggttcgtctaccgtgagaaccacaggtcttccggatactacgatggcaggtattggaccatgtggaagctgcccatgttcggctgcaccgatgccacccatgtgctcaaggagctcgaggaggccaagatggcctaccccgatgcctttgtccg

SEQ ID NO: 2589 - DNA, 139 bp, Oryza sativa
  Clone ID: uC-osflcyp048c04b1
gcgactttcgctggcggcgggggtgctggtgacggcggggttccactgtgtacggcgggcacctgaacccggcggtgacggtggcgctgctggcgcgggggcacatcacggtgttcaggttggtgcttctaagtttttt

SEQ ID NO: 2590 - DNA, 576 bp, Oryza sativa
  Clone ID: uC-osflcyp048c05b1
cctctatcagtatcagggtggtaatataatggaacaaatgcatgtacaagactttccacaaggcattggtacatggagtcgtccgatccactgcaatggcatgctcctcatttccaccatgaaccacgaaatgattgtctgcaacccatcaactagagagattgtctccctgccaaaagggagttataaccttcatgcgggcccaagggctggatttgggtttgaccctcacagcaacaagtataaggtggctagatttttctaccagagggacgatgacacatcagaattggtctgcaagtttgaagtgcttactctaggcactaatttgtggaggcaaactgaggatccgccatatccaattagtgggttaactcctgttcatgtgaaaggcgccatctactggatggttaatacgccactttgccctgatccacccaatgcatttcttaggttctgtttgactaacgagaagtttagtctgcttcagtatcctccatgtaatctaaagcctatcccgttcatagaagtggagggtgaactatgctgtgcttgcttttgcagtcaggtgagcgc

SEQ ID NO: 2591 - DNA, 380 bp, Oryza sativa
  Clone ID: uC-osflcyp048c08b1
atctcctgcagcagaacggcggcgacaagaacctgggttgcggcgctctcgtgccgcagacgtcgtcgggggagcagtgcgtgatgggggagggcgacctcgtggacccgccgccggagagcttcccggacgccggtgtggacgacagcgacgacgacgtggaggacatcgaggagctggagcgccgcatgtggcgcgaccgcatgaagctgaagcggctcaaggagctgcagctgagccggggcaaggacccctggggcggcgtcgtgggcgacccgtccaagccgcggcagtcgcaggagcaggcgcggcggatgaagatgtcgcgcgcgcaggacggcatcctcaagttcatgctcaagatgatggacgggtgcctc

SEQ ID NO: 2592 - DNA, 141 bp, Oryza sativa
  Clone ID: uC-osflcyp048c09b1
gccgcctctattatatatttttcggggaggaggagaggggggtttatttaatataacgcacgctataaaccaagcaggaccaaactgggatgaggacaaaactcctacaacacaccagacaaaaagaaacagagaaggcaa

SEQ ID NO: 2593 - DNA, 597 bp, Oryza sativa
  Clone ID: uC-osflcyp048c10b1
cgagagaaagcgtgctttatctgcacttctctcccagacaaaacagcaagaacgaaaggatgctgagattttagcagaagcaaaacgcattatggaaactcgtgctgctagcaaacatactgaggaagcgggagcactggcacactttgataatgttgatggtgtatctcccttgagcaacacacacccattgtcaactgctacacttccagctgcagcagtgaataactccatacctgcttcactgcgaatgcttcgagtgtatttgagaacccaagcgcttgatcaaatggtccaagcagcaagtgcctcggcgggccttagagttatcaaaagggttgaccagactttacaagacctcggggtgaatttgaagcccaaggtcccgacgaaagcagtttgcgtcgagcatcttgaactacggaatgagatacttacactgcttaacttacagaagcagctgcaaaataaagaagctgaagtttcagctaacagagaaaattcctttacagaggcaccaagcacacctaagcgtgctaatagagatgttgatagaccctgtgttcctgatacttgtgggtttgcaggtgagagagc

SEQ ID NO: 2594 - DNA, 291 bp, Oryza sativa
  Clone ID: uC-osflcyp048d02b1
atatctttgtttgttccgacgctctaacgccgccgacggggcgggtgtcattatacaccgccttatcttttctccctctatcatggcatctgcagcggctagctggtgctggtggtcaccattgcttgctcgaggaggacctgtcgtccgttgtgtttcccgatttccttgggaaccttggaacatgaccaccatcagtcgagttaaaggcgactagtcatacaggcgacttccattccaggaaaagaagtatactgcgatcactcaaggcatgtaaacccatgacaccag

SEQ ID NO: 2595 - DNA, 247 bp, Oryza sativa
  Clone ID: uC-osflcyp048d03b1
gtctccttgttttgagaggacattgataactcactcggggactgctttaatgctttagccatattgctgacattgcccgagcctgatcatcgccgaattattgatctaaacttgcgcatatgttcggtctatgagttggtgtctaagacttcagatgcacctccataccgcgcttaggctatttcattatgctagtcactcatacaaagcctaaaatatgaccacgattctttgctggctggttaag

SEQ ID NO: 2596 - DNA, 494 bp, Oryza sativa
  Clone ID: uC-osflcyp048d04b1
aagagctcaatacctgcgaaagaaggatctgttgggtagatcggacccatatgtgaaacttaagatgtcagatgacaagcttccgtccaagaaaacaacagtgaagcgtagcaatctcaatccagagtggaatgaggatttcaaatttgttgtgacagaccctgaaactcaggcactggaaattaatgtctttgattgggaacaggttggcaagcatgagaaaatgggcatgaacaacattctgttgaaagaacttcccgcagatgagactaaagtcatgactgttaacttgcttaagacgatggatcctaatgatgtacaaaatgagaagtcccgtggtcagcttactctggaggtgacatataagcctttcaaggaagaggatatggagaaagaaggcatcgataatgctgatgtggtggagaaagctcctgatggtactccagctggtggaggactgctttatgttgttgtcatgaagcttaagatcttga

SEQ ID NO: 2597 - DNA, 462 bp, Oryza sativa
  Clone ID: uC-osflcyp048d05b1
gcgaatagctaagctgcagcctgcagctacgcttgttggcttgagacctagggtacgagcaacaataatagagagtgactgagtgagcgagcactgagtagcaagggcccggcacaaacaggacgcagccggcaacgtgtacgtcgaaccaaacagagaacagctagctaatcgatcggtcgccatgaccaaggacgacgccgtcccggtggccgtggcgccggcgaagcgcccgcccatcaacaagtacgccttcggctgcgctctcctcgcctacatgaactccgtgctactcggctatgatatctcggcgatgagcggcgcgcagatattcatgaaggaggatttgaagatcaccgacacgcagatcgagatcctcgccggcgtcatcaacatgtactcgctgatcggctcgctggcggcggtcatgacgtccgactggctgggccggcggtacaccat

SEQ ID NO: 2598 - DNA, 558 bp, Oryza sativa
  Clone ID: uC-osflcyp048d07b1
ctctcggcatccgccaccatcagcgccgctatctcctcgtgctctctcgccccctcgccgccgtgcgcctcccccttgcgtctcctcgcccttcgcctcaaccggcatcgcccgccgccgccgatccggtctcccgccgcatctcctcgcgctctctcgtcccctcgcatctcctcggcctccgcctcaactggcatcgctggacacccgcgccgcctccacagccaaccgtcgccaccgtcgctgacttcaccgtggccatcccgcgccgtctccacaacccgcgtcgcgcccatccttcgccggatcctcttctccaatcaaccccatctcagcgtcgtagcccatccttcagtgtccaccgtcaccgactccccttctctgagcgggtgcaaatcctgctgatcgaccccatctcagtggagcacaattactgagaacaactgctgtcaagggtgtcgtctcgccgtcatttcagactacggcaatcgcggtgattatccatcccagtattactgcgaacagctgctactggtcctcacaatctcattctctgga

SEQ ID NO: 2599 - DNA, 387 bp, Oryza sativa
  Clone ID: uC-osflcyp048d08b1
tttttgttatctgcgaccagacaacgaagcctgggaggggcttattttacctcatcactgaagttgcaaaagtacatcgcatcgaatgtaaaaaaccagaaaaaccaaaaccagctgccaggccggaactgttcgagtttgtgactgcgaaatacaccccgtcccactttatgtttttgggcgaggaagatcccaacgcgcgttgtatctcttgataacaccctaatttgtactttctccgtttcacaatgtaagtcattctattatttcctatattcatatggatattaatgaatctatatatatatatatatattatttggctagatctattaacaccaatatgaacgctggaaattactgaactgacttacatcttgaaacgga

SEQ ID NO: 2600 - DNA, 412 bp, Oryza sativa
  Clone ID: uC-osflcyp048d10b1
cttcaattcgagatcaaatcagccaactttctcaggtcatggtgtgatggtgtgctagttatggtatctggtcttgaacagaccaaggagttcagtcaccaaaggaaattcatacagatgtttttgcttgctccccaggataagggttactttgttctcaatgattatttccatttcgctgacgacgagcatgtgcaacctgcacctgttattgcccaggacaacttctagaccaacatggtatacaactacgtcgtcgaacctgtgtacattcacgaagaggagatccaaagggctgtgccaataacatctgatgaaagtgatgctgttgagaactatacttactctgagccaccacatcaagtagttttttagatagacatttggggagaagagccatttcctgtagaac

SEQ ID NO: 2601 - DNA, 111 bp, Oryza sativa
  Clone ID: uC-osflcyp048e02b1
ccatttttaattttgaatctgacaagaggcgtgatgacggatggggttactttaaaattccactagcttataagcataagaagcgtgtaatgcctgatctcacaaatgctc

SEQ ID NO: 2602 - DNA, 319 bp, Oryza sativa
  Clone ID: uC-osflcyp048e03b1
gtgaacttgtacgtgacctgcgattaatatgacaatccgttctgctaagattttgtagcgatgcaggtctgatacacaaaggatgccttgcgtggcatcttggtttagctctgaagcaccagagctggcacctagaggctcagcattgcgatagctatagagtactgccaatgtacactggtacttacattccatgatctcctgtacatgcgttatgggggagacagcacttatattccacaagatgaagcgtactgcgaccactcatggcatgaaatccatggacaccaggggcacaatcttggcagctagagctgga

SEQ ID NO: 2603 - DNA, 418 bp, Oryza sativa
  Clone ID: uC-osflcyp048e06b1
gagaagcacctccaccacctgttccaccacaagaaggacgacgagccggccaccggagtagactcctacggcgagggcgtctacacgtcggagacggtgaccaccgaggtggtcgccggcggccaggacgagtacgagaggtacaagaaggaggagaagcagcacaagcacaagcagcacctcggcgaggccggcgccctcgccgccggcgccttcgccctgtatgagaagcacgaggcgaagaaggacccggagaacgcgcacaggcacaagatcacggaggagatcgcggccacggcggcggtcggcgccggcggctacgcctttcacgagcaccacgagaagaagaaggaccacatgagcgccgtggagttcaccggcgagaagaagcaccatccttttcgttgatcgaccttat

SEQ ID NO: 2604 - DNA, 461 bp, Oryza sativa
  Clone ID: uC-osflcyp048e07b1
ttaagacacaataaaggaacaccaaaaaaatgggtaagaaaggaaattggttcagtgctgccaagaaagtcttcagctcatccgatccagatgggagggaagctaagatcgagaaggcggacaagtcgagatccaggaggaaatggccatttggaaagtctaagaagtctgatccttggacctcaacagtggcagtgcctacctctacagcaccgtctccacagccgccaccgtcaccgtcaacacaccctatccagccacagcctgaggagatcaaagatgtcaaggctgttgaaactgacagtgaacagaacaagcatgcgtactctgttgcacttgcctctgctgttgctgcagaagctgctgccgtcgctgcccaggccgctgctgaggtggtccgtctcacaacagtcaccacggttgtgccgaattcgtccgttagttcaaaggatgagcttgtc

SEQ ID NO: 2605 - DNA, 253 bp, Oryza sativa
  Clone ID: uC-osflcyp048e08b1
gtcaaatgaatgacagtcggctgaatgtgggcttggcatgcactgcagcggttgttggtgcagctattcttaattatgctgaagtggtatccctcattaaggatgaatctggagaaaggattattggtgcacggatccgtgatacgctatcaggtaaagaattcgatgcatttgcaaaggtggttgtttacgcagcaggaccgctctgtgactctgtgaggaagactgttaacaactacttattgcccatgac

SEQ ID NO: 2606 - DNA, 472 bp, Oryza sativa
  Clone ID: uC-osflcyp048f03b1
gtcgccttcttttcctcctccttttgacttctcccgtggggttctttgagttagctacctccttattcaaccatgggtaaggagaagacgcacatcaacatcgtggtcattggccacgcctactccggcaagtcgaccaccacgggccatctgatttacaagcttggaggtatcgacaagcgtgtgatcgagaggttcgagaaggaagccgctgagatgaacaagaggtccttcatgtccgcgtgggtgctcgacaagctcaaggccgagcgtgagagaggtatcaccatcgatatcgccctgtggaagttcgagaccaccaagtgctactgttctgtgatcgatgcccctggtcaccgtgactttatcaagaacatgatcacgggtacctgccaagctgactgtgccgtgctaatcattgactccaccactggtggttttgaggctggtatctccaaggatggccagaccc

SEQ ID NO: 2607 - DNA, 108 bp, Oryza sativa
  Clone ID: uC-osflcyp048f05b1
ggtggtttgttttctcctcccaatccaggttaggttcgggtgggttaagattacggtacgaactcaggtatcatacacataggagacttggcgtggaatatttgtgat

SEQ ID NO: 2608 - DNA, 404 bp, Oryza sativa
  Clone ID: uC-osflcyp048f06b1
ccggttttcattggggtgtgagaacctgcggaagcttgagctaagtagttgttgcttcagtgagcaagctttagcccgcgctatacggagtatgccttccctgagatacgtgtgggtacagggctacaaggcttctaagactggtcacgatctcatgctcatggccaggcccttctggaacatagagtttacacctcccagttctgagaatgcaaatcgaatgagagaagatggtgaaccttgtgtagatagtcaagctcagatacttgcatactactcccttgccgggaagaggtcggactgcccacgatctgtggttcctttgtatcctgcgtgactgtaaataccgatatggtatctttctgcttcgttcttgcctcttgccttttttgggtgatatgttg

SEQ ID NO: 2609 - DNA, 90 bp, Oryza sativa
  Clone ID: uC-osflcyp048f10b1
tttctgtattctctcgcttctgacggcggcaactaagctttttgggattcgactaccggacgaggcgatggcggaggaagaggtggccgc

SEQ ID NO: 2610 - DNA, 471 bp, Oryza sativa
  Clone ID: uC-osflcyp048f12b1
gttctttggtgactagtagtggtaacgcgcgaggggagggagttgttgcattagcacgtccaggtaccatcgcaaaagttcaaattcaaaaatgaagagatgatgcagtccagaatcaacctgtacttggtcaaatcattgcacaagaaatgaagtgattcttgtaagatacacatcaggcggaacacggatctgtatgtgcatatactaataatcccatagaagtgtgcaacattccagaagaaattcagcatttagaagacattaaagtgtctgatagataactggacactggggatattgacacatatgtgctaccaatggatgagaaatgcttaaatggcatcaatcttgcaaatgatcacacatgtcaagaaccagttagatgtagcaatgaaaatgcactccgggagtttgcagagtgttctaattctgcctatgatgaacagagtcggtattcggatttggaga

SEQ ID NO: 2611 - DNA, 137 bp, Oryza sativa
  Clone ID: uC-osflcyp048g02b1
gtacctttcctttttcacgagacagcagcgcccggtgggggacggtgctactttaaattggcgggcgactagagaccgcgctgttaccagtgaggaaaaagctgtgacgccgggaaatcttaggcggttacggggga

SEQ ID NO: 2612 - DNA, 432 bp, Oryza sativa
  Clone ID: uC-osflcyp048g03b1
cgcactttttctttaatatcacacacacactcacgctggggctggatttcattgcactgtacacagctgatcattagctagttgggtttctggcccggccgccggctagatgggcaaggacaagcaccaccgcgactggatccttccgcggtgctgcggctgcatcgccgactgcatactcacgcttgccatcctcggcggattcatagtgcatcgtcatttacctggtgattcacccctccaagccttctctatacctgcaggacgtccagctgcgcaacattgacctcttcgaccctgccatatacctcaacctccaggcgacgatcgtgttgaggaacccgaacgacagggtgggggtgctctaaaagacgcttcacgctgtcacaacattcatgggaggagcctatcacggcgccgttggagctgact

SEQ ID NO: 2613 - DNA, 561 bp, Oryza sativa
  Clone ID: uC-osflcyp048g04b1
aaccatttgtttttgaacctgtcattgccatacatgacgtggggatcattttatggacgaacctaggtgatgttagaacatgacaggcagtgcatgagcttgctgcagttcggttgccaggtcactggaaggaagaggaccgagaccctgccaggggacctgatttgatccttgacaccgaacgaagaccacacttggtagatacacattgcatgggcaactcggggtactggcataccagagtttgcgctgtagtatggtccctacaagcagggactggtcgtagtgcagatttgcatgatctacctttaaaactcaatgcgattgattgcatgaggggcaaacgtacgcacattgaagatcaaaagagaggaggtacagagcacgaggacctggtaaatggtgatgatgacagccacttccaggaaacgatggataacaaaggctggaatacaaccttttgaagtgggcttataagtttattagtggcgacttattatcaaagaagaggatgagaaatttttgaccctaaagcttcagtacaggggaggcaatcaaatt

SEQ ID NO: 2614 - DNA, 337 bp, Oryza sativa
  Clone ID: uC-osflcyp048g07b1
gttcattttatactagccaatgacacttcatgcaggtcggtccattatatacagcgacgatcgcgttcaccacctgctgctgatgccgacgcccataactgcgagcttccgaggttcagcgatgtcgtcgacccgagaaccgctgtgcactcccctcctcagaaagaactcagatagatggaaagaatctagcaactgacgtaagcataccggctggacataaaaactggcgcaccaacgataggatggcccgcacatgcatttgctctaggaccaaaaaacccaaatgtgtcaagactgagctccagaccgaccattaagaaccctgtgcctttat

SEQ ID NO: 2615 - DNA, 416 bp, Oryza sativa
  Clone ID: uC-osflcyp048g08b1
attttgtttgcaagcactcccagacagtaccgagtaatatatggactgtattatcttcaatttctagttacctggagatcaaatgtgacaaatatgcacacaaggggagcatcttcagatgttcttagagcaagcatttctagtgcacctagtacatctagccatggttctgcacaagatgactgtgattctttaggtgatgtctacgtgtggggtgaagttttttgcgaaaactctgttcgagttggttctgatactataatcagatcaacggagaagactgatttcctactcccaaagccgttggaatccagattggttcttgatgttcatcattgagattgtggggtcagacatgctgcactggtcacaagaaatggagacgtttttacatggtgtgaagattctggaggttt

SEQ ID NO: 2616 - DNA, 576 bp, Oryza sativa
  Clone ID: uC-osflcyp048g10b1
gctgaagattcggtttctgagaggaggagaaaactggagttccttgagatgcaggaagaacttatcaaggcggaagagaagaagaaagagaaagaagaaaaagcgaaacaagagaaagaagaaaaggccaaactcaaagaaccaaaggctgctgaagaagatttggctttgaaggaaatgactggtcctactgctagggaagaagaagaactgagagaagcaaaacagcacgataaggaaaagctctgtaattttagtcgagcactggctgtactggcatccgcatcgtctgttagcaaggagcgtcaagagttcctcagccttgtcaacaaagagattgaactgtataactctatgcttgaaaaggagggtacagaaggtgaagaggaagctaagaaagcttacatggctgctagagaagagtcggacatggctgctgaggctgatgaagaagaaaaggtctcatcggcgctgattgagaaggttgatgctatgctccagaaattagaaaaggagattgatgacgtggatgcacaaattggataccgatggcagattcttgatagggatcttgat

SEQ ID NO: 2617 - DNA, 463 bp, Oryza sativa
  Clone ID: uC-osflcyp048g11b1
gtcttttttctctcggaagactcgatcgcaatgggggcggagttggcgaaggcggcggtgctgccggaggcggggctcacgaagctctagcgggaggagctgtgggcggcggacaggaaggagaaggcgctctccgagaagaagatggccgtcgagagcctcatgctcatcttgggccgcgccaagaagcatgcccaggagtacgacgcgcaggagaaggagctcgtgcagctcaagcgcgaggctgggatgatgggtgggctctacatcagccctgatgccaatcttctgtttgtggtccgcatccgtgggatcattgccatgcaccccaagaccaggaagatcttgccgcttctgctgttgaggcagatcttcaatggagtcttcctaacggttaacaaggcaaccattaacatgctgcagcatggctgagccatatgttgcatatgggtacccaaacctg

SEQ ID NO: 2618 - DNA, 69 bp, Oryza sativa
  Clone ID: uC-osflcyp048g12b1
gatgaccagacgggctgacctcacccgaggggggtttatcacagatccccgccgcggtaacacccctgc

SEQ ID NO: 2619 - DNA, 94 bp, Oryza sativa
  Clone ID: uC-osflcyp048h03b1
accatactcacatttcacatataagttccaagaatggggagtggggaaggattggaattaccctacccgatatgacctagagacgaaacatggc

SEQ ID NO: 2620 - DNA, 253 bp, Oryza sativa
  Clone ID: uC-osflcyp048h04b1
accatactcactgttcgcatataagttccatgaatggggattggagatggtttggggcgacacagctggatatgtcttggagatgatacatgtccttgtggatgtgcttcaagcgcctgatccatctactcttgagacgttcctgcgatggatccccatgagctttaatgtctgcatactgtctcttcatggacattttggccacaccaaggtggtgggctcaccagatactgcagggcatattgtctatttt

SEQ ID NO: 2621 - DNA, 148 bp, Oryza sativa
  Clone ID: uC-osflcyp048h05b1
gccatgtgtgtctttgcttgttgacagtgttggcatggagataggtttgcatatcgaaagaggtggtacacctttaacagtaaagttggaggttgaggatttgcagtctatatgtccaaatcatttcttgtagggaagggttgctacg

SEQ ID NO: 2622 - DNA, 457 bp, Oryza sativa
  Clone ID: uC-osflcyp048h09b1
gtggtcttgagtggtgctgtgattacagaggctaagctggtagaagcttcaaaagctccagctgatgatgcctcaaaacagaataaagaacaggaacaggaggaaaaggggcagtctttgcctgttgaccataagtccaatggggatatgattaagcagcaggaagtcctacaacagaaggatataaagcacgatgggaaaaatgataaggcataggatgataacgtgaacatgagtagctatctgaagacggattcatagcataagtcactcactgatactagagaaaaaaagaaatctgatgagcctcccaaacatccaggattcattcttcaggccaaaaggagtcaagactcttatgtcctatcaacatccctctcattggatggcctgcttgactatacggccaacgatctgcaggagtcaggctttgagctttatatgcttgccgtgtctc

SEQ ID NO: 2623 - DNA, 598 bp, Oryza sativa
  Clone ID: uC-osflcyp048h10b1
gtgaccttacaacctgcatgacatatgacattgatgttggcatggatcaccaaccgctagctgcatcaagcagggtgaagaaggctttgcgtgtcactgttcttaaggagggaaagtttcatgttacccaaattaatgattggctgcctgattatagaactcgggaacagacaacagaaaggctattatcaccaatatttcagccatcagaggtcgacagtgggcagtcatctccagatctggatagtgaatttcatgttactttggagctaacagagtttggactttccataattgaccatatgcctgaggaaattcttttcctctcagtgcagcaactattactagcctactcatctggaatgggctctggaatcaataggctcaaaatgcagatgcatcggattcaagtggacaatcagttacctttcgttcttatgcctgtgctttgtttgtcctcaaaggatggagaatcaatcagactacatcatcaagttctctatgacattgcagaccaataattctctcgaatttgtgtttatccatatcctgtgtgcaggttcctgagaactggtgttcttgtcatatccatgagcca

SEQ ID NO: 2624 - DNA, 483 bp, Oryza sativa
  Clone ID: uC-osflcyp048h11b1
gtgttctttccacctgcaatgctgaggtcattgatgttggtatgactcacgaaacggttgcttggttaagcattgcgaacaaagttttacgtgtcactggtgttaaggagggagagtgtaatgttacccaatatgaagattggtgtgctgattatagaactggtggacagacaacagaagggctattatcaccattatttacatcatgataggtcgacagtgggcagtcatctccagatctagattgagacttttatgttactttggacctaacagagttcggactttccataattgtccatatgcctgaggaacatctcctcgtcacagtgcagcaactattactagcctactcatctggaatggactctgcaatcaataggctcaaaatgcagatacatcggattcatgtcggcaatgagttgcctttcgttcttatgcctgagcttttttgtactagaggatggagatcaatcagctaca

SEQ ID NO: 2625 - DNA, 305 bp, Oryza sativa
  Clone ID: uC-osflcyp048h12b1
gtttgctttgcacaagccccagcaccagcaagctggtactcatcatcagcgagagctagctagctgtgtgcgccacttacactgctgctgctgctggttctagctaagctcaccgatcgccgtcttcgtcatcgccggtgacctggcgaattagtccagagagatggcggcggccgtgacggtggcggaggtgaggtgggcgcatacggcttaggggcacctgccttgcctatctgatccaaaccttgtcccacccgtccacacctgaccatgctggatcatcttactgctgtttatggatattc

SEQ ID NO: 2626 - DNA, 385 bp, Oryza sativa
  Clone ID: uC-osflcyp049a02b1
atcgcgatactttctccttcccgtcgaaccctctccagtcgcggctctatttaatcctcccacctcggctcgaaggaatggcaagcggtagtgaagctgagaagtcacctgaggttgtgctggagtggcctaagaaggacaagaagaggcttctacatgctgtttaccgtgttggagatttggatcgcaccattaaatgttacacagaatgctttggaatgaaattactgaggaaaagagatgtgcctgaagagaaatatacgaatgcatttcttgggtttggacctgaggacaccaactttgcacttgaattgacatacaattatggtgttgataagtacgacattggagcaggatttgggcatctcgttattgcaactgagga

SEQ ID NO: 2627 - DNA, 166 bp, Oryza sativa
  Clone ID: uC-osflcyp049a08b1
cgaggctgatgaggaagcagtcgaccgagaagcccgagaggctcttttaaaatcagagatcgcttgtcacacggcacgcgctactcggataaccgtatcaattctagagccaacacctgcaacaaaccccgacttcccgtgaggggcccatttattacataaaacg

SEQ ID NO: 2628 - DNA, 120 bp, Oryza sativa
  Clone ID: uC-osflcyp049b02b1
ttcttacttgtttgtagggaaacctgacaattgtactgctgcagctatagagctcctttgtatatgatactgatagcgattctttgagcagtaaaatttacaattttacatctttctcag

SEQ ID NO: 2629 - DNA, 147 bp, Oryza sativa
  Clone ID: uC-osflcyp049b04b1
cccacgcgatcgcccacgcgtccgcccacgcgttcgcggacgggtgggtgtagagtcaatgtcccgcggattcccgagcagcttgtcgaaacccttctggtcttgatttcggcgatcgcggagcccaacccgcaagtggagagggag

SEQ ID NO: 2630 - DNA, 189 bp, Oryza sativa
  Clone ID: uC-osflcyp049b05b1
cgtttctctctcaaaaccgcgggaatcaatcaatcgccgttcgcgtcgcgccacgagatattttcccccaagaaaagttggagtgagggatgagtgctatggcgatgtcgtcgctgaacccgaacgcggcgccgttcatcccggcagcgttcaggagggtggaggactttttgccggcgcggtgggagc

SEQ ID NO: 2631 - DNA, 108 bp, Oryza sativa
  unsure (1)..(108): unsure at all n locations
  Clone ID: uC-osflcyp049b11b1
gttnctcgttcacatccggctaatcatatcaaaccccgtgggggttgcttccacgagatattttcccccaagaaaagttggagtgagggatgagtgctcttgctatgt

SEQ ID NO: 2632 - DNA, 426 bp, Oryza sativa
  Clone ID: uC-osflcyp049b12b1
caatatcattatattgcagcaatggcatcctcctcccttggactcgcctgtgttgtggtggcggctatggtgtccgccgtctcctgcgggccacccaaggtgccaccgggccccaacatcacgacaagctacggcgacaagtggctggaagccaaggccacctggtatggtgcgcccaagggtgctggccccaaggacaacggcggcgcctgcgggtacaaggatgtcgacaaggctcccttcctcggcatgaactcctgcggcaacgaccccatcttcaaggacggcaagggctgcggctcaagcttcgagaacaagtgctccaagccggaggcctgctccgacaagccccgccttatacacgtcaccgacatgaaccgacagcccatcgctgcctaccactttgacctctccggacttgccttc

SEQ ID NO: 2633 - DNA, 545 bp, Oryza sativa
  Clone ID: uC-osflcyp049c01b1
gcttgtatcatttggttttgatctgaacgtgcaccatccgtacaagctcttggttgaagcaataaagaaattcaaggttgctcaaaatgcacttgctcaagttgcctggaattttgtcaacgatgggctacgcacttcactttgccttcaatttaagccccaccatattgcggccggcgcaatcttcctggctgcgaagtttctcaaagtcaagcttccatcagatggcgagaaggtctggtggcaagagtttgatgtaaccccacggcagttggaagaggttagcaaccaaatgttggagctctatgaacaaaaccgtgtggcaccaccaccatcacaagggaatgacactgaaggtagctctgcgagtgtggtcaatcaacgtgcttctgggaaagctccgggatcttctgaagagcctcccacccatgaaaatcacctagcgcccagacagtctagcacgccaggccaccagggctatgaccaccctcattctgagaagcagaactcaagccagagggtaccctagaatgatgcaaggggat

SEQ ID NO: 2634 - DNA, 209 bp, Oryza sativa
  Clone ID: uC-osflcyp049c04b1
caacaactagcgaattcttcttgcagataggaaaaaaaaaacgaaagctgagagatgaggagcagctcggctctgttcttggcctttgttcttctcgccgtcttcctcgcggcgctccccttcgccgaatccagcggtaggcaccaccaccaccaccactcccatctccatggcagaggggaaggcgagagaggaggagaagcacggtc

SEQ ID NO: 2635 - DNA, 117 bp, Oryza sativa
  Clone ID: uC-osflcyp049c05b1
aagaaacatgaaacattacaccaaaaaactagctagctagccaatggtttacatgtcctccttccgacttgccgaggcggtggctgcactattggtcattggctcacatgccacaga

SEQ ID NO: 2636 - DNA, 113 bp, Oryza sativa
  Clone ID: uC-osflcyp049c07b1
ctcctcgtctcttttacccgctcttccccccgatctggggggacttttacagccgcagcgaacaaatcccgcgcgggttgggaagagcgagcacgtgaggagagcagaggtaa

SEQ ID NO: 2637 - DNA, 200 bp, Oryza sativa
  Clone ID: uC-osflcyp049c11b1
gcggcagaaccggggggacgaacgaggccgacgaaacatgatacattacagcaaaaagctagctagataggcaatggcctgaacgtcctccaccagactaggcgaggctgaaactaccgagctgcccaatgcatggcgggggaggaggcggaggcggccggtcctttacggcggtcgctcttcgagcttggcgcgctcga

SEQ ID NO: 2638 - DNA, 451 bp, Oryza sativa
  Clone ID: uC-osflcyp049c12b1
gcgcttctccgattcgaagcgtgaagagaggagcggcgcgtggcgagaggagagagatggcccgtaccaagcagaccgctcgtaagtccacaggaggaaaggctcccaggaagcagcttgcaaccaaggctgctcgtaagtctgctcccaccactggaggagttaagaagccccaccgttaccgccctggaactgttgccctccgtgagattcgcaagtaccagaagaggactgagcttttgatcaggaagctgccctttcaaaggcttggtagggaaattgcccaggacttctagaccgactctgcgttttccagagcctgctgtcctttgccttcaggaggctgctgaggcataccttgttgccctttcctagcacaccaacttgtgcccttctatgccaagcgtgtgacccttatcccttcggtcttttcttttcttcccctattttt

SEQ ID NO: 2639 - DNA, 89 bp, Oryza sativa
  Clone ID: uC-osflcyp049d05b1
ggctaatgtctgaagggggcaaaatggtatgtgtgacaggagcaggattcttcattgggtcgtgggtggtgaacggcctcctgatccgt

SEQ ID NO: 2640 - DNA, 144 bp, Oryza sativa
  Clone ID: uC-osflcyp049d06b1
cgcaacctttttctttctcttcatctcctcctcctccagagcggcattttagcgtgccccggcgtggaagcatacgatctagtatctaactacaccgttttctgattttcttgcgtcctttctctcctctgctacaaacttttt

SEQ ID NO: 2641 - DNA, 99 bp, Oryza sativa
  Clone ID: uC-osflcyp049d07b1
agcactatgattcccaaggttcagcagctcctcagagactacttttagggcaaggagcccaacaagggtgtcaaccctgatgaggctgttgcctatggt

SEQ ID NO: 2642 - DNA, 95 bp, Oryza sativa
  Clone ID: uC-osflcyp049d08b1
agcaactagattcccaaggttcatcaactcctaatagacgacttttttaaaaaactatcccaccttttccccacccccctcatcactataattct

SEQ ID NO: 2643 - DNA, 111 bp, Oryza sativa
  Clone ID: uC-osflcyp049d09b1
ggttagtggagcaaaacagacctgaaatagctgatggagaactgtttatagaacatacctctctgtcaaacaggcgcagagagtatagacattgacaaggttttttgacat

SEQ ID NO: 2644 - DNA, 96 bp, Oryza sativa
  Clone ID: uC-osflcyp049d10b1
cccccgcgaccacacccctccgccctaacactctaagcaacaaactcccctgaacaacaaccgcgaaattctaaatcggctccccccctaaaaacc

SEQ ID NO: 2645 - DNA, 407 bp, Oryza sativa
  Clone ID: uC-osflcyp049d12b1
gggatagtaggttgggcgcttgccgccgccgcagggtaagtaaatcagcgccgctagcgacgcatgacgttagatctaggagccaactagactgttctctgattttcttgggtttttctcttccctgttccaaagtttttgctgtcacatcgaccgttttagcctgccgctgtgatcagatcagtagatctagagctcgccagatccgctgctgccgtggaacgaggaggacatgtttgaaattcttgggacaagaaaaatggaaccactcaaaacatgatgtgaagaaggttgctggagcaccttgccttcagattgggcgtgtgctcgccacaagtagaagacatttggtgagtctgtggcctcttgagatgagattagctgactgcctttgtccgcggtatttg

SEQ ID NO: 2646 - DNA, 140 bp, Oryza sativa
  Clone ID: uC-osflcyp049e02b1
cagcctttttcttttctttctactccctttcttggccgggggtcttatattcctcaatacaaccatcaagggcagccaaaaaaaagagagaacggaagagcaaaataacacattacaccatggcgcgattcgtcatcatc

SEQ ID NO: 2647 - DNA, 161 bp, Oryza sativa
  Clone ID: uC-osflcyp049e03b1
cggacgcgtgggcggacgcgtgggttcctcctccagccgccagctcgttcctttcttcctcgctctcgcgatctgacctccccatctctcctcactcgatttcccggcggctagcgacgcgggaggaggcgcccggccggccggcgagcacgtgctgatcg

SEQ ID NO: 2648 - DNA, 451 bp, Oryza sativa
  Clone ID: uC-osflcyp049e05b1
gcagaattattcccctctcactcccactaccatggatccttgcaagttccggccgtcgagctcgttcgacacgaagacgacgacgacgaacgcgggagctccggtgtggaacgacaacgaggcgctgacagtggggcccagggggccgatcctcctcgaggactaccacctgatcgagaaggtggcgcacttagcccgggagcgcatcccggagcgcgtggttcacgcccgcggcgcctccgccaagggcttcttcgagtgcacccacgacgtcaccgacatcacctgcgccgacttccttcggtccccgggcgcccagacccccgtcatcgtccgcttttccaccgttatccacgagcgcggcagcccggagacgatccgcgacccgcgcgggttcgccgtcaagttctacccccgcgagggcaactgggaccttctaggaacaactttc

SEQ ID NO: 2649 - DNA, 128 bp, Oryza sativa
  Clone ID: uC-osflcyp049e07b1
tgccatcctgaagagagagcccccctacgacgacgacgacgatggttttcgactccacctccgtcaccgcgtccgcggccgtgctcaagacgccctttctcggggcgaagcgtgcgctcgccaatgcc

SEQ ID NO: 2650 - DNA, 250 bp, Oryza sativa
  Clone ID: uC-osflcyp049e10b1
gagcttttactttactgtggaagaggcgaaaaggacaatccaggatattctgaaggagtatcttgagagtggagatattgatgctgctctctgtctcttcccaccgactccccttcccctccttttcctatctcaccccactttccccttcccccccgccaactttcccccttctccctccctctccttcccttcctcccactcttccatctcgtcctttctcccctctcccccccccctctcctccccc

SEQ ID NO: 2651 - DNA, 146 bp, Oryza sativa
  Clone ID: uC-osflcyp049e12b1
gttctatatcgcgagcggccgctactgatcctgtaaagaggactgtttggacttttgggcaaagggctacacttgagctcacacacaactggggcacagaaaatgatcctgaattcaaaggttaccataacgggaacttagaccct

SEQ ID NO: 2652 - DNA, 158 bp, Oryza sativa
  Clone ID: uC-osflcyp049f03b1
ggtgatcgttacttgatcaaagaagaagaggaagatgcgcgtttttttagctgctgagtgtattataggattaactactactaggatagtactcctatatgagaagaagatgatgcgcgggaaggatcagaaatttccggcgatgaagaaggagacgg

SEQ ID NO: 2653 - DNA, 80 bp, Oryza sativa
  Clone ID: uC-osflcyp049f05b1
ccggattgtctccccctcgcgattcctcttgcgccgccgggggattttttaccctcgcgtgctcgtcgccgacgcgctga

SEQ ID NO: 2654 - DNA, 57 bp, Oryza sativa
  Clone ID: uC-osflcyp049f09b1
gcggtgtaggcggaggcggcggcggcggagatggctgaccggctgttgagagacgcg

SEQ ID NO: 2655 - DNA, 354 bp, Oryza sativa
  Clone ID: uC-osflcyp049f10b1
gcgagagtgaggccgagcagcgaccgcggcggcgctctcccccctcccgccgcctccacccaccccgtgctcgccggcggggcgaagcctccggtgacaatccccgatccgatcgccgcgctcctctcctctacccccacccccttctccttcgacgccttcgcccgcccgctgtcgtacccgttcctaccggaaagcgcatctgatccgatggatctttcggattgctctcttcaaattttagctgcaccttgtaaggttccaattatctttggcctgcattgtctgttctatcttataaccaaagctcatggcctaacctgctaatgcttcatcccttttcactatggtccc

SEQ ID NO: 2656 - DNA, 159 bp, Oryza sativa
  Clone ID: uC-osflcyp049f12b1
atggctttttctttagcaaagttggctttatcagcaagggatcctggtgaattggtttttccttttggtcctgactatttggagaaccttaatgtcaatcttgatcatcctaaacttagtggggagacaactagccaaagtgatgtcacagaagttgct

SEQ ID NO: 2657 - DNA, 527 bp, Oryza sativa
  Clone ID: uC-osflcyp049g01b1
caaaaggattttaaggagccaagaacaccaagaacttgttggagctgagttagcagcaccaagcaagaaaccggatccaatccatccatccatccatagtttccaatggctggcaagtacatcgccgctggtcttgttggttcctttgccatctcatatgtttgtgatcattttatcgctgagaagaagatatttggaggcaccacaccacataccgtgtccgacaaggaatggtggcaagcaactgacaagaagtttcaagcctggcctcgcactgctgggccaccggttgtcatgaaccccatcagtcgccagaacttcatcgtcaaggatctcgagtcctaagattgtagtgggagcatatatgctgaaggttgcgccgtgactaagatggcgatggctgtggctacaaactacctacctatgccggactcccgaaccagtacgtgagtacttggtctcaataaaacagaactattttgcctagtgcagcctgaacagaaccttgagcatatttgctttagaca

SEQ ID NO: 2658 - DNA, 138 bp, Oryza sativa
  Clone ID: uC-osflcyp049g03b1
ctggcatggatcccaaccaaggttgaccgcagtggagcatacgtcgcatggcaagctgccaagagcattgttgctagtggccttgctcgccgctgcattgtccaagtatcatacgccatcggtgtcccagagccactg

SEQ ID NO: 2659 - DNA, 209 bp, Oryza sativa
  Clone ID: uC-osflcyp049g04b1
cccacgctgttctagagggacggacaagggaggaattaccagtagaacactgctagaataaacgatatgtagaatctagtacgagcgtaacttcatttgtttcctgttgttatcgcatgtatactcttatgctgctttgtgaactcggtttcgtatgtgtcgagcaatcacttcaatgtgtctggaactagcggttgtttgaagcactt

SEQ ID NO: 2660 - DNA, 95 bp, Oryza sativa
  Clone ID: uC-osflcyp049g05b1
ggctcgtgttctgctcaaagaccaaaggaaatctccaaagggggcgttttcaatcattacacggcgcacttcccgaaaaggggcctgatccacgc

SEQ ID NO: 2661 - DNA, 207 bp, Oryza sativa
  Clone ID: uC-osflcyp049g08b1
attttgttagcaagcactcccagacagtaccgagtaatatatggacagtattatcttcaatttctagttacctggagatcaaatgtgacaaatatgcacacaaggggagcatcttcagatgttcttagagcaagcatttctagtgcacctagtacatctagccatggttctgcacaagatgactgtgattctttaggtgaatgttac

SEQ ID NO: 2662 - DNA, 111 bp, Oryza sativa
  Clone ID: uC-osflcyp049g10b1
gccgtcgtgaccacctctcgcaaggggattttgtaggggggcttttttataaaaaacatccctcttttacaacccagcacaaaccaaactttatatcttccctgttttata

SEQ ID NO: 2663 - DNA, 173 bp, Oryza sativa
  Clone ID: uC-osflcyp049g11b1
cagtgtctctctagcttcttcctctttctctctatagggcttttctcgagccaagaaaaccactcattaaacccaccaccaccgccacctcctccacctccatggcgatggcgatgcaccggttcagcctctgctgcgtcgtcctcctcgtgctcgcgccgctcgccgccgtc

SEQ ID NO: 2664 - DNA, 145 bp, Oryza sativa
  unsure (1)..(145): unsure at all n locations
  Clone ID: uC-osflcyp049h01b1
ccggatttgcnttccctcgcgattcctcttgcgccgccggcgggttttcttctcatcgcgtgctcgtcgccgttgcgctgcgccgggttgtggttgttcttggcggctaggtcgtggggttttcttgtttcggaggtagggagag

SEQ ID NO: 2665 - DNA, 603 bp, Oryza sativa
  unsure (1)..(603): unsure at all n locations
  Clone ID: uC-osflcyp049h02b1
ctcgagctgaaccgaagcaggggaggggaggggccccccgcaggccccttttaaaaacnaccccccccttccacccccagccaaccaagtcgcaacgcccccccctcccccccccccccccccccccccccccccccccccccccctcccctcccccccccccccccccctccccccccccccccccccccccccccacccccccccccccccccccaccccccccccccccccaccccccccccccccatccctccccccccacccccccccccccccccacccccccccccctccccccccccccccccccccccctcccccccccccaccccccccccccccccccaccccccccccccccccctctcccccccccccctccccacctccccccccccctccaccccccccaccccccccccctccctccactacccctcccccacccccccccacacccaaccacccccctaccccccctcccccccccacacccacaccctccactactcccccccccatccccccccccaccccccccctcctcccccccccacatccccaccccccacctccctccccccccctaccaccctcccc

SEQ ID NO: 2666 - DNA, 356 bp, Oryza sativa
  Clone ID: uC-osflcyp049h04b1
caaaatcgtatatgaaaaaaaaatctcccctcgaagcgaagcggggaattgtcttctcaagatgcagatctttgtgaagaccctcaccggcaagaccatcaccctcgaggttgagtcctcggacaccattgacaatgtcaaggccaagatccaggacaaggagggcatccccccggaccagcagcgtctcatctttgctggcaagcagcttgaggatggccgcaccctggccgactacaacatccagaaggacgccaccctccaccttgtgctcaggctcaggggaggcacgcagatcttcgtcacgaccttgactggcacgaccatcacccccgaggactacttctctgacaccc

SEQ ID NO: 2667 - DNA, 330 bp, Oryza sativa
  Clone ID: uC-osflcyp049h05b1
ctcttcctatttccttcctccccacccacccccaaatccacgcggccgttgacgccgcgaaaccctaggcagccatagccatggctgcggccatcctcctccgccgcgtcccccccgcgcgggcccaggccacggcgctcatcgcggcgcgctcgatctcggactccacggcgccgctcaccatcgagacctcggcccccttcacctcccacatcgtcgacccgccctcgcgcgacgttaccaccaccccggccgagctccctcaccctcctcccgtgacacgtccgtgatgcgccggatggagacccccgcgcacttcccctcatttgg

SEQ ID NO: 2668 - DNA, 187 bp, Oryza sativa
  Clone ID: uC-osflcyp049h09b1
gcagatctgtgagcagcacatccgccgcgacaagggcgggggcttcatatagaactgcccaggccttgctcgccaacatggcagcgatgtatgctgtctaccatggtcccgaggggctaaaggcaattgccgaccgtgtacacggcctggctggtacctttgcccacggactgaagaagctcggaac

SEQ ID NO: 2669 - DNA, 303 bp, Oryza sativa
  Clone ID: uC-osflcyp049h11b1
aattttcctccttcacctcctcctactccccccgaggggagcgttctggatcctcctgctcctccgccgccaccgccgccgcagataggagaagatggccgcacttgataccttcctctttacctcggagtctgtgaacgagggccaccctgacaagctctgcgaccaagtctcagatgctgtgcttgatgcctgcctcgacgaggaccctgacagcaaggtcgtttgtgagacctgcaccaagacaaacatggtcatggtctttggtgagaacaccaccaaggctaacgttgactttgagaa

SEQ ID NO: 2670 - DNA, 289 bp, Oryza sativa
  Clone ID: uC-osflcyp050a02b1
atttctctagatcgcgagcgtccgccctaggtttcttcacctatcttgggactgcacgagagcacacatgacggcgagctccaataacctgttaatgaattctgtcgaacagaccaagtaccagacaacagggactggatgctgctacatgctgcctaggcggtgtacattacacaagaaattcacgagagccgacagttctgcaggttctcccttccctgctaggctgttactcctctatggtcacctgtgcttgaatttatcatctgccttgatctcagaaaccatg

SEQ ID NO: 2671 - DNA, 216 bp, Oryza sativa
  Clone ID: uC-osflcyp050a06b1
cttttctttgggcgcggagcgcgaaggacaaagggttgggttcttatgcttattcgcgggctatggacgaaagtagtgaagaaagagatagaggtgcgacattgactgtggctgcggcttatttggagaccaagaagtaccgtgtagttttgcttgactctcctggccataaagatttttgtaccaaatacgatatctggcgcaacgcaagctgat

SEQ ID NO: 2672 - DNA, 107 bp, Oryza sativa
  Clone ID: uC-osflcyp050a07b1
tttgtggatgccggcaagagcctcctccgcgtgaccaaggactttcaccgcctactgcaaggtcctccaccgggcctcattgagcagagcctgctccggctgaggga

SEQ ID NO: 2673 - DNA, 106 bp, Oryza sativa
  Clone ID: uC-osflcyp050a11b1
agttggcctacgacgctgcagtgaaggggggcctcgcaagtcgcagatctccggctgacccagagttggaagctatcaggcagaggagattgcaagagctaatggc

SEQ ID NO: 2674 - DNA, 251 bp, Oryza sativa
  Clone ID: uC-osflcyp050a12b1
ttcttgaatgagaaggaggctaaagaaaaaggaaaaggatcatttgcttatgcgtgggctatggatgaaagtagtgaagaaagagaaagaggtgtgacaatgactgtggctgtggcttatttggagaccaagaagtaccgtgtagttttgcttgactctccaggccataaagattttgtaccaaatatgatatctggcgcaacgcaagctgatgcagctattcttgatgttgaagcttgcactggttcatt

SEQ ID NO: 2675 - DNA, 63 bp, Oryza sativa
  Clone ID: uC-osflcyp050b01b1
gccttctccacaacatctagagatagaaacgcaacggatgatattgaagactccatatcaatc

SEQ ID NO: 2676 - DNA, 61 bp, Oryza sativa
  Clone ID: uC-osflcyp050b02b1
acgatagtgacacggaaacgccactacaccggccagagcattgttgcagtgttacatccac

SEQ ID NO: 2677 - DNA, 455 bp, Oryza sativa
  Clone ID: uC-osflcyp050b04b1
catggacattgttgcttacacttcgatgatcactggttattcagaaactgtggattcaattgcatggaacgcatttgaaattgccactgatatgctgcagaacaacttggaagtaaaccgtgtgactctggtaagcttactgcaaatagctgggaatctgggagcacttcaggagggtaaatctctccattgctactccataaggagagcaattggtgtctcagatgatattctagagaccagcattgtgaacttttatactcgatgtggagcttatcagtcagcggctactgttctgcaaaattcatagggaactgttgcttcatggaatgctctgctttttggtcttaatagagctggaccagagtttaatgcaatccaagtatttgcctgtgatgctgcatgagcataatggcacttccgatttctgcactttttgcaaacttggctttcaa

SEQ ID NO: 2678 - DNA, 94 bp, Oryza sativa
  Clone ID: uC-osflcyp050b05b1
ggtctattcccttttccctttctccaccccagccccaaccatctaccgccgacgacctatcctcgtaggcgccgcggattcaccagcgagggag

SEQ ID NO: 2679 - DNA, 232 bp, Oryza sativa
  Clone ID: uC-osflcyp050b06b1
catcattcgaatcgaatccaccacacggtaccctcctctctcctcctgcgaccaccatggccatggccacgcaagcctccgccgccaagtgccacctcctcgccgcctgggcaccggcgaagccgtgctcatccaccctctccatgcccacctcgagggcacccacctccctcagagcggcggcggaggatcagcccgtccgcggtggagtctgacgagtttaacaccaccc

SEQ ID NO: 2680 - DNA, 205 bp, Oryza sativa
  Clone ID: uC-osflcyp050b07b1
tgatgatcatagatggggaggtgaaacttgaatcccagttctatttctacatggagacacagacggccttagctatccctgatgaagataactgtataaccctctatgtgtcggcgcaactacctgagattactcaaaatactgttgcgaggtgccttggcattccatatcacaatgtccgtatcatcacgagatgagtcggagg

SEQ ID NO: 2681 - DNA, 103 bp, Oryza sativa
  Clone ID: uC-osflcyp050b08b1
gctgattcctagacgtgcacacaaacacacgcctgcttttctatatgccacagctggtgtgcgcaagctaccgagtgcagattctgagtggcttctggacaag

SEQ ID NO: 2682 - DNA, 106 bp, Oryza sativa
  Clone ID: uC-osflcyp050b09b1
catgcctcgccgtcccaccaaaccctactaaccgccgcgcgcgagagggtcccatccccgacttcgccgccatggccggcgctcccccgacggaggcggagaagga

SEQ ID NO: 2683 - DNA, 115 bp, Oryza sativa
  Clone ID: uC-osflcyp050b11b1
ttttctctcgcgagagagagcgatacgaacatgagaaaatcttctccagacaccgcggcgggcttccccaccccatcggaaggatgatgtctaccagcttgtgcgctttgatctt

SEQ ID NO: 2684 - DNA, 352 bp, Oryza sativa
  Clone ID: uC-osflcyp050c02b1
gttggtctttacgtcctctgtctagcgctgcgtcttggcatggatggcgtggttggcggcggctgcagcatcctgtcgtacgagaagctggaggggtacgcgatctgggtcggggccagcgtggcgtcggccttcttcgcgtccatggagagctgctcctgcatccacgtccacaccgtcgacgacgagggcgacgactacgaccccgaggaggtcaaggaccgccccctaatgcttttccgtccccaggcccttcccgagtactactacgaccgatccgtcttcttcgtcttcttcgccaagatgtgatctcatctgctgctcccttttctgattcgttttttgattagtt

SEQ ID NO: 2685 - DNA, 51 bp, Oryza sativa
  Clone ID: uC-osflcyp050c08b1
tcatcgcagagatccaaattcgcccacaagaattcacctctgcttgttgat

SEQ ID NO: 2686 - DNA, 386 bp, Oryza sativa
  Clone ID: uC-osflcyp050c09b1
tggtagacctcccaatcagtgcgagttgtcaacgtaactcacgtcctccccggcggcgcatcagcggcagcgccaccgcacgccggcggcggcgacgtcgacgtcatcgagctctccttcctcgacaccatgttcttcgccctcacgccgctcaaacgcctcttcttctacgaggcagcagagccgtcgttcccggccatggtcagctccctccagtcctccctcgccgccaccctcgccgtcttcgcgcccctcgccggcaagctcgcctaccgcccctcccacgacgacgtcgtcatcgactgctccgtcgccgccgtctcccccggcgccgcgttcatcgaggccgtgtaccacgtcgacgacgacgccgttgtgtcatgtgc

SEQ ID NO: 2687 - DNA, 378 bp, Oryza sativa
  Clone ID: uC-osflcyp050c10b1
tggcttagctgtctgcagaagtatgacaacttggtaaactttaccaagcacctcaaggtccaattactggaagctgattctgattcatcagcaacaggattgggatcaactgatccatcatcatcctctacacccaggaaaagagcgtcttctggtcggagttataagccaaaacccagagctaagaaggaacgaacagaggaggaaaagaagttcaggcgaaaagcaaagcatttccttgcgacacagctcgttgcggttcttctattcctatcgctcatgggtggagccgattgctcagagcttgacgatgaggacggtgtagaccacgaagattaaattcctcctttgttgcaccgcacgaatcttttctgaagt

SEQ ID NO: 2688 - DNA, 52 bp, Oryza sativa
  Clone ID: uC-osflcyp050c11b1
tcctatttctaccacgtacaacagcagaagtgagagaggtagaagaagactc

SEQ ID NO: 2689 - DNA, 335 bp, Oryza sativa
  Clone ID: uC-osflcyp050c12b1
tttgttggacacagccagcccacgcaggcccgccgccgccgccgacatggacccttcggcgccgtccggtagctccgccgacgcctcggcgtcctcctcttcttccgccgtagaggacctcgccccgggcatggcggccatgagcctccaagaccggttcgagttgctgcggggcatcggcgaggagtgtatccaggaggacgagctcatgaatctgctgcagaaaaagcccgtccccatctgctacgacggatttgagcccttcggccgcatgcacattgcccagggcattgagaagacaatcaatgttaacaagatggtcagggctggatgca

SEQ ID NO: 2690 - DNA, 239 bp, Oryza sativa
  Clone ID: uC-osflcyp050d02b1
gttcctgcctacgccggcgacgacctgcggcgtggtcggcgatgcagagcacatccatgatgaatgctgatgggttggatagatatgcactcagcaaagaccagttgcagcacattatgccgaaaaacacagaaagtgtacttgatatgccacacttgcaaagattataagctgacgattcagcttccaatcttggacaggttgcaaaccagtgacaccaaagttagggccgagggctg

SEQ ID NO: 2691 - DNA, 389 bp, Oryza sativa
  Clone ID: uC-osflcyp050d05b1
gtgtctattaaacattgtcgtcgttactacatttactgtatgcttgccgtgacgaggatgatttcagtgttctttcacacataaattctgtaacttctagtgtagctaaaatatcaattgatgctactcctgaattggctggtgaaatcaaacatctttttatcatgcttcttctccctactgctgaaaaattagggtgggaccctaagaacagtgtatgccacctggatgcaccgcttataccagttcttctttctggccttgttcattcttggtccatttctgtctattatttttgttgaactcttcctctatttcttactctttttattcacatatttctttttactctctttttctcttttttttttttcttctactctctcttc

SEQ ID NO: 2692 - DNA, 74 bp, Oryza sativa
  Clone ID: uC-osflcyp050d06b1
ggtctttccttgctatcaagaggctacaggatactcaacattcagagagtcattccgcatctgacatcccaaca

SEQ ID NO: 2693 - DNA, 164 bp, Oryza sativa
  Clone ID: uC-osflcyp050d09b1
tcctctccctagcagccaagccaccaagaacccaatcccccattgctagggttcctcgcttcgccgccgtcctcccttctatccacggtattgccttcaccacttcccctcctcccctgccgccgcaaccattcattctttttcttcattctccaaggtggtgt

SEQ ID NO: 2694 - DNA, 56 bp, Oryza sativa
  Clone ID: uC-osflcyp050d10b1
tactctggagagatttgttccatccgctagctggattttgagaagactccgccccc

SEQ ID NO: 2695 - DNA, 375 bp, Oryza sativa
  Clone ID: uC-osflcyp050e01b1
ctgttctcttgggttctgcagatatcacctatagggagattccagagagtgaactgcaatcaggttctctaaatgcagaagctggccaggcagtgccatctgtgtcattagtcaagaagaagtttcttggaaaatatgcaatatcagcagaagaattctctgaggaaatggttggggccaagtttcgcaacgtagcatacctcaaaggaaaagttccctcatgggtctggtgtcccttcttcttttcttctttctatttttgtacttcccctaatttttacctctctttctcttttctctttgatattttgcttcattttcactattcttctttttcctctcttatttatcttctattttttctctttttttttt

SEQ ID NO: 2696 - DNA, 278 bp, Oryza sativa
  Clone ID: uC-osflcyp050e02b1
catctttgtattctttattcacgaccgataatctgtcttgcctagtcatggagtattgccctggcagagaccggcatgtaatactacagatacagacaaccaagaccatctcagagactgatgggcagctagacgagagggaaaaaagctgggatccttcacaaggatatactctactgttcagacagctatggaggaggcatcttcttcggatcttaaccccaaggcgacctattgacatattaagggatgtacatgctgccaaagagcgcgagaag

SEQ ID NO: 2697 - DNA, 254 bp, Oryza sativa
  Clone ID: uC-osflcyp050e03b1
ttttcttgcaggcaacaatgtgcttgagaagtctgagatccaatttgcactcaatgcgcctaatgacaggccgatgactaagaatgcggctgaagaaattgcagagaaactttgtgcatcagtggcagctagccttgagggcaaaaagctgggatccttcacaaggatatactttacctgtcagacaggtatagaggaggcctcttcttcggatcttatccccaaggcgatctattgacatatttagggatgta

SEQ ID NO: 2698 - DNA, 58 bp, Oryza sativa
  Clone ID: uC-osflcyp050e04b1
ttaatccccccaccatggatcatccgcctcctcctcctcagactactaatattttccc

SEQ ID NO: 2699 - DNA, 418 bp, Oryza sativa
  Clone ID: uC-osflcyp050e07b1
tttgtaaagccacgacacctgacattgtgcaacatggaaaactgatttgatgatccaatttcagtaaagcagcagatgagcctaaggtcattgatgctcttcaatagcccaaatgtcagatcaatagataatctcgtcgagtcagcatcatgcttgcgtgtcttggatctgagcaagacagcattaggtgctctcccaaaatccattggtaacctgcttcatttgaggtacctcaatcttgatgaaactcaggtcagagacataccctcttccattggctttcttataaacttggagactttgagccttcagaattgccagagattgcagagacttccttggaccgttcgggcattgctacagcttatatgcctttcgcttacaagaaacttttttaatcatggtccaaagggtgttg

SEQ ID NO: 2700 - DNA, 131 bp, Oryza sativa
  Clone ID: uC-osflcyp050e08b1
tgctccggcgacggtcgagccattgctgccagaggggaacctcccgtttgatcctgccaccagccccgctccgccatacaacactcgagtctgtttttaccaatgccaagaaccattgtgctgcgtgaggt

SEQ ID NO: 2701 - DNA, 101 bp, Oryza sativa
  Clone ID: uC-osflcyp050e11b1
tctcgtcggctggatgggtcttgatgttggcccagatgcctttatgacttgctgagccgcatctgccacctgtaccacgttgattgggaacggagctatgg

SEQ ID NO: 2702 - DNA, 107 bp, Oryza sativa
  Clone ID: uC-osflcyp050f01b1
cttatttatgccatggctatcaatgctgatgttcttacagagattgagatcccgggagagtacattgaaactctgcctaagaatggaaggtctagttttgcagactt

SEQ ID NO: 2703 - DNA, 186 bp, Oryza sativa
  Clone ID: uC-osflcyp050f02b1
gttctttgcgatcgtagggatttagccagcggctcacgggacctacgcgaacggggccagtctgggcatgagctacaggtactgcgcgggccagagaccggcgaactcggcgcaggcggagacacttgcgggcatcagctacccggtcggccagacgccggataacgcggcgcaggcggaggcact

SEQ ID NO: 2704 - DNA, 210 bp, Oryza sativa
  Clone ID: uC-osflcyp050f03b1
gctcgtcgccaccctctgtctttcagaaatgggtcaagcgaactcggcgcagggggacagactgggcatcagctacagctactgcgccggccagacgccggcgaactcggcgcaggtggagacacttgccggcatcagctacccggccggccagacgccggcgaacgcggcgcaggtggaggcactgggcgtttgctacttggccggcca

SEQ ID NO: 2705 - DNA, 179 bp, Oryza sativa
  Clone ID: uC-osflcyp050f04b1
tgggtgattcatggaagcgattcaagcgcctatgattctgaaggaaggttcgttgctgaaaagctcgaggagatattcgccaagcacgccaagaccgtgcctgatgctctgacatcggacgagttagacgagctgctccatgcgatcctgaagccccgtgactacactggatggttctg

SEQ ID NO: 2706 - DNA, 90 bp, Oryza sativa
  Clone ID: uC-osflcyp050f05b1
ttctgagtactgcattgttgcacctgatacggagatattctgtgatggtgagcctattaagaggcaggatttctctattctatttttctt

SEQ ID NO: 2707 - DNA, 66 bp, Oryza sativa
  Clone ID: uC-osflcyp050f08b1
tcttagactggaggtggttcctcgcatgttgtgtatgtatgttagagcatgttacgcatatccccc

SEQ ID NO: 2708 - DNA, 81 bp, Oryza sativa
  Clone ID: uC-osflcyp050f10b1
cctctcttttcggtagaaggtcacacagcccaattggaaagcttggaggcaagtctgcctcttacggctctatagaggaaa

SEQ ID NO: 2709 - DNA, 471 bp, Oryza sativa
  Clone ID: uC-osflcyp050f11b1
ctgtcgctgccgccatggtccaccacctccggaggcatatgatttctctcctccttcggccagcgcatcctcatcccaccgccgcaatctctcccctctcctccctccgccgcctccttctcttcttcaccaccgccgtgtccgtctcccccgaacccttcgccgtcgaggactacctcgtcgccacctggggcctcaccggagcccaagcgcgcaaggcctcgaagaagctctcccacctcaggtccccctccaagcccgacgccgtcctcgcctttctctccgacctcggcctcccgccccgtaagatcgccgccgtcccccccgaatacccgcgcccactctgcccctaccttatcagctatccttctcgttccatcttttacccccccccctttctgtttccctacttcttcttcctcccccctccttccttctctccccttctcctcctcctcctattctcccctc

SEQ ID NO: 2710 - DNA, 91 bp, Oryza sativa
  Clone ID: uC-osflcyp050f12b1
cttctctctcagcctcccccgccgcggcggctcgcccgtgccacactttcttcgtctccttcgcggccaaccccaaccccatcgtcggcga

SEQ ID NO: 2711 - DNA, 66 bp, Oryza sativa
  Clone ID: uC-osflcyp050g01b1
gttttgtctcggttcgggtccggttcgattacggatttttcttttgtaagggggttggcgggaaag

SEQ ID NO: 2712 - DNA, 146 bp, Oryza sativa
  Clone ID: uC-osflcyp050g02b1
cgtctatttgaggatggcgagcccaacaacaatggtgggagtggcaacctcggcgcatctccacaccaccaccaccggccgtctcagctgcgcctgtgcaccaccgacgaggggaacaaggcggcggcggctcgcggtggcggcgc

SEQ ID NO: 2713 - DNA, 230 bp, Oryza sativa
  Clone ID: uC-osflcyp050g04b1
ccctcctctcctcgtccctcctccccgccgccgccgcagcagatttaatcctcaatggcggccttcaacaagctcggtagcttcctcaggcacagtggcttgacaagcagtgcctcggccggctcttcccctgccatgttcaatgctgctcgtctgatgtccaccaagcttttcgttggtggtctttcttggaatactaacgacgattcgctgaaagaggcattcaccag

SEQ ID NO: 2714 - DNA, 73 bp, Oryza sativa
  Clone ID: uC-osflcyp050g06b1
ttctcgttgagtgaccacccaccaggaccatggtagatgatgtgaggagctccctcggtgttcccccccccct

SEQ ID NO: 2715 - DNA, 65 bp, Oryza sativa
  Clone ID: uC-osflcyp050g08b1
agcgtttggttgccgccgtgctcttctcgcgactccgcgagcgctagcctagcctcaccgtcgcc

SEQ ID NO: 2716 - DNA, 251 bp, Oryza sativa
  Clone ID: uC-osflcyp050h01b1
cgactacttggggatggcgcgcccaacaacaccgtgggggagtggcatcctcggcgcatgtccacaccaccaccaccggccgtctgaggtgcgcctgtgcaccaccgacgaggagaacaaggcggcggcggctcgcggtggcggtgcgggtgcgggtgcgggtgcgggcgtcggcgtcggaggcgatggcgacggagaagctcggcgtccgtgtggagcgcaacccgcccgagtcccgcccttccgagctc

SEQ ID NO: 2717 - DNA, 235 bp, Oryza sativa
  Clone ID: uC-osflcyp050h02b1
tgtctttcttctatagagtgagctatgatgaggaacttgcatctcgacttagatatgcaattgaagccaacaaactgagtgcagcagacagatatggtgtacttgatgacacatatgccctctgtatggctggcaaacagaagctagtctccttattgcatttgattgctgcgtacaaggatgaatccgagtatactgtgcttgtccgtgtcatatgattcaagtttgagcattg

SEQ ID NO: 2718 - DNA, 219 bp, Oryza sativa
  Clone ID: uC-osflcyp050h10b1
ttgctccatgtgaactaggcaagtctctgcaaggattcagtcagctatcaaagcttaggacgttgaaagttcatcttttttggtggtcagatgctgaggagtgtcaaaattacgtgtcagctttgctatctagcaaccttcatcatctatatttgaccggtggcccactgatcatggagaagtggtacccctctagttctttctctatccggaagcttc

SEQ ID NO: 2719 - DNA, 255 bp, Oryza sativa
  Clone ID: uC-osflcyp051a01b1
cgctttatcttccctcccccgcttctcctcgccggggaggactacttgcccctcgagctctcccctatcctgcccatctcctggcgctccctccctcccttcgcttgcatcctcacgccatcgtcggccccgccttccccttctcatctgttcccagcgatggcatggggatcaatctgctgacccaggcccttctcttctagcagggggagtggaccatgcggagctagctctgggggcactgcgatagagatc

SEQ ID NO: 2720 - DNA, 222 bp, Oryza sativa
  Clone ID: uC-osflcyp051a03b1
gctccatccatctatccatccaaggagtgtggaacgccacacgtattttttttttatctatgctaatctgatcattagcagaggagagttttagcagtaggattggattaaattggagtagtttcatagtttgtgtgtagtgatcttaattagctttgattagacagacagtacagtagagtagaggatgttggctgtgttcagcggcgcggtggtggaggt

SEQ ID NO: 2721 - DNA, 191 bp, Oryza sativa
  Clone ID: uC-osflcyp051a04b1
cttgtggtcctgacgccgcgtctagggtttcttcgggcgagcttgactgccgcgtcgcaggcactcctcgtcttcctcggtcgaagaaaagcggcggcggcggcggcggcggcggaagctgcccccttccttcaccccaagggccaacagatcgaggacgctgacattatgttggagctacctttcctccc

SEQ ID NO: 2722 - DNA, 248 bp, Oryza sativa
  Clone ID: uC-osflcyp051a05b1
ccaccctctcgccgtcgcagatccgatccaggaagagctggccgccgccgctgccatggcgctctccgtggagaagacctcgtcggggagggagtacaaggtgaaggacctctcccaggcggacttcggccgcctcgagatcgagctcgccgaggtcgagatgccggggctcatggcgtgccgcgccgagttcggcccctcccagtcgttcaagggcgcccggatctccgggtccctccacatgacca

SEQ ID NO: 2723 - DNA, 243 bp, Oryza sativa
  Clone ID: uC-osflcyp051a07b1
ttgatgagatccaggaattgacaggcttgagagatgggcagtgttcctggaacctcagcaattgtggagcaaaaatgtccttgataaactagcttctgatgctcagaggctgtctattgtccaagccagcattgaagaaataaagcagaaaatggtgggtgcttctaagggaaaatctaccgtaagctctgaatacagcagcatcagagctcagctgcaggagattgatggctctgacttgga

SEQ ID NO: 2724 - DNA, 103 bp, Oryza sativa
  Clone ID: uC-osflcyp051a09b1
gcagagtctcagccgagtccattttggacggggctattgacagcatagggagcctgactcgatcatggctctgaagacaagaaacccccagaacaggtaccta

SEQ ID NO: 2725 - DNA, 144 bp, Oryza sativa
  Clone ID: uC-osflcyp051b01b1
tttctctcttcatcttctcgctctcgatctcctacggaagctatagtagccagcaaatcaatcgatcgatccgtacaatggcggccatgaagatgaacaagattgccgtggcggcgctgttcctcgtcgccgtggtggtggcgg

SEQ ID NO: 2726 - DNA, 389 bp, Oryza sativa
  Clone ID: uC-osflcyp051b03b1
caaatgttatgattgagttcaatgagctagttccctttaggctgacacgcaatatgcaagctttcttctcaaatttcggtgttgaaggtctcattgtgtctgccatgtgttctgctgcccagtctgtggtttcaccaaaacaaagccagcatatatggcaccatttggctatgtttttccgtgatgaactgttatcttggtcatggaggaggccacttggcattccttctgttccagttgctgctggaatgattaacccgttggatttccagcaaaaggtgataaacaatgtggagcatgtcattacccgtatcaaattaatatcaccacattatcttgctgatgaggaggagaattcatttgagccaccttagttggtccaaagaggc

SEQ ID NO: 2727 - DNA, 126 bp, Oryza sativa
  Clone ID: uC-osflcyp051b07b1
aactttttcaaacaacgcaaagcagtagcagcagcgagatgctagcatgaagcgatggggatggggatgaggagggtgaggctcccttttctcctccttcctcctccctttcctttttccccttcc

SEQ ID NO: 2728 - DNA, 221 bp, Oryza sativa
  Clone ID: uC-osflcyp051b09b1
gttgttttgttccgtttgcttgagcttgcaaaggcaacagagccaaccatactagacaagctttgcgctgctctaaacatcaacaaaagaagtgtcgacagggatctcgatggttaccgaaacatacttttcaaattggcccaggctaatgaactatttaaggaatacctgtaatgggaaaagaagatatgtgagcttatgttcctagatcccattatttt

SEQ ID NO: 2729 - DNA, 200 bp, Oryza sativa
  Clone ID: uC-osflcyp051b10b1
gttcgtcgccggcgagttctccattgatccggggagggcgcggtaatccaatcccgggtgcaacaatcaggaataattaagaccctgtcgttgtcgggtctgatcgatttggagaggggatggactcctgtgtgggtctccgggcgaagcccggggcctgggccggactcggaaacccacgccggtcttccacggggagg

SEQ ID NO: 2730 - DNA, 86 bp, Oryza sativa
  unsure (1)..(86): unsure at all n locations
  Clone ID: uC-osflcyp051b11b1
atactgtacagatcgatcgcaataaaggcanaggggacgtcaataaaagagcgggggcttaaataacccccctagaagaccgcaat

SEQ ID NO: 2731 - DNA, 452 bp, Oryza sativa
  unsure (1)..(452): unsure at all n locations
  Clone ID: uC-osflcyp051c02b1
agactatccgcgacccgcgcgggttcgccgtcaagttctacacccgcgagggcaactgggacctcctcggcaacaacttccccgtcttcttcatccgcgacggcatcaagttccccgacgtcatccacgccttcaagcccaacccgcgctcccatgtccaggagtactggagggtcttcgacttcttgtcccaccaccccgagagcctccacaccttcttcttcctcttcgacgacgtcggcatccccaccgattaccgccacatggacggcttcggcgtcaacacctacaccttcgtcacccgcgacgccaaggccaggtacgtcaagttccactggaagcccacctgcggcgtcagctgcttgatggacgacgaggccacgctcgtcggcggcaagaaccacagccacgccacccaggacctctacgactccatcgncgccggcaacttt

SEQ ID NO: 2732 - DNA, 283 bp, Oryza sativa
  Clone ID: uC-osflcyp051c03b1
cgagtacttagggtgccaatgccaaggctcaggaggcgggttgaaactcgtttgaaggagttcacaaaacacatttgcaatgctgaccacatttaatgaagttgacatgactaatttgatgaagctgcggtctgattataaggatgagtttgtcaccaagcacggggtcaaattgggtctgatgttctgctttgtcaaggctggtgttacagcactttaaaaccaaccaattgttaatgctgtcattgatggggatgactttatattcatggtactttttttg

SEQ ID NO: 2733 - DNA, 198 bp, Oryza sativa
  Clone ID: uC-osflcyp051c05b1
cacttctaatgagggtttggtcatctattctgttgcatatgttgatggcagccgtggacgtcggcccatagctcataggctcagctttgttgagatggttgttccttatggagatcccaatgaaccacattattgcaagaatgcttttgatgctggagaagatggtcttgggaagaatgctcattctcctaagagggg

SEQ ID NO: 2734 - DNA, 449 bp, Oryza sativa
  Clone ID: uC-osflcyp051c10b1
ttttgttcttccccatcagcctctccaccgactgcaacaaggtcagttaaatcaatcctgcttggatcgatcgatcgagcttaacatgctagctcaatcggagttgatcagctagtaattaagcacgtacttgctacagcatatatgaacaaagtaattaaaataacagctgcggcagacatgcagcgctccactctctctctgtatcagctgtatactttatgttgcacgctccctgtgtgcatgttctatcttaattttcttcagtatgtacacgatctgtgcgtacgtgtaatcctatacgttttatgaattgcatgttgtccaaatgtcttggtcctagctactagctactccagcttcttgctgaggaaatctgcagtagtagtactccctcgttgtgatacgcaacaaaattgtttaatgtgatcttgctatatatagaaaat

SEQ ID NO: 2735 - DNA, 455 bp, Oryza sativa
  Clone ID: uC-osflcyp051c12b1
tgttttcgagccattaccttgtctccccaccagagagggagagaacatctggtgaatacttggtaaagaatggcgtccgcaccttcgcttgcagtgagacagtgaagtttggccatgtcacatttttctggaacggaaaccgatctggatactttgatgaaactaaggaagagtacgttgaaattcctagtgatattggaatcacattcaatgttaaacccaacatgaaggcacttgaaattgcagagaaagccagggatgccattcttagtggaaagtttgatcaggtacgtgtcaacctgccgaatggtgacatggttggtcacactggtgatattgaagccacggtagttgcttgcaaggcagctgacgaagccgttaagattattttggacgcgattgaacaagtcggtggtatttatcttgtcaccgctgatcatggaaatgctgaggat

SEQ ID NO: 2736 - DNA, 352 bp, Oryza sativa
  Clone ID: uC-osflcyp051d02b1
gttctagatcgcgagcggccccttttttttttttggtgggtttgttttaataacagcgccagacatgctatttatctcaatggggatgaggggcccctatgcttcgggaaaaataatgcaggcattctagaagcctcattacgtaagcactgcgctgcgcagcaatccttgagataataccaatgagttaagtgtactcatcgggatttggctgggttctaataagtgggagaccatcttttctccacacaattcggtcctcacatagggcagcaactgcctcaacataaacctgatgaccctcatgaaggactctcgtagcccaatgctctggagtattaatggcttgcac

SEQ ID NO: 2737 - DNA, 110 bp, Oryza sativa
  Clone ID: uC-osflcyp051d03b1
ggctttcttctgaacactactctagggtggtacaatggggggcttcgagggagttatcggcttatttacacatgggtggggagaggtcccacgtcatcgatgtgggagat

SEQ ID NO: 2738 - DNA, 315 bp, Oryza sativa
  Clone ID: uC-osflcyp051d04b1
aaagaaattgcacccattatggcaacgtactgggagaaggcagagttcccatttcatgccattcctaaactttcaagcctcggtgtagctggaggcacaataaagggatatgggtgcccaggactttcaataacagcaagtgctattactatggcagaaattgcacgggtagatgcaagctgctccacgttcattctagtacactcctcccttgcaatggtcacaatagctctttgtggatctgaggttcagaagcacaagtccttgccattccttgctcaacttactgctgtagggtgctgcgcttttggcaga

SEQ ID NO: 2739 - DNA, 426 bp, Oryza sativa
  Clone ID: uC-osflcyp051d05b1
ctcttgtctccttctggcctgtgtcgtggcagcggccatggtgtctgcagtgtcatgtgggccgcccaaggtgccgcctggccccaacatcactgcggcctacggcaaacagtggctggaagctaggggtacctggtacggcaagccaaagggtgccggccccgacgacaacggcggcgcttgtgggtacaaggacattgacaaggctcccttcctcggcatgaactcatgtggcaatgaccctatcttcaaggatggcaagggctgcggctcctgctttgaggtcaagtgtttcaagccagaggcctgcttcgacaagcccgttatcatccacatcaccgacatgaacactgagcctatcgtcgcctaccactttgaacttttcgggcatgcttatggtgccatggctaaggaaggcaaggttga

SEQ ID NO: 2740 - DNA, 443 bp, Oryza sativa
  Clone ID: uC-osflcyp051d10b1
tggaggcagcacactgcaacttaagtttttctataggtcctagcaagctagcaatggctccctcggtgatggcttcgtcggccacctccgtggctcccttccaggggctcaagtccactgcgggcctcccggtgaaccgccgctccagcagctcgagctttggcaacgtcagcaatggcggaaggatcagatgcatgcaggtgtggccgattgagggcattaagaagttcgagactctgtcgtacttgccgccattgacagtggaggaccttttgaagcagatcgagtacctgctccgatctaagtgggtgccttgcttggagttcagcaaggtcggattcgtctaccgtgagaatcacagatcacccggatactatgacggtaggtactggaccatgtggaaactgcccatgtttggatgcaccgatgccacccaagtgctt

SEQ ID NO: 2741 - DNA, 443 bp, Oryza sativa
  Clone ID: uC-osflcyp051d11b1
ttagtacgtgaagtagaagccattggagggaatgtctctgcatcagcctctcgtgaacaaatgtgctatacctatgatgcattcaaggcctatgtacctgagatggttgaagtgcttattgatagtgtgaggaacccagccttttttaactgggagattaaagagcagctggagaagatcaaggctgaaatagctgaagtttctgataatcctcaaggtttacttctagaggcactccattctgctggctattctggggcactggcgaagcccctaatggcacctcagtccgctattcataggttggacagtagtatccttgaggaattcattgctgaaaattacacagcacctaggatggtccttgcggcatctggagttgaacatgatgaactagtttcaattgctgagccacttctgtcggatcttcccagtgtgaaagc

SEQ ID NO: 2742 - DNA, 132 bp, Oryza sativa
  Clone ID: uC-osflcyp051e01b1
gccttgcttccgccgcctcgcgccagtgcgtctcgggctgtttcttttaaaatggcggggcggactgaaacggcattcttgaagcagcctaagggtgttctctggtctaagaagaccaccaaggggaagaag

SEQ ID NO: 2743 - DNA, 293 bp, Oryza sativa
  Clone ID: uC-osflcyp051e02b1
catcgcccgcggggaccgacccggacttactggctcgacccacccacgcggccttgcctgggtgctcttgcatccgttccacacgggggggctcaattaataaatggggtgcggacttagagaggcctactgaaactgcgtaaggctaatctatagcctaagaaaaccatagctagggatgacatgatctacttggctcaacactaggcctaagagcaagcattcatactgcttagctaagacgcttagggagagataattacggaactctacatacgacaggaagatgccca

SEQ ID NO: 2744 - DNA, 313 bp, Oryza sativa
  Clone ID: uC-osflcyp051e03b1
agctatatgttggaagaagcatacaggcggcagcggggaggcatggccacacacgcagcgctcgcggcgtcccgcattccggccaccgcccggctgcacagcaaggcggcgtccaagcagagggtggacttcgccgacttctccggactgaggccgggatcgtgctccatcagccacgccgcgagggaggcgtccttctccgatgtccttggctcgcagctcgtcgccagggctaccggagagaacgccttgagggcgccggctgaggcgaagctcatgggtgccactaacggcttcggccgcattggccgta

SEQ ID NO: 2745 - DNA, 89 bp, Oryza sativa
  Clone ID: uC-osflcyp051e04b1
cggtcgctcgggcggcgacatgacgactacgacggggggggtggattggaatttcctgcgggttctctcacgatcccatagcgaggcct

SEQ ID NO: 2746 - DNA, 422 bp, Oryza sativa
  Clone ID: uC-osflcyp051e06b1
ctttataccagggacaatgttgctgtgctgggtctgggagatttgtgcatgagcgtatgtatgatgagttcctggagaaggccaatgctagggctactaagcgtggggatggagagcccaacctaccagtgcttgggcagaagcatcatcaactggcaagccgatgtggagagatgcatagagtgggaagcccacagccgccgcgccaccgggctgacgcttcgcttccctcaccgaggcgggcgaaggagcatcggctgcccactcacttgctgtcaaggggcccacccatgacctgtcactgcaagcaggctgcctgtaggatcagccgagttagggaaaggattgactctgtccggtccagtttttctggagatggtgattttaaggactggctattcagcctggatgttcccaaagca

SEQ ID NO: 2747 - DNA, 344 bp, Oryza sativa
  Clone ID: uC-osflcyp051e07b1
tgcctccgccgtctcgcgccagtgcgtctctgtgctggcgcggtgaacatggcggagcagactgagagggcattcttgaagcagcctaagggttttctctgtcctaagaaaaccaccaaggggaagaagcctggcaagggcgggaataggttctggaagaacattggccttgggttcaagacacccaggggagccatcgaaggaacctacattgacaagaaatgcccattcactggtactggatcaattaggggtcgtattatagctggaacatgtcatagtgctaagatgaacaggaccatcattgttccgaggaagtatctgcactttgcatagaagtacca

SEQ ID NO: 2748 - DNA, 150 bp, Oryza sativa
  Clone ID: uC-osflcyp051e10b1
ggcgctcacacgccgtggctcggcgcgcattggggggagggcctcgtccgccctctccgccgcgcactccagggcttggatcctctgaccgcggcgagcatgtttgccggtgcgcggtgcattggcgagaggaaggtgaatggggaggat

SEQ ID NO: 2749 - DNA, 279 bp, Oryza sativa
  Clone ID: uC-osflcyp051e11b1
gatcgcccttcctcctcctcctctcctccttgcggggtcgtctccctgatcagccgcagctcgttgccggccgttgttgcgcggccatggaggcgagcgccgggctggtggccgggtcgcacaaccggaacgagctggtgctgatccgggggcacgaggagcccaagccgctgcgggcgctgagcgggcaggtgtgcgagatatgcggcgacgaggtcggtcgcaccgccgatggtgacctcttcttctcctgccaccagtgcaggtttcccggtgtcg

SEQ ID NO: 2750 - DNA, 437 bp, Oryza sativa
  Clone ID: uC-osflcyp051e12b1
tcagcgcgcatgtccgtgcactcagcatgtggcggcttcgcgacatcttgaacagcggacaaataaactccagtaagctcatccaaggggaacaccggaatggcatccagagcccaacctaccagtgcttggcagcaagcatcatcaactggcaagccgatgtggagagatgcatagagtgggaagcccacagccgccgcgccaccgggctgacgctcgccttcctcaccgcggcggcgaaggagctcggctgcccactcacttgctgacaaggccacaccatgactgtcactgcaagcagctgctgtaggatcagcgagtaggaaaggatgacttgccggtcagttttctgagatgtgatttaagactgatattagctgatgttcccaagcatgatacggggcttgctccaagatgtgaattttactttacttttg

SEQ ID NO: 2751 - DNA, 98 bp, Oryza sativa
  Clone ID: uC-osflcyp051f01b1
ccactctctccctcccacgccgcacgggcgggattctctaaagaacgccgcggcgagaggagagagcaccatggccccgtaggttcccacccataaca

SEQ ID NO: 2752 - DNA, 278 bp, Oryza sativa
  Clone ID: uC-osflcyp051f06b1
caaaaaatcaacccaaccgccgccgcatcgccctggttggaacgatggccgcgtcggcgctgcaccagaccaccagcttcctcggcaccgcccctcgccgggatgagctcgtccgccgcgtcggcgactccggtggccgcatcaccatgcgccgcaccgtcaagagcgcgccccagagcatctggtatgggcctgaccgtcccaagcacctgggcccgctctcggagcagacgccatcgttcctgaccggagaggtcccgggagaccaccgatgggac

SEQ ID NO: 2753 - DNA, 89 bp, Oryza sativa
  Clone ID: uC-osflcyp051f07b1
ttttccactctctccctcccacgccgccgcgccgggataccttagcgaacgcagcggagagaggagagagcgccatggccgtggaggtg

SEQ ID NO: 2754 - DNA, 105 bp, Oryza sativa
  Clone ID: uC-osflcyp051f08b1
ggctgtagacctttgccgccatggtgctctctgtgtgatgcagattgcatttcctgacgctgtttacttagttgatgctattgagggtgggaaagaactcattga

SEQ ID NO: 2755 - DNA, 187 bp, Oryza sativa
  Clone ID: uC-osflcyp051f09b1
gtataatctgctcgggagcccctatgccaaggccttcgtttacaagaaggcactcgacctcgccgccgctgggaaggctgccgactgcattatccctacttttaagaacatcgacagctttattagcgattggggcattggcaaggtggagtacagggacctgctaactttttgcccttaggatcct

SEQ ID NO: 2756 - DNA, 429 bp, Oryza sativa
  Clone ID: uC-osflcyp051f11b1
gtatcttaatgctgtgggatctgtcctgtctgggggggcaattattacaacctgcgttgctcaaatcatgacaaacacaattcagaagaaattcaaggtatcttcaacacagctgctgtaccaatcatgcccataccaagcattgaccttgttcatcgtcggccctttccttgatgggtttttgactaaccaaaatgtctttgcttttgattacacatctcaagttgtgtttttcattgtgctgtcatgcttgatatcagtctcagtgaacttcagcacttttcttgtgattgggaaaacctctcctgtaacttaccaagtgcttggccatctcaagacatgcttggttcttgcctttggttattgttttgcttcacgatccatttagctggagaaatatacttggaatcctcattgctgtgaatggga

SEQ ID NO: 2757 - DNA, 142 bp, Oryza sativa
  Clone ID: uC-osflcyp051g01b1
ctcctctctctctcaccgactggaggttgggagcgggcgggagtggttgacccggcagcggcgggcacggcaacgaccgtggcgggtggcgggcacggctacagcctgcggtggcggatccggcggtgccgtcctctgaagg

SEQ ID NO: 2758 - DNA, 159 bp, Oryza sativa
  Clone ID: uC-osflcyp051g02b1
ggggtagtttgcatcaggggcagaagcattagaagcggggggcagttgtatagagccatctatctgtacagatcacggcatggagattagagagggagcgaaagatctttccttatttttttttgtatcaaaaatctcagaagagcaggaggaatgagg

SEQ ID NO: 2759 - DNA, 149 bp, Oryza sativa
  Clone ID: uC-osflcyp051g03b1
cggcccggaactgtactggctggacccacgcatccggaccttcgtgttcagggtctgcacgcaccggcggatgaggggcatttactaattttccccagcaggtcgctccatcaccatagccaacgtcgtgctggaggcagcccgaggtg

SEQ ID NO: 2760 - DNA, 199 bp, Oryza sativa
  Clone ID: uC-osflcyp051g05b1
catgtattgaagggtcctgcagttatcatgaatgggaacagtacagtgattgtagaaaaagactgtaaagctatcatcaccaagtatggtaacataaaaattgagataagtgctgctccaagcagtgtagaagtattacagactgctggtgttgggctatgcccttctatcttcagcatgctttctatgtgtattgctg

SEQ ID NO: 2761 - DNA, 74 bp, Oryza sativa
  Clone ID: uC-osflcyp051g06b1
tcgttagtaccgatggcgcaccagcggctggactgcccggatccgttgccactcctccggcaggtctcacatgg

SEQ ID NO: 2762 - DNA, 95 bp, Oryza sativa
  Clone ID: uC-osflcyp051g09b1
tgttttccgcctcttcttcggctgctggatccgatcgggtttcttccattctccgccgccgccgccaccgcgtcgcaggcgccgttcatgggggc

SEQ ID NO: 2763 - DNA, 430 bp, Oryza sativa
  Clone ID: uC-osflcyp051g11b1
gtgcattatgggagcaagaagaagcgaactaaggttgtttacaaaacactctctccagattggaaccagacatttgagtttccagaaacaggagaacccctgattttacatgtcaaggaccataatgcagtccttccaactgctagtataggccaatgcactgtcgaatacagcatgcttcctccaaatcagcccgccgtaaaatggataccactccaaggagtaaaaagcgtagaagtccatgtaaagatcacgcgaaaagtaccacacttggagaagaaaacaagctttcagactgatgcattttcccttggcaaagggcacaagatatcattgtagatgagagatagcctgaagaaattcacaggtttagttgatgagggtggcgacacaaaggccatgtcactggccttgacagagattgaatgca

SEQ ID NO: 2764 - DNA, 116 bp, Oryza sativa
  Clone ID: uC-osflcyp051h03b1
atttatattataatgataccattcttgataagtttgagggggggtatttacggatacggatggcgagtagcaactggttcttacagcaacattttccgtgtgcttggttgtgggcc

SEQ ID NO: 2765 - DNA, 447 bp, Oryza sativa
  Clone ID: uC-osflcyp051h04b1
tgattacttaggtaggggaaagaagagaagagaaggggggatcacctacagcaacacgcagggagtggaggactcttcaaggtctggagagtggagaggaagaggaatcctcctcagtcctcaccttcagatttcagaacacaggcaatcggccctagctgcaatccaacaagatgggcatgcctctgctgctgctgctgctgatcctcgtcgctgctggcccctaggcaggcagagctgcaaagtcaatcccaaatctccagctcatgaccaaggagggcggcagttcatgaatcatccaggacgacatcataaaggcaattaacaagcatcccaattgctggctggacggctgcacggaatccatacttttgcaaactatactactgggcaattcaaacatatccttggagtgaagcctacaccgtttattgcgcttaatgttgt

SEQ ID NO: 2766 - DNA, 110 bp, Oryza sativa
  Clone ID: uC-osflcyp051h06b1
cacttctaacctcccaaaccctagccatggcgtggggcggttttgactaccgcaccgtcctcgcggccgtacgacgaccggggacctcgtctaacaacaacgaggactca

SEQ ID NO: 2767 - DNA, 161 bp, Oryza sativa
  Clone ID: uC-osflcyp051h07b1
ttccatgcgtccgctgactgtgccgtgctcatgatggactccaccactggtggttttgaggctggtatctccaaggatggccagaacccggagcacgctctttttgctttaacttttggggtgaagcaaatgatcttgcttctgcaacaagatggatgcca

SEQ ID NO: 2768 - DNA, 255 bp, Oryza sativa
  Clone ID: uC-osflcyp051h09b1
accccgcctcgctgtcacccacgaggggggttctatttcaatcgcgggggcgggttacacaacctactctactacacgcctcaggggtaatgggggctctatcggggcatggccatcctacctcaggcggctgtcaccatcagaactgacccctggcacgggcgtcacaggcgaaacatcctccggtcagggaaggggccaaccccggcgagcctgaggggcgaaggccccgtcgaatccgagggggacaaggcc

SEQ ID NO: 2769 - DNA, 193 bp, Oryza sativa
  Clone ID: uC-osflcyp051h10b1
ttaattattccaaaaacaaaaaataataaaaaagaaggaatgagtgagacatttcgcatctgctgccctgcctcctctcccatcacctgcccattttttcacattgaggcccctctgaaaatacttatatttacaactaggtccctggccgggccggtcggccaccggaaggagcacctcgcccgtgaaggtc

SEQ ID NO: 2770 - DNA, 188 bp, Oryza sativa
  Clone ID: uC-osflcyp051h11b1
ttgttcactcctcttcaattctcacgcactctgggggccagtgatcacacacacacacgaccgctcgctcgtttgccttgctgctgccttagcgagaaaccgggagttagcgagcgagccgtcgtcgccggcgatgaggcaacaacaagcgggaggagttggcgactgggtgagccccggcaatgtcc

SEQ ID NO: 2771 - DNA, 259 bp, Oryza sativa
  Clone ID: uC-osflcyp051h12b1
atccttctcctccggctcttcttcagtatcgaggggggtcttctcctcgtgcccaccaccaccaccgtagcaatggcgggcaacgggccgatcaacaaggaggacccgctcaactggggcgcggcggcggccgagatggccggcagccacctcgacgaggtgaagcgcatggtggcgcagttccgcgagccgctggtcaagatccagggcgccacccttcgcgtcggcctggtggacgtcgtcgcccaggccaaggacg

SEQ ID NO: 2772 - DNA, 146 bp, Oryza sativa
  Clone ID: uC-osflcyp052a01b1
ggcgttttcgtactcgcctctctccgcgccctgctcgggcgcccgttgccgccgatcgtgttcgacggcaccgtcgtcgacatgagggagtgcatctcgatccacatcgggcaggccgggatccagggcgggaaaccgtgctggga

SEQ ID NO: 2773 - DNA, 321 bp, Oryza sativa
  Clone ID: uC-osflcyp052a02b1
ggtattgttcgtgctgggggagatggcgaacatcacggtgctgaacttattgagtccctgagaagaatgcctatgcaggtttcttcaaagcaagaagtggtggatgctctagttaaagaacaattttctgtggatgttgcacggtgggtggctacaaatctccgacgaagcagtccattagggtcactatcgtcttcaagcttctcatggatttttgacctaaatggcatatctgacatgtacaagtcctatgaagagactaacttatgggggattgcagagaatggaccaaggggtgttcatattaatttccttaaagct

SEQ ID NO: 2774 - DNA, 456 bp, Oryza sativa
  Clone ID: uC-osflcyp052a03b1
aacctttcccaaaattagccccgatccgatcgcttggtagccctgattcgaggtaaaaaaggggaggagaagatgagggagatcttgcacatccagggcgggcagtgcgggaaccagatcgggtccaagttctgggaggtggtgtgcgacgagcatggcatcgacccgacggggaggtacgccggcacgtcggacctgcagctggagcgcgtgaacgtctactacaacgaggcgtcgtgcggccggttcgtgccgcgcgccgtgctcatggacctggagccgggcaccatggactccgtccgcacggggccctacggtcagatcttccgtcccgacaacttcgtcttcggccagtccggtgccggcaacaactgggccaagggccactacaccgagggcgccgagcttatcgactccgtcttgacgtcgtccgaaggaggccgagattgcgactgc

SEQ ID NO: 2775 - DNA, 323 bp, Oryza sativa
  Clone ID: uC-osflcyp052a05b1
acattattattgattaagaagacacatttacacaagcagcagacaatctagtcgccaaagaaagattttcatgtcaacaaaaaaggtgcagatatctgtcaagaactgtgcataaatagtattgttatatttgataatacttttcctccacttaggaatttgctaatgctttctttaattggaagagtagagagctcagttttggccagtattggcacgtgcgcggaagaatagcatgagacacctttttcttcgaaggaaaatacattgcttatatgtagcaatattgtaatttatgattttctttacttttagcttaaatt

SEQ ID NO: 2776 - DNA, 469 bp, Oryza sativa
  Clone ID: uC-osflcyp052a07b1
gtttatttctcccaggacaaatcatggcgagtgggttatatggttgccaatcaattgtatgagctctgcgaggcagttggtcctgaacattctagggagcagttggtgccggcatatgttcgtctccttcgtgacaatgaggcggaagtgcggatagcggctgcagggaaagttactaagttctgtaggattttaagtcctcagcttgcaattcagcatattcttccttgtgtcaaggaattgtcatcagattcatctcagcatgttcgttcagctttggcttcagttattatgggaatggccccggtcttgggaaaggaggctacaatcgaacaacttcttcctattttcctttctttgctcaaggatgaatttcctgatgttcggctcaatataatcagcaggctcgatcaagttaatcaggttattggaattgatttgctgtcacaatcactgttaccggcgatcg

SEQ ID NO: 2777 - DNA, 444 bp, Oryza sativa
  Clone ID: uC-osflcyp052a08b1
gcttccgagctcccatggccgcacgccccgcgcgctagctgaagcagccagcctcgggccccacccacgcagccgccggcgccggcgccgccgctccccatgaggcagccgcacctcctctcgccgcagcagctctccccgtccccggtcctctcctcccacttctcgccgccggcgcccgggggctcgccggcgtggcggcggggccgacaccaccaccaccggcgggcgttccacccgccgctctcgtcgctgcgtgaccccgacaaggccacgctccgcaaggcctcgcccaacgtccccttccgcctcggcggcggcggcggcggcggcggcggtcagggcggcggcagcagcaaggaccggcgacccgccgctgaccaggaggaggaggaggaggaggaggcggccgcggaagataagggagacggcggcgcgggggcc

SEQ ID NO: 2778 - DNA, 203 bp, Oryza sativa
  Clone ID: uC-osflcyp052a10b1
tctttcgcgtgggtgataatgaagcaggagcagggcatgctggcagcctcctctatcgacagcattgtcaatggtggtgattccgggaaggaaccaattattgctgggcacgctgaagtagctgttgctcaagtcgaggtgaagacgcttggtgcgcagcctgctgagattgctgggcctagtgagggggtcacggtgaaccc

SEQ ID NO: 2779 - DNA, 213 bp, Oryza sativa
  Clone ID: uC-osflcyp052a12b1
tcttggacgagtgcgcgccggtttcggacgggggcggcaaacgcatatacgatggttaggatgatcactcttcctaccagagagagacagagagagagagagagagagagagagagacggttattccttgctagggatctgggtaacgcagcacgagtgcggcgagctgctgcagctgagcattatcaatcgtgcggcggggctgccccacct

SEQ ID NO: 2780 - DNA, 458 bp, Oryza sativa
  Clone ID: uC-osflcyp052b01b1
cgtctgtctgcagcagaagtacacccagagcggcggggtgcgccccttcggtctctccaccctcatcgtcggcttcgacccctacaccgagaagcccgccctctaccagaccgacccatccggcaccttatacgcctggaaggccaacgccaccgggcgcaactccaactccatgcgcgagttccttgagaagaattacaaggacacctccggcaaggagaccatcaagcttgccatccgagccctccttgaggttgtcgagagcggtggcaagaacatcgagattgcggtgatgacacacacggatgggtctccgcgagctggaggaggctgagatcgacgagtacgtggctgagattgaagcagagaaggctgccgccgaggccgcgaagaagggcgccccgaaagaaacctgacctgatcatcatgattcagcaaagcataatctctcttagcat

SEQ ID NO: 2781 - DNA, 419 bp, Oryza sativa
  Clone ID: uC-osflcyp052b02b1
ggtgtgagctacgagtacgtcgaggaggacatcttcaacaagagcgagctcctcctcacctccaacccggtgcacaagaaggtccccgtgctcatccacggcggcaagcccatctccgagtcgctcgtcatcgtgcagtacgtcgacgaggtctgggccgcggcgccatccgtcctccccgccgacccctacgaccgcgccgtcgcccgcttctgggccgcctacgtcgacaacaacatgttccctggaatggctggcgttcttttcgcggcgacggaggaggagagggcggcgaaggccgaggagacgctggcggcgttggcgcagctggagaaagcgttcgcggagtgcgcgggcgggaagggcgttcttcggcggcgactccatcgggtaccgtcgacctcgcgctcgggagcaac

SEQ ID NO: 2782 - DNA, 473 bp, Oryza sativa
  Clone ID: uC-osflcyp052b03b1
aaagcacagccgccattactgctcctcttccattccactggggacgtacgagctctgcgcatcccttccattccattactgaccttggctgcgctgcagagggggtttggtggtgcggttgatttccggcaataaattctctagggggaggtatcggtcatggctgccgctgctgcaaggaggggctcatcgctgctctctcgctgcctgctgtccaggccctccgccgccgcctcgcctgctgtcccctctgcgctccgcagggcagatgggacacaagaattgttgctgggaatccttcagaggttcagcactgcagcagtagcagaggagcccatatcacccccagtccaagtgaactacactcagcttctcattgatggcaaattcgttgatttagcatctgggcaaactttcccaactctggacccctggaccggggagctgattgcccatgtggcttgaggcgatgc

SEQ ID NO: 2783 - DNA, 378 bp, Oryza sativa
  Clone ID: uC-osflcyp052b04b1
gcttttgtgagagagagcgatacgaacaagagaaaagggttctccagacaccgcggcgggcttccccaccccatcggaaggaagaagacgaccagctcgcgcgctcggatctcagccatggagaaggcgatcgatcgccagcgcgtcctcctcgcccacctgctcccctcctcctcctccgaccaatcgctcctctccgcgtcggcgtgcgccgccggggacagcgccgcctaccagaggacttccgcctacggggacgacgtcgtcgtcggcgctgcctacaggacacccatatgcaaggccaagcgaggaggtttcaaggatacatacccagaggaccttcttactgttgttctaaaggctgttctggacaacact

SEQ ID NO: 2784 - DNA, 437 bp, Oryza sativa
  Clone ID: uC-osflcyp052b07b1
tgtttgccaccgcgacgtcggggacgtgttcgtgcccctcgacgacctcctcgccggcgcgcacgacggcggcgagccgaggccggctagctaccaggtgcgccgccccatgtccgcccgcgcgcacggcacgctctacttctgctacaggttcaccgacgtcaagcatcccgccctcgaagccatcgaggccgcgaccgcgaccgcgacgagcagcgccaccaaacaagggcagtacgtgcccatgtacgcgcaggactctgatgagaaggcgactgagaagagcgtgtcgtcgccggtcaccgcctacccgccgacgtcgaacgccgtggtagcgcacccgccggtcgtgccgtacggcgcgccgtacggaggagggttcccaccgcatcagcagcagtacggttacgcgggtcagccggcgttcgcgtacaacg

SEQ ID NO: 2785 - DNA, 410 bp, Oryza sativa
  Clone ID: uC-osflcyp052b08b1
atttgttgagtcgaggctgaacaggggaggggaggggacgagttgaacaaaccatgggaggggaggggattctggttgactattcaatatccatggcgagggggatttgcttcctgtctacctcctcgtccttgccatgtgccacaaaaccgccctgctgctcagtgtcctctgtcttaccctcgtctccgttctctcatcaatgccgaggtaggaaaacgagttgcgggtcaattagggcgctgcgggaggattggagggagagatccaaggccatcccttctggtggcgtctacccagccaaggaccactgcagccaatgtgggctttgtgacacctactacattgcgcatgtcaagaatgcctgcgcattcctaggagatggtatgttccgtgtccaggatttggag

SEQ ID NO: 2786 - DNA, 349 bp, Oryza sativa
  unsure (1)..(349): unsure at all n locations
  Clone ID: uC-osflcyp052b09b1
gccggttattaggctctgcatcagtttagcttgcttgtatgtatggtatgattgtggtgtggcacaacaacatacatacatacatacgtgtaccctacccatcatgctcataatatctcttatcatgcctaacttgctgtaagcacattaatcttaggacatatataccgtcgtctgtccgtccgtctgtctgtgtttgtacctgtgctgtattatgtgtaatgacttgattagctatctatgaataaggttggatgtgggatgtgcatncttttattcatccatttaagatcatccatcaacccatcaggcaggacggtttgaaaatctcccctgtttaagcctgagc

SEQ ID NO: 2787 - DNA, 349 bp, Oryza sativa
  Clone ID: uC-osflcyp052b10b1
ggtgctgattctcgagaagcttttagctgagggggaagaaagcaatgaagctgaagctagacctaaagttagacttgtagttcctaacagttcttgtggtggaatcattggtaaaggagggtcaacaatcaagtcattcattgaagactcacatgctggaatcaagatttcaccacaggataacaattttgttggtttgcatgatagactcgttactgtcacaggacccttggaccatcagatgcgtgcaatatatttgatattaagcaagttatcggaggacgttcactacccacctaatctgagttccccatttgcatatgcaggccttggtttccctagttaccct

SEQ ID NO: 2788 - DNA, 399 bp, Oryza sativa
  Clone ID: uC-osflcyp052b11b1
taaacgatttcctgccaccggcaactgctcaggaggccatcaagtactccatggatctttatgctgaatatatcctgcacagcctgaggcgctaattaattatcatcgtcagatggagcaatcagaccctgatctcatgaagaaaataacaataaaagtctcttgggtgatgctctttttgagcagccatttttgcattatatttgaaacaagggataatattatgtttctgcatttgtgcagaatatatgcaaatcaataatgttactgttattgcttgcacgcaaatatgttggtccaactagcttcaggccgaatcatcgatgcatgaccggtgataaatggtgtaattttggactacaggtgataaatattgcatgatgccctgtgtaatatatg

SEQ ID NO: 2789 - DNA, 352 bp, Oryza sativa
  Clone ID: uC-osflcyp052b12b1
ttataagcaaacaagggataggtttgccgttcagggcccacccagagccagcggactgcacctcgcagtccggcatggctggacagatgctaccgccgattgcgcttgttgctgtggccatctgtatcaccgcggcggcggcggcgaaggtgccggcgatatacgtgttcggcgactccacggccgatgtcggcaacaacaactacctgaccggcgccgccgtgccgcgggcaaacttcccgcacaacggcattgacttccccacgtcgcggcccaccggccggttcagcaacgggtacaacggcgtcgacttcttggctcttaacatgggattcaggcgcagccccccacc

SEQ ID NO: 2790 - DNA, 453 bp, Oryza sativa
  Clone ID: uC-osflcyp052c01b1
aatggttttcctccaccaagatccccttcctcctcctggccgttcttcttctcctttccgtcgccttcccagcggaggtgatggcaggagggcacgggcgcggcggaagcagcggcggcggcggaggggtggccggcggcgggaacctgaggccgcgggagtgctcgcccaagtgcgcgggccggtgctccaacacgcagtacaagaaggcgtgcctgacgttctgcaacaagtgctgcgccaagtgcctgtgcgtgccgtccggcacctacggcaacaagggcgcctgcccctgctacaacaactggaagaccaaggaaggcggccccaagtgcccctaagatgcatgctttgtgtctttccttctttttttttaccctatgaataaaacctgctcctactaggtctacattgggggcactggctcactgacactggtttagcttatggatc

SEQ ID NO: 2791 - DNA, 424 bp, Oryza sativa
  Clone ID: uC-osflcyp052c03b1
catgatcatcacccttgaggtcgagtcgtctgacaccattgacaatgtcaaggccaagatccaggacaaggagggcatccccccggaccagcagcgtctcatcttcgctggcaagcagcttgaggatggccgcaccctggccgactacaacatccagaaggagtctaccctccaccttgtgctcaggctcaggggaggcatgcagatcttcgtcaagaccttgactggcaagaccatcacccttgaggtcgagtcgtctgacaccattgacaatgtcaaggccaagatccaggacaaggagggcatcctcccagaccagcagcgtctcatcttcgccggcaagcagctggaggatggccgcacccttgctgactacaacatccagaaggagtccaccctccaccttgtgctcaggctcaaggga

SEQ ID NO: 2792 - DNA, 373 bp, Oryza sativa
  Clone ID: uC-osflcyp052c04b1
cattcttccagtaccctgatgttaaccacgccactgtgaagactcccagtggagagaagcctgtcagggaactcgttgctgatgatgagtggtttaatacggaattcatctctaccgatcagcagcgtggtgccggcatcattaaggcgaggaagtaatccagtgtcttatctgctgccagctttgcatgcgatcacatatgtgactgggttcttggtactcctgagggaacatttgactacatgaaaagggtcatcgtttgggttgtctggtgtaactggtgaatcttatctattacctgctcttggcatggcctaaggagatgagaagaaagttgtctggattttctcttgtctacaacaaagaaggtaaa

SEQ ID NO: 2793 - DNA, 372 bp, Oryza sativa
  unsure (1)..(372): unsure at all n locations
  Clone ID: uC-osflcyp052c06b1
ggtgttcacgctggaatccggcgatccggatcccttggccgccggtgagggcgtcgaagctcccgctggcgaggatccactaggatcgagcgccgccggcgaggacccgtgggcgaaggatttccgcgcggaggacagcgagaagggggacgtgttcgaggagatcttcaaggaagaggctgccaccgccgccgtcgcttctggagagaaggctccgggggcaggcgccgacgagctgtggacgctgagtggggaggatgagaaggatcctttcgcggaggccgtgctcgggggtgggcttggggatcngcaggtgagggcgctgcgattgatgaggccgatgcgtgggtagacgaggaggagngaagagcg

SEQ ID NO: 2794 - DNA, 460 bp, Oryza sativa
  Clone ID: uC-osflcyp052c07b1
tttatatttacctcctccacctcctcctcctccccccgatcggatcggcccggctcctcctcctccgccgccgccaccgccgccgcagataggagaagatggccgcacttgataccttcctctttacctcggagtctgtgaacgagggccaccctgacaagctctgcgaccaagtctcagatgctgtgcttgatgcctgcctcgccgaggaccctgacagcaaggtcgcttgtgagacctgcaccaagacaaacatggtcatggtctttggtgagatcaccaccaaggctaacgttgactatgagaagattgtcagggagacatgccgtaacatcggatttgtgtcagctgatgtcggtctcgatgctgaccactgcaaggtgcttgtgaacatcgagcagcagtcccctgacattgcacaggggtgtgcacgggcacttcaccaagcgccctgaggaga

SEQ ID NO: 2795 - DNA, 460 bp, Oryza sativa
  Clone ID: uC-osflcyp052d04b1
cccttctctcacattttccccaaataataatagaggaaggggaaaaacacatttgcagccacatcatccatggcctctctccgcaccattccggtgatcttcggcatcctcttctatgtccttcccagcactgccactgccaccgacgcaccggactacgtcgtccaaggccgtgtctactgtgacacgtgccgcgccgggttcgagaccaatgtcaccgagtatatcaagggtgccaaggtcaggctggagtgcaagcactttggcaccgacaaggtcgagcgtgcgattgacggtgtgactgatgagaccgggacatacaagattgagctcaaggacagccatgaggaggacatctgcgaggttgtcctcgtccacagcccccttgcaaactgctctgaaatcgaggccgaagggatcgtgcccgtgttttgctcacaggaatgtcggcatctgtgac

SEQ ID NO: 2796 - DNA, 463 bp, Oryza sativa
  Clone ID: uC-osflcyp052d06b1
gcaattcttgagctcaatcagcaacaacatctatctgcttcttgcttagttaagtccttcgccctcccaagaagaagaagatgtcttgctgcggcggcaactgcggctgcggcagcggctgccagtgcggcggcggctgcggcggatgcaagatgttccctgatgtggaggccacagccaccaccaagaccttcgtcctcgctgctccatccaacaaggcgagctctggaggaatggagatggcggtggagagcggcgagaacggcggctgcggctgcaacacctgcaagtgtggcaccagctgcagcggctgctcctgctgctcctgcaactgaatctatcgttcgtcgtcgcccggctgcatgagggatttatcgtatgggatgctgctactggtcgatcagagctttgatcgaggccttaatttgcttgcattagtacccagcttatatgtaggcaggcc

SEQ ID NO: 2797 - DNA, 494 bp, Oryza sativa
  Clone ID: uC-osflcyp052d07b1
gatccaagctggtttaaggctaaacttgatatggagatctctccgaatccttaattgatttggagtcacatgtagtataattaaggaacaagccccacagctcacgtcgtcttaatattctatctcgacagttttggtgtaaaatcaataatgaagatatggagtgatacgcaaatcaatcttgtcgatcttccatgatgtggtgtctaataaaatggtctttagttgcagacaactaactagcaccacatgtctttgtcacaatatattctattatacatgcacaacaaatggagcaacaagagggcactctaaaagtaaagtaaaaaaaaatcctccagatatcataagatatgaataaaaaaagaaatttgtaatggatagtacatggagaataattctgtgttcaatttctggattgcatatcatggtttttgatcttagaataaactctgatacagttatgattttggtatctgaatcagatgcctgga

SEQ ID NO: 2798 - DNA, 310 bp, Oryza sativa
  Clone ID: uC-osflcyp052d08b1
gtgaaattctcagcttatagtcaggtgaggtctgagctgtggttgagagatggcacaggcaatggcgtccatgaccgggctgtcgcagggcgtgcagctgccggccgggcccaggcgcgccggcggcaggtccaggctcgccgtcgtcagggccgacgccgccgccgccgacgtccagaccggccgccgcgccgtgctcggcctcgtcgccaccgggatcgccggcggtgccctcgcgcaggcggtgctcgccgtggccgtcaagctcattaagctcggccctctgccatcgcccttcggtggactcctt

SEQ ID NO: 2799 - DNA, 326 bp, Oryza sativa
  Clone ID: uC-osflcyp052d11b1
ttccagcctctcgagcctccacgtcacatcgccggcgccggctcatgtctctcctcacctcgcccacgccgttcggcggcgcggccgtccgccgccgcgcccctcccgcttccgccgccgcggcgacccggctcgacctcccgctggtgggcagccgggccgcgctgcacgtggcgcgcgcgcgcagaggcggcggctggtcccgcacgcagcggcgcctggaggagcgcggcaagaataagcgccggggaggcggtagcgtcacggcgcccgcgccgcccgacatggacgaggacgccttcgcccgggaagggggtggactggga

SEQ ID NO: 2800 - DNA, 268 bp, Oryza sativa
  Clone ID: uC-osflcyp052e01b1
aatccttctccgcctccgccgccgcttccgcttaacctccttgctctccttgacccccccgcctttcaatcgggcgcggccgttcggggttcgcgtttttatcggatcgcctcgttcgttccctcccctcccctccccttcgcgcggttctttgccgcgccgcgggggttccgttccgtcgtggagcggctggccccggagccggaggccaaggggcgtggacggtggagggtaatccgtggtgttgagggagccttggtgaggtggt

SEQ ID NO: 2801 - DNA, 403 bp, Oryza sativa
  Clone ID: uC-osflcyp052e02b1
agcatttacactgtggggcagtatgaatcacacattgcattcacccttcctgggctttaccgagttgtgcatggcatagatgtttttgatcccaagttcaacattgtctctcctggagctgacatgagtgtctacttcccgtacaccgaggctgacaagaggctcactgccttccaccctgaaattgaggagcttctctacagtgaagtcgagaacgatgaacacaagtttgtattgaaggacaagaacaagccaatcatcttctccatggctcgtcttgaccgagtgaagaacatgacaggtctggttgagatgtatggtaagaatgcacatctcagggatttggcaaaccttgtgattgtttgtggtgaccaccgcaatcagtccaaggacagggaggagc

SEQ ID NO: 2802 - DNA, 495 bp, Oryza sativa
  unsure (1)..(495): unsure at all n locations
  Clone ID: uC-osflcyp052e04b1
cttttgaggaatatgatgacctggccatgcgtgatgtgcatggagaatggttttttgaccgacgatggtgttgttcacaccgtatttgatggcaacggacagaagcacagcacattgagaaagcgtcaagttaatttgcgtaccctatcaaagatcgacttagactctcctgacactgcacgctcttcttctgctcttcctattagcgcaagcagcaagcgaaatggcacaaggaggtggaagcggtccttgagtgaatcatttcgttcacggccacggagtgctccatctttagtggaattgacgccaaagcacaagggctcaaccgttccagaagtggctcccgacaagtagaactgcatataaccagggtatatctgcctaactagtgttttgcaggaggcctagacttaacagatgaataaccgattttttttctttttttctggnctttaaccctcatgccttttttttcctggacttggagaggatgca

SEQ ID NO: 2803 - DNA, 279 bp, Oryza sativa
  Clone ID: uC-osflcyp052e05b1
cgtcttcttccctcctccctcctcgccgccgacgagctcccggtcatctccgccatggcgtcggagaagaagcagtcgaacccgatgcgggagatcaaggtgcagaagctcgtcctcaacatctccgtcggcgagagcggcgaccgcctaacccgcgcctccaaggtgctggagcagctcagcgggcagaccccggtgttctccaaggcgaggtacaccgcgcggtcgttcggaatcaggcgtaacgagaagatcgcgtgctacgtgacggtgtagagg

SEQ ID NO: 2804 - DNA, 416 bp, Oryza sativa
  Clone ID: uC-osflcyp052e11b1
tcaccaccgtctcggatcaaaccggccaacatctcgcctcgccgagaaattcccaaacgaggaagaggggaaaaggagttcatccccatggcggccaacccctcctccccgtcggcgggcggcggcggcgacgtgtcggcgtcctcgccgacgctgccgccggtgcggctcgcggcggcgcaggcggcgtcggcggcggcgatccaccccacctcgccgcggtacttcttctcctcgctcgcgggcaccaacgcctccccgcaccggcgcatcgccatcgccgtcgacctctccgacgagtccgcgtacgccgtccggtgggccgtgcagaactacctccgcccggggacgccgtcgtgctcctccacgtgcggcccaccttcgtgctctacggcgcccactggggcttcatcccc

SEQ ID NO: 2805 - DNA, 476 bp, Oryza sativa
  unsure (1)..(476): unsure at all n locations
  Clone ID: uC-osflcyp052f03b1
gtttggagtctatgcatttagtaaacgggtgaacttgggtgccactagttcaggcagtggccgtggggactgtgtttacactactgttagccacttcaacatcatacactaccaatgtcatcaggaggctaaaagagctgatgctgcactgaagaatcctaaaaaggaatgggatggtgctaccctgagaaataatgagacactgtgtaattgtatctttcccttgagggggccatctgttcctcctgggcagtacacacgatgtctcgaccagtattgggaccaattgaattctctaggacgagcagatggaagtcgccttcgcttgttaacatatgacattgttctgatgttggccaggtttgcaacaggcgcttctttcagcactgactgcaaaggtggnggtagggagagcaactcgcggatttttccctttatgatccaaaaggcttctcatcttgtagatggaagtgcca

SEQ ID NO: 2806 - DNA, 392 bp, Oryza sativa
  Clone ID: uC-osflcyp052f05b1
tgttgatgtatggcaatttagtggctggtgggaaggagttctagtcagtgcagacaacatttcagctgatagcctacaaatatattttccaggcgagaacttctttagtgtatgccagctaaagaatttaagaatttcgaaagattgggtcaagagccactgggttgatatagaaatgaaaccagatgtgttatcgaaaataccttcggttggggttcaaacaaggcaacctgataatctgacatctgcagagaggccggactccagaaattctgcaatgcttgaccaagagcttgcagccatacaaacaaactctagtgaagataaacaaacaggaggtgaccaggcagcagatgctagtttgactgatatggtctctgcttttgttgagg

SEQ ID NO: 2807 - DNA, 486 bp, Oryza sativa
  Clone ID: uC-osflcyp052f11b1
gtttctctctgttcttgctgcttgcttggtggtggtggtagctttcatgatggaggcgatggtggtggtggcgctggtgcttctcatgtcgtccagtctcgtcgcttcagattggtgcgtgtgcaggtcggatcagccacaggcggcgctgcagaagaccatcgactacgcgtgcggcgcgggcgcggactgcaactccatccacgagcaggggcagtgcttcaaccccaacaccgtggtggcgcactgctcctgggccgccaacagctacttccagaggaacagggccatgggcgccacctgcgacttcaccggcaccgccaccctcaccaccagcgacccaagtgtttctggctgctccttccctgctagtgcaagtggtgctggaacatcaaccactccgaccatgggaggcacaactggaacaatgaccccaggaaccttcacacctggaactggtatgggcacaaccaccggcaccggcat

SEQ ID NO: 2808 - DNA, 451 bp, Oryza sativa
  Clone ID: uC-osflcyp052f12b1
tttcaaggaggctatgaagatgggtgttgaagggtaccataacttaaagtctgttatcaagaagaagtatgggcaagatgctactaatgttggtgatgaaggtggttttgctccaaacattcaggaaaacaaggagggccttgagcttttgaagactgcaattgaaaaggctggatacactggcaaggttgtcattgggatggatgttgctgcttcagagttctacactgaggagcaaacctatgatcttaacttcaaggaagagaacaatgacggttcccagaagatatctggagatagcctgaagaatgtgtacaagtcatttgttagtgaatacccaattgtctcgatcgaagacccatttgatcaggatgactgggttcactatgccaagatgaccgaagaaattggagatcaagtgcagattgttggagatgatcttcttgtcacc

SEQ ID NO: 2809 - DNA, 446 bp, Oryza sativa
  Clone ID: uC-osflcyp052g02b1
aggttgttctcaagggccccttctccgtccgcttgctgggcaagatacggcggctaccgcgttgtcgatgacgtcatccccgaaagctttacggctggctctgaatataagagtggcatcaacatctaagtgatagacatgtgtgcttttttttttgaaataattcttaacctgtctataatcctttttttttcaaaagagagatcaagtctgcattcggggaagccaaaaattaagtttctatggttattttgtgaaatatgccatcaacaaaataaagcattccatatgccatgtccgcatgttgctgcagaggtatatatccagactattttgaggatattactgtaacatgctgaaaataagatattttctaataatgtatcatgccggttcttatgttcttaataaccttccaaaacttaggaaattatgaatagagggac

SEQ ID NO: 2810 - DNA, 479 bp, Oryza sativa
  Clone ID: uC-osflcyp052g04b1
agcaattgtcttgactggcgctggttttggttggtggatggtcagaagattcatcctttcaaaagatggtagtgttgatgctgggatagcacagtttgtgaagtgggctatgcgtgttgttgctatatgctttgttatgcagagcacacttgatcctcttctagcgttattcgcgctggccgctagttggtggatttgttctgtgttcacagcatatagagctccaaagtcaatgacactgaagcaaaagcaatcaaaggcttctactcagccaatgtataataaaggatcacctaaccctcgccaaatccaattcttaagcccatccaagagggatattggaagaaccacatcaaacagttcagccacacagtatggctggagcaatttagccaatggaggactggtgtcttcaacacttacaaagagggtggtacccgataatcaagatgaagaccactactccaccttgcacaata

SEQ ID NO: 2811 - DNA, 488 bp, Oryza sativa
  Clone ID: uC-osflcyp052g05b1
cttgttgccgtcgaaacccaaaatcttctcttcccgtacgtgagaagcgccaggtcgtcgtcgccgccatgggcgtggaggtgtgcgtcaaggccgtcgtcggccacccggacacgctcggcgactgtccattctcgcagagggtgctgctgactctggaggagaagaaggtgccctacgagatgaagctcatcgacgttcagaacaagcccgactggtttctgaagatcagcccagaggggaaggtgcctgtgtttaacggtggtgatggcaaatggattcctgattctgatgtgatcactcaagtcattgaggagaagtacccaaccccgtctcttgtcacccctcctgagtatgcatcagtgggatcaaaaattttctcatgctttacaacgttcttgaagagcaaggatccaaatgatggttcagagaaggcacttcttactgaactgcaggcacttcaggagcatttgaagctcatggtccct

SEQ ID NO: 2812 - DNA, 304 bp, Oryza sativa
  Clone ID: uC-osflcyp052g06b1
cttctcatcccagagcaagaagctcatctcctcctgctctcgcatggcagccatggccaccaccgcgtccagcctcctcaagacctccttcgctggcgcgcgcctgcccgccgccgcccgcaaccccaccgtcttcgtcgcgccgcgcaccggcggcgccatctgcaactccatctcgtcgtcgtcgtccactcccccctacgacctcaacgccatcaggttcagccccatcaaggagtccatcgtgtcccgcgagatgacccggcggtacatgaccgacatgatcacctacgccgacaccgac

SEQ ID NO: 2813 - DNA, 357 bp, Oryza sativa
  Clone ID: uC-osflcyp052g08b1
ccttcatccaccgcgctgcttccatctccgcccccagccacctcttcgcccttcccagcctcactcccccagccagggaaggacagtggagcgcggatccgccgcctcccgtcctcggtaacgatggcggcgcatgaatccagcggcctccgtcctcgggaacggcctggagcacgcggatccgccctccggagcggcggcggtgtgcttaggcaggcgggagcgagcagctacggcggcggcggaggctaccgcgaccacggcgccggtggctgcaacgaccacgacggcgccgatagctgcgacgacgacaatgacgatgaccagcggcaggtcggcggcttgcaatcgcggggc

SEQ ID NO: 2814 - DNA, 503 bp, Oryza sativa
  Clone ID: uC-osflcyp052g09b1
accataccttgactggtacaagggccccaccttgcttgaggctcttgaccagatcaacgagcccaagaggccatcagacaagcccctgcgtcttccccttcaggacgtgtacaagatcggtggtattggcaccgtgcctgtgggtcgtgttgagactggagtcctcaagcctggtatggtggtgacctttggtcccagtggcctgaccactgaggtcaagtcggttgagatgcaccacgaggctctccaggaggctcttcctggtgacaacgtcgggttcaacgtgaagaacgttgctgtgaaggatctgaagcgtgggtacgtggcctctaactccaaggatgaccctgccaaggaggctgccagcttcacctcccaggtgatcatcatgaaccaccctgggcagatcggtaacggctatgctccagtgctggactgccacacctcccacattgctggcaagtttgctgagctggtgacccagattgacagaccatctggca

SEQ ID NO: 2815 - DNA, 409 bp, Oryza sativa
  Clone ID: uC-osflcyp052g10b1
catacctgaagttccatcgtatggagcggcttcaggtgatctcagtggctgctggagtgatgcacaccactgttttaaccgcagatggtgctattttctactgggtttcatcggaccctgatttaagatgccgacagatattctctatgtgtggaaggaatgttgtgaacatctcagctggaaaatactggactgcattggctaccgcaggtgggtgatgttttctatgtgggatgcatagaaacatatggatgatctcccaatgtttactcgagtgcatggtgttaagcgagcaacgtcagtttgtgttggtgaaacacatatgcttgtgctgtctagcatataccatcctgagtacccaccccaacctaaaatccaatgcatgaaagccctgtttgaatggattggt

SEQ ID NO: 2816 - DNA, 480 bp, Oryza sativa
  unsure (1)..(480): unsure at all n locations
  Clone ID: uC-osflcyp052g11b1
tcctcaccctggccgactacaacatccagaaggagtctaccctccaccttgtgctcaggctcaggggaggcatgcagatcttcgtcaagaccttgactggcaagaccatcacccttgaggtcgagtcgtctgacaccattgacaatgtcaaggccaagatccaggacaaggagggcatccccccagaccagcagcgtctcatcttcgccggcaagcagctggaggatggccgcacccttgctgactacaacatccagaaggagtccaccctccaccttgtgctcaggctcaggggaggtatgcagatcttcgtcaagaccctgaccggcaagaccatcaccctcgaggtcgagtcctcggacacgatcgacaatgtgaaggccaagatccaggacaaggaggggatccccccggaccagcagcgtctcaattttngtggcaagcaactggaggacggccgcacccttgccgactacaaca

SEQ ID NO: 2817 - DNA, 402 bp, Oryza sativa
  Clone ID: uC-osflcyp052g12b1
ttcagatctcccccatttcaactccctcctcctgcactttcccccccgcatcgagcagcgaagcggcgatggcggaggagcagccgcgcgcggcggcggagggcggcggcgagacgctgatggagaagatcgccgacaagctccacatcggtggggacgggtcgtcgtccgactccgacgctgacgagcgcaagcagccgaagccctcggcgccgccggccccggccgaggtcgcaacggagtcgtttgttgattcggctgctgctgccgcggccgaggccaaggccaagggtgttccgcctcttcgggcgcgaggagcccatccacaaggtcctcgggggaggcaaacccgctgatgtgttcctatggaggaacaggaacatctctgccggtgtactaagc

SEQ ID NO: 2818 - DNA, 188 bp, Oryza sativa
  Clone ID: uC-osflcyp052h01b1
ccttgttgctgctgctgcagctgagcctccgttcttggaagcgagagagagggagggaggagggaggcaattggtgaggcttttggaggaggaaagggaagcttctggccccaacatcctcctcctcctcttgctcactcaccacgctctcctctcaccaaactctctcttatctccttccaagaccc

SEQ ID NO: 2819 - DNA, 286 bp, Oryza sativa
  Clone ID: uC-osflcyp052h03b1
tggttgaagagcaggaggagcccaacgcccgggggggcctatttgaagagctcgcccaccgcctaactctccccccctacccgaccccgagctcgccacccgatgcgatcgaagatgcataagctggggagaggaagccgcgacaaggtgcagcaggtcatgaccataactcgtgcgagtgagaagggcgcccttcaggccctgaaggctagtgatgggcacttggaaggagcttgtgattgtttctacagccaaccacaaaattctctgacgaactctcgggatc

SEQ ID NO: 2820 - DNA, 388 bp, Oryza sativa
  Clone ID: uC-osflcyp052h04b1
attattaacattcgcattcatcagctggtaggtagggtgagctagagattaagggagagagagagatcatggcgtccaaggttgagctggtggtggaggtgaagtctccggcggacaagctgtggacggcgctgcgcgactcgacggagctgttccccaagatcttccccgagcagtacaagagcatcgagaccgtcgagggcgacggcaagtccgccggcaccgtccgcctcctcaagtacaccgaaggggtgccgatggtgacgttcgcgaaggagaaggtggaggtggcggacgacgagaagaaggtggtgtcgtacagcgtggtggacggcgagctggtcagcttttacaagaactttagggtgacgctgcaggtgacccccaa

SEQ ID NO: 2821 - DNA, 358 bp, Oryza sativa
  Clone ID: uC-osflcyp052h07b1
tagcttaatgagtttgacaaattcttcaacctgggattcttttgcaatcacagaaggttcaatgttgcaatcactcgtgccaaatctttgctaattatcataggaaaccctcacattatcactaaggatcggcattgggataggctcctgaggtattgtgcagacaatggttcttaccaaggatgcccacttccaccaccagaagagacccaagtctctggatttcgtgacagccaagacgaacctgctaggtggggttacaaccaacaacaagagtcatctgctaactacagctacaagcaagacccacacgactctggttccgaacatgtaaatggtttgccctccactgaaaatg

SEQ ID NO: 2822 - DNA, 418 bp, Oryza sativa
  Clone ID: uC-osflcyp052h09b1
ggtagaagagcaggaggagcccaacgcccgcgaggccctagccctcgcgctcgcccaccgccttcctctccccccctaccctaccccgagctcgccacccgatccgatcgaagatgcataagctggggagaggaagccgcgacaaggtgcagcagttcatgaccataactggtgcgagtgagaaggtcgcccttcaggccctgaaagctagtgattggcacttggaaggagcttttgattttttctacagccaaccacaaatttctctgacgaactctcggcatcttgaagatctgtacaacagatacaaagaacctgatgttgatatgatcatggtggaaggtgtatctcagttttgcactgatcttcaagtggatccccaggatattgttatgcttgtcatatcatggcacatgaa

SEQ ID NO: 2823 - DNA, 463 bp, Oryza sativa
  Clone ID: uC-osflcyp052h10b1
tgcttaatatggtgcaaaggtgattggttctgcaaaggatagggatagaattccaggcattgacataactcttagtgagggtgacacatggatgtttgctggtcatcaagttcttgtaatggaaactcctggtcatacatcaggtcatgtgtgctaccacttccctggatctggagcaatatttacaggggacacattgtttagtttgtcatgtggaaagctttttgaagggactccacaacagatgtactcttcactccagaaaattatagcacttccggatgagacaagagtgtattgcggacatgaatatacattgagcaattcaaagtttgccttgagcatagaaccaggaaataaagacttacaggaatacgctgcaaatgccgttgatctccgcaggaaggatacacccaccggtgccaacaacaattggggagagagaagcaatggcaatcctttt

SEQ ID NO: 2824 - DNA, 210 bp, Oryza sativa
  Clone ID: uC-osflcyp052h11b1
gttgagaggcagccaaggatacgatagcaaggaagagagagcgttgaagatgctgctgaccaccccgttcgtgtcgtcccctgtgagggtccagggcaatgggggcagcggcgcctcgccgtgggcgggcgcggcgacggcgctgaggatccaggcggcgaagcagctgacggggcgtgtggtgacgacgaaggcggacaagacggtggg

SEQ ID NO: 2825 - DNA, 567 bp, Oryza sativa
  Clone ID: uC-osflcyp053a02b1
cctcccatctcgttttctcgcgctcgattcgaatcccagcgcagggcaaaagcccacgcgcgaagcaaaagctcgccgcaaatggaggacgccgcggtcgaggaggccgaggtgagcggcggcgcggcggagttcgcgccggctctcgtcgccgcccacccgctcggccgctccgtcgccgtcgccgtcgggcccgagctccgcgtgttcgatctcaaggccagcagtgcagtttcattgtcagacaattctggcggtggttctcattcggatgctataagagctatctcgtttagtgcaaacggtgctctgttcgcatccgctggtgatgacaagcttgttaaggtctggaagactgattcatggtgctgcattcggaccataacttctgaaaagagggtcagtgcagttgctattagcaatgatggcacatatgtaacttttgcagataaatttggtgttatttgggtagctaccatggcggaaagtggtggagagcaggagccaactgataataaacctgtgtaatttttggcccttctgccgtattatactagcatgaatttc

SEQ ID NO: 2826 - DNA, 145 bp, Oryza sativa
  Clone ID: uC-osflcyp053a05b1
tatttcctttttcgccggctcgccctcagggagttgcgagagtataaatttaaatgccgtttcacacctccctatcttttgactactatattatttacaactataattaatattattaatattcattttttttatatcttttatt

SEQ ID NO: 2827 - DNA, 410 bp, Oryza sativa
  Clone ID: uC-osflcyp053a07b1
gccgcgggaaggtattaaaatcgagagcgcccaaccaccgctgctctctacctgtctctgctgcatccgcccacgaggtgttcgacggaatgcgtgagagagacgccgcagcgggcgccacccctccccccatgtgggcctcctccctactccctcttccccctggccacgcgcgggaggggacggggggccgacgtcgccgcgacagcgacccgggcggtgggcgagggggagagcggtgtgatccacccagaatcgtgctgcgatgtcaagatcgaggacagctacatcgtgtccggcgacaactgcatcgccgtgaagagcggctgggaccagctcggcctcaagtccaacatgccgagcctgcacatccttatcaggaggctcacctgcattatcccgaccagcgc

SEQ ID NO: 2828 - DNA, 438 bp, Oryza sativa
  Clone ID: uC-osflcyp053a09b1
gtaatatatatgaaggttttcacagggaagttggtctttttcttggccattatcctcttcgaaggatgcttggtcagatctcaaagtgttccatatgactactcagcaaacattgagtgcgtgaaggagccggagaagcctctgtacggcggcggtatcctgaaggagaccgaggctaaggggtatgccagcggcaagaagcttctgtcggagaatagcaagagcgccgctccggtgaagggctccgccctcaaggtcgacctcaagaaggaccaccactacgccttgtccgtgtggctgcagctctccaagggggaaggcgacatcagggccgtgctggtgacccccgacggcaagttcaacaccgtcggcatgatcgcggccaagtgcggctgctggaccatgctcatgggcggcgccacctcctacgacgacggc

SEQ ID NO: 2829 - DNA, 423 bp, Oryza sativa
  Clone ID: uC-osflcyp053b03b1
gctggctctgggctggccgtgccctcctgtcagtcctaggtccagctagaatccctccttggtcatccaccaccaccatccacatgattgcatttgtgcagattcctggagaattaagctgtcctctcatgccgatctgacacaccttgttgttgttgttgctgctggttgccgcacaaccgaaaggggggattatttggccctctttctctttcctttcgcaggaagatttggtgattcttcttctgagggctcctctaaggatttgggaggatggggaagaaggggaagtggtttggagctgtcaagaaggtgttcagccctgaatccaaggagaagaaggaggagagactgaggagaaaattagcagctagtaacccgaacccgccagatctaacccctttcgcttctctggaagtcaat

SEQ ID NO: 2830 - DNA, 517 bp, Oryza sativa
  Clone ID: uC-osflcyp053b08b1
gagcgaggcggcgacgaggacgacagaacgaagaggagtgcgtacatggaggcggcggcggcggcgagggcggcggaggcgaagacggaggggcttctccggggcgcgtgcgcgctgctggcggcggcggcggcgctgctggtggggctcaacacgcagacggagacggtgctgttcatcaggaagaaggccaccgtcaaggacgtccaggccctctgggtgttggcgatggcggcggcggcggcggccggctaccacctgctgcagctgctaagatgcttctacctcagccgcttcgccgacggcaagccctgccggcatcgcagggccatagcctggctttgcttcctcctcgacaagggttgtgcatacataacattcgcgacgacggtggcagcggctcaggcatgcgtggaggcctatatggcacgcacgcgttgcagtggactaagctttgcaacatctacactcgcttctgcgagcaggttgctggtagccttgtgtgtgccatgctcgc

SEQ ID NO: 2831 - DNA, 555 bp, Oryza sativa
  Clone ID: uC-osflcyp053c01b1
gttggctcattgtcatggactgctgtagttttcttcacagggtgggttgagctcattggttttgacaatagcagttcagcagcgctaaacagcatgtttgctatcggttgtgccagtggatcatttctaggcggagtaattgcagaccgtctgtcaaaatactatcctgattcagctcgcatcatgtgtgctcagtttagcgccttcatgggtatccctttctcttggatcctccttacagtcattcctcagtcagtcgactactggtctgcttttgctgtcactctcttcttgatggggattaccatcagctggtgcgctacttgcgcaaacaaccccatgtttgcggaggtagtccctcccaagcaccgcacgatgatctatgccttcgaccgcgcgttcgagggttcatttgcctccctggtgctcctgctgttggcatggtcactgagatgatctatggctacaacgcaaagaccgtcaatctggaaaatggatcggtagcaagggcgtttgccctctccaggggctatcgacaacgatgattgtcctttt

SEQ ID NO: 2832 - DNA, 552 bp, Oryza sativa
  unsure (1)..(552): unsure at all n locations
  Clone ID: uC-osflcyp053c02b1
cgacattggagctggatttgggcatttcgctattgcaacgtgagggctgtgtactaattggctgagaaaattaaatccagttgttgctgcgagatcactcgtgaacctggtcctgtcaagggaggatccactgtgattgcctttgcacaggatcctgacggttacatgtttgagcttatccagaggggtccaacacctgagcctctttgccaagttatgcttcgtgtgggtgaccttgatcgctccatcaagttctacgagaaggcccttggtatgaagctgctgaggaagaaggatgtacctgactataagtataccattgccatgttgggctatgctgatgaggataagacaactgttattgagttgacatacaactatggtgtcacagaatataccaagggcaacgcatatgctcaggttgctattggcactgaagatgtctacaagagtgctgaggcttgtgagttggttacaaaagaactagggggaaagattttgcggcagccaggtccactaccagggctcaacacanagattgcctttttcctt

SEQ ID NO: 2833 - DNA, 457 bp, Oryza sativa
  Clone ID: uC-osflcyp053c03b1
gccgccgtcgcatgccgtccgccttgctcctcctcgccgggagcttggtcctcgccgtctcctctccccacgcgcagatctaagcctagggttagggtttgtgtagctcgcagcgatggcgatcaagaggaccaaggcggagaagaaggtggcgtacgacaagaagctctgccagcttctcgacgagtacaccaaggtgctcatcgccgtcgccgacaacgtcgggtccaaccagctgcaggagatccgcaagggcctcaggggcgactccatcgtcctcatggggaagaacaccctcatccgccgctgcatcaaggtggacgccgacaacacccgcaacaaggagttcctcgagctcatgccccttctcgccggaaaccgtggcctcacttcaccaagggtgacctcaaggaggtccgcgaggaggttgccaagtacaagggtggagctcctgctc

SEQ ID NO: 2834 - DNA, 82 bp, Oryza sativa
  Clone ID: uC-osflcyp053c07b1
gtcgttttttattgaaaactgcacaaactccagggaaggggttaatttgaaatccggtgccggttaccacacgagctcatct

SEQ ID NO: 2835 - DNA, 501 bp, Oryza sativa
  Clone ID: uC-osflcyp053c09b1
catctttttgatactcaagaagctgaatcttccagaagcacctcagatgatgcaaatcaagagaccaggaagtacaaccagttgttagatataattggtgatatccttcagcagattgtacgaagtgggggtagcaattcggagatatggggtttatatgcgaggtggcataagacgaagggtaaccttatcgcatgctctgaagctatgttgaagcaagttcggtctctccagggttctggactatggcatgaccagacgaagttcactaagtatgctcaagcttccctgcagctttgcaagatctatatggaaatttcttcttcgactggaagccaaagagagttattttcagctgagatgcaccttaaaagctccttaaaacaggcttcagacttcttacatacccctgagtataaagctctcgatgactgccttgcagaaataaaaaaccttattggccctgcctagagttattaagggtggtttgagctgtcttaa

SEQ ID NO: 2836 - DNA, 503 bp, Oryza sativa
  Clone ID: uC-osflcyp053c11b1
ggcaacaaaaatgcctttaaggcacttattgctgcagagtgacactggagtcaaggtcgagctgaccaagaattttgagatgggtgtctcaaacaagacccctgagtttctcaagatgaacccccttgggaagattcctgttctggagactcctgaaggtgctgtttttgagagcaatgctatcgcgcgctatgttgctcgcttgaaggacaacagctctctttgtggttcttctcttatcgactattctcacattgaacaatggatggacttctcagcaacagaggttgatgccaatattggaaggtggttgtacccaaggcttggttttggcccttatgttcctgtgcttgaggaatttgctattacttcattgaagaggtcattgggtgctctgaacacacaccttgctttaaacacataccttgttgggcattcagttactctagctgatattgtgatgacatgcaacctatattatgggtttgttcggatcttgatca

SEQ ID NO: 2837 - DNA, 413 bp, Oryza sativa
  Clone ID: uC-osflcyp053c12b1
agcaaactctcctcatacgacagagagagcgtgacagcgggaggggtttcggaggcgggagcgggcgacggcggcggcggcgggcgccagcgagcggcgaagggcgcgctggagatgaaggagaaggggtcgagggcggcggtggacgagcgctacgcgcagtggaagtcgctcatcccggtgctctacgactggttcgccaaccacaacctcgtctggccgaccctcttctgccggtggggaccccagtttgagaaggctacctacaagaatcgtcagccgttttacctttcagagcagaccgatgggactgtccctaatactctgggtattggcaactgtgaagttgtaaaaccaagggttgcagctgctgacatatatcccagtccaatgaggaagcacgatcacctttt

SEQ ID NO: 2838 - DNA, 126 bp, Oryza sativa
  Clone ID: uC-osflcyp053d02b1
gagatgttagaattgttccgtggattgcctggagttgtgtgcatattacctgattcatatctttatccagagacaaaggagtatggaggagacaaatattaaaatggtgtgatctctccatgactc

SEQ ID NO: 2839 - DNA, 412 bp, Oryza sativa
  Clone ID: uC-osflcyp053d06b1
atgaagttatctgatccatttgatccacaaacagaatgagggttgggtggaggttaccccgaaaactctggctgatgttaaaggtggcacactgatctcatatgaagacaagggtcagctcctggagattgcacaagttcctgatgcacatgtgaatgaattcaaatccatcgagaaattcaagatcttcaacacgaacaatctatgggtgaacttgaaggctatcaagcgccttgttgaggctgatgcactaaagatggagatcattccaaaccctaaggaagtggatggagttaaagttttttagttggaaacagcagctggggcaataatcaaggtctttgatcacccattgggatcaatgttccaaggtcccggttcctaccagtgaagggaacttcagatttgcagc

SEQ ID NO: 2840 - DNA, 142 bp, Oryza sativa
  Clone ID: uC-osflcyp053d07b1
gttgatttttgttgagaacggcacaaagggcagggaagaaaatttatcggagtgctatgatgctcaccagtcgagctcaccagcgagagaaagatcaacgtcgttgaagcatgcatagagaggtcactaaggcagaggtgaa

SEQ ID NO: 2841 - DNA, 83 bp, Oryza sativa
  Clone ID: uC-osflcyp053d08b1
tttgcattttgagccaaggggtgcaaaacgcaggggagaatttgtatggaataccactgatggtgatggggagatcacactag

SEQ ID NO: 2842 - DNA, 464 bp, Oryza sativa
  Clone ID: uC-osflcyp053d12b1
gtaaaactttgttgacatttgccatcgttaccgggatgggtcatacttaaatctgtctggtgtcccacatgcagaattactggtgatggaagcgataacatgcttaaggcatctcaagacactaataatgggcaaagggcagctgggagaagcattttttcagttgttgtctgagtgcccattactgactactctgacagttagtgatgcatccctcgggagtggcattcaagaagtaactgttaatcacgatggattacgtgaacttcaaattttgaagtgtcgtgcacttcagaatatctgtcagatgttcccagcttcaaatactctcattgaggcgaactggcatggctcatgtatcactcaacttgccccagttggttgaattgggatttcagacctgccataaactttctgataatgccatttccccaagctgctacagcttgtccgctgttagcatc

SEQ ID NO: 2843 - DNA, 611 bp, Oryza sativa
  Clone ID: uC-osflcyp053e03b1
ctcacttcaccgttgcaatggcctaactgctgctcttcggcatgctccttccttcccgttccacaaggaagagaacttctggttgcttctagcagatgctgcatcgaatgaagtttggttatcccagaaggtcagcttcatggatgagactaccgctataactgcagcatcaaaagctatacaagagacccaagaagcactaggtgcaagtgcaaaggaaatagggattgcgattagagaggcagtcgacagggtgaagaaaggcagtaggttggtaatgggcaagttccaagccccggccgagggcactcacaacctgacttccttctgtttgtgcgacgcatggataggatgtgacaccaagaccagcttgaagttgaaggtcctgaagcgcagccgggcaggaacaagaggtcatgtggctgaagaaggcccagtggcagaggatggtattgaggaagaagaagaggaggaagaagaggagtacgacgactacgagagcgagtacagcgatgacgaggaggatgagaagagcaaaggaaagggtaaggtcgcgaacggagtagcccaccaaaaggcaaactccgatatagattctggcagtgatgatc

SEQ ID NO: 2844 - DNA, 224 bp, Oryza sativa
  Clone ID: uC-osflcyp053e06b1
gagagaatccacttttggatctatccattccgcacaccagcgcaggttgaaaatcaaggaggcgagcaccacgaccactacaaccactaccacaaccatgggtactccccccacaagcctccaggaccacacccgccacggaaccccacccccacaccagccttagccagctcacgcaagcacgccacaccccagcccgccgccctcaagatcaacaaccccac

SEQ ID NO: 2845 - DNA, 159 bp, Oryza sativa
  Clone ID: uC-osflcyp053e08b1
ttacattttaaacgttgccgctgcagcgctgctggacggggttgcttgtgaaaacttcatttctcatttctgccctccttaatcttgggattaatcaccgcagccaatgacgctgccgtgtcggcggccacgtctacggcgctctcggccgttagcttc

SEQ ID NO: 2846 - DNA, 157 bp, Oryza sativa
  Clone ID: uC-osflcyp053e09b1
ttcatatattattcagaaatgcaaaaagtgcgcggaagaaaatatttccgagtccggtgatgatcacttctagccatcgccatgaggacacataacacttactatgagccaactatcgtggggtttctaaggcagctaagaaaataagcagtaaatt

SEQ ID NO: 2847 - DNA, 333 bp, Oryza sativa
  Clone ID: uC-osflcyp053e10b1
tttatgattgccttgcacaggaagatgcggaggctgttaacactgaggaggctcctgcaactgcagaggatgagaagaaacctgaagatgtgccacagtctgaggtccacaaggacaaggagagtccacaccttgcaatagaccagatagtgcctgaggataaggagatgactttggaggaatatgacaaagtgctggaagatacgtcgctcgcttcgcttgcactgaaggctgaggagaggaaagttcactgctactcggacactgctggccatgcaacagatgctctgtcataaaggctaaagaggtagtgattattctcctggttctctg

SEQ ID NO: 2848 - DNA, 231 bp, Oryza sativa
  Clone ID: uC-osflcyp053e11b1
tctttgttgacataccctgcataagtatatacaacaaacatataactttttgcaaggtaagaaggagtttttatctgttcttgatgatagactcctagagaagttgtcctagttgtgtagatgttgatgctcatcatccctgagctcctcctctgtagattcatgactggcccagccataacccagcttgttcagtccttctttgccgtattcctatactggctctatgtc

SEQ ID NO: 2849 - DNA, 77 bp, Oryza sativa
  Clone ID: uC-osflcyp053e12b1
ttagatttttatctggagccgcacaactgacgggggagattttaaatttgatcggggtcttaccactcatgccaaca

SEQ ID NO: 2850 - DNA, 553 bp, Oryza sativa
  unsure (1)..(553): unsure at all n locations
  Clone ID: uC-osflcyp053f03b1
gtcgcattgttatttacaagacagcgtactactcctttgaccttcctgtggccaatgctttgctcttatctggcgcaaaacttgaagacttcagtggtctaaaggatatacttattgaaatgggcatatattttcagatacaggatgactacttggactgttttgctgaccctaacaccataggcaagattggaactgacatcgaagatcataagtgttcctggttaatagtacaggctcttggtcatgctgacaacaatcaaatagaagtactacataggaactatggcaagaaggattcaagttctgtttccgaagtaaagaggacttacgcggcgcttgatttgaaagatatcttctccgagttcgaacgtcgatgctacaaccacctggtcacctctatcgaagctcagaaggatcatgcagcacgggagatcctgaaatcatttctgaagaaaattcatcaaaggaagaagtggtaataagttataacaattatgacctgtatgagcctattggtacatttaaaaatgatcngaatctatcttcccat

SEQ ID NO: 2851 - DNA, 184 bp, Oryza sativa
  Clone ID: uC-osflcyp053f04b1
ccggattttacgttcagagggcgcagttataatccgtgggaaggtttttgttcttgtaaaggtgtagaaaatagctaacgccatgaggtggcagacaagattgactgatcatgagggtggccctcatgtgcctgagaagatactctttgcggcttaaacattactgggctgctgaatgctatat

SEQ ID NO: 2852 - DNA, 390 bp, Oryza sativa
  Clone ID: uC-osflcyp053f08b1
tttctttttacactacaactggcttgagctgggggctcctttaagttaacaatgggggtttccttagtgctcaacctgcaatctgcatcgctcgaaaggagctacttattcgaaacggcctctccacccatcacaacaggatgaccacttggcatgttttgctgtccctcgcctctttgtccttgattggaacctgcatccaagatcattagcattcctgacttaacactacaggctcttggtcatgctgacaacaatcaaactgaagccctacataggaactattgcaagaaggattcaagttctggttccgaagtaaagaggacttacgccgcgcttgatttgaaagatatcttctccgaattccaacggcgaacctacaaccacctg

SEQ ID NO: 2853 - DNA, 443 bp, Oryza sativa
  Clone ID: uC-osflcyp053g01b1
tcaccttttccaccaccatggccacagccgcttgcctgggcgccacttttctcctccctcctcgttcccgcccccgccaccaccggcgccgcggcggcgcagtgctgctcctcctcgtccaccgcgctgttccccacccccgtcccgtcgctgcgcgcctactacccgcgcctgctcctcgcgttccgccgccccgccgtcgccgccgtcgcagacccgcagggcgccgtgcttgaggaggagcagggggagcagcaggacgaggggcaggagcagtaccacgacgacgactaccacgaccggtacgagggcggacgccgacccgcgttcacgccccccacccggccgcgcaccgggaaggcccaccttccgctcaagcgcgaccgcacgaggtcgaagcgattcctgcagatacagaagctgagggagagccagaaggagca

SEQ ID NO: 2854 - DNA, 273 bp, Oryza sativa
  Clone ID: uC-osflcyp053g02b1
tttctttctcatctcacatcgactctatagctacctacgcggcatctttgtatagagctagagctagcacacaagagagagggagagaggtgtggtggatggcgcaagatgatgaggacgtgggtctagctctgggcctctccctgggctccggcggccacaggcggcagagagaaagtagagacgaagcgcccgcgtcggcggcggcgtccctgctgacgctgaggcctcccgcagagagcggcgggctgtctcaggtggaggtgaagaggg

SEQ ID NO: 2855 - DNA, 381 bp, Oryza sativa
  Clone ID: uC-osflcyp053g03b1
gcgaagatgactttaggctgcttgtgtacgagctcatgggtcgaggaagtctagaaaaccacttattccgaaggacagctactccactatcctgggctactaggatgtcggttgcattaggggctgccaaagggtcagcttgcctccacaatgctgaaaggccaatcatctacagggatttcaagacatcaaatattctgctggactcagattatactgctaaactctctgactttggcctggcaaaagctggcccagaaggcgatcaaacccatgtatcaacacgggtgatgggaacatatggttatgctgcccctgaatacgtgatgactggtcacttgactgctagaagtgatgtctactgcttcggtgctgtccttc

SEQ ID NO: 2856 - DNA, 334 bp, Oryza sativa
  Clone ID: uC-osflcyp053g04b1
acgatcagattccgagggcttggggctctcctacgatcccccggctcctccatacggtatatctctcggcggcatctcgaaatcctcatccgtttctgttgttgtttccgcggcgagtttgaggggtgtgtgttcttggagaggaagaaccgctcgccggtttgattcagggtacaggaacttgctacagagtgattggtgggtggataagaagccatgctacctgctttgaagctctctcctggtccctgaggccttctctggcaccattctacggtccagatccagcttcggtttcatcttgtcttatgcctcatacccttcccaaattttg

SEQ ID NO: 2857 - DNA, 130 bp, Oryza sativa
  Clone ID: uC-osflcyp053g08b1
tgtttttttccccgagagagattcgttccaaccaagcccggccgctttcagcgacttcttcttggtgagcaaatcatttgagagtttagtaacgcgaggaagcgaatacgaggatgactgtgtagttgcc

SEQ ID NO: 2858 - DNA, 451 bp, Oryza sativa
  Clone ID: uC-osflcyp053g09b1
tcacgtctgacaatttgggttggctgttccaatgtaaggggtattattttagattattaattaatttctaatcgccggccgatttgatttcctggcaatttttgttgtttttcacatgctggttgagatcacgacacggccgccatcgtcgcctactcggccactcgggtgcctcttgccgtgtccgagtgctcctctcttcccttacatgcagatggacgtgctgctagataggcacaggacacaggaatatactcggccaccaggagcaagcacttgtatacgtcgatttaatctacatgtacatagcagcatggaaccagcgtgcaacaggaccatgcaggccatggagggagtaaacacattaaattacaaacctgctcccataataactgctgcacttttatgcataaatttttggatgctaaaatgatcgtatgccaaatattta

SEQ ID NO: 2859 - DNA, 461 bp, Oryza sativa
  Clone ID: uC-osflcyp053h01b1
gttagcacagcatattacaaaaggaaatgaagatgggttgtttattagttcagtggcttcttgttcaaatctgtgggctttaataatggatgctggcactggatttacttctcaagtatatgagctttctcaacattttcttcacaaggaatggataatggatcagtcggagagaaacttctatatcacttcattagcaggtgcaaacaatggcagttctctggtggtcatgtcaagagggacgcaatatgcccaacaatcctacaaagtaagcgactcatttcccttcaagtggataaacaagaagtggaaggagggtttctatgtcactgctatggccactgcaggaagccggtgggcagtggtcatgtcccggaatgctggctttacagatcaggttgtggagcttgacttcctgtatccaagtgagggaatacatcggcgttgggacaatgggtttc

SEQ ID NO: 2860 - DNA, 294 bp, Oryza sativa
  Clone ID: uC-osflcyp053h03b1
ttattttttatgtacgaaagcaccgccctttggcagatgatgaattttccaggcttagtagcgaccattctgcgcagactgatgcactctttgatattccacatcttcgccttggaggcccgtcaccgctcagtcttttccgtgcattcaatgatcctctcactgataaacgcacgcattggtttggaccttattaccgactcgatgatgaatctgaaaggaaatgccttctttaaataaactcctttaaactttcttgcgctatcatttatcacatcattgtctatatttgac

SEQ ID NO: 2861 - DNA, 238 bp, Oryza sativa
  Clone ID: uC-osflcyp053h04b1
gcggattttatgttgagcctgccgctgtcacacaggctgggaggattcggtccgacgaacttggtgaaatgaacctcaagatgcaataaatccggcgacttttgcctaagttcgggtggtagtacgccggtgagactattatggaataggcgtatcggcttcaatgccggacaccgaccgcatctcgccggtgtgctacctgagaagttggtagagtgctcagctatgatcgtactct

SEQ ID NO: 2862 - DNA, 398 bp, Oryza sativa
  Clone ID: uC-osflcyp053h07b1
atttatttagcaccagaaatatggcttcttccaagatgaggctgctttcagtcctgctgcgcctcgccgcggcctcgccggcggcgctgggcgccttcgacgtgaaccagatgctcgccgacaagtcccagtacgggtcgttcctgaagttgctgacgcagacgaaggtcgcggaggagacgaaccggctcaagtcggcgtcgctgctggtcctccaagacaaggccatgaagccgatcacgtcgctccccgccgacaagcagcggatggccatggccaaccacgtcctcctcaagtacttcgaccccatccagctgggcgagatgaaggaccgcaccgccatgctccccacgctggctgtccaacaccgacagaagctcggcgtcgcaactacacca

SEQ ID NO: 2863 - DNA, 223 bp, Oryza sativa
  Clone ID: uC-osflcyp053h09b1
cttccagcctttcttcataggaatggaagctgcgggtatgcatgagactacattcaactccatcatgaagtgcgacgcggatattaggaaggatctatatggcaacatcgttctcagtggtggcaccactatgttccctggcattgctgacaggatgagcaaggagatcactgccttggctcctagcagcatgaagatcaaggtggtctctcctcctgaaagg

SEQ ID NO: 2864 - DNA, 444 bp, Oryza sativa
  Clone ID: uC-osflcyp053h10b1
tttccattttgatcttggcaagcgttgcgccaaggactgggatgcctgtgcccgcttcgccaagtggcgtgccgacctcaagattggccccaacgagccatcgtagctttccattgacctgaatgctcagggtcttgctcgctatgccatcatctgccaggagaacgggctggtgccgattgtcgagcctgagatccttgtcgatggctctcatgacattgagcgctgtgcctatatcaccgagaaggttctcgctgcctgctacatggccctcaacgaacaccaatgtcctcctggagggctccctcctgaagcccaacatggccaccccaggatctatatccaagatggtttcccctcagctcatcgccgagaacaccgtccgccccctccagaggactgtccctgctgccgggcctgccattgccttcctttctggtggac

SEQ ID NO: 2865 - DNA, 493 bp, Oryza sativa
  Clone ID: uC-osflcyp054a01b1
gtctaaaagttgaagcttcttttatgtctgaacaagagttgctttacttgggatcagttggattgcttggagaatattctcggacaacgagaaaaaggcacaagctctcgcttggaaggccctgctgcgcactggtttctgctgattcatttcaaggatacaagactactgttccttttggctcttggtgcttctgatattatctcagcgaaagaaaattaatccaagatggctctgcaaaacattggtgcttcaaaccgtgatgatgccttctacaggtataagatgcccaggatgatcaccaaaatagaaggccgtggcaatggcatcaagactaacattgtgaacatggtggatatagcaaaagccctagccaggcctgcttcctacacaacaaagtactttggatgtgagcttggtgcacagtctaaatttgatgagaagactggtatttccttgggtaatggggcacatgatactgctaagctggctg

SEQ ID NO: 2866 - DNA, 493 bp, Oryza sativa
  Clone ID: uC-osflcyp054a02b1
gtggtggcgtttggcattgtcagcgtgctcggagaggggtgggttttttgatcggggggtagaagacctgaattctcggatcactctgacggggctccatgccaagggatcagatacctccttcgcgagggccagatcaacccaccacaaggagacctctggagggtatggatcaatgcccgacaacgtgatcctctgcggacagacggatcaaccattccagaggagacatttgcagtagcccgatcaaccgccgataagacctatgcagcggccggatcagctcctactgtcgtcgacactgcgcctgcgcctcccgtgacaacttatgattaattacaaacattcggtatttcatattttggaggatgctaacattaaataacgtgttcaaaatgttaggacaccaacgaaaatacttacaaaattttgactaatcaacgtttctaaggagtttaacaaattgttattcgtgtaacttttttttacatat

SEQ ID NO: 2867 - DNA, 315 bp, Oryza sativa
  Clone ID: uC-osflcyp054a03b1
acgcgaccttgcgctggctctccgccttctacgaggaggtgcgcggggtttatcggaatcgctctgggaactacccatcctttcaggtcgcctggatgggactacgggcgacgaccagatacctgcttcgacatcatgccagcgcaaccccgcggaaggacacctgtgcgtcggctggatcaaccggggcgaccgggacctgtaggggggcaggcgcaacctcctgcacggatacatctccaactaccacggcatcctcacatgagagctaggcaggggcccggtcaagttctagaagactcgaccctacggctg

SEQ ID NO: 2868 - DNA, 387 bp, Oryza sativa
  unsure (1)..(387): unsure at all n locations
  Clone ID: uC-osflcyp054a06b1
gtcttgcttctcccgctgctcgcctcgcctcctcggggatctgagatcatcgagatcgattgagtggagctaggcggcggctagggcgagatggcgctcgtattgcatgctggcagcggaaacangaatgcattcaaggcactcattgctgccgagtactctggcgtcaaggttgagttggtgaagaactttcagatgggtgtctccaacaagacacctgagttgctcaagatgaatcctattgggaagagtcctggtctagagactcctgatggtcctgtgtttgagagcaatgcgattgcacgatatgttacccgctcgagggctgacaacccactctatgggtcttcactgattgaatatgcccacatcgagcagtggaatgac

SEQ ID NO: 2869 - DNA, 427 bp, Oryza sativa
  Clone ID: uC-osflcyp054a07b1
ggcgttttctcatctgaattgcaggccaatgggaggggtgtttttgcacagaccgcagatatggcttccggcaggatagctctgctctgccttcttggcttgctgctggtagcagccctcaccggctgccattgctgccaaagatgacaaaatcttctaccagattactttcatgtggccgggagcgtactgcgcgcagaccaaggccggatgctgcatgccgaagaccgacgtcgcgccggcgtccgacttctacgtcgccggcttcacggtctacaacgccaccaccaactcttccctgtccagctgcagcaacactccattcgacatgaaccaaattggggatgtcacgaggctgatgcagtactggaacaacatcaggtgccccagcaagagcggccagcagggctggaagaacgcgtgggag

SEQ ID NO: 2870 - DNA, 405 bp, Oryza sativa
  Clone ID: uC-osflcyp054a09b1
caccgtctcaacccggacgcagcagccgcagcggaagagggaagcgaagcaagcgaagctcgaggggagatggcgcgcggcgtggcggcggcggcggggggcatgggcggcgccgggcagaagaagggctccgtcaccttcggcatcgactgcgccaagcccgtcgacgacaagatcatggagatcgcgtcgctcgagaagttcctgcaggagcgcatcaaggtcgccggaggcaaggccggcaacctcggcgagtccgtcaccgtctcccgcgacaagaccaaggtcaccgtcacctccgacgggcccttctccaagaggcgcctgaagtacttgaccaagaaggacctgacgaagcacaatgtgcgtgactggctacgggtgattgcatccaacagggaccgc

SEQ ID NO: 2871 - DNA, 564 bp, Oryza sativa
  unsure (1)..(564): unsure at all n locations
  Clone ID: uC-osflcyp054a10b1
tgaaaatattaacaaggagacggaagatcacaggctggctcttcctgtgcatcctacacaggatgaaaacacaactgagcagggatttggtttggaagatacagaaaaagagtccatgtcaccagagaaggcactgcctgctgaaccagaggagcaagaagagaatcaagtaaccaaagaacaagatgaagaagacaggcatgatgcagaacttggtgatgcacatgaagaagatcacaaagaagctgaacaagattatttgcctgtctctagtttcctgatgaacctaatattgggaaaagacaatgatgatccaaagaaagattcagaaaccgaggttgaaaaggagcaagaagaaacaacgaagggngaaagttgtttgatcgcttctcaacaagaagaaaatttggtggcatttcctatagaaaaatcggtggatgaaaaactcacctttgaacaagaaaaagaaaaggtagaaggctttgaagaaacacatgaaccagggaaagaacagagttatgatgtccagatggacgtccaaaaatcattggaaactgatgaaga

SEQ ID NO: 2872 - DNA, 303 bp, Oryza sativa
  Clone ID: uC-osflcyp054a11b1
ttgagttccttctcggccggtgatcacctcggggggggttattacactctgtggggcacgctcatgatgatcggtaccttcgtcagagtgggacacgttgaccggtgccggcggttgtttgcaagctgtacataaccgaactcgacgagcactatggatcagcgacgaacctggtgtagagacccgcttgctttgtaatctaatcaggatctaatgtcttcttaccgatggccattgatgctgggagggtatgactattgattgcttttggtttcttacgtctagatcgttattctagagggg

SEQ ID NO: 2873 - DNA, 434 bp, Oryza sativa
  Clone ID: uC-osflcyp054a12b1
gtggcctgcttggtggttgtggccatgtcaggggcagtcatcctttgttaccggcacaggaagactagtactgtggtacctttttctccaacagcaagtgggcaattacatactgctactttgggaggaataactaaattcaaacgctcagagcttgaaacagcctgtgaaggtttcagcaacataattgacacactacctagattcacattgtataaaggaactctcccgtgtggagcagaaatagctgctgtgtctacattggtgacttacgcaagtgggtggacaactgtagctgaagcacaattcaaggataagggtgaagtcttatcaaaagtgagccataagaatttaatgaaccttgtgggttactgtgaagatgaagaaccattcacttggatgatggtgtttgagtatgtttcaaatggaacact

SEQ ID NO: 2874 - DNA, 313 bp, Oryza sativa
  Clone ID: uC-osflcyp054b01b1
cccgtgtccagccaccaccaccgcgtcgtcgtcgtggaccgggccatccatcccacccacacgtgaccacccgcgcatcctccccccgtgctgcggcggcggcggcggccggcggccatggacatggacagcgtggagtgcctctccctcccggactcgtccatggacgtggacgacgtcgacggcggcggctcggtgcaccaccaccaccaccaccaccacgccctcccgcctcacctccccgcgggggtcgccgtcggggtcggccccggggggcgcgcgttccccaaggcgaatgtcgctggggggcggg

SEQ ID NO: 2875 - DNA, 391 bp, Oryza sativa
  Clone ID: uC-osflcyp054b03b1
atcgtcgccctccgctgacgcgtgggacacactacaccccgggccactctcaggcaggcaatcagcggctaggcaccagcccaccggccggcaatggcgttcacctactgcttcctgcaccagtccacggcccgcgtcgccgcgcgcgtcgcctccccgtccccggcgacacggacccacctcctcgtctgccgcgcccagaagcaggacgacgccgacgtctcccgccgcgcggtgctcgcgctgctggccggagcgacggcggcggtggggttgaaggtggcgcccgtcgtcgaggtctacggagaggcggggaacgtgaccggggagcccaagacgaacacggagtttatcgcctacagaggagaggggttcaagctgtttggtcccg

SEQ ID NO: 2876 - DNA, 457 bp, Oryza sativa
  Clone ID: uC-osflcyp054b04b1
agcatccttagctagtggcgcctgaaaattattaagcgctggaagatggcaaagcatggcgttgcttccgttttaacactggcattggtccttggagttgcggccattcctacagtggtgcaatctatcggcgtgtgctacggcgtgatcgggaacaacctgccgtcgccgagcgacgtcgtgcagctctacaagtccaacggcatcgactccatgcgcatctacttcccaagaagcgacatcctccaggccctcagcggctcaagcatcgccctcaccatggacgtcggcaacgatcagctcggctccctcgcctccgaccccttcgccgtcgtcgtcttcgtgcagaacaacatgcaggcgttcccgggcgtcaacttgcgctacatcaccgtcggcaacgaggtttccggcggcgacacgcagaacatcctcccggccatgcagaacatgaaca

SEQ ID NO: 2877 - DNA, 298 bp, Oryza sativa
  Clone ID: uC-osflcyp054b06b1
cagatgtgggttggctgctccaccccctgccggttaggctggggtcggttcaaatccggatcgatttcagaatattccttctggtcagcggttggcgggagaggatggtggcaacatcttcatctctgcccatcattactggtggggagggtctgtgaaaatcaagtctgaaatcgggtaatctataaggggaggcaatgcctaaagtggcgccggttatcaatctgtagggcgaagacacaccctgcgtaacgggatacaacacacatgtcactttttgcaaagcaagaaggaggat

SEQ ID NO: 2878 - DNA, 171 bp, Oryza sativa
  Clone ID: uC-osflcyp054b08b1
tcggttgccggagtaggcggtggggtcacggtgaggggcgcgctggggcccgacgacggccggatctccgcggtggagtgggtcccgctcgtcggggaggacgccgaggaggctggtggggagggagtggacgtccccgggggcacccacctcggctggcttctgctgtac

SEQ ID NO: 2879 - DNA, 540 bp, Oryza sativa
  Clone ID: uC-osflcyp054b09b1
gtctatcctgagcgagtatatgtcaagagacaggaagggggcatagacttaggatggggatctttgcatctatattgcagatgcacaacgtacactatagagaggaatgtacagcgtctgcgctggctgagcatggcagactggctatgtagaagtagacagctacatgggctaagcagtcaaggtttaaagcagcaaaggacttggttatcaatctcctctccattttctgaagcatgcttttctaggcctgcacacagttttataaatgctgcaaagcgagattcagtggacaatctttctggtactctagatgcaattgcctggggcaaagaaccttgtgcagggtcgtcaggtcctttcaagattctatattctgggaagtcacatgagacaaaacaaaatgagcacatatatgactttctacataaccctgaagttcaggctcttgaaacgaatgtaatggatacctacagaaaaaggacttgaaaaacttccagcggagatcagcactcaattctgaggcaatgctaccatcaa

SEQ ID NO: 2880 - DNA, 443 bp, Oryza sativa
  Clone ID: uC-osflcyp054b11b1
cttcctctgaagtttcagtctttgtttctgaatctcttcagtgttcagaggggaagttctgccaaaaaatttctctggccatccattttccaaggggagattctgccaaaattttcatctctgtccatcaatattcctggggaggttctgccaaaattttctctgaaatcggttaatttataaggggaggttctgccgaaattttcgctggtcatcaatcttccctttgttgacataccctgcataagtatatacaacaaacatataactttttgcaaggtaagaaggagtttttatctgttcttgatgatagactcctgcagaagttgtcctagttgtgtagatgtctgttgctcatcatccctgagcacctcctctctagatttatgactggcccagccataacccagcttgttcagtccttctctgttgtcttcctctac

SEQ ID NO: 2881 - DNA, 527 bp, Oryza sativa
  unsure (1)..(527): unsure at all n locations
  Clone ID: uC-osflcyp054c02b1
ccaatatcgcagagaaaaaaaaatctcccctcgaagggaagggttgaattgccttctgaggaggcagatctttgtgaagaccctcaccggcaagaccatcaccctcgaggctgagtcctcggacaccattgacaatgtcaaggccaagatccaggacaaggagggcatccccccggaccagcagcgtatcatctttgctggcaagcagcttgaggatggccgtaccctggccgactacaacatccagaaggagtccaccctccaccttgtgctcaggctcaggggaggcatgcatatcttcgtcaagaccttgactggcaagaccatcacccttgaggtcgagtcgtctgacaccattgacaatgtcaaggccaagatccaggacaaggagggcatccccccggaccagcagcgtctcatcttcgctggcaagcagcttgaggatggccgcaccctggccgactacaacattcagaaggagtctaccctncaccttgtgctcaggctcaagggaggcatgcagatct

SEQ ID NO: 2882 - DNA, 245 bp, Oryza sativa
  Clone ID: uC-osflcyp054c04b1
gttttctcggcgtttgcacggccctcccctcgtcgggtcgggtgatgactgaacgccaccaccacccaccctgcactgccccttctttattcccccgcacatgccattgccatcgccattgccaacctcaccctgctcctctccatctcctccctctccattgtcaactcgcctcggttccttcatgtcgccggcgacgacggctgagtagaggtaacagcggcggccgcggcgatggaggggag

SEQ ID NO: 2883 - DNA, 465 bp, Oryza sativa
  Clone ID: uC-osflcyp054c06b1
gcctaactcgatgatgtcaaatcatacaactctgaaggagtgtgctctggaagaaccttctaatctcacatttaaacaaccacctactgtgcgctctttttctacgatattgccatgctgcatcaggttcatcataacttatgttccatttcttttttcttcaaggctttttatagtttctgtctgattttctacgattgctctggtcgaacctattcgtttggtaatgatgtgattacgtctgtctaaatagctgggatatttatatccatggaatacaaaatattgacaatgatttctagtgttgccaattcttattgatttttggtgggccaattgggtcctatgatctcttttgtgcagttaatcattttttaccttcaaaatttgacattttttcagcttgttcctggatttctgatttcattaactggacttatattgaaacggaattaattacgaacc

SEQ ID NO: 2884 - DNA, 420 bp, Oryza sativa
  Clone ID: uC-osflcyp054c07b1
ttgcgttttggcgcattccctactctctactgggtggggggtctgtatgtttctcaccgcactaaggaaggaaagaaggaaggaagaggaaaaaaaaggatcatcacccatgtcgaattcggggtcaggaatggccatgtgagacgaatgcaaactcaaggtactggaactcaaggggaaaaggagcttccgattcatcgggttcaagatcaatgagaaggtccaccaggcggtggtggacaggttggggcaatcgggtgagagctatgacgacttcactgtctgcttaccagcagatgagtgccgctacgccggcattagaccctgactttgccactgaggaaaactggcagaagagcaagatattcttcatctcctgggctcctgatccatcaagggtgaggagcaagatgctgtatg

SEQ ID NO: 2885 - DNA, 457 bp, Oryza sativa
  unsure (1)..(457): unsure at all n locations
  Clone ID: uC-osflcyp054c08b1
ggcgctggggctgggcaactgggtgcaggcgcaggagtgggcggcggagcccggcggccaggccacgtacctcggcaacccggtgccatggggcacgctgccgacgatcctggtcatcgagttcgtcgccatcgccttcgccgagcaccagcgcaccatggagaaggaccccgagaagaagaagtaccccggcggcgccttcgaccccctcggcttctccaaggaccccgtcaagttcgaggagtacaagctcaaggagatcaagaacgggcgattggccatgctggcttttgtgggtttctgcgtccaacagtcggcgtacccgggcaccggcccactggagaacctggccagccacctctcggacccgtggcacaacaacatcggcgacatcatcatccngagaaccatctacccttgagcttggcacgaaccggtgcgtgcgtcgggcgtacgt

SEQ ID NO: 2886 - DNA, 251 bp, Oryza sativa
  unsure (1)..(251): unsure at all n locations
  Clone ID: uC-osflcyp054c09b1
gaataaaaaaaaaagagaaggcgactcgaaaagcaggaaggaataaaaaaaaactccgttctctcctggaagaacaggttggggaaggagaggagaggagaggagagganactttctcccttgctcgtctctcttcttctgtcaccctctagccatcctctccgcctactccatcgtcttcgtcgtgccggacctcggcttccttatcttccccgcggggctcccgctcctggtgcccgccccctgtgcct

SEQ ID NO: 2887 - DNA, 439 bp, Oryza sativa
  Clone ID: uC-osflcyp054c10b1
ctcgccctcgtcggcttcgccgagcaccggggggtggaggactggtacacgccgggctccatggggaagcagtacttcctcggccttgagaagtacctcgccggctccggcgagccgggctaccctcgcggaccgctcttcaacccgctcggcttcgggaccaagagcgaggcggagatgaaggagctcaagctcacggagatcaagaatggcaggctcgccatgctcgccttcgtcggcttgtacgtccaggcgctcttcaccggggttggccccgtgcagaacctgcttgatcacctcgctgatcccgtacacaacaacatactcaccagcctaaagtgccattagagatgccatcaactacgtattcaattaattacgagtggttaattatgtatgtatggacgtgcgtgtgcctatctgtgtgctcgtatgtatg

SEQ ID NO: 2888 - DNA, 304 bp, Oryza sativa
  Clone ID: uC-osflcyp054c11b1
gcgctatgctcctgtttccagaaaatctaagggcttgaactaatcaagaagacggtgaaagcattggagcacgtgatcgtgaggcgagcttgggatgagttagattagtattatactggcataccaccgccacaattttatgtaaccattcaagaatagatatttatgtaggttcatttcgacgaattagctattttattatttgtgaagctggatcttggaaaatttgctcatctgttgctacaaaagcatatatggaaaatttgctcatctgcttcctcctgacaaggaataacaaaagttg

SEQ ID NO: 2889 - DNA, 364 bp, Oryza sativa
  Clone ID: uC-osflcyp054d03b1
ctcctcccgtttcctccgtctccggcgccggcgccggcgagggcgccctttgcgattcgtgccctccgatcagaggcgaggcgggagaagagatggggctcacgttcaccaagctgttcagccggctcttcgccaagaaggagatgcggatcctgatggtgggtcttgacgcggccggaatgaccacaatcctctacaagttcaagcttggcgagcatgttaccaccttacccaccattggatttaatgttgaaaccgtggcgtccaagaacatcagcttcaccgtgtgggatggggggggacaggctctgatcaggatttcttctactactatttcttaagacggtagaacaatgtgaagctt

SEQ ID NO: 2890 - DNA, 422 bp, Oryza sativa
  Clone ID: uC-osflcyp054d04b1
ataggcccatgcggttgtggaaatggttagatcatgggcacattatgtaaattaactttattatttatttttgatagtgaaattaactggtaaaataagcatgttaaactgttttttctagcaatgtattgaaataatatctctttgcattcataaaaaaaaaaaaaaaaaaaaaaaaaaaaaaaaaaaaaaaaaaaaaaaaaaaaaaaaaaaaaaaaaaaaaaaaaaaaaaaaaaaaaaaaaaaaaaaaaaaaaaaaaaaaaaaaaataaataaaaaaaaaggggggggccgttttaggggaccaaatttttctccggggggcttggaagtatttactttttttttgggggccctaaatttaaattcggggggggggttttaacacccgggggcggggaaaaacctggggttccccaaatt

SEQ ID NO: 2891 - DNA, 369 bp, Oryza sativa
  Clone ID: uC-osflcyp054d05b1
ggattatgacgacagattagattaaccgatctacaggctttgagccagtctcagttgactctggagtctggactgcagatatctctggctttacccaagacaagaacctgttgtttgtttctgtgtttcttctgcacccactgctggagcagttgaaaatactgtgcccaaaaatccaaaataatcctttttttgcattttgtgaaaataatatgcatatactcaaaacatccctttctgttatgctggtggtgcccattaaaatttgtatcggggatacttcgctaacagtagtcaaggatctctctgtttgcaatctaaagccacttctgttatcatcagaaagaagctatatactacaatttcccc

SEQ ID NO: 2892 - DNA, 112 bp, Oryza sativa
  Clone ID: uC-osflcyp054d06b1
ctcgtatcctaagccccggaggctgctgctccctaggtaggggttgaatttgatattcctgtcccggcacggtggcggatgctcccctccccgtcctggtggcatctggtac

SEQ ID NO: 2893 - DNA, 450 bp, Oryza sativa
  Clone ID: uC-osflcyp054d07b1
aaaatcttctcttcccgtacgtgagaagcgccaggtcgtcgtcgccgccatgggcgtggaggtgtgcgtcaaggccgccgtcggccacccggacacgctcggcgactgtccattcttgcagagggtgctgctgactctggaggagaagaaggtgccctacgagatgaagctcatcgacgtccagaacaagcccgactggtttctgaagatcagcccagaggggaaggtgcctgtgtttaacggtggtgatggcaaatggattcctgattctgatgtgatcactcaagtcattgaggagaagtacccaaccccgtctcttgtcacccctcctgagtatgcatcagtgggatcaaaaattttctcatgcttcacaacgttcttgaagagcatggatccatatgatggttcagagaaggcacttcttactgaactgcaggcactcgaggagca

SEQ ID NO: 2894 - DNA, 446 bp, Oryza sativa
  Clone ID: uC-osflcyp054d09b1
aggacaccttccgccatgtggtgctcgtcgccgctgccttcgtgctcgcattgctcttcaacgagcggttcaccttccgcgagatctgctgggcattttcgatttacttggaggcagtggcaattctccctcagttagttttgctgcagagaagtagaaatgtggacaacttgactggacaatatgtattcttcctaggggcctaccgtgcattttacatcctaaactggatttaccgttacttcactgagggtcaccacagcagatggatcccttggattgctggtttggtccaaacagctctttatgcggatttcttctactactatttcttaagttggaagaacaatgtgaagcttgagttgcctgcttgatagttcttcgccacgccagaaaatgtgcacatcacatgagaattatcgagattagttgatgctggcagagac

SEQ ID NO: 2895 - DNA, 478 bp, Oryza sativa
  Clone ID: uC-osflcyp054d10b1
ctcttctcttctctggtggtgtgggtgagagggggtattccaaatccttcctgcgctccttaaccctcctctcttaccccctctcacaagagagagagcgccagactctccccaggtgaggattcagccatgaagggggccaaatccaagggcgccgccaagcccgacgccaagatggctgtgaagagtaagggcgcggagaagcccgccgccaagggcaggaaggggaaggccggcaaggaccccaacaagcccaagagggctccctccgctttattcggttttatggaggagttgcgctaggagttcaaggagaagaaccccaagaataaatctgtcgctgcatgcggaaaagcacccggtgatcggtggaaatccctgaccgaagcggacaaggctgcctctgtagcccaggccaacacgctcaaggccgtgtacaacatggccattgctgccctacaaccagggcgagagcact

SEQ ID NO: 2896 - DNA, 391 bp, Oryza sativa
  Clone ID: uC-osflcyp054d11b1
tataataagaaaagagaaaagaagagagaaggagaaacatgtcattccgagttgtgagtgactgcggtgcatatttttttcgccagcaaggccgagttcttcgctgaacccccaaaatctgacaacccacctgccctccggctgtaccatctacccaccggcgggcggcggcggcgacatggagggtggcggcgaggagttcgcgatcggggtgctgatctccgtgaagaccaccctcggctaggagttcgaaggccagatcgttttcttcgaccgtccgaccaacctactagtcattgatatccttgccaaatacctacccatccggttgttccccccccccccatctcagtgctctgccactttcgctcccaaagttgatcgtgctttt

SEQ ID NO: 2897 - DNA, 454 bp, Oryza sativa
  unsure (1)..(454): unsure at all n locations
  Clone ID: uC-osflcyp054d12b1
tggcggggagagcagtggcgaagcacatccagcttgggatggaggtggacgtgcgcctctcctcccgcggtggcgagctcagccgaggtcccaagatttgcaggtgcgagatcactctctttaccaagcgccacggcgtcatccgcgccgaggaggacgccgagtccacctacgccagcatcgacctcgcctcctccatcatcaagaggaagctcaggaagatcaaggagaaggagaccgacgtccgccacctcaaggggaccaagccccccgtctccgactggccgccatcattgctcgacaacaacgacgacgacgcccaggcccagctcaaggatctggaggaggccgtcggcgccgaggacgaggacacggtgctcacaagngtggtgcgcacaaggtgttcgagatgccgcccctgtccgtggaggaggcgatggagcagctagtgaat

SEQ ID NO: 2898 - DNA, 406 bp, Oryza sativa
  Clone ID: uC-osflcyp054e01b1
aaagatatcatgcaagcaagaagagacgagactagggggagggggagattagggggccggccgcgttcatcatcgtgttcctccccccctctctctcctctcctctcctctcgaactccatccttccttccatccattcctccccgcacccttcgcattgctctcgtcgtctcgattcggtcgaggatctccaggaaaagaggaggaagcgatatgggttgcttttcatgctgcggagcggatgatgtccgcaagaagaagaagcgcgacgatccttacgtcccgatccctgatccaggtgggaactatggacgtagcaagcccgggcccccaaccccttcgcgttctccccccaccagcagaaatctgccaattgcagtaccggcaattccccttgatgaaataa

SEQ ID NO: 2899 - DNA, 541 bp, Oryza sativa
  Clone ID: uC-osflcyp054e03b1
catggtctccacgctcgcctggagctccgccgcctggtgcggcgtcccttactcccgcctgccgccgcgccgctccccgtcgctggtcgtcgtcgcccagggcaaggtcaagaagtatcgccaggtcatactgacagatgacatagcagaggtggggaagaaaggggacacgcttaaagtgagggccgggttctaccgcaacttccttctgccaaagggcaaggcaacgctgctcaccccagaagtactcaaggaaatgcaagtagaacaggagaggatagatgctgaaaagaagcgggtaaaagaagaggcacagcaacttgcccgtgtttttgaaactattggggcattcaaagtgccacgtaaaggtgggaaaggaaaacagatatttgggagcgtcacagcacaagatcttgttgacatcataaagtcacaacttaaaggggatgtcgacaagcgtctcgtgacagtgccagaaattcgtgaattggggaatacattgcagagattaagctttaccctgaagtcacagctcaagtaa

SEQ ID NO: 2900 - DNA, 511 bp, Oryza sativa
  unsure (1)..(511): unsure at all n locations
  Clone ID: uC-osflcyp054e05b1
cgatcatcgatcatcagattggtggctggctggctgggccttatcagtttggaaccggatgctggttgaggagcagagttggaggatcatccctctggttccaggattcgttcctgttggcgttggtggagggcccagcacaccataaatataatgggcatcttctgctgcttccagtccgaggacagaggaggcgacggggacggcgatggcgacggagcgcctccctcgacctgctctagcggctgcagcaacagcagcagcagcagcaagacgaagaatttagcgtctgagcggagcctgggcgggagcagcagggacaacaacagcaacctggtgaacctggtgaacgagatcgtggcagagtcagtgacttaccggcacaagcgcgtggcggacgagatcctgaagatcggcaaggngaaggtgacggcgcgggcgttcacgtacggcgagctgtcgaaggctacgggcgggttcagggcggagtctctgctggtggaggggggtt

SEQ ID NO: 2901 - DNA, 545 bp, Oryza sativa
  unsure (1)..(545): unsure at all n locations
  Clone ID: uC-osflcyp054e06b1
aattaattaatcatcactcgcgttttaaccatggccccctgcaagctctccatagcgtcgttcttcctcgccacggctcttctcctgctggctttcgccagcggccagaccaccaatgccccacccccaccaccgcctccgaacacgcagtgccccggaggagtcatatcagatctcgcgaactacacgaggtgcatcactgcgatattgttcggacgccccaatcccgagcagttctgctgcccggcgatctcggagctccccaacaacgtcgccgccagatgcgtgtgcgccgctctcagggccaccggactatcaatcggtataaccgcgagcaataatgtcacaggtagcatcctcaagatctgcaacaaagctcccctggacctcttgactgtcaactgcagcagagcctagctgatcgcgatctggctctagctaataaagcatgcatgcactacgcgcgtactctacccttaaatcgtaattatatattgggctgcttgcgtaattacttatatnatgtactcgtatggacttaattt

SEQ ID NO: 2902 - DNA, 465 bp, Oryza sativa
  Clone ID: uC-osflcyp054e07b1
ctccctaatctcccgaggctctcgtaccaggggaggggcctctttggaactgaagatgcggatcttcgtgaatacattgaccggagagactatcaccctcgaggaggagccctctgacaccactcataatggcaaggctaagatccaagataaggagggcattcctccggaccagcagcgtctcatcttcgctggcaagcagctggaggatggcaggacccttgctgactacaacatccagaaggaggcgacccttcaccttgtgctccgcctccgtggtggcatgcagatctttgtcaagactctgaccggcaagactatcacccttgaggtggaggcttctgacaccatcgacaacgtcaaggccaagatccaggacaaagagggcattcccccagaccagcagcgtcttatcttcgccggcaagcagctggaggatggcaggacccttgctgactacaacat

SEQ ID NO: 2903 - DNA, 238 bp, Oryza sativa
  unsure (1)..(238): unsure at all n locations
  Clone ID: uC-osflcyp054e08b1
ctcctctccctctccgcccatttctcctctgcacctgggatccatccgcgcccgcgaggaggagggagccggacgccgccgcggggagagcaggggagagaaggagaggagganaatcccctattccagacagaggacattacatctggcggggaagaaagggttcactctgtaagtgaggggcgggttctatccgaaatttcttttgacaaagggtaaggcaacgctgctcacccca

SEQ ID NO: 2904 - DNA, 480 bp, Oryza sativa
  Clone ID: uC-osflcyp054e10b1
ggctttctctcccttcccacgccgtctcgccggaagggctcgctcggtcgcctcctcttccgccgcgagacacgaagagcagcagctcacaggtaggcctgcgcgtcggcggccatgggagacagccagtactccttctccctcaccaccttcagcccgtcggggaagctggtgcagatcgagcacgcgctcaccgcggtcggatccggccagacgtccctcgggatcaaagctgctaatggtgtagttatcgccactgagaagaaattgccttctattttagtcgatgaaacatctgtgcaaaagattcagtcattgactccgcacattggagttgtctacagtgggatgggtcccgatttccgtgttcttgtgagaaaaagtcggcaacaagcacagcagtattatcggttgtacaaggaaactatccctgttactcagcttgtccgagaaactgctgctgttatgcaggagttcaca

SEQ ID NO: 2905 - DNA, 327 bp, Oryza sativa
  Clone ID: uC-osflcyp054f02b1
cacattcaacttaggcctggtatcagatcagattggggggggggtgatttaatggcccaggcggtgtaagttatactgctaatggattttcagaagcaaggcctttgaatccttctgggcctaggtcagggatgccaccaatgccacctagccagaaccaattctcagcacgtggacggatgggtgttagatcaagatacgacaacacatttaacaagggtggcgcaagtgccactggaccggcatataataaaccagccaccccatccatgaatccactgtctggtgccactttctttgtgccaacttcagctactgttgcgttag

SEQ ID NO: 2906 - DNA, 551 bp, Oryza sativa
  unsure (1)..(551): unsure at all n locations
  Clone ID: uC-osflcyp054f03b1
gatcttgcttgccttggttactgcatgggttcgccgaggccgatggtttgatgaagagggaagagcagtatatgcagcagaggctgatagaatccgtaattgggctgaaagtcgagcacgcttctctttcacagatgccatggagatgtacacagaaaacacatgggtttctgtgttctcgctctctgtcgtctgcgcattcataattctttccagctcaggtggacctcttccaggcacatgatcccaggagttgccaaactagatggctacacacaccatttttcttcagtacggggattctattatgtactgatatatgacacacgaaacttatgaagggngggaaattgaacccagaaagcttactgcgtacatacgcccaacggtgagaagcatcagctgccactcaccatttaaggtcaagctaaccatgtgctcagtaaaaatgggtaaatagcatttgctgtgtgggcattccactgtttgtaagctgacttgtaaaacgtgtatctgagctaaactgagcacgaacagattcgatgggacat

SEQ ID NO: 2907 - DNA, 429 bp, Oryza sativa
  Clone ID: uC-osflcyp054f04b1
ctcgtttgcgccattccccaaaggctgcttctacaccaccgggggagggctgcagagcttcgagcacccgctgaacgagctgaagcctgtgccgcgggtcgacagccagggccagatgtgcggctccaactacaaggtcgacagcgaggccaagaaggactccgggatccctcgggtcggcagcgccgcagactggtccaaccatttctgaggcaaagataccattgagatggcttacattttaccatttcggcatttccagttgtggactctgccctgtatgtctgatgctgaagtactcaagaaccactcctgagacgacgcgctaggttttactttcaggcgtgcgtaaaactcttctgcaaacattcagagcattgctatctttctacgtcatagtactgaatactgatacttatgtaatctgat

SEQ ID NO: 2908 - DNA, 328 bp, Oryza sativa
  Clone ID: uC-osflcyp054f05b1
ctgcctttataacaccctactgctatctctcacctgggcgagctagtttaataacacagtctggactcacacgcattgcagaggagaggcgacaatggaggggtaggaggcggacatgcggctgggggcgaacaggtactcggtgagggtgccgatagggacggcggctccaggattctgctgacggcaaggactacaatggaggctaaaggaactccgatgaccacgcactggggagtctccatgcttgccaagaagattgggagagcaaaccaagggctggcaaaacctcatagtttctggagccctccaaagaaagagggtgaca

SEQ ID NO: 2909 - DNA, 457 bp, Oryza sativa
  Clone ID: uC-osflcyp054f07b1
gctttgtagacttcattacgaggatttcatggtgggggtcgattaactacgtggtgtggtggttgatgctgatgagctaaagggcatgctaactggtgagaacatacacctgcaaaagggttctagtgccacattgttgaatcttgatgagctttttgagttatattcgattaagaaaaacataggagaagccataacaacgttgaagatatgtgtgaaagtcatcagtttatgcatggcatgcaatggttatattgcagaagctaagtttcatcctgcgcttaagactctcgacacgatcgagaagggctacttgaaaaatattcctttgaaacttctgaagaaggtaggtgcaaaacatataccattgataaagatgcacattgagaagaaagtttgcagtgagtttaatgattggcttgttcatatcacaaggatggcttagcagattggacag

SEQ ID NO: 2910 - DNA, 412 bp, Oryza sativa
  Clone ID: uC-osflcyp054f10b1
actagccagtaagctagctaactaactacgtggctggggcccccaccgtgatggcctgctcggccacctccgtggctccattccaagggctcaagtccaccgccggcctccccgtcagccgccgctccaccaactcgggcttcggcaacgtcagcaatggcggaaggatcaagtgcatgcaggtgtggccaattgagggcatcaagaagttcgagaccctatcgtacctgccaccactcaccgtggaggatcttttgaagcagatcgagtacctgcttcgatccaagtgggtgccttgtctcgagttcagcaaggttgggttcgtctaccgtgagaaccacaggtctcccggatactacgatggcaggtattggaccatgtggaagctgcccatgttcggctgcaccgatgc

SEQ ID NO: 2911 - DNA, 457 bp, Oryza sativa
  Clone ID: uC-osflcyp054f11b1
ttcatgtacatgaccagcaggcgaaagaagaggagggtcgattaaagatggctgactgacttcaaatgattgttggactatcatcggagagaagttatgtgggaactttcagagagtatcaggatttccatgatagccatgcacgtagaacaactgaaaacaacttcagaattcaactagaggcaaagaagcatcgattggaaaaggaactgaaagaccaggaatggagactttccatgcttaccaagaagattgaaagatcaaaccaagtgctggcaaagcttcatagttcttggagcccttcaaagaaagatggagacagagaactcttgacagaggaggaaaggaggatattccgaaaaattggcctaaaaatggatgaacatgtgctgcttgggagacgtggtgtctttgaaggcgtcattgaagagattcatcaacactggaaacataaaga

SEQ ID NO: 2912 - DNA, 451 bp, Oryza sativa
  Clone ID: uC-osflcyp054f12b1
ccggctcgcacatggttcgccgcctttcggtgagaggcccgcggctgcagcgagctcgcaggccgccgccttccgcgccgccgaccaccgcgcccatggaccccccctcgccgccgccgccgccgccatatcctcctgctgctgctgagggcggtccggcagcggatagccaggccgctgagctgccccggctgactgtgacgcaggtggagcagatgaaggtggaggcgaaggtgggcgaaatctaccgcgtcctcttcggcaacgcgcccaacgccaattccctcatgttagagctgcggcgtgagcagcatgttgagtatttgacgagagggctgaaacatcttggaccaagcttccatgtgctcgatgccaatcgacctcggctgtgctactggattattcatgcacttgctctgttggatgaaatacctgacaatgttgaggatga

SEQ ID NO: 2913 - DNA, 171 bp, Oryza sativa
  Clone ID: uC-osflcyp054g01b1
caggatgcatctgtatggtgacggtgagcggattcgtggaggcgtgcatggtgctgaggaaggggctttcctccgggtagaagtccgagctgggcgcatacgcgctggacagagctgctagtcacgcctttcgagtcacgcggcagctatgataggtggcccccggctggc

SEQ ID NO: 2914 - DNA, 560 bp, Oryza sativa
  unsure (1)..(560): unsure at all n locations
  Clone ID: uC-osflcyp054g02b1
ccaacgcgctttcctcgcgtcatcggctcaaatgggggagggggtcacttcgcggaaccgagagcccttcctcctgctaatgcgccgccatggccgtccgcgcgctgggtccacctnctcttcacgctctcgcagccacgcggcaggctcctcgctgccccccggctgccgccgcgccgccgacccatggctaccggcgtggagccgcggtgctctccggccgccggggaaggcatactttgagttcaatacaattgatgcatgctgttagaggtggcaatcttcaagtggaaccaaacatgcttcattcccccaagccattgatgtccaccagacgtgggtgtgtggctagtcctactattgctaatgtggatgactgcactgaaggtgaaggtgcactggggtacacaatgacccaaatctgtgataagtttattgagttcttcatgtacaagaaaccacaaacaaaggactggagaaaagtattggtgtctagagaggagtgggaaagatacagaccatacttttacaagcactgtcaagcacgtatagatatggaa

SEQ ID NO: 2915 - DNA, 527 bp, Oryza sativa
  Clone ID: uC-osflcyp054g03b1
caaatcattatctatggggagccatacatatgttcctggtaccggctaaggctactggcagtttgagatgggggatcttcttattgatgactactcaactgggttctgttctggtggttgcgccgctattgcggattcagggacttcattgctcggtggcccaacaactattgttgctcaaattaatcacgcaattggagctgagggaattgttagtatggaatgcaaacaagttgtgcgggactacggggacatgatcctcgagatgctcatagcacaggcaagccccatgaaactgtgctctcagattggtctctgtgcatttgatggtactcgttctgtcagaaacaatatagagtctgttgttgataaagaaaaggtgggctcagatctttcctgcactgcttgcgagatggctgttgtctggatacagaatcagctccgacataaccaaacaagggagctcattttgcaatatgctgaccagctctgcgagcgtctcccagccccaatggcgaattggcagt

SEQ ID NO: 2916 - DNA, 544 bp, Oryza sativa
  Clone ID: uC-osflcyp054g04b1
gaaagaaattgaacctgctctgaagaagcagctcatgatctgcactgctttgatgactgttggtattgcaataatcagctggttggcccttccagcaaagttcaccatcttcaattttggtgctcagaaggaagttaccaactggggcttgttcttctgcgttgcaattggtctgtgggctggtctgatcattggttttgtgacagagtactacactagcaatgcatacagccctgtgcaagatgttgcagattcctgcagaactggtgctgccactaatgtcatatttggtcttgctctgggatacaaatcagttatcatcccaatttttgctattgctgtcagcatatatgttagtttctctattgctgcaatgtacggcatagccgttgccgctcttggcatgctaagcaccattgcaacaggccttgccattgatgcttatggtcctatcagtgacaatgctggtggtattgccgagatggctggtatgagccacagaatccgtgagagaactgatgcccttgatgctgctggcaacaca

SEQ ID NO: 2917 - DNA, 498 bp, Oryza sativa
  Clone ID: uC-osflcyp054g05b1
gggagctggttgcgcaagaaacgaatcaaaaggtatgtacagatggaattcgaaagtagtaattagctgtccataaacaaatcacgaagaagaagaatgttcaaacgagttcatcattgattaattaaattttgaattataaaaagttccggagacgcactaaaacaaaagatgtggtatagcaaaagaattaatgtatgattaactatcatgtcataattcagaaatattctagtgctgcactcggagagggagcgacatcgtcaggcgaagtacatccaaggaaccttatggttaagacaaacgactacgggcgctatgacccatctccagccttctccaagcctcgcttcaagattattccgaactgatgattagacctgaacctgacttcccctttgtacggtgttcaaccaccgctcaactaattaacacagtacccgttagatgaagagtaatgctatatgtgtttgtctaaagtggacgtactacaatatt

SEQ ID NO: 2918 - DNA, 93 bp, Oryza sativa
  Clone ID: uC-osflcyp054g07b1
accgaaccccaattcccacccaccccacccacactgccttttcaaccaacaacgaacacaatcggggggggggttaattaaaaaaggggggcc

SEQ ID NO: 2919 - DNA, 268 bp, Oryza sativa
  Clone ID: uC-osflcyp054g08b1
cctcttcctcatctcacatcgtctctatagctacctaccttcatctctctctagagctagagctagcacacaagagagagggagagaggtgtggtggatggcgcaagatgatgaggacgtgggtctagctctgggcctctccctgggctccggcggccacaggcggcagagagaaagtagagacgaagcgccgtcgtcggcggcggcgtccctgctgacgctgaggctcccggcagagagcggggggcagccgcaggtggtgttgaaa

SEQ ID NO: 2920 - DNA, 232 bp, Oryza sativa
  Clone ID: uC-osflcyp054g10b1
ggcgtggctcccctgaccagacggcgcgatgggctggtgcgcattggatgtgcaggcggcgcggagagggcagcagtccggagcagggaggcggctgacgcttgtggaaggggggttcataaaaggaaggatcctataaagggtcgacactcagtaaaacataggactggggtagcaaaagaaataaggtatgattaactatcatgaccactagcaatgaatactgtactgc

SEQ ID NO: 2921 - DNA, 317 bp, Oryza sativa
  Clone ID: uC-osflcyp054g11b1
accgccgccgccgccgccgcccgcgccgccggggagggcgccgtcgagatagagatcggtcgccggggagagatgatgtctggcggccccagcgacgcgacccaccggaagcggcggctgaggcgggggccgaagggctcgggggtcgacgggccctcgatccccagggcggtcacgaccaacggagcaggtcccgaagaggaggaggtggtggaagggaaggctatggagttggctgctgggatgagcgctgcctacgtgggaggcgtacatggatcgcatctcagggagacacgattcgatcaactggctgtttc

SEQ ID NO: 2922 - DNA, 466 bp, Oryza sativa
  Clone ID: uC-osflcyp054g12b1
tcgcttcgccaccgcggcaccgaccaccggagggcgggggatcgtctacctcttcagcaggaagcccgccccgaagcccaagcccggcggcgtcacctcctcgagccccgacatcggcgatgagctcgccaagtggtacggccctgacaggaggatcttcttgccggagggtctcctggaccgctcagaggtgccggactacctcaacggagaggtccccggagactacggctacgacccttttggcctcagcaagaagccagaggacttctccaagtaccaggcctatgagctgatccatgccaggtgggcgatgctcggcgccgctgggttcatcatccccgaggcctgcaacaagtttggcgcaaactgcggccccgaggccgtctggttcaagaccggcgccctcctcctggacggcaacaccctcaactactttggcaacagcatccccatcaacctcatc

SEQ ID NO: 2923 - DNA, 154 bp, Oryza sativa
  Clone ID: uC-osflcyp054h01b1
aaagaaaagaataaaaaaaaggaaaatcgtgtctcgggtgcggttgtcttcgtctcccccgattcccgagcagcttctcgaaaccctcgcggcctcgattccggcgatggcggagcccaacccccaagtggagagggaggtggaggtggaggag

SEQ ID NO: 2924 - DNA, 466 bp, Oryza sativa
  Clone ID: uC-osflcyp054h03b1
agaagactcatcttgaagttgagccaaggtttcctttgtttggtggttgtcaaacgacctttaccattggttatggtttacctcttcaagactttgttttcaattctgatggaaagagattcctcaatatcacatttggttctccagtggaggagattctcatagaaaagcttattgtgaaggttgttctgcctgaaggttcaaaggatattgatatttcagttccatttccaacaaagcaagagcaagaggtgaagtattcacaccttgatatttctggaaggccagtggttgtcttggagaagcttgatgttattccagagcataatctatattttcaggtttactacaggttcaacaacatctctctactcagagaaccgatgatgttgataactggcttctttttcctcttcatggcctgtattgtttacatgcgcactgacatgtcaatctttaagaattc

SEQ ID NO: 2925 - DNA, 510 bp, Oryza sativa
  Clone ID: uC-osflcyp054h04b1
caagaatttaattcagagagcgcgctcaatgtcccctgctcgacagttctataataatgacaaagaaccacattacatgttacagatggtatcaaatcggtgtttgactaaggaaaattctgacagagacgtgcgccactttgaactggaaaatccatcttctggcatcacttatcaagttggcgacgcgctagaaattctaccaagtcagagtccatcagctgttgactctttcattgaacgctgtaaattggatccagattgttacataacggttcgagccaaggacagggttaaaatttccaaaggttcacttttgaaagatcgtatcaagttaaaaacctttgttgctttgacaatggatgtcgcatcagcttcccctcggcgatatttctttgaggtcatgagcttttttgcaacggctgaacatgaaaaggaaaagctttagtattttgcattttccgaaggaagagatgacctttatcagtacaatcaaaaggagggccgaac

SEQ ID NO: 2926 - DNA, 385 bp, Oryza sativa
  Clone ID: uC-osflcyp054h06b1
cccactcgttcgctccaacgcacgcacgcgccatcaccaccggcttgactccggcggcgacgaccacggcgacggcaacggcggcggcggcagagaagccctcctcatccccaagatggacagccataactcagcacctccccagattgctgaagtgagaatggacatctcatcatctacttctgtagcagctgggaacaaagtttgcagaggtgctgcttgtgacttttctgattccagtaatagctcaaaagatgcaagggagagaatggcgtcaatgaggaagctcattatcgctgtgatcctttgcatcatattcatggcggtcgaagtggttggtaggtatcaaagcaaacagtttggcaatcttgactgatgcagacca

SEQ ID NO: 2927 - DNA, 363 bp, Oryza sativa
  Clone ID: uC-osflcyp054h08b1
attcatttgcgtctaccttgcttccgagggctccgctcggcggtgttaaaccggctagagggattactctcctccaaggaaggcagaaatggctacctaatgtctaggaaagacattacccaatatgacatttggttcttcagtggaggagattcttatagaaaagcttattgtgaaggttgttctgcctgaaggttcaaaggatattgatattttagttccattttaacaaagtaagagcaagaggtgaagtattcacaccttgatatttctggaaggccagtagttgtccttggagaaacatgatgttattccagagcataatctatattttcaggtttactatcagtttaacaacatttt

SEQ ID NO: 2928 - DNA, 487 bp, Oryza sativa
  unsure (1)..(487): unsure at all n locations
  Clone ID: uC-osflcyp054h11b1
tgngcgtcggcgcctccccgacctcgccgtcggttgcggtatactcctgcgttccagcccccgtcgaccagatgacgaagcgcaccaagaaggctggaattgttggcaaatatggtactaggtatggtgccagcttgcgtaagcaaatcaagaagatggaggattctcagcactacaagtacttctgtgagttctgtgggaagtttgccgtgtagaggaaagcagttggaatctggggatgcatggactgtgggaaggtgaaggccggtggtgcttacaccatgaacactggtagtgcggtcactgtcaggagcacaatccgtcgtctgagggagcagactgaagcctgattgcactacgtttgtgccgtaaggagtcctgcgattctgtatcgagtcaagacctatattggctgttgagccaaagcacattggttagcatttttggtctttactttaggatctcctagcatggtgctaaaacctgt

SEQ ID NO: 2929 - DNA, 468 bp, Oryza sativa
  Clone ID: uC-osflcyp055a02b1
ctcttgccccgacagcaagtgtgagctactgggcgcgagaccctcctgtcgcgcggcgcggcgcggcgagagtggccttttgatccgacgaagctaccttttatcagtctaagaccctgccaatgtccatttggagataggatgtcggaacagcaggatagtactagtaaaagctctagctcaagcatcagcagcagtacacaggagagcgaggaggaggtatctataacaataggtagcctcctcgcccaagcaaagaacaacagtgggcatagtcttggaaggcgcctctctcaattgggttcaatcccgcacactcctcgagttaatggaaaaatccctaatcttgataatgcaactttggatcatgaaagattgtcggaaaggttgggaaattatggtttggccgagtttcaaatagagggtgatggaaattgtcagttccgagctttggcagaccagatattt

SEQ ID NO: 2930 - DNA, 287 bp, Oryza sativa
  Clone ID: uC-osflcyp055a03b1
gctgtctctttgtgatgaagtgcaagtccactgagtgcggctttttaagaagaagagtcgggtgaaaggtcacaacggcggtagtggcatcagctgtatgctcatctgcattatcatagcctcctcgcctgatgatgagcaggctccaaaagaggaattcggtcgttattttccagatatttcacctgaagttgattctttgggatttgctgacacggggagtgcgtctaacttataaaactttaagaaatattcttatgagactatcgatgtgatgaacggatgat

SEQ ID NO: 2931 - DNA, 386 bp, Oryza sativa
  Clone ID: uC-osflcyp055a05b1
tctttctcccacctccaccggcgacgccaccgggcgggcctcctcctcctccgcctgtgtacggcagcctcgccgccgcgccgcgcagcgcagcgcagagcaacatggaagcgacgggcgccgccgtatccgccttctccaccgcgtcctcgtcgagtcccgcggcgcctagacacggccgtctcctggcgagccccgcggcgtggcgcagcgcacggacgctgccaccacgggccgtcgcctcctcccgcgcgacggtcctcgtctcgaaccctcctccgccgccgctgccgccgacacccgctcctggtgcggtcgcgccctccaaggtcgaccggtcgggcggttctgtagcccccgcgccgctcgcgagctcgcgctgatga

SEQ ID NO: 2932 - DNA, 272 bp, Oryza sativa
  Clone ID: uC-osflcyp055a06b1
ggcaaggaaatggtaactgctatccaaaatcttgacttgttggtggtgtaacaagccagatcattgcctggttcaacctatctcaagcttcctgtggctataaaagtgcgagagtacttcattgcgcgctcacagccttgtggtcatgaatatgggcctatcagttgccaaagaaccaatattccattggaaatttctcagatatctcaagatgtgggcaaagtgaatcaagatttctctacttgtaccgattcttatcatgaatatttcta

SEQ ID NO: 2933 - DNA, 223 bp, Oryza sativa
  Clone ID: uC-osflcyp055a08b1
tctctctctctctctccatccgcgacaactgtgcgggatatttatgagcgctggtggagtggcgtggcgaggcgaggaggtggctgatctctctcatcaatctcctccgtcgcggtcgcagctgcgggagtgaagccgccccgcggagctagctaaaccctagccactgcccgggcggggagctggggcttgggttcccatccaagccaggatgatgtactct

SEQ ID NO: 2934 - DNA, 404 bp, Oryza sativa
  Clone ID: uC-osflcyp055a12b1
tcatcgagatagatgtggctactttctcaagtcgtagtcgattagagacatgatgagacaccgtcctggctcaacctgattacagggttgctggtagaaatgcagttgaagcatgatttgtatggcgctgacatccatggagctcatggttattgccatcaattgtgtttctaaaagaccaatgtataattcgttctgacaaatattgtgggagcttagagaatcgctgccggtttgcgctagaagtggtccaagccgtaactgatgaaattggagctgacaaggttgggataaggcttgcaccctttgccagctattcagaggcagcagactcaaacccagaagctctaggcctatacatggcaaatgcactaaacaagtttgggattctctattgtcacatg

SEQ ID NO: 2935 - DNA, 252 bp, Oryza sativa
  Clone ID: uC-osflcyp055b01b1
gcgctagacttggccgccaccctggggggggtgatggtaagatacgcagtggggcgccaaacccacccaggctggccgccgacaccgtcgccgatgcggcggatgcttcccacgctcgtgtcagcgccgggacggccaggggaagagggggagggggcgtcccaggccgcgactaccgagacacgcgccgggccgggttctgagacccatgttaccgagtataccaagggtgccaaggtccggctggagtgc

SEQ ID NO: 2936 - DNA, 466 bp, Oryza sativa
  Clone ID: uC-osflcyp055b03b1
atcgcacttcacttaaggtatgagaaggacatgctctcatttactggttgcagccacaacctaacacataaagaggcagatgagctgagagaaatgagactcaacgtgcggcactggaaagagaaggaaatcaacagtagggagaggagactccaaggacgctgccctatgactcctcgtgaagtagctcttttcctcaaagctatgggctatccttccagcacaaagatctatattgtagcaggtgaaatatatggtggacatagcatggattcattaaaggctgaatatccaaacatatatacacattatagtctggcaacggtagatgagttagagcctttcaagctataccaaaacagattagctgccttggactataatgtagccgtccaaagtgatggttttgtgtatacgtatgatggaaatatggctaaagcagtacagggtcacagaagatttgaag

SEQ ID NO: 2937 - DNA, 472 bp, Oryza sativa
  Clone ID: uC-osflcyp055b05b1
gagagagaaagcgcgtggccggcggcgagaggagcggcggctatgggcggcggcgggcacggcggcggcacgacgtacaaggggtacaccatcccccacaacaagcgctggcacaccgtcgccggcaagggcctctgcgccgtcatgtggttttgggttttctacagggctaagcaggacggtgctgttctcttgggcatgcgtcatccttgggatgatcatgatgatcactcacatggtcatgggcatgagcatgagggatcatcatcaacatcgtcgtctcactaaatcaactgcttcttggcggctgagggagactcgctgctttggttgtcgcgatgaaatcctcgaagataataaagtttcacactattaattttattaagatgggttcatgttgctggcaactgtttaaggcaaactggctatgtatcttgcttttgagatagcctccctcgatggaaaacccatg

SEQ ID NO: 2938 - DNA, 466 bp, Oryza sativa
  Clone ID: uC-osflcyp055b07b1
gctcctcctctcacattttccccaaataataatagaggaaggggaaaaacacatttgcagccacatcatccatggcctctctccgcaccattccggtgatcttcggcatcctcttctatgtccttgccagcactgccactgccaccgacgcaccggactacgtcgtccaaggccgtgtctactgtgacacgtgccgcgccgggttcgagaccaatgtcaccgagtatatcaagggtgccaaggtcaggctggagtgcaagcactttggcaccgacaaggtcgagcgtgcgattgacggtgtgactgatgagaccgggacatacaagattgagctcaaggacagccatgaggaggacatctgcgaggttgtcctcgtccacagcccccttgcaaactgctctgaaatcgaggccgaaagggatcgtgcccgtgtttcgctcaccaggaatgtcggcatctgtgacac

SEQ ID NO: 2939 - DNA, 345 bp, Oryza sativa
  Clone ID: uC-osflcyp055b09b1
caccaaggctaacgttgactatgagaagatgggcagggagacatgccgtaacatcggttttgtgtcagctgatgtcggtctcgatgctgaccactgcaaggcgcttgtgaacatcgagcagcagtcccctgacattgcacagggtgtgcacgggcactttaccatgcgccctgaggagattggtgctggtgaccagggacacatgtttggatatgcaactgatgagacccctgagttgatgcccctcagccatgtgcttgctaccaagcttggcgctcggcttactgtggttcgaatgaatgggacctgcgcatggctcaagcctgacaggaagacccatgtgac

SEQ ID NO: 2940 - DNA, 394 bp, Oryza sativa
  Clone ID: uC-osflcyp055b11b1
gtgggagagagacttctctacgcggtcacggggtccccagcggcggagaaagatagatagagagagcaaagagcaaaaaaatctctcttttttcttcttgttgtttctgcagctacctttgtcttgccttcaatgccaccgctttactgccggatctgaggaaagctcccatccttgctgagttcttgtgctgcttcttccacaattcttccttttgttgagaattctgccttccatctgcttaatcggtgacaaaggcgctgggattcccgcctcttttcctgcctgacaagtctcccctttttgccaagttggcttattattaaatggcccccccccatttccctttcccacattttgccccccctttttttcttattttcccccccccttt

SEQ ID NO: 2941 - DNA, 466 bp, Oryza sativa
  Clone ID: uC-osflcyp055c01b1
ggcaagctgattgcattctatgatgacaaccacatttccattgacggagacacagagattgcattcactgaggatgtgagtgctcgctttgaggctcttgggtggcatacaatctgggttaagaatggaaacgatggctatgatgagattcgtgccgccattaaggaagcaaaggcggtaactgacaagccaacactaatcaaggtgaccaccacaatcggttttggatcacccaacaaggccaactcatacagcgtccacggaagtgctttgggtaccaaagaggttgaagcaaccagagagaaccttggatggccctatgagccattctttgtgcctgaggatgtgaagagccactggagccgccatgtgcctcaaggtgctgcttttgaggctgactggaatgctaagttcgccgagtatgagaagaagtacccagaagatgcagcgacctttgagagcattg

SEQ ID NO: 2942 - DNA, 428 bp, Oryza sativa
  Clone ID: uC-osflcyp055c02b1
gaaaaagacccccgcgtcgcccacacgcaggcgacatgggggcgaaccctaccaccggcgccgaccaccctagtaccctcccctacctcgccgtcggcggagctcaccgccggcaaagccggccggcgagctaggaaggcagcggcggggctttctccgcagtggtgccccctctcaggcgcgggggagtgacagactccttagagccgacacacacagtgcgtgctgttagacgacgcaggcatgcccaccgagtaccgccacatggacggctgggtgcgaaacacgtacacactggcaacccgagacgccgagggcaggaacagcaagtcccactggaagcccacctgcagagtcagatgatcgatggacgaccaggccacgctcgtctgcaggatgacgacaggcacgccacccacgacctgtac

SEQ ID NO: 2943 - DNA, 213 bp, Oryza sativa
  Clone ID: uC-osflcyp055c03b1
gctgctgctgctcctcccgttcttcgagcgagggcgtgggaacccgaaccgtggccttggtgctcctagcgggcgggcggctccaagccctcctccccgttcaagcagaggagggattgcagcggatcgcgctcaataagcgcccgatcgacgagaacagtcttgtagccgggctactataccgccaggaaggggcgcgcacagatgggcctc

SEQ ID NO: 2944 - DNA, 376 bp, Oryza sativa
  Clone ID: uC-osflcyp055c05b1
ttttgaatagatcaaatcgaatagatagaaatagtgaatttgaatggagacacctattctatgatggattttaacttaccctctattttcgtgcctttagtaggcttagtatttccggcaattgcaatggcttctttatttctttatgtgcagaaaaataagattgtctagaaccgacgggaccgaattttctcaatgtatttccacacaggatcataatacggatcttttgtagtgtaagtaatataatatggcatgttatgtggctctttctacacacaaatgcaaacccgctatggatggggattatggatgcggatataggctacgagcataaatgcatgcatatgcggaaccgggtatagcgagttttttt

SEQ ID NO: 2945 - DNA, 420 bp, Oryza sativa
  Clone ID: uC-osflcyp055c06b1
ttggttttccctccctttatatggacaacacgggtttgttttttctgttgcgcaggtttcagatcttggatggacttgctcatccttcggcggccatggatctatcggcggaagctgctgctgctgctcgtcctcgcgttcggcgagtcagatctggagccgatctgacctcttagaggtccggttggggcatgctccgtacgagctggcgtggatgaagcggcggggcgagggaggaggctggtcgtcgcctggatcctctccatcggggcctcgcgcgatgatgtctctttgtattgataattattcgatgaactttcgataattattagatctaagagatgttgttcgagggagccgtgtgctgagatgaaggcggcaaggtaagagaacatgtaaccagcgaggtgcttgtgtctg

SEQ ID NO: 2946 - DNA, 313 bp, Oryza sativa
  Clone ID: uC-osflcyp055c09b1
tgccgccgccgccgccgtcgcgcccgcgcgggccaagtcgacgctggagtcctgctcctcttccaccgcctgcccagcgctgctctcctacacgctctacgccgacctcaagctcgccgagctggccgcgctcttctccgccgacccgctcgccatcctcgccgccaactccatcgacttcgccgtgccggaccccgccgaccgcatcctccccgcggggctcccgctccgtgtgcccgtcccctgcgcctgcttcgacggtattccgagggtcaccaccgtgcgctactttgcgcgcccgggcgacacgctc

SEQ ID NO: 2947 - DNA, 270 bp, Oryza sativa
  Clone ID: uC-osflcyp055c12b1
tctatcacccccccacgcgagcccgcgagccggggcgtgctttgccaccgatctccggcgaccccccgggcgccgtcgtcgtcgtctgcgccgccaccacccggagatcctcccgggtgcctcccccctccccgccgcgtgctcccggcgcccactggcctggccccgaggtgggggctcccctgctccccgcaaaccctaaccctagccctagcccacccccggcgcgggggctgcctaggaaacaggttgcacatttggcggactttt

SEQ ID NO: 2948 - DNA, 204 bp, Oryza sativa
  Clone ID: uC-osflcyp055d01b1
atacaatccccgtgcctcccttgacctcacaccccacaggtgttcgccatttcgccgcccccaccaccgcgcgccgccgccgccgccatggcctccatctccgccgcctcccccgtcgctgggaaggccgccgccttcgcccacaagaacgagctcgccgccgccgccgtggcgccgtcgcagcagcagctgcagcggagggtg

SEQ ID NO: 2949 - DNA, 414 bp, Oryza sativa
  Clone ID: uC-osflcyp055d02b1
ctttagccttctcatggatattgcttgaacaaccgagcgtgcaagggaggggcgttaaaattaatcaattaacccagccctaaaatatcaccaatatatctctttctccatttcttgagaacattcccaggtgtatctggcagtggggataatcctacatttaagtcctctccccaccctaaatgcattatgtgtctgcacatatacatggcaaagacttagatgaattgatctgcgaatacctttagcttcactagtaatagtgcatgagcaagacacgttccgcacgtataaatgcgaagttattaatgtttcccactatgcaaaagaacaagaaaatacttgttaccaaagcaaaaggaattgatgcaaattttgcaagagaggaaagaccaacctctgcggcaaaaatca

SEQ ID NO: 2950 - DNA, 251 bp, Oryza sativa
  Clone ID: uC-osflcyp055d03b1
tgagacgtgacaagggacagacggagaagaggggtccaaacggcttcctcgtcccattgccaggtcattacctgtaatgtgctgtgctgttgagatgccaacatgcctcatacattcgtggacgtacccttggcatcgccgtaggccggtcagttccgtgtcaagactctattcaccgagctgtgacacaacctccacttctcctgatgctgcaaggatcctgatggcctatttacttgcattcttggcca

SEQ ID NO: 2951 - DNA, 225 bp, Oryza sativa
  Clone ID: uC-osflcyp055d04b1
ggaaagagagatggaattgaaagagaaatttgagaagaaccttcaagaagcagcagataagtatcaaaacactaacctgtacctgaagaacttggatgatagtgttgatgatgataagttgagggagctgttggctgagtgtgggtctaatacgtcatgaggggcaatgcgagactcaaatggtgaaaaaactagggcccaaaatggcgcgtttttttgtgatta

SEQ ID NO: 2952 - DNA, 456 bp, Oryza sativa
  unsure (1)..(456): unsure at all n locations
  Clone ID: uC-osflcyp055d06b1
ccaaaatcgcagagaaaaaaaaatctcccctcgaagcgaagcgtcgaatcgccttctcaagatgcagatctttgtgaagaccctcaccggcaagaccatcaccctcgaggttgagtcctcggacaccattgacaatgtcaaggccaagatccaggacaaggagggcatccccccggaccagcagcgtctcatctttgctggcaagcagcttgaggatggccgcaccctggccgactacaacatccagaaggagtccaccctccaccttgtgctcaggctcaggggaggcatgcagatcttcgtcaagaccttgactggcaagaccatcacccttgaggtcgagtcgtctgacaccattgacaatgtcaaggccaagatccaggacaaggagggcatncccccggaccagcagcgtctcatcttcgctggcaagcaagctgagggatggccgcaccc

SEQ ID NO: 2953 - DNA, 455 bp, Oryza sativa
  Clone ID: uC-osflcyp055d07b1
cttctccaacagccgagaagaggcagagagagcgccgtcccccgtccctctctgtccctcacgacctcgcgcccatgcctctggcctgtcccttgccggcagcagacgaggcggcgctgggaaggccagcggcttcgaccacaagaacgagctcgcggcggtggcgtcggcggcttccgatggcgaatccggcgggaggatacaaatcagtgttccgataggtaaaaccctgctctcagcatctgcccttttgaattcgccaagagccagcatctgcccttttgaattcgccaagggccagcatctgcccatttgattttgaattcgccaagagccagcaacagttgccccgtgcccccttccttcttcggaataaacaaggcacacgcgccgccccatgttcacccttattggcacagtggaacaacaccaccaccaccaccaccaccaccacc

SEQ ID NO: 2954 - DNA, 413 bp, Oryza sativa
  Clone ID: uC-osflcyp055d08b1
cttcccttctcttctccatcgcatctaccaccgagcgtgcaaggagggggggtgaaaatggcttcctcgacccagggccaggtcatcacctgcaaagcggcggtggcatgggaggccaacaagccgatgacgatcgaggacgtgcaggtggcgccgccgcaggccggcgaggtccgtgtcaagatcctcttcaccgcgctctgccacaccgaccactacacctggagcggcaaggatcctgagggtctatttccttgcattcttggtcatgaagctgctggaattgttgaaagtgttggggaaggagtaactgaggtgcagcctggggaccatgtcattccttgttaccaagcagaatgcagagaatgcaagttttgcaagagtggaaagaccaacctctgtggcaaagttcg

SEQ ID NO: 2955 - DNA, 270 bp, Oryza sativa
  Clone ID: uC-osflcyp055d09b1
tccgcaacgacaacgttggcgttgggaaccgagtggagactagctagtgaagaccagaggcagacatggcgagatcactggcgcacgcgacgctgctcctcgtcgttgccgtcgtggcggcggcggcctgctggaccacggcggccggcgagaacgaggaggtggcggagatatgcaagaagacgtcgtaccctgaggtgtgcattgccacagcggggaagtaggcgtccaagcacggggccgttcatacagcgttcacggtagtgcttt

SEQ ID NO: 2956 - DNA, 343 bp, Oryza sativa
  Clone ID: uC-osflcyp055d11b1
ttcactgcctgaaccaagaacactgccctcctccacacgacatggcttctcaagaagagaagacgagcgtcaagtcggaggaggcctcgtcggcggcggaggagcagccacctcaagctgcagctccgccgccgcgcaggggtgtgccgccggccaaccccttcgacttctcaaccatgatgaacttgctcaatgatccgagcatataggagatggcggagcacatcgccacggacccggcgttcacggagatggcggagcagctgcagaagacgttgcagtagccgccggcgcgttgggcggcacatgaggctgcagacgctgcagctccggctctggaccc

SEQ ID NO: 2957 - DNA, 327 bp, Oryza sativa
  Clone ID: uC-osflcyp055d12b1
tctattcgcgccgcaccgaccgctcaactcttggttcgcgcaggctgcggcggtggcgcaggcgacgtcttcctacacctgatccacctacactttctccggaccggacaagaattagaagacgatgaagtgcaggtacggcgcaagtgcagacccaattgcgagctcacctgctctgccctgcccactaccaagtagtaggctgcttgtggttggctttctccccgacatactacaccatatcaaaggctactagactagagctgggggtgatgctcaagatagggctgaggccctgcgacctgaccatgcctgtcgagaccatca

SEQ ID NO: 2958 - DNA, 455 bp, Oryza sativa
  Clone ID: uC-osflcyp055e04b1
ggacatactctactactactagccagtaagctagctaactaactacgtggctatggcccccaccgtgatggcctcctcggccacctccgtggctccattccaagggctcaagtccaccgccggcctccccgtcagccgccgctccaccaactcgggcttcggcaacgtcagcaatggcggaaggatcaagtgcatgcaggtgcggccaattgagggcatcaagaagttcgagaccctatcgtacctgccaccactcaccgtggaggatcttttgaagcagatcgagtacctgcttcgatccaagtgggtgccttgtctcgagttcagaaggttgggttcgtctaccgtgagaaccacaggtctcccggatactacgatggcaggtattggaccatgtggaagctgcccatgttcggctgcaccgatgccacccaggtgctcaaggagctcgagga

SEQ ID NO: 2959 - DNA, 383 bp, Oryza sativa
  Clone ID: uC-osflcyp055e06b1
gcacaacttgctcgggatgttcctttctctgctatatgctggtcaacactggagccgattcgaagaaagctgcttggtatcgtcggagaagaaggtgatgcagctagtgtgctgggtgcaaactttgcagctggctttgtagcaggtagtcttgctgctggtgctacatgccctctagatgttgctaagacaaggagacaaatagagaaggatacgcaaaaggcaatgagaatgaccacaaggcaaacattagctgatatttggagctctggaggtatgaaaggcttgttaccggtgttggtccacgtgtagcacgagctggcccatcagttggaatcgtcatttctttctacgaggttgtgaagcttgctcttcatcaaagg

SEQ ID NO: 2960 - DNA, 185 bp, Oryza sativa
  Clone ID: uC-osflcyp055e09b1
cggacgcgtgggctctcgtgctcctcttcctgatggcgatctcgaaggcttggatctcgctgctgctcgcgctcgccgtcgtgctgtcggcgccggcggccagggcggaggaggctcctaaagcggacgactacgcccacaggaacgagctctccagggccaacgaagcaccggcgcatcagcaa

SEQ ID NO: 2961 - DNA, 95 bp, Oryza sativa
  Clone ID: uC-osflcyp055e11b1
attggcttctcctccccctctttaccttttcctgctcggttcaactccgtggttcgtctagggttcagtggggtgagatcacagaaaaaaatgac

SEQ ID NO: 2962 - DNA, 121 bp, Oryza sativa
  Clone ID: uC-osflcyp055e12b1
tttagagtggaagaatcgacggcctattccgggggtttaattaaagtggcggcgattacacaagagctaagtgcttttgatgtagaatgaggtgattgacccttgtgggctggtagcaaac

SEQ ID NO: 2963 - DNA, 418 bp, Oryza sativa
  Clone ID: uC-osflcyp055f01b1
ctcctctcctctccgcatcctcctcatcgcctgcgcttctgcttttttttttcttttttctctcgttgatcggtttgttcgatcagatcggttctttggagagatggagcagtccttcatcatgatcaagcctgacggcgtccagagaggcctgattggagacatcatcagcaggttcgagaagaaaggattctacctgagggggatgaagttcatgaatgtggagaggtcctttgcacagcagcactatgccgacctttccgacaagcccttcttccctgggttggtggagtacatcatctctggccccgtcgttgcgatggtctgggaaggagaggaatgtttgttgccactggccgcaggatcatttggggccaccaggccctgggaggcagcccccggcaccatccgtgctgac

SEQ ID NO: 2964 - DNA, 445 bp, Oryza sativa
  Clone ID: uC-osflcyp055f04b1
ttcatccatccgcgcgcggtgcgtagtatcgagaagagaagggggggagggcaaagcgatggctccgatgaagctgtacgggtcgacgctgtcgtggaacgtgacgaggtgcgtggcggtgctggaggaggccggcgccgagtacgagatcgtgccgctcgatttctccaaaggcgagcacaaggcccccgaccacctcgccaggaacccctttggtcaggtgccggctttgcaagatggtgacttgttcctctgggaatcacgtgcaatttgcaagtatgtatgccgcaagaacaaaccagagctgttgaaggatggcgacctcaaggagtcagcaatggtggatgtgtggcttgaagtggagtccaaccagtacactcctgcactgaaccccattctttttcagtgcctaatccgtccgatgatgtttggtgcaccccccgac

SEQ ID NO: 2965 - DNA, 222 bp, Oryza sativa
  Clone ID: uC-osflcyp055f05b1
cctggacctcctcttcatcgcgacagggtggtggttcctgtccagcaagcagagcatccccagctcgctggaggcagggtacaggagggtgatgacgagccagttcaggcggttcacgtaccgggagctcaaggacgtgacggccaacttcaaggaggagctcggccgcggcggctccggcgtggtgtaccgcggcgtgctcgacggcgggatggtggtggc

SEQ ID NO: 2966 - DNA, 236 bp, Oryza sativa
  Clone ID: uC-osflcyp055f06b1
gccggccggcgagcgagcgccgcggcggcggcggtggatactgtctaccttctctcctcccctccccgcccccgcgcggtctggacaagctctctttctctggctctgtctctgtctctgtctatctgtctgtctgcctactttcgcctcgcattcttcccggctcgaatcgaattgaaggataaacattgatcttggaatagctgtttttatgtcacatgttgctatgaaggaat

SEQ ID NO: 2967 - DNA, 328 bp, Oryza sativa
  Clone ID: uC-osflcyp055f08b1
tctaccaaagaagtggagtatagagatatttgcggcacatccttttcagtgccgtcataccgatgtgctgagcaagaaactgaatgctgttcatcggaaccttcatgctctgcccagactagcatgcgccctttccattctaggcataaccgtgatgataacattgacatgaatatagaggatatgatggttatggaagcgatttggcgttccattcaggagcagggaagtatagggaatcctgtctgtggcaactttatgcctgtaactgagccatctccgcgtgaacgccagccattcgttccagctgcttctctagaaataccta

SEQ ID NO: 2968 - DNA, 394 bp, Oryza sativa
  Clone ID: uC-osflcyp055f09b1
ctccggtgagcatcgaggaggtagaggccgcccccgactccaacggcggcggcgaggaagccaatcggccccgcgtggaaggcgacggcgaaggtgtcttgcagagcaacgagtcctccgcgaaggtcgatgagccggtagctacagagaacagtgacgctgctcctgctgaggcatctgtagatgctgtgaacggcaagattcctcctaccaagttgattccccaacatcctctggaaggtgttacattgacagaaagaactgtacgtattactgggaatatgaagcagatagaagcggcaaaagatattattaagcaagctatgagtcaggttttggtagaagcaaatggtgttacacggacattggttttggattggccaaagcagtttta

SEQ ID NO: 2969 - DNA, 267 bp, Oryza sativa
  Clone ID: uC-osflcyp055f10b1
tgatgaacgcctattgtgaccgtcagtctgtggatatgaatgctattgcattcctatttgatggtcgtaggctccgtggcgagcagacccctgacgagctcgagatggaagacggggacgagatcgacgccatgctccaccagactggaggctgcctgcctgcctagaagcttaggagttcttgcagcctcgtaaaattgtgcctttagtaggctcaatatctagaagtacatgaaaaaaaagaagcctaaaagaacttgcgaggct

SEQ ID NO: 2970 - DNA, 140 bp, Oryza sativa
  Clone ID: uC-osflcyp055f12b1
tcagcatgagtatagactggctcggctcgctcactgggtgagttgtacacacactgcacttcggctcactctgtccactgttcttcctcctcggcgaggggggaaggaggaggcgacagcccccggccgcccggaggagg

SEQ ID NO: 2971 - DNA, 391 bp, Oryza sativa
  Clone ID: uC-osflcyp055g02b1
cttggtttgcctctatgccggcatcaacatcagtggaatcaacggcgaggtcatgccaggacagtgggagttccaagttggcccgtctgtcggcatttctgccggtgatcaggtgtgggttgctcgctacattcttgagaggatcaccgagatcgccggagtcgtcgtctcatttgaccccaagcccatcccgggagactggaacggtgctggtgctcacaccaactacagcaccaagtcgatgaggaacgatggtggctacgagatcatcaagtccgccattgagaagctcaagctcaggcacatggagcacatctccgtctacggcgagggcaacgagcgccggctcaccggcaggcacgagatccgcgacatcaacacctttagtggg

SEQ ID NO: 2972 - DNA, 324 bp, Oryza sativa
  Clone ID: uC-osflcyp055g03b1
ggatttttgtcctggcaatggttggaatatgtgctcgatttatagctctggaactgaatgtccacatgaagcagtgtgttgaatactgtaagatctttgatcgagctttctgattctattctatacttccctcttatgttaatgtgggagctttctgattttgttctaatacttgcctcttatgttagtgtgaggatatgtaaatgtgacaccttttatgcttattgcagcttcacaaaggtgtatcccatgccttccattgattaccttcattggttacacatccatctagtcatgttgatcatatgtaatgcccatatctct

SEQ ID NO: 2973 - DNA, 457 bp, Oryza sativa
  Clone ID: uC-osflcyp055g06b1
ttggttgtccaactctcagcagagcataacgtaggcattgtgtcagtgagaaaagaattgcagtcaatgcacccggaagataggcatattgttgttctcaagcacaacgtttggcgtgtaaaaggtctaattcaggtctgcagatcaattggtgatgcctatctcaaaagatcagagttcaaccgggaacctttgtatgcaaaattccgcctccgggaaccttttcacaagcccatactaagttcagaaccatcgattagtgtgcaacccctacaaccacatgatcaatttctcatatttgcatctgatggtctatgggagcacttaaccaatcaagaggccgttgacattgttcacagtagccctcgcatggaagtgctaggaggctcataaaggctgctttgcaagaagcagcccatgaaagagacatgaggtactcagatctcaagaagattga

SEQ ID NO: 2974 - DNA, 316 bp, Oryza sativa
  Clone ID: uC-osflcyp055g07b1
tgttagttccagccatggcagcagacaagggagggaaggtgttcggcatgtgggcgagccccatggcgatccgtgtggagtgggctctccggctcaagggcgtcgactacgagtacgtcgactaggacctcgccaacaagagcgaggcgctgctccggctcaacctggtgaccaagaaggtgcccatgctggtccacaacagcccgtcatgtggctagaccaccatcatcgtcgatgtcatcaacgaaagatggtagctccaataccttataatgccctacaaggactttaaaagtgctatccaccgattgttttt

SEQ ID NO: 2975 - DNA, 278 bp, Oryza sativa
  Clone ID: uC-osflcyp055g08b1
cttttcttgagctcaatcagcaacaacatctaggtccttcttgcttagttaagtccttcgccctcccaagaagaagaagatgtcttgctgcggcggcaactgcggctgcggcagcggctgccagtgcggcggcggctgcggcggatgcaagatgttccctgatgtggaggccacatccaccaccaagaccttcgacctcgctgctgcatccaacaaggcgagctctggaggaatggagatggcgtgcgagagctgctacaacagcctttatgtgcctg

SEQ ID NO: 2976 - DNA, 384 bp, Oryza sativa
  unsure (1)..(384): unsure at all n locations
  Clone ID: uC-osflcyp055g09b1
tgagcgccttggtgcagacattattcaaaaggcgttggtagctcccgcttcactgattgcccacaatgctggagtggaaggggaagtggtagttgagaagatcaaggacngctagtggtaagtcaggcacaatgcgatgaacgacagagtatgagaacttgattgatgcgtgggctattagacacaggataggagccgagaggcgcgctccacaatgccgtctcgggggcttttatggaacttaccacatacgcccttgttgtcgagaagccttttcccaaggctgtggatgccaaaccatcagagggaacccttaccattttatcagaagtgaatttctttagaggtgctttgtttagatggttcattccaaacctgaaatgg

SEQ ID NO: 2977 - DNA, 377 bp, Oryza sativa
  Clone ID: uC-osflcyp055g10b1
gtagaaacacaatctgtgggacaactgagggaggtatcgaataaggcacacaatgctgagctgaagttgtttttggaagtagaacttggcccggatttgcggcctctccctccacctgagaagagcaaggaagatattcttctgttcttcaaactctataatcccgaaaaggaagaactctgttttgtggggaggctcttcgtaaaggccttgggtaaaccctgagaaatcttgaccaaactaaatgaaacggctggatttgtgcctaatgaagaaactgagccctacgaggatattaattttgtgccaagcccgtatcgtgaacctattgacagttgtgcctcttttcccgctagtcagcttgaatatgtggtcat

SEQ ID NO: 2978 - DNA, 383 bp, Oryza sativa
  Clone ID: uC-osflcyp055g11b1
cagggttcagggaggtggcggcgtacctgttggatcatgataacttcgcaaatgttcctccgacggcgttggtgaagatcacacactcaattttccatatcaattgtccggtgaacggcggcagtccagctcatgatcagaagcagcaggtttccagcaagatcgcttcgtttcagcagttcatcgcgcatgacttcgatgccagtgatcatggcacgtcgagcttcccggttgctgctgttcataggatcggcatactggatatcagaattttcaacactgacaggcatgctggtaatgtgctggtgaggaagcttgatggtggcaccggtcgctttggttgtcagacggaattgtttccaatttgatcatggcctgtgctt

SEQ ID NO: 2979 - DNA, 275 bp, Oryza sativa
  Clone ID: uC-osflcyp055h02b1
ccgattgagggaaaaaaaagagaaaaagaaaagaaaaaaaaagaagaagaagagagaactcgaactctcgcctaccatttcgcccccctccgcaagcaatccaccactgcatcggcggcgagggctcaccggcggcgagccatgtgcggcggcgccatcatccaccacctgaaggggcacccggaggggtcgcgccgggcgacggaggggctcctgtggcccgagaagaagaagcccaggtggggcggccgcgggaggcgccacttggggggttc

SEQ ID NO: 2980 - DNA, 427 bp, Oryza sativa
  Clone ID: uC-osflcyp055h03b1
gacagaaccacaagttgcatctttagatgcaacaaacatcgagtgttcaatatcaaggcaaggagatttctatgtgataaatggaacgaaatggtggaccagtggggctatggatccaaggtgccaaattcttgtattaatggggaagacagatttttctgcacctaaacataaacagcaatcgatgattttagttgatgtcaaaatacctggagtgcagataaggagaccgttgttagtatttggtttcgatgatgcacctcatgggcatgcagagattacttttgagaatgtgcgcgttccagccacaaatattctccttggggaaggccggggttttgagattgctcagggaagactaggccctggaagattacatcattgcatgagactaataggggcagcagaacgtggcatgaatttgatg

SEQ ID NO: 2981 - DNA, 224 bp, Oryza sativa
  Clone ID: uC-osflcyp055h04b1
ggagtctagggttatcgcgctccctccctccctccggtcccatggcggacaccggagcggcacagcctccgccgccgcccctgcgggcgcccgccgccgtgccggagaccctgcgccggctcctcgcgctggtcactgacgtactggcgggctgcttcctcgccgcgaagcgactgacgcgaagcttctgccggggcgctagaaccttctagtaggagtgtggg

SEQ ID NO: 2982 - DNA, 292 bp, Oryza sativa
  Clone ID: uC-osflcyp055h05b1
gtcgtcgtcgtctcctcgatcgggttaccacggctgcgggctacggcgactagcttccttctctcgccgaagcgagacctcgcctcccccgaggaacctgtgtgcaataatttgttgttacctctggcatccataagatggaggtcctgagttggagaacggtgtgcctctcggttctctgcaccgtggcgttgctgcacccggctgcggctatccgctttgcgattgacagggaagagtgtttctcgcataacgtggagtatgtgggggatactgcccatgcttggcccct

SEQ ID NO: 2983 - DNA, 240 bp, Oryza sativa
  Clone ID: uC-osflcyp055h06b1
cggtcgcgtgggcggacgcgtgggctcgcaccaggggtctctctctctcccttgtctgtccccgattcctcctccgcctcgccgtcgagatctcgccgcgcccgcgcccgcctccgccggagctctcccgcgccatggcgacgcggaaccggacgcctctgtaccgcaagtaccgcgacgcgctgcgccacgtccgcgcgccggcgggggctccgtcgtcggcatcgttcggaggaggag

SEQ ID NO: 2984 - DNA, 374 bp, Oryza sativa
  Clone ID: uC-osflcyp055h08b1
tcggacgcgtgggttcctctgctcctcttcgtgtgccccccccccccctctcttgtctccccccggccggggaagaaattttgcccccaaaataattttctgcacggacgatcaaagaaagggcaaaatttttctgcgcctccggttgaaggaagccgtgatccatgtcggacgagactggccggaccattccaaagttcggcgcatgggacgtcaacaacccggactctgccgacggtttcacggtgatctatagccaacccagggatgagaagaagggccccgacaacgtggacgccagcaccaggtaaaactttgacatgaaagactccaagttctattagtgcacagagaagattaacccctaccaccgt

SEQ ID NO: 2985 - DNA, 325 bp, Oryza sativa
  Clone ID: uC-osflcyp055h10b1
atccaacccaatccatccatggagctgtagcctgcatgcttccacagagaagagaacacttgggaggaggaggaggatcgagctgtagatctttctctccgttgtactcttctccttggcttggcttccggaccaaactaatcacggggggctttcgcttcgttagcaacgctggcgaagcttcttccggggttctagaaccttctagaaggagtgtggggttattggggaggccagcggtggtggctgctgctggcggcggcggcggtcgtcgtctgtgccggggcgcatgagacgtgctctgacatggtgcctgctgcgcctc

SEQ ID NO: 2986 - DNA, 461 bp, Oryza sativa
  Clone ID: uC-osflcyp055h11b1
ctccggaagatcgaaaagcttggtcttgacatgaacaatcttgaagcaagagacagttggggatgggaattcctagatgcattgagcaactgcacgcgtcttaagatgctctcactgcaccaaaatctactgcaaggtgtcctgccgaattctgttggcaacctctcctctagcatggacaaccttgtgttgagtaacaacatgctttcagggttagtgccctcgagcataggaaatcttcataggttaactaagtttggattggatttcaacagttttactggtccgattgaagggtggattggaagcatggtaaatttacaggctttatacctagacagcaacaacttcactgggaacattccagatgccattggcaacacctcccagatgtcagaattgtttctttcaaacaatcaattccatggtctcataccatccagcctaggaaaacttcgaca

SEQ ID NO: 2987 - DNA, 51 bp, Oryza sativa
  Clone ID: uC-osflcyp057a05b1
atatgtgccacctctcctatgctcttccttgtggtgcgttctactagtact

SEQ ID NO: 2988 - DNA, 177 bp, Oryza sativa
  Clone ID: uC-osflcyp057a06b1
ttgttgagcagcgtgaaatcttgggtcagattagaaagaagaaggcattgctcatccaagagcatagaatgaagaagaggactgcagaaagccgtcctattgttcctagaaagtttgacaaagacaggacattcacaactaatagaatgggtcgttaacttttcattcattgggttt

SEQ ID NO: 2989 - DNA, 66 bp, Oryza sativa
  Clone ID: uC-osflcyp057a09b1
ttctttccctccttccagagaaggcccttggatccctttttaaggccttctcccccaattttccac

SEQ ID NO: 2990 - DNA, 299 bp, Oryza sativa
  Clone ID: uC-osflcyp057a10b1
tcgttcaatttcctcctctcttctcctctcctgttctcacacgaagccaagaaagccaagaaatccatccatccatagcaagggagctagctcgccggcggcgatgggcaaggactgcggcaaccacggcgacgacgacatccggcaggcgtgccggcggctgctgacgatcctcttcggcctcgccctgatcgtggccatcatcgcgctcatcgtctacctcgtgctccgccccacccaccctcgcttcttcctccaggacgccacgctccgccagctcgacctctccaatttctcca

SEQ ID NO: 2991 - DNA, 172 bp, Oryza sativa
  Clone ID: uC-osflcyp057a11b1
tttcttgcagcaaggaaaagtaggcttaggaggagggtttacattcagcagctggagtcaagtaggattaggctaagccagcttgaacaacaagtttacgtggcaagaggacagggtgctatcctgtgtgctggagattcataccagggccttttttatggccctttagctg

SEQ ID NO: 2992 - DNA, 442 bp, Oryza sativa
  Clone ID: uC-osflcyp057b02b1
tcgcttagccactgcatatcttccagcttttgtcatagcctttttttgtttcttctcttttggtacaaattcagggtctggaatacttgaatcagtgagaagaaaaaacaagatgtataaccctccaagtgcccaggagatgacatacaaagatcatgttcagaggcgccatgaggaaaaaggctgcttatatgcatgcctgtttacactgtgctgctgcttctgctgctacgagacctgcgagtgctgcctcgagacactctgctgctgctgctgacgtcgtcatgacgaagtgatatgcggactgtgacgtccactgggacactattcgttgtccatctgctttgtctgaataaaaaatgtatctatgtacttaattaattatttgagtgctgaaaatttgcaatgcgctgtgttgatgtgtttaattatccttactttc

SEQ ID NO: 2993 - DNA, 484 bp, Oryza sativa
  Clone ID: uC-osflcyp057b03b1
ttaagagataagatctgtagagctatacaatatggctcgaaatttgtgagtaatggacaaccagggcctgcacagaatgttgacaagtcgactagtctagctcgtaaagttttccgactttttaagtttgttaatgatctgcatgctttgattagtcctcctgccaaaggaactccactacccctgatcttacttggaaagtcgaagaatgcactgctatcaactttcctctttctggaccaaattgtatgggctggaaggacaggaatatacaagaacaaggagcgagcagaattcctcagcaagatagcattttattgcttcctgggttctaacacatgtactagtattattgaggtagccgagcttcagcggctatccaagtcgatgaagaaactagagaaggagcttaaacaccaggagctgttaaagaacgagcaataccagatgaaactgcagaagtgcaacgagaggcgtctcgctc

SEQ ID NO: 2994 - DNA, 251 bp, Oryza sativa
  Clone ID: uC-osflcyp057b04b1
ttaacactgttatggttaatgctggtgagattcttcagattctcactcctggtggtggtggttttggctctccttgatggctattcttgtggacgatcatctacctcgcttctggcgttaaggtgagaccacaccctgttaagagggtcaatacatgctttgcatgaatgcttagttcaggttctgtcacctctgaatctagtggacacccactttctttggctaggcagcttatttagtggactccactg

SEQ ID NO: 2995 - DNA, 239 bp, Oryza sativa
  Clone ID: uC-osflcyp057b09b1
ggcttgtcgtacgcgccgttcccggtggggtgcatgttccacagcgagggggggctcaagagcttcgagcacccgatgaaccggctgaaggcgatgccgcgggtggacagcgagggcgtcatgtgcggcgccaccttcaaggtcgacaccttcaccaagatcaactccatgccccgcgtcggcagcgccaccaactgggccggcacctgggacgacgctgccgtctgatgatggcgctc

SEQ ID NO: 2996 - DNA, 488 bp, Oryza sativa
  Clone ID: uC-osflcyp057c01b1
tggatagagggcaaaccaggtatacatgattgattttggactggcaaagaaataccgggacacttcaacacaccagcacattccatacagagagaacaaaaatttgactgggacagctcgatatgctagtgtaaacacccatcttggaatcgaacaaagcagaagggatgaccttgaatctcttggatatgtactcatgtacttcttaagaggaagtcttccatggcagggtctaaaagctgggaccaaaaaacagaagtacgagaaaattagcgaacggaagattgctacatcaattgaggctctctgtcgcggatacccttgtgagtttcaatcctacttccattactgccgttcactacgttttgaagatttgccagactattaatacctgaagagattgttcagagaccttttcattcgagagggaatttcagttgattacgtttttgactggaccattctaagtaccagcagtcacagataac

SEQ ID NO: 2997 - DNA, 488 bp, Oryza sativa
  Clone ID: uC-osflcyp057c03b1
tcggacgcgtgggcgcacgttgccaccacaggctacgcaaaattctctcccttcctcctccaccacctccactccgacgatcctcctcctgatcctgtgccggccggcgatggcgtaccggttgctggagctcacgctggtctccgcgagcgacctcaagaaggtcactctcttctcgcgcatgcatgtctacgccgtcgcctccatctccgggagcaacgtccccatgcccatgcacggcacccacgccgaccgcaacggcggcagcaaccccgcgtggaacaccgtgctccacttccccgtccccgcccgcttcgacacccgcggcctcgccctccacgtccagctccgcgcccggcgctccttcggcggccaccgcgacgtcggggacgtgttcgtgcccctcgacgacctcctcgccggcgcgcacgacggcggcgagccgaggccggctagctaccaggtgcgccgccccatgtcccgccgcg

SEQ ID NO: 2998 - DNA, 487 bp, Oryza sativa
  unsure (1)..(487): unsure at all n locations
  Clone ID: uC-osflcyp057c08b1
cggacgcgtgggcgcacgttgccaccacaggctacgcaaaattctctcccttcctcctccaccacctccactccgacgatcctcctcctgatcctgtgccggccggcgatggcgtaccggttgctggagctcacgctggtctccgcgagcgacctcaagaaggtcactctcttctcgcgcatgcatgtctacgccgtcgcctccatctccgggagcaacgtccccatgcccatgcacggcacccacgccgaccgcaacggcggcagcaaccccgcgtggaacaccgtgctccacttccccgtccccgcccgcttcgacacccgcggcctcgccctccacgtccagctccgcgcccggcgctccttcggcggccaccgcgacgtcggggacgtgttcgtgcccctcgacgacctcctcgccggcgcgcacgacggcggcgagccgaggcccgctagctaccangtgcgccgtcccatgtccgcccgcg

SEQ ID NO: 2999 - DNA, 105 bp, Oryza sativa
  Clone ID: uC-osflcyp057c09b1
agctgaactcctgcaggcaccccccctggaattccccgttctgacccacgcctcctttattgaacagggaaaaaggaaggggtcttatcgcgactagtatcctac

SEQ ID NO: 3000 - DNA, 486 bp, Oryza sativa
  Clone ID: uC-osflcyp057c10b1
ttaaccgacgaaacccgcacccactcctccggccaccgacgccgcagccggcggcgcagagaggggagatccacgccgccgcgatgggccgcaagcgcgcgctcctggtgggcatcaactacccaggcaccaaggctgagctcaagggctgccacaacgatgtggaccgcatgcaccgctgcctcgtcgaccgcttcggcttcgacgaggatgacatccgcgtcctcctcgaccgcgactcctccgggacgcagcccaccggcgccaacatccgccgggcgctggcgcagctcgtcggggacgcgcgccccggggacttcctcttcttccactacagcggccacggcacccgtctgcccgccgagacagggcagaacgacgacaccggctatgacgagtgcatcgttcccagcgacatgaaccttatcacagatcaagatttcagagaacttgtgcaaaaggtgcccaatggttgcttatttacca

SEQ ID NO: 3001 - DNA, 76 bp, Oryza sativa
  Clone ID: uC-osflcyp057c12b1
tttctatttgaggtgggtaggcttctcctaccccggtatacctttacctcctcgggtcggttccgtggttcgtcta

SEQ ID NO: 3002 - DNA, 477 bp, Oryza sativa
  Clone ID: uC-osflcyp057d01b1
tgctggacattggaggagatacttggccattcaacctttgggaaagtgtatctgagttcagcaaagccgcgcgttcaactcaatgggtccaaaagtggtttgctaaacaaagtttcttgtgactcccagcaacctcttcaatctgctatcacctccaggataacaaatttggtaagtcatacctctgagcaaacaaaagaattgactataatagaaagtctcttctggtatttcttcatgatttattttgtagtgtatactttgatttttagagtaacaaacacaggctaccagggttacaaatagagttcgctctcgggtcaagacgggtcagaattgcgatgatcagttcggtggtgcctgtgagagccattattctgaacatgatgccagagaagagcagacatctagtgaaggaagcaccccaagtggggatgttctttatggggccttttgtagcgaagacaattactctgg

SEQ ID NO: 3003 - DNA, 281 bp, Oryza sativa
  Clone ID: uC-osflcyp057d04b1
gccttcaggagattcccaaccaattgctgatcagcctattgagtgggtaaaggttactttatctgcggttccaggagttaacatggatgatgttgatgacaatgaaccaacgcggaagaaggaccatcgccgcgttccaagtacaattgccatagaggaagtcaaggctgcagcattaaaaggagaagctccacctggtcttccactgaaaggagtcggccagaatgctcaaaatatagaatctaaggcaactgatggtggagatcctaatccaactgatg

SEQ ID NO: 3004 - DNA, 324 bp, Oryza sativa
  Clone ID: uC-osflcyp057d06b1
tttttgatcagaggaaggtcggcctccctatgcgtttgaatgccatcactgtggggtaaatgcaaaggctacacctatgatgcgtcgtggacctgatgggccaagaacattatgcaatgcctgtggcctcatgtgggcaaacaaggggatgttgagggacctatcaaaagcacctcccacacctattcaagttgtggcattagttaatgatggtaatggaagtgctgctgctcctaccaccgagctagaaattcctgcaccagccactgtcaatggccacgaatcatcaacgtgagtatagcgatgtttgtcttgtggaggatc

SEQ ID NO: 3005 - DNA, 456 bp, Oryza sativa
  Clone ID: uC-osflcyp057d08b1
ttctccatccgttctgaaggctttgtggccgagttctcctcccccacctcctcctcctcctcctcctctgtagccgagctgaggccaacgcgagtagtgacattctcctgcaatggggtgcaagtcgtgcgagaagcccaggccgaactaccggaagggcctgtggtcaccggaggaggaccagaagctccgcgactacattctccgccatggccacggctgctggagcgcgctccctgcgaatgccgggctccagaggaacgggaagagctgccggctgcggtggatcaactacctgcggccggggctgaagcacggcgtgttctcgccggaggaggaggagacggtgatgagcctccacgccgcgctcggcaacaagtggtctaggatagcacggcatctacctgtgagaacagacaacgtggtgaagaactactggaattcttacctgaagaa

SEQ ID NO: 3006 - DNA, 211 bp, Oryza sativa
  Clone ID: uC-osflcyp057d10b1
tcgctcccgcttcgcgaaccacccacccgtccgtttctcgcctcgcctcgcctcgccctccctctcttccttcttaacaatggcggtacaggcccagtaccctttcagtctcctcttccacgataggtgcggcttgtctcctcttcttcgttagggcggctacttgttttaaaggcttggcctccttagggctgatggattattctgtcgt

SEQ ID NO: 3007 - DNA, 371 bp, Oryza sativa
  Clone ID: uC-osflcyp057d11b1
ctgcaaaagatcttgcttctcgagatgttgtttcaagatctatgacaatggaaatcagagaaggccgcggtgttgggccattgaaggaccacatctatctgcatcttaaccatctgcctccagaagttcttaaggagaggcttcctggtatttctgaaactgctgctatttttgctggtgttgatgtcaccaaggagcccatttctgttttgcctactgtgcactataatatgggttgggatcccaacaaattaccatggagaggtagtgactatgaagggtgacaattctgattctgttgttcctggtttgatggctgcgggagaagcagcatgtgcatttgttcatggtgcatatcgtctgggtgcaaa

SEQ ID NO: 3008 - DNA, 134 bp, Oryza sativa
  Clone ID: uC-osflcyp057e04b1
atctatgctaatctgatcattagcagaggagagttttagcagtaggattggattaaattggagtagtttcatagtttgtgtgtagtgatcttaattagctttgattagacagacagtacagtagagtagaggat

SEQ ID NO: 3009 - DNA, 190 bp, Oryza sativa
  Clone ID: uC-osflcyp057e06b1
ttccgccgccgccgccgcctctgcctcccccgtcgcctcgcgccgccaccaccccctcgcgccgccactaccactcccgctgctgttgccggcccctcaaaccctagcgcctcctccttcgccaactaccggcgccgtttctgagcgcctcccctcacgtcgccgacgccgtcgtcgagagcagccttgt

SEQ ID NO: 3010 - DNA, 325 bp, Oryza sativa
  Clone ID: uC-osflcyp057e09b1
cttatatcggaactacctctatgctaacattgtctaggtctcattagctagattaacttaactgttttcacttagtggtgttagtctgtaaagaaaatgaatacccagtcttagttgagtcttttgtaaaaaaaaaaaatggaaccaaagaatgcaattgcactggatgaacatgtgctggattctactatccgcaagaggaagcgtgtgggtgctactcaatgtgctgaggccaatgacgcccccaacctctcttagaatggtccaaaacagaatctcgctttatttcctgattcgactggacataagaagtccaagatgatgt

SEQ ID NO: 3011 - DNA, 194 bp, Oryza sativa
  Clone ID: uC-osflcyp057e10b1
tgcatatctctctggggaatgcatcgaatgtatggccacttcagacaatgtggtccgtgctggtttgactcctaaatacaaagacatacaaactctttgctcaatgctaacatataaacaggcattccctgaaatcttgttaggcgctcctgtgcactcacacttaaaggttaacaacccttcattttatgaat

SEQ ID NO: 3012 - DNA, 172 bp, Oryza sativa
  Clone ID: uC-osflcyp057f03b1
tgaagaaaggctctcaccaatccaacggtgctcgatccatccatccatccaatccgcctcgctccatccatggcgtctgcggatgcggtctcgccggcgccggcgacgtccgccgcggcgcagcagcaggtgagcgtgcgacgccggccgatgtggatggttggagttgggg

SEQ ID NO: 3013 - DNA, 360 bp, Oryza sativa
  Clone ID: uC-osflcyp057f04b1
ggcgccgccaacatgcggtgcctctccacggtctcctccgtgtcggacgcggcgcgcgccgtgatgtcgaacgagccggcgaccgtgctgggcaacagcggcagcagcggcaacggcggcgtgatggcggcggaggagatgctgcggcggtacgagatcggggaggagctgggtcggggggagttcggggtgacgcggcggtgccgggacgcggtgacgggggagcggctggcgtgcaagtcgatcagcaagcggaagctccggagcagcgtggacgtggaggacgtgcggcgggaggtggccattatgcggtcgctgtctgcgcacgccaacgtggtgaggctccgggaggctttttag

SEQ ID NO: 3014 - DNA, 472 bp, Oryza sativa
  unsure (1)..(472): unsure at all n locations
  Clone ID: uC-osflcyp057f07b1
ctcccctgccaaaccagtctcccccaaatctcctttgcgtcctctcgattcctcagcaaccatgtcggcctactgcggcaagtacaaggacgagctcatcaagaacgctgcctacattggcactcctggcaagggtatccttgctgcagatgagtccactggcaccattggcaagcgctttgccagcatcaatgtcgagaacgttgaggagaaccgccgctctctccgcgagctgctcttcaccacccctggtgccctccagcacctaagtggtgtgatcctcttcgaggagaccctgtaccagaagaccaaggacggcaagcccttcgtcgatgtcctcaggangttggtgtcctccctggcatcaaggttgacaagggtaccgttgaggttgccggcaccaacaaagagaccaccacccagggccacgatgatcttgacagcgttgcgcccagtactacgaggccggtgc

SEQ ID NO: 3015 - DNA, 339 bp, Oryza sativa
  Clone ID: uC-osflcyp057f09b1
gttttgccaaccgcttgttcttgcctctttggaaccgtgacaatattgataatatacagattgtattcagggaggactttgggactgacgggcgtggtggatattttgatcaatatggaatcattcgtgacatcatccagaaccatttgttacaggttttctgtttggttgcaatggaaaagcctgtctctcttaagcctgagcacattagagatgagaaagtcaaggttctgcagtccgtgaaccctataaagcatgatgagtgttgttcttggacaatacgaggggtacaaggatgaccctacagtgccagatgacttaaaacacctcaattttgta

SEQ ID NO: 3016 - DNA, 526 bp, Oryza sativa
  Clone ID: uC-osflcyp057f12b1
tcttccgctcggaaaaaaaaaaaaagaaaagagaaacagtgtgcgcgtttcgtgcactagtacacaggacgttggcgtggtttgttttagttgttagttgtttttggtttatttttgtttttttctttttttttttttttatttttttttttttatttatttgttttttattttgtcttttttttttttatttttttttttttttttttatttttttatttttttttttttttttttttttttttttatttctatttatttttattttttttttttttcttttttctatctttattttttattttattttttttttgtttatttatttattttttttctttttttatttttttattctaattttttttattactttttattcttttctatttttttattcttattttttcactttttttttttttttttattgtttttcttattttttatttttcttttctttttttttttttttatcttttttttattctttttttatttgtttttttatttttatttttttttt

SEQ ID NO: 3017 - DNA, 488 bp, Oryza sativa
  Clone ID: uC-osflcyp057g01b1
ttatttacgcaccgtggcaaggcgccattttcatagacttctttagggtgtgcgtgactttgtcagtgaggtcgccgcagtgtaaacgccaaccaaactcccactagcagagtagcagtccatcagcacataaacccttccattccaaccccaattagcactagatcgtcatcgctatcggctgcagcaaagaatggcaggagctgggaggactaggagcacggccatggcggcgtggtcgtactcgtcgctgctgctgcagctgctgcttctctcgatggtcggccgactagacggcgcggcgaacaccggcggcggcggtgcccggggcgccggcgccggcggcggactgcacggacgcccttgtgagcctggcgggttgcctgagctacgtgcaggaggggagcacggtggcgaagcccgacgcgccgtgctgctcggggctcaagggcctggtgaagaaggaggtggcctgcctctgccaggcg

SEQ ID NO: 3018 - DNA, 405 bp, Oryza sativa
  Clone ID: uC-osflcyp057g03b1
gaatttcctaaatgctcgcttctggttgccaaagaccctgaggacagaacagatactgtgattactgtatatggtgatgccacacctgtttcagaccaagaaaaagatgcagtacgaagtgcatacttacgaagacatcctgaggcattttgggttgattttggtgacttccgttttctgcacatcaagccaaaagccgtgcgatatgtgtctggggttgcaactgccatccttggttctggagaattcagtgctgttgagttcaaggaggcaaaagtggacccaatatctcaattctcaacccctattacgagccacatgaataaggatcattctgatgatacaaagcttattgtgcaatacttaaccactgctaaggtggactttgcttacatgcttgatgtg

SEQ ID NO: 3019 - DNA, 175 bp, Oryza sativa
  Clone ID: uC-osflcyp057g04b1
tccctttttttagttgagcttgaagcagcagagcgaggtggacattttcgtcgtcaccatggtcctttcgtcccaggcgctggccgacaaggtcgtcgtaaaggcgttcgtcgaggggcgcatcaccatgcgcaagtcggtggcgaagcccaagcccgccgcgatggagagcccg

SEQ ID NO: 3020 - DNA, 253 bp, Oryza sativa
  Clone ID: uC-osflcyp057g06b1
tttcttctggaacccagatgcaattgtattcagagtggcttgtaacagtatggcactcctagttattggatgcaaacatatttccgtgaatcaagtggttctgtgattcatccaattacgatcggtttcagctactccgattcactggctgtatctgcaatcacctggaaagacacacatgatatctttctgagaataaagatagtttactttgggccataatgctgttaacctcgcaatatcttcaagagga

SEQ ID NO: 3021 - DNA, 161 bp, Oryza sativa
  Clone ID: uC-osflcyp057g09b1
tgagagtaggactggctcggctcgctcactgggtcagctgcacacacactgcacttcggctcactctctccactgttcttcttcctcggcgaggggggaaggaggaggcgagagctcgaggcggataggaggaggagatggaggtagactcttattattta

SEQ ID NO: 3022 - DNA, 467 bp, Oryza sativa
  Clone ID: uC-osflcyp057h06b1
tccgtgttgtccatccattggaaaagatccccatggaacaattggttgacagagattttactgaaagcgagcctataaagcctactgctttggatgataccccttttacacatgtcgaagacttgaaatccttggaggtgctagctacaaagctgaagagtgcaaccgagtttgctgttgatttggaacacaaccactataggtcttttcagggtctgacctgcctgatgcagatttcaactagaactgaggactttatagtggacactcttaagcttcgcaaatatcttggtgattacttaagagaaatttttaaagacccaacaaagaaaaaggtaatgcatggtgcagatcgtgatataatatggcttcaacgggactttgcatatatgtatgcaacctttttgacacaggccaggcttcaagaatcttgcagatggaccgcaacagcctggagcatcttttgc

SEQ ID NO: 3023 - DNA, 480 bp, Oryza sativa
  unsure (1)..(480): unsure at all n locations
  Clone ID: uC-osflcyp057h10b1
gctccgccgccgccgccgcctcttgctactgcctccctccctccgccgcatactcccctcgccctccgaccactccccctcctctactcccccgtctcctcctcgccacttcgccaccccgccgccttcgccgatcccctcacccatcccgccgcgagctgagcagaggagccgtgggtttccgtcgtcctgctgcttccgcctccgtgatcgagtggtgcgttctcatcaacgggccttgtgcgctaaattatgcgatcttcatgggctgactcagctgcgaacgccgaggaatcggcgcccgcggctgctgctaaccacggcaactcgcgcctcccgcgcagctcatacgttcccccgcacctccgcggccaagcggctcctgcagcgccggcgcaagctggcgcgctgccctcggccgccgncgncgcgcagccttctgttggccagctggtgtggttgggtggccctcgctgggcg

SEQ ID NO: 3024 - DNA, 107 bp, Oryza sativa
  Clone ID: uC-osflcyp057h11b1
ttttccttaaaccctagctccgcctcccacggtggttttctttactagggttcttgtgccgacgccgacgacgccgtcgattccgaaggagttctggggtctcgaag

SEQ ID NO: 3025 - DNA, 254 bp, Oryza sativa
  Clone ID: uC-osflcyp057h12b1
aactagcgcctcatgctcacctggggggcttcttttattatccgccgtggtacaccaccaccaccatgtctggccggacggtgagctcctgctactacttctccccgccacggcacccaccatgcctcgcgactacgacggagccgtcgccaccttgttcccgtcggcacaatcgtcgtgcgaccacccgcagctcgacctgagcctgtccatccgcattgggccgacgccgccgccgtcgttgtacacgctca

SEQ ID NO: 3026 - DNA, 332 bp, Oryza sativa
  Clone ID: uC-osflcyp058a01b1
gtcgtatgaggctaagtttcattttgttgcatcttcttcatgtaccattctaaacttgctatattctactcctttctcgcacctcttcaaccactcgaaatgtaagagaccaatgttttatagagatgctggaaatcgtttgaataacttgccagcatttggtgtttggtggatataccttaccttaggaaacataattatcaataccttacgttgtttcccccagaacaaaaataaacagaatgcttggatggcgaactgtaaaagatggagtgatagggccatacatatggaaatcatacagggtagggtatgaataaatcctgcaagtt

SEQ ID NO: 3027 - DNA, 289 bp, Oryza sativa
  Clone ID: uC-osflcyp058a03b1
ctcctctttaacgtgcgactactctaccgaccgggcttgggtggggtgtatataacctttagacgaaactggcgacggcgaagactactccgtttgtggtgccaaatgtgtgaatggctcatcgaatggaatgactttctagcacatattgttggcatggggcgattggataggcacgaacttagagagacgcgcacaatggatgttgtgctagagggcctgatgtggatctcaatatgaagactatctcggtcgaaggttggggtgtaacaaagcaaggcagacaatg

SEQ ID NO: 3028 - DNA, 149 bp, Oryza sativa
  Clone ID: uC-osflcyp058a05b1
gtccagcgcctttactcgatcgcagtgcgacccaccctggaggggggagctttaagaaccatggtcgcctcctcgctgtcgacgcctaccgtggccgggctgtggttggcgccgatgtcgctcgtgcggtcgccgtctgtggctttcag

SEQ ID NO: 3029 - DNA, 182 bp, Oryza sativa
  Clone ID: uC-osflcyp058a06b1
gtgtttttaattttctaggagctggtcactgatgttaacttgcgtgcacttgtaataggcgaatccgtcctaaatgatgcgatggcgatttttgtctacaggacaatgtcgttgttcataagtcaagcgtcagctggtgagaacttctttatgatggtttagcagattgcttggagaccttt

SEQ ID NO: 3030 - DNA, 510 bp, Oryza sativa
  Clone ID: uC-osflcyp058a08b1
cgcaaacaaaaaacacttgtgtggcactgacttagttgggttttcagaagaggatgaagcgaaaattgttttggagaataatttgttctttgcaggggcaaatctggaaataaaactaaagaaggaatttgatgctgaaacagaatctaaaaaagaagcatatgaaaaggcacatcctaagaaggacgagcagaatgaaggctatcctaaaggcctaattgtggccttcaaattgaagagaatcacggttgatggtggggtgcaacaaaacagtgcagacaatgatactgccactgaagaagaaactccaaagtccatgaagaaaacatcaactggggaatctgaagagaggactaccgtgaacagtgatatggaggaacagaagtcattagacgacatgactgaagcgaaagatgtgaacgcttgggaagctacagaatctggtgacaagtgcccagttgatgccttgcttgaaagtgaaacgaatgttgatattgaaacattgatcaa

SEQ ID NO: 3031 - DNA, 301 bp, Oryza sativa
  Clone ID: uC-osflcyp058a11b1
aggtagtgtgcggtgtgccgtactacaatcaaatgttgagatcttgaggaggccattgtgtccagtgttctgccaagaggagcccgaatagctggagggatggtgggtgtattgttaagctgtggagggtgacttttatgttgaaacttcctttgctgtatgttccatgcctgtaccgcacctgcatccattcaacctcatattcacaactgatgtaatcatgataaaattgaatgtgtcaatgatggtcgaatcgtatgccattatatgcgaattgactgttggttctattgttatgatc

SEQ ID NO: 3032 - DNA, 494 bp, Oryza sativa
  Clone ID: uC-osflcyp058b01b1
ctcgacataagagctccctggcttctctgtaggggggtcactttggtctatggagggggggacgaagaaagttttcacagatcaggtggaggatggaaagcccaggaaggacggccggccggcggtagggccagtgttcaggagtgctctgtcaaaggatggatttccgccacttgagcctgacatgaaaacatcatgggacgtgttcagggtcgcagcaggctagtacccagataatcggatgctcggatggcgtcctgtaaaagatggagcgatagggccatacatatggaaatcatacagggaagtgtatgaagaagtcctgcaagatggatctgctttgcagcagctgggggtgaagccagcttccccgtttggaatatatggatcaaactgccctcagtggatagtagcaatgcaagcttgcatgggttccgtttaatctgtgtccactctacgaaaccttaggtgccagatctgttgctttattattt

SEQ ID NO: 3033 - DNA, 376 bp, Oryza sativa
  Clone ID: uC-osflcyp058b04b1
ctttttatgcttttagacaaccagttactctctaggaacgttggctggctacatcttcctggaaaagactacaagtagttggaacagtattgttagaaacagataccattgaagatcaactataagatttccatcttaggctctggatacaaggtcagaatgttcatagagaacagatcaaagaaaccagaaaacgttaacgtatcaaccatgaatctagccgatgcaaacggtttcgacagaactcggatagaagccattcaggatggacattacagttgcctgaggtggaaaatccgtagaggccttagcattacaaggtcgtacgacatacgaagaacagttgatgtgaaaggggccgattagtgcattaagt

SEQ ID NO: 3034 - DNA, 281 bp, Oryza sativa
  Clone ID: uC-osflcyp058b06b1
ccactcctcgcttctcccgccatcttctcctcctccacggccagtggccgccgtcgcgttccgctcgctgctacaccccgccgccgcggccctcaccgagcgtgtgccactgcctcccgctcacctacggctccagggccttcaccgccaccgcgtcggcgtactcaacctcttcgtcgcctccggtcatcgccgccgcattctgcttcccctcgccgacgacggtggagagttctcttcggaagaggaggagtacgcccactaggaggaagaagaggggg

SEQ ID NO: 3035 - DNA, 517 bp, Oryza sativa
  Clone ID: uC-osflcyp058b12b1
gccgccgagctacctcaccggcgagttcccgggcgactgcgggtgggacaccgcggggctctccgccgacccggagacgttcgccaagaaccgggagctggaggtgatccactcccggtgggcgatgctgggcgcgctcggctgcgtcttcccggagctcctcgcccggaacggcgtcaagttcggcgaggccgtgtggttcaaggcgggctcgcagatcttcagcgagggcgggctcgactacctcggcaacccgagcctgatccacgcgcagagcatcctcgccatctgggcggtgcaggtggtgctcatgggcgccgtcgaggggtaccgcatcgccggcgggccgctcggcgaggtcgtcgacccgctctaccccggcggcgccttcgacccgctcggcctcgccgatgaccccgaggcgttcgcggagctcaaggtgaaggagaacaagaacggccgcctcgccatgttctccatgttcggctttttcgtcaggccattgtacccgcaaggg

SEQ ID NO: 3036 - DNA, 443 bp, Oryza sativa
  Clone ID: uC-osflcyp058c03b1
caaaccttaaccccggaggagagggaggagcagccatggccgtgggcaagaacaagaggatctccaagggcaggaagggcagcaagaagaagaccgtcgatcccttttccaagaaggattggtacgacatcaaggcgccgaccgtgttctccgtccgcaacatcggcaagaccctcgtctccaggacccaggggaccaagattgcatctgagggtctcaagcatcgtgtctttgaagtctccttggcggatctttagaatgacgaggatcaggcttacaggaaggttagacttcgtgctgaggatgttcaggggaggaatgtccttacgaatttctggggcatgagtttttaccacggacaaacttaggtccttggtcaagaaatggcaaacattgattgaagcccatgtggatgtttaagcccacagataactacattgctc

SEQ ID NO: 3037 - DNA, 195 bp, Oryza sativa
  Clone ID: uC-osflcyp058c05b1
accacgtctccttctcttctcctcccctaaaatccccaattccggccaaaccctaggcccccccaaatcgcctcactccaccaccccacgcttccttcgccgctaagtatatccctcccggcgaccgcgaatcggatcttgagagtgagagagaggatgggggaggtggatgagagggcggagatgactgcgatg

SEQ ID NO: 3038 - DNA, 428 bp, Oryza sativa
  Clone ID: uC-osflcyp058c07b1
attttctggatagccaagctgagtacgatgaatcatccggagaggatcaggatgccaaggtttcaccatccgctgaggatgaagaagctggcaagaaagctgaggatggcaggtccaaattgtcagacgaacagaaagtgaaacagcagagaccacataagattcagatatggtcggaaataaggccctccttaggccacattggggagatgatgagcttgcgtgtcaagaagaagcaatcttctgcagataaggagaatgcagcgaatgaactccaatctgcaaataatgaagaaatcaaaccctcagaggactccgatgatgagttctatgatgtagagaaagttgatcccaaccaagaagggcctgtagctgatagtgctgatgctgattcaagcatgaaatgtgatgcgaattcagaagggcat

SEQ ID NO: 3039 - DNA, 547 bp, Oryza sativa
  Clone ID: uC-osflcyp058c11b1
cctcctcctcgcgctcccccgattcgaagcgtgaagagaggagcggcgcttgcgagaggagagagatggcccgtaccaagcagaccgctcgtaagtccacaggaggaaaggctcccaggaagcagcttgcaaccaaggctgctcgtaagtctgctcccaccactggaggagttaagaagccccaccgttaccgccctggaactgttgccctccgtgagattcgcaagtaccagaagagtactgagcttttgatcaggaagctgcccttccagaggcttgttagggaaattgcacaggacttcaagaccgatctgcgtttccagagccatgctgtccttgccctccaggaggctgcggaggcataccttgttggtctcttcgaggacaccaacctgtgcgctattcatgccaagcgtgtgaccatcatgcctaaggacattcagctggctatgaggattcgtggtgagagggcttaaaattccctcggcgactcctttgacaaatgaagcatgcctcgtaatgttagtagggggtttaatcttttgct

SEQ ID NO: 3040 - DNA, 528 bp, Oryza sativa
  Clone ID: uC-osflcyp058d05b1
agaaccgatcagctttggtgttcgatcgatcaagacgaggcgggggcggggctgatcgagatggcggcgccgccggcgaggtcggtgagcgtggcggacagggcgctgcgaggggtggcggacctgatcaagctgctgccgagcggcacggtgttcctcttgcagttcctcagcccgctcgtcaccaacaacggccactgcgccgccgcctacagcagggtcctcagcgccgccctcctcgcgctctgcggcgccttctgcgccttctcctccttcaccgacagctacgtcggctccgacggccgcgtctactacggcgtcgtcaccgccagggggctccgcacgttcgccgccgatccggacgccgacgcgcgggacctgtccgggttcaggctccgcgccggggacttcgtccacgccgcgctttcgctccttgtctttgccaccatcgccctccttgacgccgacaccgtggcgtgcctttacccggggcttgaggtcagcgagcgcaccaatgatgggccagct

SEQ ID NO: 3041 - DNA, 481 bp, Oryza sativa
  Clone ID: uC-osflcyp058d10b1
catccacagagatattaagcctgacaacctgcttctcgacaagaatggtcacatgaagctgtcagattttgggctgtgcaagccaattgattgttcaaagctctcaacattgaatgaagatgaaccgatgggtgatgacaatttgagggaatcaatggatatcgatagctctttctctgaaacaacaaatggtagaaggtggagaagtcaacatgaacaacttcagcactggcagatgaacagaagaaaactggcattctcaactgttgggacaccagactatattgctccagaagttctgctaaagaagggatatggaatggaatgtgactggtggtctttgggtgcaatcatgtatgagatgctttgtggttatccaccattttattctgatgatccaataaccacatgccgaaagattgttcactggagaaaccatttgaaatttccagaggattcaaaggtgtcttctgaagcaagg

SEQ ID NO: 3042 - DNA, 133 bp, Oryza sativa
  Clone ID: uC-osflcyp058e01b1
gtgctttttcaatatattgacgaacacacaatataaaacacttgcgttaatgctgttagcgtcacggaaaggatcgactaagatgtttataactctcgtacccaaggtattcattaaggaccattggtgagta

SEQ ID NO: 3043 - DNA, 165 bp, Oryza sativa
  Clone ID: uC-osflcyp058e02b1
ctcgcctgcgcttcagagcatcatggaccaactaaggccaacagtgtttaagatccgattaacccggttaactgcaacgaagagcaattagagctagccagcttatctatgtggggaggtaatttgtatggtgtccgaaggctttttattgagaagatggatgac

SEQ ID NO: 3044 - DNA, 117 bp, Oryza sativa
  Clone ID: uC-osflcyp058e07b1
tcgtattttaagagaggagaagccaaggaggataggcggtggctgtgactgggcgaaagtgatcagagctcgtgaggatgaaggcgactgtgaagggcatgtactagggcgacaagg

SEQ ID NO: 3045 - DNA, 334 bp, Oryza sativa
  Clone ID: uC-osflcyp058e08b1
aaaaaaggttgtgttcgatccccaaccgcgatgtgctagggtttggaggcccggtgttcaatcccatcttccctccgtgcagccgctaggatcagttttatcttctttctttctttctttccgtgtcattgttattagattagatcctaagttccctgttgagattccttgctgctcatgggggcctgccgaaaactacctcacctgattacgttttgtttttggttttagccccttatttttttttatatgcagatagcgctcaccggaaattccaagcagtatatagaattatagatcgccgacatgtgtaggcgtttcttgtttcatgatt

SEQ ID NO: 3046 - DNA, 144 bp, Oryza sativa
  Clone ID: uC-osflcyp058e11b1
ttaaatttttcacctggagcgagcagttatacgatgtggggtaagttttagcaggatactccatgaaacccataatccttgaggtcgactagcttattatctctctggtcttaacttcactaatctatagctgactgcttgatc

SEQ ID NO: 3047 - DNA, 288 bp, Oryza sativa
  Clone ID: uC-osflcyp058e12b1
gcggagagagactctctctctctccatcaggcgttaactgagctcgtacggccggcgctggcgaagaaggcgacggaagaagatatcaccgaattccacaggataaatgccgctttctgcagcagctgggttgagatgggggaagaaatcaagaacggagaggagggaccagacatggctgcaccgggcgaggaggagcaggagcaggggaggaaaggcatcccgtctctgctctcctccagggaggagaacattttcttttacattactcagctgaatggatggaca

SEQ ID NO: 3048 - DNA, 395 bp, Oryza sativa
  Clone ID: uC-osflcyp058f04b1
cggacgcgtgggtgagaattgatagtaagatttcttttcattctttgaagtggtttttaggcacctttggtgctgaaggccaaatgtgtttgttatcagttcacttatatgcatgtgtgggtggtctctgtgttcttaaaacgaattgtcacattcataccctgtgatttgagatagtaagagatataagcacttataagaaacataaacacaatgcagttgaagaattgaacctttaaggaatagaggcattgagttggcttcattatctagcaatttggaaagcatttatgtggacctgcaacaggtggttcttagttctaacattattgaaaattattcatggattttatacttcgacaaactgatgttttatacatgacaatgagattaac

SEQ ID NO: 3049 - DNA, 458 bp, Oryza sativa
  Clone ID: uC-osflcyp058f05b1
ggtttctacagatggctgtgatgggatcaattcagttcaaatgagtgaactgggatccagagtgaagcctttcacaagtaggttagtttctgaggaaagcacaaaccttgcaacagtaactgttttcaataaaagttctactgatcttggctggagcaatgataaacttgggcaaacatctcaacaaagcatatctgaattgaagaaccaggatcttttggatgttgattctggaactagtaaaattggacagtcaggtcacgacaaagttgaacatgtcaccaatgaattgagcatcttcaagaaagctgcagatgtagatgatgatttggacctctccgattctcatatgaatgacaacccaggttcttctgatcgtggtatgtcccatgcccatgaagaagagggtgctgatgcaactattagtaataatcttacctgtactgacagtagcaatg

SEQ ID NO: 3050 - DNA, 361 bp, Oryza sativa
  Clone ID: uC-osflcyp058f07b1
ctcgaatcgcgggggggaatccgccggttgatgcagcagaggggcctcgcgcacaaccgccgctcccgcggcttctcccgatcccgccgcgccgtcgagggcgcctaaaccacacgccttttttttttttcccttaaaaacgaatagatctctctcaatttcctgaaacttataataatttcaaaaacgccctagacgaggacgaggagacgatcgagatggacgccgtcgcggcgaatgggatcggggaggtggagaggaaggcgcagcggagctactgggaggagcactccaaggaccctaccgttgaggccatgatgcttgactcccgcgccgtctgaccttgacatggaggagcgcc

SEQ ID NO: 3051 - DNA, 488 bp, Oryza sativa
  Clone ID: uC-osflcyp058f09b1
cagcaattgcactagcatctgttagatttcttactggtctgcgtgtttacctcgataacccagcaaaagtaaagcgcatgctacttcctaccaaagtatccaccagggctggtggaaagaaagatgtttcaaagtgcgactcgagttccacaagcctcatcagtttgctgatgggagttagtgtcttgaagcaggctatcatagacttgcttcttgatataatggttgagtgctgccaaccttcagaagaaagaccagcatatgtctcatcctcagcaagttccaaaacttctcctgactcgaatggggctagctctccaccagagctcaatgttgaaggtgaactgacagaatgtgctttcagtaataagtatgaaaggctgaaacctggcaatgatgatatccatcataggctttctgtacaaacacagataagtgtacaaatgatattcctgccagagttttagaacagtcctgttcttcccctg

SEQ ID NO: 3052 - DNA, 342 bp, Oryza sativa
  Clone ID: uC-osflcyp058f11b1
cgaaatatttctccccaatctcgcgaggctctcgtcgtcgaatcgaatcctctcgcgtcctcaagatgcagatctttgtgaagacattgaccggcaagactattaccctcgaggtggagtcctctgacaccatcgataattgtcaaggctaagatccaagataaggagggcatccccccggaccagcagcgtctcatcttcgctggcaagcagctggaggatggcaggacccttgctgactacaacattcagaaggagtcgacccttcaccttgtcctccgccttccgtggtggcatgcagatctttgtcaagactttgaccggcatgactataaccccttg

SEQ ID NO: 3053 - DNA, 302 bp, Oryza sativa
  Clone ID: uC-osflcyp058f12b1
gcgggtgggacggtgatccacaactgcacggtggcgccggacccggacctggagaagttcacggacaaggtgatgacgtacctggtgcgggcgtggaaggagtactcgcggaccatcttcgagcagaacgagatcggggcggaggtggatcctgtggggtggctggagtggaacggcaactttgcgctggacaccctttactacgcggaggttgacaaccatggacccggcgcctacatgagcaagcgcgccaagtggaagggcgtttattacataacctgctaggaccgtttgaaggagtt

SEQ ID NO: 3054 - DNA, 503 bp, Oryza sativa
  Clone ID: uC-osflcyp058g04b1
cctgaccatggtgtgccacatgacagtgcttttgtacgaaaaattttgaaaagattatatggcattccaaaagagcatccaatagtagcacattgcagtgcaggtattgggagaactggtgcttatatcaccatccacaacactatagagaggattttacttggtgacatgtctgctttggatctttctaaaactgtcaaaaaatttagatcccagcgacctggaatggtccaaacagaggatcaatacaagttttgctatatggcagttgtctctgagctgaacgacctgctatcaaatttaaaacactgaatcatttttatggaacaatcagtgccctgggtatctctgacagattgtcgcccttcaactccctcaattcttaagcctagctaacagcattcatgtatgctgatgatgtacagcatgaagacctgaaaattcatgctttagcatgaaggcttcttttactttctccacaccaagaatccccgtgtatgatc

SEQ ID NO: 3055 - DNA, 575 bp, Oryza sativa
  Clone ID: uC-osflcyp058g05b1
cggacgcgtgggcgcgattcggagggaaaccctagctagctcccgctctcgatcccgcgcccgccaccgctctcggcaagatgttcctcacgaggacggagtacgaccgcggggtgaacaccttctccccggaggggcggctgttccaggtcgagtacgccattgaggccatcaagttggggtcaactgcgattggattgaagaccaaggatggtgttgtccttgctgtggagaaacgtgtgacctcaccactactggaaccaagcagtgtggagaaaatcatggaaattgatgagcacataggctgtgccatgagcggccttattgctgatgctagaacattggttgaacatgctcgtgttgagactcagaatcataggttctcatatggggagccaatgacagttgaatctactacacaagctatctgtgacttagctctgcgttttggtgaaagtgatgaagaatcaatgtcacgaccatttggaggttctctccatattgttgtcatgatgagaacggacccagcttgtactacactgccccataggacccttttggcatgccatgccaag

SEQ ID NO: 3056 - DNA, 441 bp, Oryza sativa
  Clone ID: uC-osflcyp058g06b1
gcgccggcgccgccacttccctctcgcatcttctcgcgctcaggggccaggtaagcgaagatgtacaccgcgaggaagaagatccagaaggagaagggcctcgagccctccgagttcgaggactccgtcgcgcaggctttctttgacctcgagaatggcaaccaggagctcaagagcgagctcaaggacctgtacatcaacaatgcagtccagatggatattgccgggaacaggaaggctgtggtgatccacgtgccgtaccgtctgcgcaaggcattcaagaaaatccatgtcaggcttgtcagggagctcgagaagaagttcagcggcaaggatgtggtaattgttgcaacaaggaggaatgtgaggcctaccaagaagggctcggcttgtcagcgccctcgcacaagaactcttactgctgttcatgatggtatcttt

SEQ ID NO: 3057 - DNA, 475 bp, Oryza sativa
  Clone ID: uC-osflcyp058g07b1
ggtagatcgcatggagtcttgagagagagatgccattctgcgggtcccagtcaagtaaaccccctgatgtgttggtgatcacccctgcccccccttttgcttatctgatggctgatgcaatgcaaaccctatggctttagctagtatgagatgtagactgcctattgtttatccttttgttcctttttcttctcttggcagaaagatttagggccaagatttatcattattgctattgcccctctcaacttctcccaactctctgatgtaaatatttatctacgtagccagccacccagccagaagtagagcagtagtagtagagttaccccctaccttgtattaaccagcagcctattcccccggataaatttgtgtaagctctgtagctcgagataaaaaaaaatggcgatcgaacgaacgaacaaatggcgtatgtatggtctgacctttgatatacatttttatcaatgaa

SEQ ID NO: 3058 - DNA, 459 bp, Oryza sativa
  Clone ID: uC-osflcyp058g08b1
ataaattccaccaaccccccctcttctcgtctctcgccttcgccaccttcgaatcgaaactaatcccccacacctccgcgtgcctccccccaatctcgagcgcacggaagccgccgccaatggcgctcccgaatcagcagacggtggactaccccagcttcaagctcgtcatcgtcggcgacggcggcacgggcaaaaccacctttgtgaagaggcatttgactggcgagttcgagaagaagtatgagcctactatcggtgtggaggtccaccccttggatttcttcactaactgcggcaagatccgcttctactgctgggatacagctggtcaggagaaatttggtggactcagggatggttactatattcatgggcagtgtgctatcataatgttcgatgtacttctcggctgacgtacaagaatgcccaacttgtcaccgggatatatgcagggtc

SEQ ID NO: 3059 - DNA, 513 bp, Oryza sativa
  Clone ID: uC-osflcyp058g10b1
ttcgttacgacgaaaaccctagccgtcttcggaatgtctaaggcctaggccgtcgccgccggctacgtcctcaagccttacccggagatgggagtcgtgttggagaatgatgtttttatatattattttatcaaatcttattcatttgttctttcttttttttttttttttttttttttcctttttctatatttattttttttttttttttttttttttctttattatttattatctttgttctattattttgtttttttatttttttaattttttttttaaattgatcattatcttttctttttattatatttatttattattcatttattatattttttttttacttcttatttttaatctcttttttttatactctgtttttttaaatttttattttttcttttatattattatttttaattattattcctattattatattattatttttttttattttttttcttttatattttttcttattttattatttttttatttatacttttt

SEQ ID NO: 3060 - DNA, 439 bp, Oryza sativa
  Clone ID: uC-osflcyp058h07b1
ccccgacaccatcgcacccagccgccatggcctcctcctccaagctcctagccctcaccctcacctcctccttcctccgctcctccctcctgcccgccccgtcccgccgcctccccaccggcccactcctctccctccgcttctgctccgccgcgggggatgtcgccgacgctcctgccgccgccgcagcaccagatcatccgtggcccgagtggggcgatttcctcgagaagcttcgggccaaggggtacttcgagcagcccaccctcgcgtctcgcgctgatgctgcggagggggaggtggctgcgaccgccgcggcggcggcggcggctgatgtggaggaccctggggcctcggtcgacaattacccatcccaggacctgaacaggttgacgaacccatgccttcagttcggccgagagcgcttccatctccttag

SEQ ID NO: 3061 - DNA, 511 bp, Oryza sativa
  Clone ID: uC-osflcyp058h10b1
gttggaggcggaagccgtcatccaccggatcgccgtgacgccatccacaacacctgagctgaggccgccgccgcgtcgtcgtcgtcgtccgtacatcgccgccggatcgagccgcgccgcaagcggtaggagatgaggcccgcggtgagcagggccgccttcgcgtccgtgcttctggcgccgcgcgcggtcggggtcgccgtccgctgcgcctccttcttctcttcggtcgtcttcccgtcggtcgccgtcgtcacttacgatcacgcgtagattattaaggaggacgccgtaaccgatccaccggagcatcttagcttgttgctgaatgtgctccatgcacgaggtgaaaagcttgtttcttcaggggcgaaaagaggcccgatttccttgttggtcccttagcagaaagtccagcagggtaattaacattactactgagaagggcaactgttcctagcgggatggaaatgccctggtggaagtttgtaatacggcctattgctttggc

SEQ ID NO: 3062 - DNA, 441 bp, Oryza sativa
  Clone ID: uC-osflcyp058h12b1
gacaaactgagtttggaagttaagagcagaagaagatgcggggagaccacgggtactacggcgggagggactcgccgacgcaggggtacggctacggcggcggctacggctacggaggcgggtatggctacgacgccggtgggtactactccggcggcggcggcggctacccgacggctggggcggcggcggcggcgtacgaggacccgatggtcgggaggaggacgcacgacttcccggcgccgatgaacgagctggagttccagccgtcggccacgtgccccaagaactacgtcatcttcgaccagacgtgcaccaagagccgggtcatgttccacccctcgctggcgcacaagttcggcggcgggtcgtcggcgtacgacaacaacgtgtacggcggcggtggagcgcacgacgccgacaagggcgcgttcagggaca

SEQ ID NO: 3063 - DNA, 526 bp, Oryza sativa
  unsure (1)..(526): unsure at all n locations
  Clone ID: uC-osflcyp061a04b1
tcgtctcgcgttccctcccctctcccctccggccatggcgtccaagcggatcctcaaggagctcaaggacctgcagaaggatcccccaacctcctgcagcgctggccctgtgggagaagatatgttccactggcaagctacgattatgggtccagcagatagtccatatgcaggtggcgtcttcttggtttctattcacttccctccagactatccgttcaaaccgcccaaggttgcatttaagacaaaggttttccacccaaacatcaacagtaacggaagcatctgccttgatatcctgaaggaacagtggagccctgcattgacagtgtcaaaggtactcctctcaatttgttctctactgacggacccaaacccagacgacccgctagtttcggagattgcgcacatgtacaagactgatcgggccaaatatgaatcaactgcgaggggctggacccagaaatatgcaatgggcttgacgacgtangccgatagtgttctctagcgatatatgttatcttgg

SEQ ID NO: 3064 - DNA, 524 bp, Oryza sativa
  unsure (1)..(524): unsure at all n locations
  Clone ID: uC-osflcyp061a05b1
tcggttagatagcttattggagagaaaaaagggtcgaagcgcaagcaaatcgatcagcaacacaagatgaagaagatgcggatggcaatggtgagcctggccctggtgctggtggggcttctcctcgtcgccaccactgctaacgccaagaacgcccatgccggtggcttgaagaagggcggctctgaagctgaaggccgcgtcgtctacgccgacatgagattggtcgttccctccgactccgactccgcccccgcccccgcccctgcctccgcctctgatgggccagcacctgcgccatcccccaacaattaattcaacatcgacctagcatatatatatacgtatatatttgntattttcatgtgttgttttcgcattttatataaccatgcgcgctctaattgtacatgcagccgattgatgtgcatttgatttatgcctgctcatttttatttctttctttttatttacgttaaatgaaacactttctccatgcatacatgggttgtcttatttattta

SEQ ID NO: 3065 - DNA, 524 bp, Oryza sativa
  Clone ID: uC-osflcyp061a06b1
tcgttcccatcgcgccgccacctctccccaaccctagctagctccccctccttccccggcggcgacatcgacgatggcggcggctgcggcaggcggcggcgccccgcgggcgctctcccagcgggagcaggacatccagatgatgctcgcggcggacgtccacctcggcaccaagaactgcgacttccagatggagcgctacgtctacaagcgccgatccgacggcattttcatcattaaccttggcaaaacctgggagaagcttcagctggctgccagagtgattgttgccattgagaacccacaggacatcatcgtgcagtctgctaggccttatggtcagagggctgtcctcaagtttgcacagtacaccggagctcatgccattgctggcaggcacactcctggtacatttaccaaccaactgcaaacctcattcagtgagccacgtcttctcatccttactgaccccaggacagatcatcagccaaataaggaggctgctcttggaaacatccccacta

SEQ ID NO: 3066 - DNA, 512 bp, Oryza sativa
  Clone ID: uC-osflcyp061a09b1
tttttcccggcggcggcgcagcagaggatatcagccatggtgaagtttctcaagcccgggaaggcggtgatcctgctgcaggggaggttcgcggggcggaaggcggtgatcgtgcgggtgttcgaggagggcacccgcgaccgcccctacggccactgcctcgtcgccggcctcgccaagtaccccaagaaggtgatccgcaaggactcggcgaagaagacggcgaagaagtcgcgcgtcaagtgcttcctcaagctcgtcaacttcacccacctcatgcccacccgctacaccctcgacgtcgacctcaaggaggtcgccgcggggcccgacgcgctcgccaccagggacaagaaggtcgccgcctgcaagtccgccaaggcgcgcctcgaggaccgcttcaagaccggcaagaacaggtggttcttcaccaagctccgcttctgagctctctcctgcggcggcggcggcggcgatgggatggtactggtgcacggccatctcatcctttt

SEQ ID NO: 3067 - DNA, 403 bp, Oryza sativa
  unsure (1)..(403): unsure at all n locations
  Clone ID: uC-osflcyp061a11b1
ttcgtgctcctcttcctcatggcgatctcgaaggcttggatctcgctgctgctcgcgctcgccgacatgctgtcggcgccggcgtccagggcggaggaggcgccggcggcggatgaggaggcgccggcggcggaggccgtgctgacgcttgacgcggacggcttcnattaggcggtcgccaagcacccgtacatggtcgacgagtactacgccccgcggtgtggacactgcaagaagctcgctccagagtatgagaaagatgcacaagagctaagcaagcacgatccaccgattggtcttgctaaggatgatgccaacgacgagaagaacaagccaagtgctaccaagtatgataaaacatggcacagcacaccggaacatattcaggaaccagggcaagaac

SEQ ID NO: 3068 - DNA, 503 bp, Oryza sativa
  Clone ID: uC-osflcyp061a12b1
gttctgagttggaagcgatcgatggcggctactacgacgggacgagttgttgcactcggcgcggtgaccatggaggtggcgctgacattcctcgccggcggcagcggacgccgactgatacgacttgtgcttgaaggactgcatggccagggagaacaacatggtccactactgcagctacacctgcgacaagacgtgccagccggacaagcccacgctgaacttgtcgtcaacgtggtcccggctcaccggcgacatggagtgccaactctcctgcgccttgagctcctggcaccgactacttacggacagaaagggcgtcctggaggcctgcttagggcagtgctacgactgctgcaagaccacggcagcggccagactgccgaggcctctccgtgccggccactacgtgctctctagtcctgctgatgacgaacaccacgagacagaccaccgctacgggtgctctagcccccatgatgacgcacaccatgatccggacc

SEQ ID NO: 3069 - DNA, 517 bp, Oryza sativa
  Clone ID: uC-osflcyp061b03b1
tttttgaactgcctgttgaaattattgatacccgtctgatccaagcccgtgatatccttgaagatctgctgaagcctgtggacgagtctcaggacttcttcaagaagcagcagctccgggaactcgccatgctcaatggcaccctccgtgaagaagggatgcaaagatctggctcatcttcccctttccacaacagccttggaatgaagagggcgaagacaagggggtaagtgagcaagtgttcatgatgggaggaccaatcgtctattctgagaccgatgctgaagtatgcctatggggttgccttgctggctgatggcccaaaaacggtctcgcaccgccagcatcggagcggcccgtacttgataataccatatatctggagttgtgtattcctgctaccgcctaccgaggggtctggttatggcaacgtagggtgttgggctatatattgggatgtgcatggtttggtggtagctatgtggcttgtgtattgctatgaactgatatctggggt

SEQ ID NO: 3070 - DNA, 492 bp, Oryza sativa
  Clone ID: uC-osflcyp061b04b1
tttttcacccaacggattaacatggtggcgccggcggggagcttcttccaggaggccgccctcccggagcagcggctcgtcgagggcgtcgccttcccggcggtgctcgtcccgagcgccgccgccgccgcggccggtggcggcctcgacgcgttcctggactccttgcggtcggagagggcgtccacggcggagccgctgctgcggggcgccggcgcggtgctgctccgcgggttcccggcgcgcgccgcggcggacttcgaccgcgccgtggacgcctttgggtacgcggagctcccctacgtcggcggcgccgccccgcggagcaacgtggtggggcgtgtctttaccggcaacgagtcgccggccgaccagaagatccccttccaccacgagatggcgcaggttccgacatttccggcgaagctgctcttcttttgcgaggtggaacccgagaatggtggcgagacaccgatagtgttgagccactac

SEQ ID NO: 3071 - DNA, 508 bp, Oryza sativa
  Clone ID: uC-osflcyp061b05b1
ttatgaactccttcctgctggtgatgacgcaatatctcgtggagtgaatgggatgaagctctatatggtcgcaccatttttgcagggtctaaaagcctggatagccacacatcgtcacccacagtatcagaaatcagacacgtctgctagaggtactgtgtggaaagcgaagaattcctcaactggagcggcgcctgttgagaaccccgttattactagaacaggatctgacccacaaactcttgacagccgcccaggtaaaagcttccgaaacttcaggttcgacacagcgagtatcctgcagtccatggaagcttccttcctacgtacctaggagcctgacaaagcatcaccccatgtgtgtatgcttgatgtgtatagactatgtaagccaagggcgtgtcttctgttgttaactcagctttttcttcacttttctagttgtatctgtaatcctgaatgcaacagatgcttctaccattgtgataatatccctacatttcgtgca

SEQ ID NO: 3072 - DNA, 496 bp, Oryza sativa
  unsure (1)..(496): unsure at all n locations
  Clone ID: uC-osflcyp061b06b1
tcgcacatccaacttaagcaaagcaaagtgagagctcgccgatggccatggccgtcgagaggaacaacgtcgccgcggcggcggcggcgctgctggcgctcctgccgatgatgatgctgtcctccacggcgacggcggcgcgccccgtccatggcggcccgcccggcgagctcccgccgatcatcatcacaaccccaccgacggcgataagcggggagagcgacttctccgttctgaggaaggtccccacgggtcctgaccccatcacctccgacccgcctccgccgccgccgccatcgacgccgactcagttctccgttctgaggaaggtgcccactggtccggaccccatcacctccgacccgccgccgccgccattgtcggagttcccggttctgagggaggtcccctcgggtcctgaccctatcacctncgacccgncgncgncgncaccgncattgacggagttcccgattctgaggaaggttccccgagg

SEQ ID NO: 3073 - DNA, 502 bp, Oryza sativa
  Clone ID: uC-osflcyp061b08b1
gtttttcttttgtgacacatatagtgtaggtttacttccagcttcgtcgattaccagacggcaccggcgtcgcgcgagcgagcttgatcttgcgccttgtgcctgctagctgcttcggcggcggcggttatcttcttccgatctgtaacagccccgatcaagaaaggatccaacccacctaggaggactaacctgaacgtgctaatgagttcaaagctagtaacatcacctctgaaatccatggagcagggccatctagagcaacctctgcgcgatccgcaggcgccggcggagcagcatgacatggggttatctcccctgacgctcctcggcttcgccttcctgaccttcaactcgggaatggcagtgtacagatcagatagagacttggcaaccatcttcttcgtggtcttctcctacgttgacctcgtatcgctcttctacttcctccgattatttgagaagacgccgccggagtcgcctcgccgccaccacatcaaga

SEQ ID NO: 3074 - DNA, 515 bp, Oryza sativa
  Clone ID: uC-osflcyp061b09b1
aatttcactagagcaccggcggcgtggttgcgggcggcggcgctggttcggctccttcgctcggctcggctccgccaccgcgccggaggctagggttctgcgaggcgggaggcgtacgcggcggcggcgacagtcgacggagcttccggagcaggagagctccgacggcgcacgctcctgcggctcctcctgcttcccgtccaatctcgcgacgccccccgggcagattcgaggacgaccggaggcggcgaacggcgacccccccgccggataccggcagactaggttttctttgttagcataagcttgtgaaaatttagcttgtttcttacttatggataactcacacgaacagccattaccccctggtgtcggggcatggccgccgccaccttccattcatcctgcaaaatttcaacctaatccacagccttatgcaacaccttatggcgctacacccaacaatggcagcaatcacaatgcagcgagctactctgctgctgcacaacccacca

SEQ ID NO: 3075 - DNA, 508 bp, Oryza sativa
  Clone ID: uC-osflcyp061b12b1
gttggggctccaggggctgctcagaggagtcatgctgagccctcctccatgaacatgcctgctttcagcatcgaagagaagccggccgtcatgtcagcaggcaacaaaaccatgtacaacacaaatgcttatgcctaccctgctgctgagtacaccttacaggagccatttgtgcagattcagaatgtctcatttgttcctgcaatgaacgcgattgaggatactttcgtgaacctgtcctctgatcaagggagcaactcctttggttgctcggactttagccaggagaatgatatcaagacccctgacataacttccatgcttgcaccgaccatgacaggtgttgatgactccgcattcctgcagaacaatgccagtgatgcaatggtacctcctgtgatggggaatgctagcattgatcttgccgacctggagccggacatgaaatttctgatcgatggtggatcggatgagtcgattgacacccttctgagctctggtggatctc

SEQ ID NO: 3076 - DNA, 79 bp, Oryza sativa
  Clone ID: uC-osflcyp061c02b1
tcgttggaatgctcattatttggacatagatcgggtctatgaagaagtagattgcattgcatacgcggcgacattgaat

SEQ ID NO: 3077 - DNA, 486 bp, Oryza sativa
  Clone ID: uC-osflcyp061c05b1
ttcgtcccgaggaagggcggcgacccaccccccccaatcgccaaaaccctaactccgatccgatcgagctctgcttcccatggcgactgccgcgagccaggcgagcctcctgctccagaagcagctcaaagatctcgcgaagaaccccgtggatgggttctcggcggggcttgtggacgatagcaacgtgttcgagtggcaggtcaccatcatcggcccgcccgataccctgtatgatggaggctacttcaatgcaataatgaccttcccccagaattatccgaatagtcccccatcagtaaggtttacctctgagatgtggcatccaaatgtttatcctgatgggcgcgtatgcatttctatccttcatccacctggcgaagatcccaacggttatgagcttgcgagcgaacggtggacacctgtgcatacagttgaaagtatagttctgagcatcatttcgatgctctctagtccaaatgatga

SEQ ID NO: 3078 - DNA, 506 bp, Oryza sativa
  Clone ID: uC-osflcyp061c06b1
tcggaacacccgtgagacagcttttgctatcaggaagttgcctctgggcaaggccaagaggtaccttgaggatgtgattgcccacaagcaagctatccccttccgtaggtactgcggtggtgttggccgcactgctcaagctaagtcacgccattcaaacggtcagggacgctggcctgccaagtctgctagattcattctggatcttcttaagaatgcagagagcaatgctgaggtgaaaggtctggatgttgatactctttatgtgtcccacattcaagttaaccaggcccagaagcagaggcgccgtacctaccgtgctcatggacgcatcaacccttacatgtcctccccgtgccacattgagcttatcctgtcagagaaggaagaaccagtgaagaaagagcctgagtctcagatcgcagccaggaaggcctagagaaggaagctttgccccccttctgcctgtttgttagatcagattattatatagcctgtggcttttg

SEQ ID NO: 3079 - DNA, 415 bp, Oryza sativa
  Clone ID: uC-osflcyp061c07b1
ttcagacccagagcaggagaggctaacacttccacggcacaataatgagtaacttgtgagctctcggttggtcaagaacagaaaccttgtgaacccgccctaaatctttgcaggtgatcgttggcaatcgcgacttgttcatggattgatcagacatcatctatatgcagatcattcttcagtacctaaaaactcattgaatcctacattaaggcatttgctccaagacttctcttctgatcttatctcttgagaggttgttagaggttgtctgggatgtgattcacacgtacttgtactgtggattgtcaggtacaagttggaccaaactgaagctccaaagatttatgttagtgtaagtaccattcagcgagtacatgcatgtaacaggaatacaaagtcatcgatacaatcc

SEQ ID NO: 3080 - DNA, 519 bp, Oryza sativa
  Clone ID: uC-osflcyp061c08b1
gtggaagaaggagagaaacatctagagtgaataagaaagatggggttcgtccgtgccctgttcctgctggcgatggtgtgcgtggcggcgcacgcgaaggactaccccaaggaggagggcgcgaaggcggaggggccggccgccgcctcggggggcggcggcggcggcagcacccacgacttgctgaagctgggcggcaagggcgacggcaagacggacagcaccaaggcggtcaacgaggcgtggacggcggcgtgcgctggcaccggcaagcagacgatcgtcgttcccaagggcgacttcttgacgggtcccctcaacttcaccgggccatgcaagggcgacatcgtcatccagctcgacggaaacctgctcagctccaccgacctcgccttattcaagtcgaactggatcgagatcatgcgcctcgaaagcctcgaaatcagcggcaagggccagctcgacggccagggtgccgccgtctggagcaagaactcctgcgccaagaaatacgactgc

SEQ ID NO: 3081 - DNA, 511 bp, Oryza sativa
  Clone ID: uC-osflcyp061c09b1
atttagaaagcaatttgcccatcttgaagaaaatggtggaaatggcccggtaattccaatggatagaaagcacacttctcttcccaggtctactattgttcactcaactccaattcctgccaaggaacagccccgcattggcccatcaagggataaaccatctgatgaaccctatagcaatccccgggaatttgacagattttctggcaatgccccgaggacctcacaagctccacaaagagtgccaacagcaagaccaggaagagttgttggtccagtattgccttatgaaaatggtgccacaaaggattcctatgacgcacggagattggcaatgaactcagggtatcctccccagcaacaaatccctcaagcttacggttattatcagatacccggtaagtcagcttgttctgagccgtcgcaggccgaaaggtatacgctgcaccagcaggcctacacttgcgcaaacagtgccactgtgactgatgttgctctggacatgagagca

SEQ ID NO: 3082 - DNA, 510 bp, Oryza sativa
  Clone ID: uC-osflcyp061c10b1
tgttgtttactaatctgctcaatagtgcacgtccatcacaaactccaagctttcctactatgagttccttccctgaagtgaaaaacaactcatcattcggggcttctcaaaccaatggaccacctgtgttcagtagtttcagtcaaattggagcagcaactaatattggacctgggccaggaaccaccacaccaggaatgccagccagtagtccttttggtcatccaagctctgcaccacttgctgcccctacttttggcagttctcaaatgaagtttggagtttcgagcgtatttggaaaccagggttcaggtcaaccatttgggagctttcaagccccacgttttcccagttcgatgtctcctgcttcctctgtccagcacagagacattgataggcaatcacaagagttgcttaatgggatggtaactcctcctagtgtgatgtttgaggaatcctgtgtgaacaacaaaatgaaaatcaggatgatagcatctggttgaaggaaaa

SEQ ID NO: 3083 - DNA, 169 bp, Oryza sativa
  Clone ID: uC-osflcyp061c12b1
tttgtatgctccttatttggaatttgatcccttctatgacgtagcagattgaattgcattaatggacgcatagaagaggtgcatggcgatcgaatagctgtcgattacgggatctcgaatatggatgggggatacgcgaatagagtgatacgccatttgcaggactaca

SEQ ID NO: 3084 - DNA, 73 bp, Oryza sativa
  Clone ID: uC-osflcyp061d01b1
aaaatgaaaaacaaaaacgaaaaaaaacaactacaaaaaaaacaaaaacaaaaaaaaaaaaaaaaaaaaccac

SEQ ID NO: 3085 - DNA, 486 bp, Oryza sativa
  Clone ID: uC-osflcyp061d05b1
tgcagagaaaggcgtcttcgtactcgcctctctccgcgcctccgcgcttttcctcctcctctcccctctctcccttctccgccgccgtcgcagcatcaacccaatccgccgccatgagggagtgcatctcgatccacatcggccaggccggcatccaggtcggcaactcgtgctgtaagctctactgcctcgagcatggcatccaggctgatggtcagatgcccagtgacaggactgttggcggaggtgatgatgctttcaacaccttcttcagtgagactggtgctgggaagcatgttccccgtgctgtatttgttgatcttgagcctactgtgattgatgaggtgaggactggttgctaccgccagctcttccaccctgagcagctcatcaatggcaaggaggatgcagctaacaactttgcccgtggccactacaccattggcaaggagaatgttgatctgtgccttgaccgcatcaggaagc

SEQ ID NO: 3086 - DNA, 62 bp, Oryza sativa
  Clone ID: uC-osflcyp061d07b1
tcgtttcattgcacattatttcgtctacgttccttactttgactaaacaaattccattggga

SEQ ID NO: 3087 - DNA, 525 bp, Oryza sativa
  Clone ID: uC-osflcyp061e02b1
atctcacttcactctctttctcttctcttcacttcaccaccgccacctctctcatcggatccctgcagaggaggagagggcagtggcggcgaaaggcgacatgggctcgctgtcctctctcgccgccgcggcggtgtttctctccctcctcgccgtcggccactgcgccgccgccgacttcaacgccaccgacgccgacgccgacttcgccggcaacggcgtggacttcaactccagcgacgccgccgtctactggggcccctggaccaaggccagggccacctggtacggccagcccaacggcgccggccccgacgacaacggcggcgcgtgcgggttcaagcacaccaaccagtacccgttcatgtcgatgacctcctgcggcaaccagccattgttcaaggacggcaagggatgcggctcttgctacaagatcagatgcaccaaggaccagtcgtgctccggcaggtcggagacggtgatcatcaccgacatgaactactacccggtggctccgttccactt

SEQ ID NO: 3088 - DNA, 520 bp, Oryza sativa
  Clone ID: uC-osflcyp061e03b1
gtatttggcccaagagttgggctaactcttcaagaaagcgtaaggataggattgctgctttctcaaggaggagaatttggttttgtggtgttttcgttggcaaacaggcttggtgtcctaccacttgagttgaataaactgctcatcattgttgttgtactgtctatggcgctaactccattactcaatgaaattggaagaagggcagcagggatcatcgatgagaaatcagaaacaaaagaaaaaccagctgagatggtgaattatgatgccactgaacctattgtgattcttggttttggagaaatgggaaaggtccttgcaaagtttttgtctgcaccattatcttttgggcttgacaaagatgcggaaggttggccatatgttgcatttgatctaaatcctgctgtcgtaaagtcagctagaaaatcaggctttccagtgctatatggagatggttcacgccctcttgttctgcaatctgccggcgtatcttcttcgaaagcttgcatggtcatgt

SEQ ID NO: 3089 - DNA, 73 bp, Oryza sativa
  Clone ID: uC-osflcyp061e06b1
ctttttgttaatctttccccattttccctccccttcttctcctgtccttctcttttttttttttttttctttc

SEQ ID NO: 3090 - DNA, 71 bp, Oryza sativa
  Clone ID: uC-osflcyp061e08b1
tcgtttgaatgcaccttccttggtatctgatctcgtctatgaggaatcagctggcaatgctataatgcacg

SEQ ID NO: 3091 - DNA, 513 bp, Oryza sativa
  Clone ID: uC-osflcyp061e09b1
tcgatgagttcttctctggcatgccatggcttgctcttcctttgggagacgaaaggaagcaacaattgagtaagatcttcaaaatcactgggatcccttcgcttgtcgccattggtcctgatgggaagacagtgaccaaagatgcgaagaccccactggtggcccatggcgccgacgcttttccattcaccgaggagaagcttcaggagctggagaaggagaaggagaagaagatcaatgacatggcaaaggggtggcctgagaagctaaagcatgatctgcacgatcatgagcttgtgctgactcgctgcaccacgtatggctgcgatggatgcgacgagatgggcgactcatggtcctacaggtgcaaggaatgtgacttcgatctgcatcccaagtgcgcgctggaggagaagggcgatgtggagatgggagaggagaatgctgaggctgcccccgctgggtatgtgtgcgagggagacgtctgcagaaaggtctaaaggagtttgtttg

SEQ ID NO: 3092 - DNA, 507 bp, Oryza sativa
  Clone ID: uC-osflcyp061e10b1
gtcgtcttcgtactcgcctctctccgcgccctcctccgccgccgctcgccgccgttcgtctccgccgccaccgccgccgccatgagggagtgcatctcgatccacatcgggcaggccggtatccaggtcgggaacgcgtgctgggagctctattgcctcgagcatggcatccagcctgatggacagatgcccggtgacaagaccgttgggggaggtgatgatgcttttaacaccttcttcagtgagactggtgctgggaagcatgtcccccgtgctgtcttcgtcgatcttgagcctaccgtgattgatgaggtgaggactggtgactaccgccagctcttccaccctgagcagctcatcagtggcaaggaggatgcagccaacaactttgcccgtggtcactacaccattggcaaggagattgttgatctgtgccttgaccgcatcaggaagcttgccgacaactgcactggtctccagggctttcttgtgtcaacgctgttggag

SEQ ID NO: 3093 - DNA, 467 bp, Oryza sativa
  Clone ID: uC-osflcyp061e11b1
cgtaactgccgggaccgaccacgcctttgttcccttctactcgcctgtgttgtggtggcggctatggtgtccgccgtctcctgcgggccacccaaggtgccaccgggccccaacatcacgacaagctacggcgacaagtggctggaagccaaggccacctggtatggtgcgcccaagggtgctggccccaatgacaacggcttctcctgcgggtacaaggatgtcgacaaggctcccttcctcggcatgaactcctgcggcaacgaccccatcttcaaggacggcaagggctgcggctcatgcttcgagatcaagtgctccaagccggaggcctgctccgacaagcccgcccttatccacgttaccgacatgaacgacgagcccatcgctgcctaccactttgacctctccggccttgccttcggcgccatggctaaggatggcaaggacgaatagctccgtaaggc

SEQ ID NO: 3094 - DNA, 496 bp, Oryza sativa
  Clone ID: uC-osflcyp061f02b1
tttattagtacatggccaatggcagcctcgagaaccacctcttccgacgttcatgcaacctctcatggacgacccggatgaagatcgccttggacgtggcgaggggcctcgccttcctccacggaggcgaccggccgatcatctaccgcgacttcaagacctccaacattttgcttgacacagatatgaaggcgaagctgtcggatttcgggctggcgaaggaggggccgcggggagggaagacgcacgtgtcgacgagggtgatggggacgtacggctacgcggcgccggagtacgtcgccacgggccacctcaccgcgatgagcgacgtctacggcttcggcgtcgtcctgctcgagatgctcgtaggccgccgcgcgctcgagccgccggccgccggctgcagcaagtgcaacctcgtcgactgggcccgccccatcctcatccggcccaagaagctggagaggatcgtcgaccgccggatggcgctgccggc

SEQ ID NO: 3095 - DNA, 521 bp, Oryza sativa
  Clone ID: uC-osflcyp061f03b1
ttctttctcaggcagaaacagctattaaaaaactatatggaagagaaaaagttgctgaagttatgtatgacctaaaagctgccagccaaggttcttctgagccagatgctggctggttggatcttttcagcaaacgctattggaaagttgttagtgtgggcgcagctatgttcttgttccaacagcttgccggtataaatgctgttgtatattactctacatcggtgttccgcagtgcaggcattgcatctgatgttgcagcgagtgcccttgttggagcagccaatgtttttggtacaatgattgcatcttctctgatggacaagcaaggaaggaagagccttctgataacaagcttttctggcatggctgcctcaatgttacttctatcattgtccttcacgtggaaggctttggcaccttattcaggccctcttgctgttgctggcactgttttgtatgtgctggcttttgctcttggagctggcccagttccagcattgctccttcctgaaatattt

SEQ ID NO: 3096 - DNA, 303 bp, Oryza sativa
  Clone ID: uC-osflcyp061f04b1
ttgtttgggtgaaactcaagagggtgtttgtgattggttctggagatgccaatcgccaatgctggagcaagcggcggggagtggcttccaattccaattgccgtcttcttatttttttaaaaaataaatatatagtgtctaaagaactcggtacaaattctgaatcaagaactcatcatttgtgtagccctttgtatatttgaacctggaagttattgaggttgaaatgtcagataaaagtgtctactttgcttgtagaaacttcatttgagttaaatatcatatatatacatcattcctgtc

SEQ ID NO: 3097 - DNA, 445 bp, Oryza sativa
  Clone ID: uC-osflcyp061f05b1
tcgtttttccactacgcactagtagtagcactctggtattctcccatggcgactgcaaccgaggaggttgccgctgcggctgctgccgccggcgaggcgccgccgccgccgccgccagcggtggtagaggaggtgaaggaggcggtggaggcacccaatccggaggaggcgcctaatgctgatgagggggaggagaagaaggcggagggtgagaaggagaaggagaaggcgaagaaggagaggaaaccgagggcgaggaagccccgatcggcggggccacaccacccgccctacttcgagatgatcaaggaggcgatcatggcgctggacgggaacggcaaggcgggatcgagcccgtacgcgatcgccaagtacatgggggagcagcacatggtggttttcccggcgaactaccggaaggtgcttgccgtgcaactgcggaact

SEQ ID NO: 3098 - DNA, 522 bp, Oryza sativa
  Clone ID: uC-osflcyp061f07b1
tcgttcgggcgaaacgccaaacgaaacgaggcgctgccctgccaccttcgcctcacgaacgccagcctcgctgtttcccctccctctcgcaccgctcgttcccgtttgccttctttctctcctcccccccgttcagcttcccgttcaggttcaggcaatcacgcctcctctcctctcctctcctctccttcttcactccactccaacgccccacgccctcccccgctttataagggggagctccacatcaccacccttcccacaccatcgcggcagccaccgcatctttcctcctctttccctggagccatttcctcccctaaagggcccttccttttcttgatctctcttctatcttcgatccatccatccatccggccatccttcctaggtgaatttcaacgatgcagttcagcagtgtgtttcccttagagggtaaagcatgcgtgagcccaataaggagaggtggtgagggctcagctagtggtagattgaagatcggggacagtagcagcatcaagc

SEQ ID NO: 3099 - DNA, 506 bp, Oryza sativa
  Clone ID: uC-osflcyp061f08b1
tcgtttcatcctccccaaccactgcatccgggtcggcgtcctcctcctcctcctcctcctcgcagaatgcaacgggcaattcaagctatcgggtcacatggcagtctcctcaagtctgctgttctgcgacacatcagtgctccaaaaccatctattttacctgctgtatattcacgctccatgtcagtttcatctgctcaaatagaggagagtggatttgagactgccactgtggcagatattttgaagtctaaggggaagagtgctgatggatcttggctctggtgcactactgatgactctgtctatgatgctgtcaaatctatgacgcaacacaatgttggagctctggtggttgttaaacctggacaggataaatcaattgctggtattgttactgagagagattacctcaggaaaatcatagtgcagggacgatcttccaagtcaactaaagttggagacatcatgactgaagagaaccagctgatcacggtgaagcctga

SEQ ID NO: 3100 - DNA, 481 bp, Oryza sativa
  Clone ID: uC-osflcyp061f09b1
tcgttcttgatgagggaattgcagtcaaggcttctgaccttgacattgcctcaatctttggcatgggattcccaccgtataggggaggaatcatgttctgggcagattccattggtgcaaagtacatccatgacaagttggaggtgtgggcgaagcggtatagcgacatcttcaagccttgttcctaccttgcagaaagagcagcaaatggggttcctctgagtgcaccagctaagcaagtcaaggcccgactatagatgaacatcctgctttcctatcaactgcggaaactatgcagaataatagaacacacgccaatggggcatttatggtctgtagaatagcccatccaataataattagaataggattcttgaagagttatgtgtaatctgtatgacgcctccaaagtcttgaaccattactgcgacagtgttttgagttcagacattctttaaaatgtttcatgtgccaatggttt

SEQ ID NO: 3101 - DNA, 507 bp, Oryza sativa
  Clone ID: uC-osflcyp061f10b1
tcacttctcaccaagtcaaagtttcttcctcgcgaccggcggcgagcggcggcggcggcgatgtctgggagaggcaagggcggcaaggggctcgggaagggcggcgcgaagaggcacaggaaggtgctgcgcgacaacatccaggggatcacgaagccggcgatccggaggctggcgaggaggggcggcgtgaagcgcatctccgggctgatctacgaggagacccgcggcgtgctcaagatcttcctcgagaacgtcatccgcgacgccgtcacctacacggagcacgcccgccgcaagaccgtcaccgccatggacgtcgtctacgcgctcaagcgccagggccgcaccctctacggattcggcggctaggcgaggcgatgcgaggccacgcgattggatagggattcgattagtgccatgttcttcagttcgtcgtagtagcctagcctcttctcctgtagctgttgtttcatctcgtctcctgttccttcattaattagggat

SEQ ID NO: 3102 - DNA, 523 bp, Oryza sativa
  Clone ID: uC-osflcyp061f11b1
tataggatagctggacgcctgatgtaccgctccggacttaattggctgcgaccgaccgcatgccgttctgtttcctatcctatctgaccatacacggcacattacctcggatggcctcatgctgggagctggaccaataacaattgccaccactgtcacgatggacgactccagccttacaaagaccactgctattttcatggaccttcctacgatgccaccttcaaaatattctgccaagactactaagggtactgacaagcctgacgctacgagaacagctcgctttgccatactaacccgttctaaaagggctaacactgacacaaggacatgcgctctagccacctgatcaatgtctaacagggctaacgcttgttaagactgggacacaaggatacctaatctcctgataatggaataattctgacttgcacaagcggaacggttaccacagcgacactcgagagaacttacgaaatgagctctatgacatgagattgaacatgagaacagaagctgc

SEQ ID NO: 3103 - DNA, 513 bp, Oryza sativa
  Clone ID: uC-osflcyp061f12b1
tgtttttggaccttgtaagtatgatgcaatgatgcattcaacagtagttttgtacattgaaatttctatgactgtaattctgtatcgccattgtaatttgatgttgagctcttatggttgccgacaattttgtgaaccgtttctttcaacagctggagcaaaagcaaattgcaggtcattgttggaacagtatgcatccaccccccccccctcgtctatgcccccctctcctctctctctctctctctctctctctctctctctctaacattcaagttttgtattaatttatgtaggtggcgtttggaatgggaatcaacaagccagatgtcaggtttgtgattcaccacagccttagtaaatctatggaaacatactaccaggaaagtggaagggcagggagagatggactaccttcagaatgtattctgtattatcgacctggtgatgttccacgccaaagttcaatggtcttctatgaaaactgtggcctgcaaaatctttatgacataa

SEQ ID NO: 3104 - DNA, 500 bp, Oryza sativa
  Clone ID: uC-osflcyp061g04b1
tctttcaaatcgaatagatagaaatagtaaatttgaatggagacacctattctatgatggattttaacttaccctctattttcgtgcctttagtaggcttagtatttccggcaattgcaatggcttctttatttctttatgtgcagaaaaataagattgtctagaaccgacgggaccgaattttctcaatgtatttccacacaggatcataatacggatcttttgtagtgtaagtaatataatatggtatgttatgtggctctttctacacacaaatgcaaacccgctatggatggggattatggatgcggatataggctacgagcataaatgcatgcatatgcggaaccgggtatagcgagtttttttaagtggatcaacaaatactttttgaatagaaagtcaatgtatctaaccaattattttacaggagtatctagttggcgaaggcgatttcagaatcaaaaaaagtaaagtcaaaatcatttaacttattctct

SEQ ID NO: 3105 - DNA, 495 bp, Oryza sativa
  unsure (1)..(495): unsure at all n locations
  Clone ID: uC-osflcyp061g06b1
ttgctcacgttgccaccacaggctacgcaaaattctctcccttcctcctccaccacctccactccgacgatcctcctcctgatcctgtgccggccggcgatggcgtaccggttgctggagctcacgctggtctccgcgagcgacctcaagaaggtcactctcttctcgcgcatgcatgtctacgccgtcgcctccatctccgggagcaacgtccccatgcccatgcacggcacccacgccgaccgcaacggcggcagcaaccccgcgtggaacaccgtgctccacttccccgtccccgcccgcttcgacacccgcggcctcgccctccacgtccagctccgcgcccggcgctccttcggcggccaccgcgacgtcggggacgtgttcgtgcccctcgacgacctcctcgccggcgcgcacgacggcggcgagccgaggccggctagctaccaggtgcgccgccccatgtncgcccgcgcgcacggnacgctctac

SEQ ID NO: 3106 - DNA, 521 bp, Oryza sativa
  Clone ID: uC-osflcyp061g08b1
tcgttcctcaaaaaatacgatggaaggtttaaagatatatttcaggagaactatgaaacaaaatggagagccaagtttgatgatgcaggaatatggtacgaacatcggctgattgatgatatggtggcctatgcccttaagagtgaaggtggctatgtttgggcttgcaagaactatgatggagatgtgcagagcgatctaattgctcaaggttttggatcgctaggtctaatgacatcagttctggcgtgccctgatggtagaaccattgaagctgaagctgctcatggtacagtcacacgccattacagagttcaccaaaaaggaggcgaaactagtacaaatagcattgcttcaatatttgcttggacaaccggactaggacatagggcaaagctcgatgacaataaaagactgttagattttgtacaaaaacttgaagctgcttgtgtgggaatagtggaatctggaaagatgacaaaggatctagctcttctgtacatgggccaaatgttagccga

SEQ ID NO: 3107 - DNA, 507 bp, Oryza sativa
  Clone ID: uC-osflcyp061g10b1
attcttgaagaaggagaagaaggagaggagcagccatggcgtcgtcggtggcagcggcggcgagcacgttcctggggacgaggctggcggacccggcgccgcagagcgggaggatcgtggcgaggttcgggttcggcggcgggaagaaggcggcggcgaataatgcggcgaggccgtcggcgccgacgacggacaggccgctgtggttccccggcgcggtggcgccggactacctggacgggtcgctcgtcggcgactacggcttcgacccgttcggcctcgggaagccggcggagtacctgcagttcgagctggactcgctggaccagaacctggccaagaacaacgccggcgagatcatcggcacccggttcgagaccggcgaggtgaagtccaccccgttccagccctacaccgaggtgttcggcctccagcgcttccgcgagtgcgagctcatccacggccgctgggccatgctcgccaccctcggcgccctctccgtcgagt

SEQ ID NO: 3108 - DNA, 492 bp, Oryza sativa
  Clone ID: uC-osflcyp061g11b1
ttttgtgagaattcttaattcatgagttgtagggagggacgtatgtcaccacaaacagaaactaaagcaagtgttggatttaaagctggtgttaaggattataaattgacttactacaccccggagtacgaaaccaaggacactgatatcttggcagcattccgagtaactcctcagccgggggttccgcccgaagaagcaggggctgcagtagctgccgaatcttctactggtacatggacaactgtttggactgatggacttaccagtcttgatcgttacaaaggccgatgctatcacatcgagcccgttgttggggaggataatcaatatatcgcttatgtagcttatccattagacctatttgaagagggttctgttactaacatgtttacttccattgtgggtaacgtatttggtttcaaagccctacgcgctctacgtctggaggatctgcgaattccccctacttattcaaaaactttccaaggt

SEQ ID NO: 3109 - DNA, 512 bp, Oryza sativa
  Clone ID: uC-osflcyp061g12b1
ttcagagactcgtgctatccagaggagcactacttcccgacattgctggatatgcaagaccccgaaggctgcaccgggtatactctgacaagggtgaactggacggatcaagtcgagggccaccctcacacataccggcctggggaggtgtctgcaagcctgatcaaggagctgaggaaatcaaatgggacatactcgtacatgttcgcccgcaagtttgctcccgagtgccttgagccactgatggagattgcagactctgtcatcctacgtgactaatccagcaacaacaccacatttcagggtgtcggaatttgtacactgaggtgaatgagggttgtgatgtgatgaacaagcacagagtgtccatctatgcccttgaactactacgtgaggaacaacatatcccctctgttttgttattcagagattttccagcaattgaatgcgctgctgggaggtgaggatggtatgactacaaattgtccctacgtgagtatcctgtatgaatg

SEQ ID NO: 3110 - DNA, 495 bp, Oryza sativa
  unsure (1)..(495): unsure at all n locations
  Clone ID: uC-osflcyp061h02b1
tttaaatccaatgcatctcgtgcttctgccactcgtagaaagttctacttcttgcagaaatctctgcttgtctcttctttgcttgcggttgttgcagcagatgttgttggagcagggccaaaccagcagtgttttccttcctcctgtggtgatcttggcaacatatcctaccctttccgtcttgcaagcgattcacgcccgtgcgttggtactcttcgcccatggtacaacctctcatgtagcagtggcagggctaccattcagatcaacacacggacgtactatgtcaccagcatcaactatactggtgagatcttctcggntgtggatgccaccttgcaggatgatgatacaaacggcaccagctgccctcttcctcgctctgatcaccttccttacatcgattactggcctccctatttgggggaaagttcaaccgattcttatggttttgtctatttggccactgcttcagacacttgggcatgctttgtg

SEQ ID NO: 3111 - DNA, 452 bp, Oryza sativa
  Clone ID: uC-osflcyp061h04b1
tggtttaactaatggagctctgctgaatggtttcgtgcgacatgtggggcgtgctggccagctgcagggtagtccagcagaccaacatgatggtgaccaggggtggtctcagacaggcagggagagggagggggtagctggactgcgcagcgtgtggccgtgatttctgaagatgattcataaaccatgcgtgctgagctgcagtgagagcagagtaaaaactggttcacagtatcggtgtacgattgcagttggcatgcatgcagaaaccgacagggaggaaaacggctacgggagccggacaaacacaagcagctaagctaagctaccactcgctctcatctgcattctgcattgcatcatattcatgctgatttcatatctatcgatcgatttgtatgatatgatttttgcagcatcgatcgagaacatgcatgcatatgatcagatgc

SEQ ID NO: 3112 - DNA, 475 bp, Oryza sativa
  Clone ID: uC-osflcyp061h05b1
ttgatccctcttccagtcaagaaaaaaggaagattacaccaacaaacaaactagctagccaatggcctctttgtcctctttccggctcgccgtggcggtggcggcactgttggttgttggctcctgtgccactgagctcaccttcaaggtcgctgagggctctagcgccaaaagtctagagcttgtcactaatgttgccatctctgaggtggaggtcaaggagaagggcggcaaggactgggtggcgctcaaggagtcgtcgtctaacacctggacgctcaaaagtgagtcgccgctcaagggccccttctctgtccgcttccttgtcaagaatggcggctatcgtgtcgtcgacgatgtcatccctgaaagctttacagctggctctgagtacaagagtggaatccaactctaagtaacagacatgtgtactcttgttgggtcacatgcgaaatatgaacatctaaataatcct

SEQ ID NO: 3113 - DNA, 484 bp, Oryza sativa
  Clone ID: uC-osflcyp061h06b1
ctggacatactctactactactaggcagcgagctagctaactaactacgtggctatggcccccaccgtgatggcctcctcggccacctccgtggctccattccaagggctcaagtccaccgccggcctccccgtcagccgccgctccaccaactcgggcttcgacaacgtcagcaatggcggaaggatcaagtgcatgcaggtgtggccaattgagggcatcaagaagttcgagaccctatcgtacctgccaccactcaccgtggaggatcttttgaagcagatcgagtacctgcttcgatccaagagggagccttgtctcgagttcagcaaggttgggttcgtctaccgtgagaaccacaggtctcccggatactacgatggcaggtattggaccatgtggaagctgcccatgttcggttgcaccgatgccacccaggtgctcaaggagctcgaggaggccaagaaggcctaccccgatgcct

SEQ ID NO: 3114 - DNA, 458 bp, Oryza sativa
  Clone ID: uC-osflcyp061h07b1
tcggttgagagctccagattggaatctcgagagagggaggaagggggaaatggcggactgggggccggtggtggtggcgacggtgctgttcgtgctgctgacgccggggctgctgtgcacggtgcccgggagggggcgggtggcggagttcgggagcttccacaccagcggcctcgccatcatcgtccacgccgtcctctacttcgcactcctcaccatcttcctcatcgccatcggcgtccacatctacgccggctagctatgtactactcctttcactgattgattttggtggattggttggttgtctggtgaattggggatctcgcgtgtgtgtttgctgtactagatgtcatactgtcatgtcaggtcgcttgtgttgtactagtacggcagaatcaaagggtgtgtagtaattctcttttgttcatctgattagtactagtactactaatttt

SEQ ID NO: 3115 - DNA, 431 bp, Oryza sativa
  Clone ID: uC-osflcyp061h08b1
tcgtttctaatagaatactatggacgggtcggagggatatcttacgacaactatgaaacaacatggaaagccacgtttgatgatgcacgattatggcccgaacatcgtatgatggatgatatggtggcctatgccctcaagagtgaaggtggatgtgattgggctactatgaactatcacgaagatttgccacgtgacctaatggactcaaggcttttgatcgatcggactaacagacactatttctgcagagccctgatcggcagaaccattgaagctgaagctgatcatgggacagacacacgccattatagagaacacctgccacgaagcaaatcttgagcctatagcattgctggagtgaatgctcggacagccggactcgtacatctggctaaggtcgatgacaattaatgactgttcgatcttgt

SEQ ID NO: 3116 - DNA, 185 bp, Oryza sativa
  Clone ID: uC-osflcyp061h09b1
ttgttcgaacttttggtcaggctagtaacggatggatggcacaaagatgcgcacactttgtgtgaagcatcttctgctgatgtcttctgctgtttttgtcagtttgtggtagccagagacaagatgctgatgtcttctgctgtctgtattttaatactccaagcaacgctgcaaaatgttaactg

SEQ ID NO: 3117 - DNA, 509 bp, Oryza sativa
  Clone ID: uC-osflcyp061h10b1
tttttcagcagcaacagccagtcccacagcaatatgtcactgcacaaaatcagcatttcattcacaatccagctactggcacattcatcccaatccaatcctattaccaccatccggtccctcagcaagcaccacagccgcccatgccgcagcctgtgccacagccacaacaatcacacgctttcgacccaaatactggcatgtattacattcccatgcgcacgaatgcgcctcaggcatatagcatgcctcctggtgccgctgctgtgccgcctcccacccttgttgacactacaccaaaaccaactgtgccaattcctcagatggccgtgaagcagcctgaactgcagcaacctggtttgtaccgaactaccgcagcacctacccctgtaccagcgtctaatgctcctgcgtatgctgggatgggctaccaccatgttattcaaacacaccatcatccagcgccacagcctgcagcgactgtggcaggcaattttggatatgactat

SEQ ID NO: 3118 - DNA, 507 bp, Oryza sativa
  Clone ID: uC-osflcyp061h12b1
gtgaacggcacggccgtcggctctggccttgcatcgaccgtgctctttgaggccaacgtccttgccatcctcgccgaggtcctgtccgccgtgttctgtgaggtcatgaccggcaagccggagtacaccgaccacctgacacacaagctgaagcaccaccctggacagatcgaggctgccgccatcatggagcacatcttggaaggcagctcgtacatgaagctggcgaagaagctcggcgagctcgacccgttgatgaagccgaagcaggacaggtacgcgctccgcacgtcgccgcagtggctcggcccacagatcgaggtcatccgcttcgccaccaagtcgatcgagcgcgagatcaactccgtcaacgacaacccgctgatcgatgtctcccgtggcaaggcgcttcacggtggcaacttccagggcacgcccatcggcgtgtccatggacaacacccgcctcgccctcgctgccatcggcaagctcatgttcgcgcagttc

SEQ ID NO: 3119 - DNA, 456 bp, Oryza sativa
  Clone ID: uC-osflcyp064a01b1
gtttcttttacggccacccgtcgtcctctcccaccgccgccgccgtgccggcggcggccgtgcagtcctcgtcctcccgcaccgtcgcggcgcagtgacgcaagaacggtctctcggaccaagaaacgcccaacaagaagagaggagaaggaaaaaagaaggaaagaacataatctaaaccaaagaatatttgtgtcattcataagaaaagggatattatttggttcctcccttgatgtggtgccatttggaaaaaaaaagtcccttttttcccgttctttttcccatctttttgtttgggatctccattgaagaagttgtctgcttttcctctgtcctctcgactattggaaattggaagcattttagtcatattgttaagagtatgtgtggtgctctactatgtaattaacatttcagtaagatccatgcttgttgaaaggtgtgatttttgtc

SEQ ID NO: 3120 - DNA, 520 bp, Oryza sativa
  Clone ID: uC-osflcyp064a02b1
gttttcgtctcttccccgccatcaacgtcaacgactccgggaccaattgcaagtgtgagcggttatatccgtgccgccactctctccctgatggtctcatgagggctaccgatgttatgatcgctggcaagggtgccgtgccctgcacgaatacgccaatgaggcaagggctgtgctgatgctctcaagcaggctggtgcccgtgtcattgttactgagagggaacacactcgccaagggcaggcccttatggagggtctccaggtcctcaccttggaggaagatgtctaacaggctgacatctttgtgaccaccactggcaacaaggacatcatactggttgaccacaagaggtagatgaagaacagccccatcgatggtaacaaaagtcactttgacaatgagattgacatgctcggccttgagacccacctctgtgtcaagcgcatcaccatcaagccttaaacccgaccgctgggtctttcctgagaccaacaccggccatcattgtccctgctga

SEQ ID NO: 3121 - DNA, 540 bp, Oryza sativa
  unsure (1)..(540): unsure at all n locations
  Clone ID: uC-osflcyp064a03b1
gtttcagcatgcaagcaatggtgtacttgaaggtgacagtggtgtggtggagaccctcgactggcagaatggaatgctacagaagggcaagggcactgtttcaggcgaatatgggcatgatcaggctgagttcgagtttcagcatggaaatcctgatgcgacagtgaggcctgtcaatgttggaaggcctgccaatggtggaacaccaaggaaaatcaacaatgatgccttctttgagcttcaggattcactgagcatggctagtaactctgaggcggaggatgctggtgggcatgagcggtggtggaagcctagttcccctcttgggacatctgttggcacacctggtgcagaattttatgatgcattcgaagaaatatccagtgatggtgcaactcgatcttcacaatgcatggatgatgaccttcgtgaatgaggttgagtctgttgatggaaattgagagaaggaagcaagctgaggaagcacttgagaacntgcaaaaggagtggaagaagctgagtgatcacctatcacttatt

SEQ ID NO: 3122 - DNA, 467 bp, Oryza sativa
  Clone ID: uC-osflcyp064a04b1
gttgttgttgcagacacatgcaagaagctacaaagactcagagttgtgcgaggagatgatgatccaggtttgcaagaagaacaaggaggagtctctcaagtcgggttgacaactgtagccgtaggatgccgtgaactggaatacatagctgcctatgtgtctgatatcacaaatggggccctggagtctattgggactttctgcaaaaatctttgcgacttccgtcttgtcctactcgatagagaagagaggataacagatttgcccttagacaatggtgtccgtgcactgctgaggggctgcacgaaacttcggaggtttgctctatacttgagaccagggggactttcagatacaggccttggctatattggacagtacagtggaattatccaatacatgcttctgggtaatgttggggaaacagatgatggactgatccggtttgcattgggtgtgagaacctg

SEQ ID NO: 3123 - DNA, 427 bp, Oryza sativa
  unsure (1)..(427): unsure at all n locations
  Clone ID: uC-osflcyp064a06b1
gttttaccgtatctgagcctcttgctttgctgatctcctcgagtaattctcgctgaaatgaagctagaaaacatgaaggctgtgaagagtccgattatgtgtgtgctggtgctaggcttagtcctgcagcaagagaacganttcaaggtggaaagnnctaagaagctnngctgctccaaaccccaccacggcaagggaaacaatctattaatgcaatgcccgtttttgcgccttggcacaagggaaagatgttctaaactctctggctgcaaaattgttgatgggaaatgcaagccgccttacattcaccacaccctttaccccgaatctgaggaatcggatgtacttgacttctgtatgctaggatgtacttcgtccatgtgcagcaacatgaacactnttgctgacaacgaagaagggaacgttg

SEQ ID NO: 3124 - DNA, 545 bp, Oryza sativa
  Clone ID: uC-osflcyp064a07b1
tcgggttttcgcctagttgtgtgctctgctcctccttgaagaagccttcagatctgtggttcctagcctttctcagcttcctcaacacagccgtccagatggcgtccctgacacccgaagctgaagctcccggaggaggagccctgctcgccgccggcgacgacgtcgccgccgcgaatctgctcgccgccgccgtagccaccgagggtcctgtatttgatatgcctgacttcaagatgggtgggaagaagagtgatgatgctgctcccactgatgccggggatgaagatggtggtgatgatgacggggacgaggatggtgactttggggaaggcgaagaggacgtttcagaaggtgagggatatgataatccaaaaggcatcgataacaacaagaaaagaggtgagcctgaggaaaatggtgaggaggatgaggaagagcctgaaggccaggagggtggtggaggtgatgacgacgatgacgatgatgatgacaatgaggatgacgacgacgatgatgatggtggtgaagatgatgatggagta

SEQ ID NO: 3125 - DNA, 539 bp, Oryza sativa
  Clone ID: uC-osflcyp064a08b1
gtttcccccaaaaccagcggcgccaccacccaccttcccccatggcatcggcggcggcgagatccggcctccgctcgctggcggcgcgcgccaaggcgaccgccgcccccgcggcgaggcgccgcatgtcctcctccgcccacgacgacgcccatgagacggccaagtgggagaagatcacctacgccgggatcgtcacctgcaccctgctggcggcgtacaacctctccaagggccacccccacttcgacgagccgccggcgtacccctatctgcacatccgtaacaaggagttcccatggggacccgatggcctatttgagaacaagcaccattaagtactgaacagcgcaccatcagaagcccagtgaatgcttaagaaaaattctctggttgttccagtgattcttgttttcagtgaaacctatttttcttgcaacaaagaaataagaatgacaaaactcttgtgttgataatcaggatttaactgtgttgttagttgctacctggtttcttcattcacagcagtgatcatatgc

SEQ ID NO: 3126 - DNA, 507 bp, Oryza sativa
  unsure (1)..(507): unsure at all n locations
  Clone ID: uC-osflcyp064a09b1
tcgatttatgatttggattattggagaatatgctgaaaggattgacaatgctgacgaacttcttgagagcttcttggaaacattcccagaagaaccagcattagttcaattgcagttactaacggcaactgttaagttgttccttaaaaagccaactgaggggcctcaacagatgatacaggctgttctcaataatgcaacagttgaaacagacaatcctgatttgcgcgaccgagcttatatatactggcgacttctttctactgatcctgaggcagctaaagatgtagttttggcagagaaacctgtgatcagcgatgattccaaccagcttgattcttctctcctagatgatctgctagccaatatttctaccctttcatcagtttatcacaagcctccagaagcatttgttagccgcgttaaaacagctcctagggctgatgatgaggagtttgctgatacagctgaaacaggatattcggagtcaccatctcnagggtgtga

SEQ ID NO: 3127 - DNA, 470 bp, Oryza sativa
  Clone ID: uC-osflcyp064a10b1
tcgatttcctgcaaactaaagctactcttcagtgggattgcatttcgaccgagctagagagatttatagctaagccaatggcatcacaggttgagagccaccgtgccggcgcggagatcgtcagtggagacggcgtcagcaggaagaagtccatcgagctgctggaggagctcggcctccccaagggcctcctgccattggaggacatcgaggagtttggctacaacaaggaaacaggattcatgtggctggtgcagaggaagaagaagatcgagcacaccttcaagaagatcaagcagaccgtctcctacgccggcgaggtcacggcgttcgtcgagaaggggaagctgaagaagatcaccggcgtgaagaccaaggagctgctgctctggctcagcgtcgtcgaggtctacgtcgccgatgcctcgccggagaaggtcaccttcaagactggaactgggcttttgata

SEQ ID NO: 3128 - DNA, 262 bp, Oryza sativa
  Clone ID: uC-osflcyp064a11b1
tttatttatggaagctacactggtaggagagacacctaacaactttatcccaaagactagaactgggctcacaggttcattgtcatgtggacagatagcttcagcaagatctttctcaagcagtgcagacctgccaccacataaggaaatagggatgccatcactctctcctacaatgaccgaggggaacattgcaaggtggctgaagaaggaaggagataaggtctcacctggtgaagttctttgtgaggtggagactgat

SEQ ID NO: 3129 - DNA, 284 bp, Oryza sativa
  Clone ID: uC-osflcyp064a12b1
tcggctctgttcatgatgttgttcttgttggtggctccactaggatcccgagggtgcagcagctcctgcaggatttcttcaacggcaaggagctttgcaagaacatcaacccagatgaagctgttgcttatggtgctgctgtccaggctgccatcttgagtggtgagggcaacgagaaggtccaggacctcctcctgttggatgttacccctctctctctcggtttggagactgctggtggtgtcatgaccgttttgatcccaaggaacaccaccattcccacc

SEQ ID NO: 3130 - DNA, 539 bp, Oryza sativa
  Clone ID: uC-osflcyp064b02b1
tttctctttgtctccagcgcacgcacgcacgaccacctcgcctcctcctctcctctcccctcccctcccccacctcgcctcgcctccacgcgcgcgacgcggccggcgacggcgagccgcacggcgcgtgggcgtgcctctcctcagccggcggctagccctctcctcgcgcggcggcggcggcggcggcggttgctggcctcattccaccgccatccctcctccgtgtctcgtgctcgactcggtggtgaaggtcaggtgctgatgcaagatataggttgttctatgagaaggatagctgtgcacatcaagacccaaatataatctcacttggttgtactatagtggtggttgaacactaagatatagcttattctgttgtttcaaaaacatgggttcgaggtttccatcgcatcagcttagcaatggcctgtatgtgtctggccgacctgagcaaccgaaggagaaggccccaccatttgttccactgccatgccatacactggtggtgatataaaaaatctgagagcttggaagat

SEQ ID NO: 3131 - DNA, 447 bp, Oryza sativa
  Clone ID: uC-osflcyp064b03b1
atttatatgtggcttcttccttccagatcagtgtaggtctggctgggtctaccaacaagacagttaagttgcctaagaacttcactcttaaggccccaggtcctgggtacacgtgcgggcgtgctatgattgtcaggcctactaaggttttgaccggggatgggcgcagagcaacccaagctctaatgacatggaatgtgacctgcacatactcccaatttcttgctcagaagactacttcctgctgtgtatctctctcatcattgtataatgacacaattgtgaactgcccaacatgcttttgggggtgccaaaacaaatgggacaagtcctggaagctgtgtaaatgagaattcaccttatttacaatctgccattggtgggcctggcaaaaggaaccggcagagctttgggcaatggacttctcacatgtgcccgatcagaatc

SEQ ID NO: 3132 - DNA, 403 bp, Oryza sativa
  Clone ID: uC-osflcyp064b04b1
cttattttagtgatgtaaagggtgttgatgaagccaaagctgaacttgaggaaatagttcactatcttcgagatcccaagcgttttactcatcttggtggaaaactgccaaaaggtgtcttgctggttggccctcctggcactgggaagaccatgttagcgagggctgttgctggggaagctggtgtccctttcttctcatgcagcggtagtgagtttgaggagatgtttgtaggtgtaggagctagaagagtcagggacctttttgctgcagctaaaaaacgttctccctgtatcatattcatggatgaaattgatgcaatcggtgggagcagaaatccaaaggatcaacagtacatgaggatgaccttgaccagttgcttgtcgaactggatggctttaag

SEQ ID NO: 3133 - DNA, 513 bp, Oryza sativa
  unsure (1)..(513): unsure at all n locations
  Clone ID: uC-osflcyp064b06b1
atttgctgctgctaataacggtggctttgcttcaaaacccagcatgcagttcccactgtcataactaagtccagaaccgttctagaggactctgatactgatgacctagtgggattccatatgctggcagtactgcgcaacagatgtgtcttcatggccacctgctgccgctccgagctaagccaaacctcgctgaatctttctcgtggactgttgctggatttaccagtgctcgaactggtggtcactgcaagcattgtgaggccaacaatgtacattgttttgaaggtttggcctagttctcgatggcgatgctctatgatccgaacttgtctagcctggcgcgctactgaggatcagatattcgctttgtgttaccttatttacttgctgctgaataaagtttgtttatcaaactagtgtatattgtgttatgactgcacttaaaccttatgtaagtttgcatggtttggcctactatntacttgctattaatctttctctaaagttcgt

SEQ ID NO: 3134 - DNA, 509 bp, Oryza sativa
  Clone ID: uC-osflcyp064b08b1
tcgctttatctctagagaaatggaggacaatctaccagtcaatgtccgggagtatcaagaactcgccaaaaaagcgttgccaaagatggcttatgattacatcaatgggggagcagaggatgagcacacactgagggagaatatcgcagcatacacaagaattatattacgacctcgcgttcttgtggatgtgagcaagatagacatgtcaacaactttattaggatacaccatgcgttcacccataattgtggctccaactggggggcacaaattagcacatccagaaggggagaaggctacagcaagagctgcagcatcatgtaacgccataatggttctttccttttcttccagttgcaagattgaggatgttgcctccagttgcaatgccattcgcttttatcagctatatgtgtataagaataggaatgtttcagcaacattagtacggcgggccgagagttgtggattcaaggcacttcttttgacagttgacactcctatgc

SEQ ID NO: 3135 - DNA, 539 bp, Oryza sativa
  unsure (1)..(539): unsure at all n locations
  Clone ID: uC-osflcyp064b09b1
ttgggttgtgtgtgatgagcatggcattgaccctaccgggcggtacacaggcaactcagatctgcagttggagcgtgtcaatgtgtactacaatgaggcctcctgcggtcgctttgtgcctcgtgctgttctcatggaccttgagcctggtactatggacagtgtccgcactggaccctatggccagatcttccgccctgacaactttgtgttcgggcaatctggtgctggtaacaactgggccaagggacactacactgagggtgccgagctaattgattctgttttagatgttgtgaggaaggaggctgagaactgtgactgcctgcaaggattccaagtatgccactctcttggtggtggtactggatctggtatgggtacacttttgatatcaaagatcagggaggagtaccctgaccgcatgatgctgacattctcagttttcccctcaccaaagtatctgatactgtggttgagccatacaatgctacactctcagtccatcaagtggntgagaatgctgatgagtgtatggt

SEQ ID NO: 3136 - DNA, 467 bp, Oryza sativa
  Clone ID: uC-osflcyp064b10b1
ttcgtttaatcaaacaaaaagaaaaaatattccccatctgtgaaattcgcaaaaccctagcgcggcggcgatgtcgaacacgagggtgttcttcgacatgaccgtcggcggagctccggcggggcggatcgtgatggagctgtacgcgaaggacgtgccgcggacggcggagaacttccgcgcgctctgcaccggcgagaagggcgtgggcaagagcggcaagccgctgcactacaaggggagcaccttccaccgcgtgatcccggagttcatgtgccagggcggcgacttcacccgcggcaacggcacgggaggggagtcgatctacggcgagaagttcgccgacgaggtgttcaagttcaagcacgacagccccggcatcctgtccatggcgaacgccgggcccaacactaacgggtcccagtttcttatctgcaccgtgccctgcagctggctggacgggaagc

SEQ ID NO: 3137 - DNA, 539 bp, Oryza sativa
  Clone ID: uC-osflcyp064b12b1
gcctcgcccggccgttccggtatggaaggctcggctcgacccacgcgtttttctttcccacacccgtctcgccgtcgcagcgcgcggaggctacccctcccccgcggccgtcaagatgcagatcttcatgaagaccctgacggtgaagaccatcacgctggaggtggcgtcctaggacaccatctgcaacgcgtaggtcactatccaggacaaggaagggatccccccggaccagcagcgcctcatcttcgccggcaagcagctcgaggatggccgcaccctcgccgactacaacatccagaaggagtccaccctccacctcgtgctccgcctccgcggcggcgccaagaagcgcaagaagaagacgtacaccaagcccaagaagatcaagcacaagcacaagaaggtgaagctcgccgtgctccagttctacaaggtggacgacgccaccggcaaggtcaccaggctcaggaaggagtgccccaacaacgactgcggcgcgggcaccttcatggccaaccacttcgatcgccactact

SEQ ID NO: 3138 - DNA, 501 bp, Oryza sativa
  Clone ID: uC-osflcyp064c04b1
attctgattcagtttatatatggtcaaattttagtaagtatgaagagatatgcccaccccaagtagaagagctctgctatatttctgacaatacatacactaaggatgaggttttgaaaatggaagcttctgtcctgaaatacttgaagtttgagatgactgcacctacaacaaaatgctttttgaggagatttctacgagctgctcaagtatgccatgaggctccagttttgcatcttgagttcctagctaattacattgcggagctatcacttctggagtacagcttaatttgctatgtaccgtcacttatagctgcgtcttctatttcttggcgaagtttatccttaagccaacagagaatccttggaattcaacactttcattctacacacaatacaaaccatccgacctatgcaattgtgcaaaaggactacaccggcttttttggttggccctggaggcaacctttgagcagttagagaaaaatacagtcaacac

SEQ ID NO: 3139 - DNA, 222 bp, Oryza sativa
  Clone ID: uC-osflcyp064c05b1
tttgcttaagttgacgcatttgtaactgtttttgctgactatcaagacactgttgctaggcatgaagctgctcatatatgggggataggactatagtgttgcactccacgtgtttggaggactgccttacggaggagcattttgcgctctgatccatgcctagcagacgggtgattgctaggggcagagcactccatgggatactaatgcttgaacaaactg

SEQ ID NO: 3140 - DNA, 405 bp, Oryza sativa
  Clone ID: uC-osflcyp064c06b1
gtttctgtccctcatcatcaacaccttctactccaacagggagatcttcctccgcgagctcatctccaactcctccgatgcattggataagattaggttcgagagcctcacggacaagagcaagctcgatgcgcagccggagctgttcatccacattgtccccgacaaggctagcaacaccctgtcgatcatcgacggtggtgtcggcatgaccaagtcggacctcgtcaacaacctcggtaccatcgccaggtcggggaccaaggagttcatggaggcgctcgctgctggtgctgatgtgtccatgattgggcagtttggtgtcgggttctactccgcctaccttgttgctgagagggttgttgtgaccaccaagcacaacgacgacgagcagtatgtgtggga

SEQ ID NO: 3141 - DNA, 493 bp, Oryza sativa
  Clone ID: uC-osflcyp064c07b1
tttcgttaagcctcttttggatctatccattcgggtcaccgtggcagttcggtaattttggcggagaggaggaggaggacgacgacgacgacgacgtgatgggtctcctcgacaagctgtgggacgacaccgtcgcggggccccgccccgacaccggcctcggccgccttcgcaagcacgccgccgtccgccccgccgtcgtcaagatcaacgacccgacaggggacgcggcgatggtggtcgtcccgccgacgacgccggccggggcggaggaggcgccggtgaaggtgacgcgcagcatcatgatcaagcgccccgcggggtacccggcgtcgccgaggagcgcggacagcacgccgtcggcctcccccgtcggatccacccctcccatctcgccgttcgccggcgccggtggtcgcttcagaaggaaattatcgttcgacgcatatgagagggcaacaccctgggacaaccagtcacccttctccctttg

SEQ ID NO: 3142 - DNA, 258 bp, Oryza sativa
  Clone ID: uC-osflcyp064c09b1
tcggaacttcgcttggaccaccacctgatcagagaagtagctagctgcaggagagaaaccgaccaacaatggcggagtactactcgaacaccgtggacgagtgctacgagaccaccggcaggcagcacggtcacggccacggccacggccatggcggcatgagggtggagtcccacaccgacgactactactgcgagggcggcgagatcgaccgtgggaggagggacaacttcatgcactcgcaggagtacctgatga

SEQ ID NO: 3143 - DNA, 532 bp, Oryza sativa
  Clone ID: uC-osflcyp064c10b1
tcggctgcaattggcgcatttttaactgtttttcctgactatcaagacagagttgctaggcatgaagctgctcattttttggggatagttctctcgtgttgcactccaggtgtttgtagttttgccttacggaagagtagtttcagttctgctccatggcttgcagtggttgattactaggggttgatcactagaggtgtgattcatgcttgtcagtactggctgtggtccagtatatgaatgatttgaatgctgtaagaggaacaaaccagaagaaaacagatcggggaagcttctggacctggctcttctcgctgtttggttgttgcaaaaaggaccaagagctgggattgccagtatagctgaagcatttcatctgtatgtatgttgtgaattactcaggtctgcaaagaaaggaaacgtgggtaatttggttcctcttctttatttggcttccttttttttgtgtgtatatatgtaattttgtcatgaacctgttcccgctgcttcccgggcgttcagggccaatagc

SEQ ID NO: 3144 - DNA, 454 bp, Oryza sativa
  Clone ID: uC-osflcyp064c11b1
tcgcgttagctagctaactaatcttccccttcgtctgcggcattattccacttggacgaacactagctcaccggccggccatggcgtcttcttccgttctgatcaagctgctcgtcgtcgtcggctgcgccgccgcggcctccgcggcgacgctcaccgtgggtggtagctccgggtggacgcttggccagaactacgatacttgggcaagtggccaaaccttcgcggttggagacaagctcgtgttcagcttcgttggggcgcacacggtgacggaggtgaacaagaaccattaccacaactgcgccgtcgcaaggcactcgatcagctcgaccagcacccagcccagccaccctcgacctcgccgccgccggcatgcactactacatctgcaccatcagcggccactgcgccggcggcatgaagctggccatcaacgtccgcagcggctccg

SEQ ID NO: 3145 - DNA, 467 bp, Oryza sativa
  Clone ID: uC-osflcyp064c12b1
ttggtttatcaaggctgtttgggctccttactatacagttcacaagattatgcaaggtcttcttgatcagtatacggtggccgggaattctaaggcccttgatttggtggtcgggatggccaattacttcagtgaccgtgtgaagaatgtcatacagaaatacagtattgagaggcattgggcttcactcaatgaggagagtggtgggatgaatgatgtgctctatcagctctacacgataacgaatgatcagaagcatctgactctggcccatctttttggatagccaatgtttctttgggttgcttgcagttcaggccgacagtatttcaggcttccattccaatacacacattccagttgttattggtgcacagatgagatatgaagttactggtgatcttctttacaagcaaattgcaacgtttttcatggataccatcaattcttctcatagctatgctact

SEQ ID NO: 3146 - DNA, 392 bp, Oryza sativa
  Clone ID: uC-osflcyp064d01b1
ctttgatgtgggttggcttctcctccccctctttaccttttcctcctcggttcggttccgtggttcgtctagggtttagtgggttgagatggcggcgccggatgtcgagtaccgctgcttcgtcggcggcctcgcctgggccaccgacgaccgctccctcgaggccgccttctccacctacggcgagatcctcgactccaagatcatcaacgacagggagacggggaggtcacgtgggtttggcttcgtcaccttctcctccgagcagtcgatgcgcgacgccatcgagggcatgaacggcaaggagctcgacggccgcaacatcaccgtcaatgaggcccagtcccgccgctccggcggcggaggcgggggctacggtggcggctgtggcg

SEQ ID NO: 3147 - DNA, 534 bp, Oryza sativa
  Clone ID: uC-osflcyp064d04b1
ccttctttttctcctcctcttcctccgcgcgcgcgagatccagggagagggagagggagagatcatggcggggacggtgacggtgccgtcggcgtcggtgccgtcgacgccgctgctcaaggacgagctggacatcgtgatcccgacgatccgcaacctggacttcctggagatgtggcggcccttcttccagccctaccacctcatcatcgtgcaggacggcgacccgaccaagaccatccgcgtccccgagggcttcgactacgagctctacaaccgcaacgacatcaaccggatcctcggccccaaggcctcctgcatctccttcaaggactccgcatgccgctgcttcggctacatggtctccaagaagaagtacgtcttcaccatcgacgacgactgcttcgttgccaaggacccatctggcaaggacatcaatgctcttgagcagcacatcaagaacctcctcagcccgtccaccccgttcttcttcaacaccttgtatgatccctaccgcgaaggcgctgactttgt

SEQ ID NO: 3148 - DNA, 445 bp, Oryza sativa
  Clone ID: uC-osflcyp064d05b1
gttataatggacaggggcacagatgctcgtaactttctgttgggaaatgtgattccattacgactaggctatgttggtgtggtaaaccgcagtcaacaggatatcaaatcagatctcagtatcaaggaagctctggcgcgcgaagaaagtttcttccgtaatcatccagcgtataatggtcttgctcagtactgtggtataccacaattagcaaagaagttaaaccagattttggtccagcatataaagactgttctgccaggattgaagtcacgtataagttctcaattgacaactactgctaaggagctttccttttatggtgatccagtcgagtccaaggctggtcaaggtgctaagcttttgaacattctggcaaagtactgtgaagctttctcctcgatggtggagggaaaaaatgaggacatatcaacaattgagcttt

SEQ ID NO: 3149 - DNA, 287 bp, Oryza sativa
  Clone ID: uC-osflcyp064d07b1
accttctccggttctccctctcctatctctctctcaccggtcggcatggagcagcggtaactccacgaaagggcccggcggcggtgactgcaaagcgagcatggctcgcggcaactcaacaaagcggcccaccagcgacggctgcaaagcgggaaggaggggcgtagcggcggttcagtgaaggggtttggcgcatctcctcctctgcttccgcccgtctctaccaactaagcccatagtcgacgagcctagagaggccgcatcagaagccaacagccttgggtggt

SEQ ID NO: 3150 - DNA, 544 bp, Oryza sativa
  Clone ID: uC-osflcyp064d08b1
tcgatcgaattaaggatcctgcagctacaagcaagaaggtgcaggtgcagggtgcggccatggcgaactaccaccaccaggagtactaccagatggcggcggcggcggcggtggcgtggccgagggagccggacagcccgcagctgagcatcatgagcggctgcagctccctcttctccatctccaccctgagggacgacgacgacggcggcggcgtccgcctcgccggcgccgcgctgcccgccacgccggtgtcgctcgccgggatcgccggcggcgccagtacccccggcggcgacgaggtggacatggaggtgcggcagcagagcggcggcagcggcgacgaccggaggaccatccggatgatgaggaaccgggagtccgcgcttcgctccagggcgcgcaagagggcgtacgttgaagagctagagaaagaggttcgccggctggtggatgacaacttgaatctcaagaagcagtgcaaagagctgaaacaggaggttgctgcactggtgatgcctacaaagagctcactgcgacgaac

SEQ ID NO: 3151 - DNA, 498 bp, Oryza sativa
  Clone ID: uC-osflcyp064d09b1
ccaacattgaaagatccctgtccagttcattagcaatggccaaagccgtcgccctactccttgcagccatcgcggcatcggccgtgttagtgcaagtggaatgcgacgcccccgtcgagaagagcttcaacaaggccctcctcgcccctgtcgataagcgcttggatgaggcaactcaggccatcaacgaggctgccgactccgttgtggctgctgccccaccagcaaaaaaggatgaagttgaagctgccacgtggaagcggagaatgttcgcctttgctgctctcgggatggcccaaggagatgagaagaaagttgctgcaacttcacttgcctacaagaaagcagctaaagctgtcctcgatgccgccccagctgacaagtttaagttgatggatgaatccttcaaagtggctgctatggaggtaatcgcatcatgagccacacgccaaccttcaataaggtctactgctacatcgccgacattggtagacgact

SEQ ID NO: 3152 - DNA, 514 bp, Oryza sativa
  Clone ID: uC-osflcyp064d10b1
tcgctttctctgtgtcatgtcgtcgtcgtcgtcggcagctcgcaccctcctctcgccggcggcgcctcctgtcccgcgccgcggcgtggtgcgtcccgcgaggtgctccgggggcggcggcgcggcggcggtggagacggccgcgtcgggggcgaaggtttgtacggtgagcaaccgcggggactccctggcgatatgccgggtgctcaacggcatgtggcagaccagcggcgggtggggccgcatcgaccgcgacgccgcggtggacgccatgctcgcctacgctgacgccggcctctccaccttcgacatggccgaccactatggaccagcagaggatttgtatggccttttcatcaatagagttcggcgtgagcggccacctgagttgcttgaagaaatcaaggggctaacaaagtgggtaccacctccggttaaaatgaccagaagttatgttgaggataatattaacagatctcgaaagagaatggatgtttctgccttggacatgctg

SEQ ID NO: 3153 - DNA, 502 bp, Oryza sativa
  unsure (1)..(502): unsure at all n locations
  Clone ID: uC-osflcyp064d11b1
ttgcttttctccccgagccgccgccggagagcaagaacacggaggagcgagcgggtcgtcgagggcgatggcgggaggcggcatgttcggcggcgccggcgcgttctgggcgacgcgggcgctggaggtggtgaagcggaacgactccccgggactgctctggaagcggatcaagctcaccaccacccgcaagaacaacgccaagaagcgcctcaagcgcctctggcagaatgaggcagttataagggcttgtggtgaagcagaatcgtcgtcgtcgtcaacatcaaacaccgcatcggcctctgggaaacaagagtagatcccaaagtcaatctgatgacatgcacacaggtttaaatgcaatttgaaaaggcccagtcagtgacctttgcatgacaatgctgaaagcctctccatgtttccaagctttgttacttcatcaactggaacaagtacatgcatgtacacatncaaccttttttcatcaagaggacacatacat

SEQ ID NO: 3154 - DNA, 473 bp, Oryza sativa
  Clone ID: uC-osflcyp064d12b1
tcgctttctctctctcggtgtttccccttcggccttctcgtccgccccttctctcctccaccatccgcctcaccggcgtacggctccgacgagatggccgccccgctccggcggagcctcccctccctggggcgcacgctcctctcgccgtcccccgcgcccgcgcggatgctctccgcggcggcgtccgacgccctcgtcgagatcaagccaggcgagatcggcatggtctccggcatccccgaggagcacctccgccgcaaggttgtaatatattcacccgctaggactgcatctcagcagggttcaggcaaagtcgggaggtggaaaatcaactttgtgtcaacccaaaagtgggagaacccattaatgggatggacatctactggagatccatatgctaatgttggtgaagcagggcttacgtttgacagtgcagattcagcaaaagcatttgctgaaaagcatggatg

SEQ ID NO: 3155 - DNA, 537 bp, Oryza sativa
  Clone ID: uC-osflcyp064e01b1
gtttccgtcgccgcagcctcctcctctcgtcttctccttcgagttgttagctacctccttattcaaccatgggtaaggagaagacgcacatcaacattgtggtcattggccacgtcgactccggcaagtcgaccaccacgggccatctgatctacaagcttggaggtatcgacaagcgtgtgattgagaggttcgagaaggaagccgctgagatgaacaagaggtccttcaagtacgcgtgggtgctcgacaagctcaaggccgagcgtgagagaggtatcaccatcgatattgccctgtggaagttcgagaccaccaagtactactgcacggtcatcgatgcccctggtcaccgtgacttcatcaagaacatgatcacgggtacctcccaggctgactgtgccgtgcttatcattgactccaccactggtggttttgaggctgttatctccaaggatggccagacccgtgagcacgctcttcttgctttcactcttggagtgaagcagatgatctgctgctgcacaagatggatgc

SEQ ID NO: 3156 - DNA, 281 bp, Oryza sativa
  Clone ID: uC-osflcyp064e02b1
gctgtgttgcagaggatatcagccatggtgaagtttctcaagccctggaaggcggtgatcctgctgtaggggaggttcgcggggcggaaggcggtgatcgtgcgggtgttcgaggagggcacccgcgaccgcccctacggccactgcctcgtcgtcggcctcgccaagtaccccaagaaggtgatccgcaaggactcggcgaagaagacggtcaacaagtcgcgcgtcaagtgcttccttaagctcgtgaacttcacccaccgaatgcccacccgttacac

SEQ ID NO: 3157 - DNA, 351 bp, Oryza sativa
  Clone ID: uC-osflcyp064e03b1
gctgtatttagaatgctcacgaaggtgctaaagacatgagcaaaaaggtgcctagtggcatgttgctgttgataaccataggtctgcaaagtattatgctgcgcacgtcttttgcggacaccttaagaaggttgcgaatatacatgtgaccaccaaaaccttgttcaaagtgatgctaagtactttaaattatgatgaaatgcaacatgccgtgtgttgtattcggcttgaaccctcgacccgcgagatgtggacatgcgtgccagcatgttgtacttgtaccaggttcaacgttagcttgaacactgaacaagttaaatgtgttgcaaaatgccatttttctttatcagc

SEQ ID NO: 3158 - DNA, 239 bp, Oryza sativa
  Clone ID: uC-osflcyp064e06b1
gttttgctttggctcacggtcttacacgctcgcgctggtgttttgatcaaagatgacagcggtacatagctttaggggcaagtgaggacgctggtgctagagctatagaactaccaggtgatacgggcggacccactcatttatgaatggatcattgcaaaagaaagaatgatataaggatgactatgaggaggacagagagcgtgaatggagagacataaatgaacaagacggacgtg

SEQ ID NO: 3159 - DNA, 526 bp, Oryza sativa
  Clone ID: uC-osflcyp064e08b1
tcgcatatatctcccgtctcgtcgtcgccgcctccgctccttgcgccatctcgcggctgaacaggggaggggcgccgatctccattggcgagcagagcagggcgcgggaggggaggggatcctgaaaacacttggtttcccaaatgaagcacatattcaagataattgctatgctggtggcagtctcagctatttggattgcccttcttgaaaccgcgactgttcctcgaagttatacttggttgcttcccatctacttggtagtggcacttggatgctatggcctttttatggttggatttgggcttatgttcttcccaacttgcccgcaagaagctgtactactacagcaggatatcttggaggcaaaggaattcctatcaaagaaaggtgttgatgttggctctgaataatgtcaagatcgatgatagatgacttgaggctagtttggggacaactgtgtgctcccttatatgagttgttttgggggctttatagctaggtatatgtcacttcgtaatgatca

SEQ ID NO: 3160 - DNA, 546 bp, Oryza sativa
  Clone ID: uC-osflcyp064e09b1
tcggtttgggctataagaaatggtgtggatccaatacctgtcaatagtgggcttggtggtgcctactatttcagaaacagcaaaggtgagaatgctgccattgtgaagccaaatgacgaggagccatttgcacccaacaatccaaaaggttttacagggaaagcccttgggcagcctggccttaaaagatcggttcgagttggtgagactggttttagagaggttgctgcctaccttctggattatgataactctgctaatgttcccccaacggttcttgttaagatctctcatcctgtatttaatgtgaatgaatgcgtcagttcagccaacatgaaggcttctaaggactatccaggggctgtaagcaagattgcatcatttcagcagttcattcctcatgattttgatgccagtgaccatgggacttcaagctttcctgtctctgctgttcataggattggtattcttgacattagaattttcaacaccgataggcatgctggaaatcttctggtcaggaagttactggaccaggaaaatttg

SEQ ID NO: 3161 - DNA, 481 bp, Oryza sativa
  Clone ID: uC-osflcyp064e10b1
ttggttttcatgatacataacaaagtagccagtagttatagaaacacagctttgggcagattcgagaaattcttagctgcagctgaataagccaaatgaccatgttaagcaggttggtgagcgaagctccatattccacaaaatcctccgagggcatggaagcatcagggatggaagtaactgctgagggcaaggcccagtaactgtcaacttcgaatggtggaggctgacgtttggagggggaaggaaggaaaggcgtcgcgttcattgtttagatggtgtcgcaccctagaaccttactaataatcgaacctatgcccttattatcgttgtactgttccttatgtgctagtctattctgtcatgaatttgtttactcgaacagcaaactgctatgatagtagtatatcattgtacatcatgcatatcattgcctgacaatgttatcgtgttcgtctagtaatgatatcatccaggttaa

SEQ ID NO: 3162 - DNA, 534 bp, Oryza sativa
  Clone ID: uC-osflcyp064e11b1
ttcggttgctgcgcgcttcggggccgtgcgggctcgtcgtcaccgacgcgctcgagcccgactgccccatcatctacgtcaactgcgggttcgaggaggccacgggataccgcgcggaggaggtgctcggcaggaactgccgattcctgcaatgcagaggaccctttgcgcaaaggagacatcccctaggtgatgccatggtggtttctgagattcgcaaatgcatagacaatggtaccgaattgcgtggtgatttgctaaatttcaggaaagatggctctccattgatgaacaagttacacctgacccctatatatggagatgatgagaccataactcattacatgggcattcagttcttcaccaatgctaatgttgatttgggaccattgcctggctcattgacgaaggaacctgtcagatctacaagatttactccagataactttttgccgcccatatccactggaccagggcagagcaacttctgccgggaatattctagcctgttccaggtgactgatgaagtactct

SEQ ID NO: 3163 - DNA, 530 bp, Oryza sativa
  Clone ID: uC-osflcyp064f02b1
gccgccggccggaggaggagaagagagagagagaggccgaggttttccggtgaggaggatgggcgagttcgacgactactgggcgcgggcgtacaggggcgactccggggtgccgcactccgacccgcagcggctggtcaccacctggaccggcgccttcgccctcggcgccgccgcctgcgtccaccaccacgcctccgccctcgcctccaacatcaagtccctcccccactactggcaagacatgacaatgatgctcgatcaaaagcgctggaagaagattcttgagaagaagcaacagcaagcttaaggaagtgttgaagctgtaaacaaattgcaacggatagactttttctatttggcattttcttccgtacctttacaacttcacatatgttttcaatacagaactggttgatttgtttaaccttcacccctaatattctcgtaatgcaagtgttggacgtcttatcagttttcttaggcagcgtgtttttttcaatgatatgcaacataagtctacccttaat

SEQ ID NO: 3164 - DNA, 534 bp, Oryza sativa
  Clone ID: uC-osflcyp064f03b1
atttacatataagattagaagaaagcaagcaacaatggcgtcagctccggccgcctcttccgcagtgctcctcgtcgtggtcctggtggcgagcctcgccgccggcggcgccaacgcggcgaccttcaccatcaccaaccgttgctcgttcacggtgtggccggcggcgacgccggtgggcggcggcacgcagctgaacccggggcagacgtggaccatcaacgtgcccgccgggaccagctccggcagggtgtggggccggaccgggtgcagcttcgacggcgccggccgcggcaggtgcgccaccggcgactgcggcggcgcgctgtcgtgcaggctgtccgggcagccgccgctgacgctggcggagttcacgctggggacgtccggcggcaaccgggacttctacaacctgtcggtgatcgacgggtacaacgtcgccatgagcttctcctgcagctccggcgtgacgctgacgtgcagggagaggagctgcccggacgcgtaccagtaccccttcgacgactccaagct

SEQ ID NO: 3165 - DNA, 185 bp, Oryza sativa
  Clone ID: uC-osflcyp064f04b1
ctgtcgcttgggttcttcttcttctcctcccggcaagcatcgtcccgccattgttgggatccatttgtttattatggtgtttcttgacgtggtttagggcttcaagaacgccgccatgatcgggacaaggtgtgagacgacatgggtttgggtggtgatggtggtggtggtgattttttaatccg

SEQ ID NO: 3166 - DNA, 458 bp, Oryza sativa
  Clone ID: uC-osflcyp064f06b1
atgttgttatagcaaaccggagcaatatgaagattctaaaagaaatgaggaaattggcaattgaatgcctaacactggacattcataaacgtcctcaaatgaatgttgtggcaaaacgccttcgtacacttaaaaaagaattaaaagacatgcatggaagatactcagaacacattttggcatcacaccgctcatggcgaaaaaatgacaaccaggggccgagctataattctaggatgcaactgaagaagagtttgagcattttcaagagaaatcttagcaattcttctaagatcctattgggactcggcaatatgagaattttcacacaggaggagctaaatgaaatcacacagaattactcgtgtctactcagtggaggtacttcgggtagggttacaaggaacgcttgaggacaatacagtggtagcggtgaggatatttttcgaggtacttga

SEQ ID NO: 3167 - DNA, 544 bp, Oryza sativa
  Clone ID: uC-osflcyp064f07b1
tcggtttggatcagtttacacttgcggagctggtgggcttgccatttatatgagaggatatgatctggttgcatccaagcgtctttcttgggctgggaaagtgcgatgttggcatggtttaatcaaaccgcgcaaatttatgcactagctaagcaagatgcagggatatgcaatatggttttgtttggtctgattgagccgggccactatcacaagcttggctggcttaattacatgtagtagtgtgaggatattggattcttccacaaggtatgagaattgtcatgttgtgtatttgtgctcctttatgcgtgttatttcacatgcctgcctattagatttaagtttctttatgttgtttcatgcaaagctttcagaaactattttgtctgacggttcaagctttacagatttaagttttgctgctggtactagctggtcaaatggcactaaaaggtttaaaaccatgtgaatatttatgaatatcaatgtagtagtaacataaatcttactcctatcaaagaaaaatccttatcagcagcac

SEQ ID NO: 3168 - DNA, 485 bp, Oryza sativa
  Clone ID: uC-osflcyp064f08b1
ttcgatttatggacccaacatgacattcacttgggaaaggttaaacaagttttgtcggccgatacgctctgactataatgcaacttcgtgtaattcatccaaggatcaggttttagtaccaccagggactaatgccttagtagcgactctgaaagatagcagccaggtccatagtgcgtcaagtcagcagtatgtcagaactgatccatgcacacaaagggctcttcatgaagtattatcacctacaacctgtggtttgaagccttctttagatcccactgccatgaaaaatctgtatgggggtgtttactcaaggcagtgcccatcctggacctccaagtttcagtaatcagctaccgaatgatgggcgaatttaaagaacatgtgaatctctaccaggtgtggaagcttgagctaggggacatccaactgacacggaacagcctgcactagaaattcacagcaggaatggaggcgctcagaat

SEQ ID NO: 3169 - DNA, 465 bp, Oryza sativa
  unsure (1)..(465): unsure at all n locations
  Clone ID: uC-osflcyp064f10b1
tgtttttttttttttttttttttaaaaattaaaatgccttgtataaagggacgggggagtatcagcgtatctcctctccaccctcgcagtccaaaccgagcaagatctcccctgtttctctctctctctcaactgtgaactctgaactcaatccaggagatctctccatcatgtgttaatctgcatctttgtctccatccatctctgccgcactcaatcacactgcaactgcaactgcatcaagaatccatccatcctttctccctgccaataatttctcaagaaaaaaaagaagaaaaaaactgtcgtctctctccgttgatagcgaccttgccttgcgttgtctccggcttcttcgcctataaatcatcgncttcctcctcctcttcgcttccaaaatcctcgagattttcttgttgcattgcattgtggaggggagaggaggaggagagattagggagtact

SEQ ID NO: 3170 - DNA, 542 bp, Oryza sativa
  Clone ID: uC-osflcyp064f12b1
ttggtttgacccaccctcaagctccaagctccaagaaccatggccgccacctcgctgtcgccgccgaccgtggccgggctgcggctggcgccgtcgccgcgcgtgcggtcgccgtctgtggcgttcagggcggcgccggcgaggaggaggtcggtggcggcgagggcggagctgagcccgtcgctggtgatcagcctgagcaccggcgtctccctgttcctggggcggttcgtgttcttcaacttccagcgggagaacgtggcgaagcaggtgccggagcagaacggcaagacgcacttcgacgccggcgacgagcgcgccaaggagttcgccggcctgctccggtccaacgaccccgtcggcttcaacctcgtcgacgtcctcgcctggggctccctcggccacatcgtcgcctactacatcctcgccacctgcagcaacggatacaacccaaacttcttctgatcattctcatcttggatggatgcaatgtaatctgaatggatctctggtgtttctacgtgattatgtatgagatgggt

SEQ ID NO: 3171 - DNA, 544 bp, Oryza sativa
  unsure (1)..(544): unsure at all n locations
  Clone ID: uC-osflcyp064g01b1
acggtttaatttttttcacgatctcgatggttatcatcaacttggggcccaaagcgtataaaacaggcacttcgccaaaaaggggtgcaagatgcagaagtagaccaggcgacaaggagagtattccaagatggtcattcaaaccagacaatgtatggcatttccgaggattcaatggatcatctctttgagtaggcagctaaacagtggcagcgggggcaaagcttgccccttgagaatcgccgtgcacgcgtagtgaggtggcttcagtaccgagggttcaactgggctgtaaccaatgccattgttaggaagctggaagcacagaaacctccctgagtatggaattgatccttctcctttgctgcttttcaactntgcaatttacaatggtttgctatttctgtcgcaagtttagcttgcacgttccttctatagttatgaatctggtttctgattaacatgccattttgaacaacggggaacgatgattaacatggtcatcattcaacttacattaactcatccattgcatgattacatg

SEQ ID NO: 3172 - DNA, 539 bp, Oryza sativa
  Clone ID: uC-osflcyp064g02b1
acgcctaactttgttttcaacaaaatatgcaaatctgtagtggtatccccaatttgttctgttcattctattcagacgatagatattttgcagtcttttgtacaaccacttgagctgctgttaagccatccaagtgcattcttgttcattagtgccttgcaggatacagttatttcgcatagaaataaaaaattctaacgatactaaaaaatagggggttccatcgattatatggttcccttttaaacggcgaggcccatgtatccgtgctccaggatagagggttcatgtggcactgctatagagatttcaaagcacagtcccaagatttgcttgtcatcaaagttttactgtgaacaagttgcctagtagattctgaatccttcaaggcaattcatactctggctcctagattctgaggttgatatgcaaaaacaaacatataagcattggccatgatttcccagaagaatctttgctaagctgtaagtgcaacgtgaaagatgcaggcacctcagattgcattttatcactttatg

SEQ ID NO: 3173 - DNA, 531 bp, Oryza sativa
  unsure (1)..(531): unsure at all n locations
  Clone ID: uC-osflcyp064g09b1
gcctgcggccgacgcgggggcgcggaggcgcgcacgcacgcacggcggtgtggacggctcctctccttgccggagcccggcctccttccctgtgcggcctcctcgccccgccggcgagcctctctgctcgaatcgaaccggaggtataccccattcctgcctcgtagccctctctctccctccctccctccctcgctccggcgccgcttcatgcgccggcgagacctggatcgggaggaagactcggatcgagccggtggggcgcgatgaacagccagggattcggtccgggcgggagccccaagtcgttccgctaccctagggcggacttcgatctcgagtccgggatcgcccgcaagggcttacgcaagcccaagaaccacgacgcccccggtttgctcacctccacgctgatgaagatccggtacttctacgaggcgcaccccgtcgcggtcgccttcatcctgctgtccttcgggctcagcgtgctgatccttctgtcggtgtacgagacccggntcaggatgatgc

SEQ ID NO: 3174 - DNA, 114 bp, Oryza sativa
  Clone ID: uC-osflcyp064g11b1
tggatgctacctagcttaattacctagctactcgatcgatcatcagtctagatatggcggctttgaacggtaaggtggtggtggcggtgatggtggtggcgatggtggtggcgg

SEQ ID NO: 3175 - DNA, 538 bp, Oryza sativa
  unsure (1)..(538): unsure at all n locations
  Clone ID: uC-osflcyp064g12b1
tgcgttgacgcagctccaaatcggaaccctaaccctagtagtcctcctcctcccgcgctcgatccgaggtcgtcatcccgctgattccgaggctctctactgcggcggcggcggcgatggaagagcataggcttggcggcggcggcggcggaggcggaggcggggggaggccgccgatcccgggggcggcggggaggaagcttccggggctctcgcggcacgcctcgttcgtgaggagtcctgcaaacagtacaaaatctggaactgagaaaacttttgaaaacatggatgctgttgcatatatgcctgttgtaaggtctggaggttgggctgatattgggtcaaggcacacaatggaggatgtctttatttgttctgataacctcatgaaagagtttggagttgaaagttttgaagatggtccgagcgcattttatggngtttttgatgggcatggtggaaagcacgctgctgactntgtgtgcagcaatttggcaaggtttatcgttgaggatgaggattttccaagggagataga

SEQ ID NO: 3176 - DNA, 474 bp, Oryza sativa
  Clone ID: uC-osflcyp064h01b1
ggtcttcgttcgcgcacccggccatcggcaccacctcctcctccgcccccaagtcggtgcctctctttccttcctttagtttttactctttttctttttttgattgcggattgattgcttaagagctcctagaaggaaactccctcagctcagatgctttgctcaacttgttcaaagtcatccatcctagggagaaattcactctgtgcggcgtaattagttttgacgaacagagatctgaatcatcaatgcccgtactggcttacaatacagagaggcatagctgcatagtagatagtacatgttcatggtgttgacaactactgctttttctatgtgcttgtagtaccttaatttacagacctctacaaaccttacatattgcgccactaatgtaaggcagatcaaggcgagtctagtctgagatataaaaatcacactagccaaagccaataaataaatgaatagagaatc

SEQ ID NO: 3177 - DNA, 490 bp, Oryza sativa
  Clone ID: uC-osflcyp064h04b1
gtttgtttgcgccgacaccgccttcttgcggagcctgcggccagcgtcgccgctttcttgtcgagtttctagagagaccgaagacatcgacggcatttgtaaatttttggcgtttacaatttgtcctcaactggttgtcgcgatccctatctatattctatccacagcagagcaagaagctgatccggactgcctgccgtacgtcgcccggccggctgtcgcggccttgtccagctgtgagagacgcacaccgcgcacccaccggcgcccccaatggaccccgcggatccggtcgctgtcagcctcctccgcaatccaaatgtccaattgacgcaccacctcgatccgtaccgtcgattgcaccagtaatccgcaattccgcatcatgccgtacaaggggagctgtacgtcggatgcgagaggccatcggcgggcattaaacaatgggcatttgtttgggttggagggggttttgagagagggaatgggg

SEQ ID NO: 3178 - DNA, 416 bp, Oryza sativa
  Clone ID: uC-osflcyp064h05b1
gtctagtgttccacccgcgtcgacctcgacaacgccgacaaccccaactgggacgacaagctcaccctccctctccccccctcctcccgcctcgacgacgccctcctctacctcgacgtcgtccacgccaacgccgccgagggcgtcaagccgctcgtcggctccgcccgcctcccgctccgcgacgtcctcgacgacgccggcgtaggcgcccgcgtctcccgctccctccgcctcaagcgcccctccggccgccctcagggacgccttgaccttcgacttgccgtccgcgagtccgcgcgctactacgacccctcgccctacccggctccctacgggcaacccgtcggaacacgcgacccctatggcgccccgcctacggcctacagcttcggctcaggcgggcagtacccgta

SEQ ID NO: 3179 - DNA, 372 bp, Oryza sativa
  Clone ID: uC-osflcyp064h06b1
cattataaattaccaacgcaagggatcttatcaatgttttggaggaggccataagaggtgcatacccaattctgataattgctgaggatattgagcaggaggctcttgctactcttgttgtcaacaagcttagagggtcattgaaaattgccgctatcaaagcccctggttttggtgagcgcaagacccagtacttggatgatattgccattctaactggagcaactgtaatcagggatgaagttgggctgtcacttgacaaggcagacaaatcagttttaggaacggctgcaaaggtggtccttaacaaagagtcaacaacaattgttggtgatggcagtacacaagaagaagtgacttaaaaggttgcac

SEQ ID NO: 3180 - DNA, 476 bp, Oryza sativa
  Clone ID: uC-osflcyp064h07b1
tcggtttcgttgctgacgaagaagatcgtgaagaagcgggtgaagcagttcaagaggccgcacagtgaccgctacattggcctcaagacaagctggcgcaggccaaagggtattgactctcgtgtcaggagaaagttcaaaggatgcaccttgatgcccaacattggatatggttctgacaagaagacaaggcactaccttcccaacaagttcaagaagtttgcggtgcacaatgtctctgagctggagctgcttatgatgcacaacaggacatactgcgctgagattgctcacaacgtctccacccgcaagcgcaaggagatcgtcgagcgcgctgcgcagctggacatcgtggtcaccaacaagcttgccaggctccgcagccaggaggacgagtgaaattttctgcagtttttcgtgcttatggctgcattgttcgtagggcagtgccttggtaccttaaaaatatccatttt

SEQ ID NO: 3181 - DNA, 444 bp, Oryza sativa
  Clone ID: uC-osflcyp064h09b1
atttgctgctaaagacgttgaattctgcgaatggaagggagacatcctcgcaatcgcagagacagagaatgatctggtcaaaggatcagactccaaattcgagaatgcggtgttgaagaagctcgacggtcagctcggcggcctactgtcggaggcatcaggaggaggaggatttcaccggcaaagctcgggcaatacagcggtgcgtccgctctcccggggcacggcttcaagagggtgggtctgatcggccttgggcagaacgccccctacaccacaacggtttgcaagggcatcggggaatccgtcgcgcaagatgccaagtttgctcaagctagcagcgcggttattgattttgcttcagggggtgggatccaggaagattataagctgactgatgcggcagccattgcttcacgaactgtgcatgggctgcacgaggac

SEQ ID NO: 3182 - DNA, 498 bp, Oryza sativa
  Clone ID: uC-osflcyp064h11b1
ttgctgtcgcgtgggacccaatcccctcctcatccactccgctctgcggccatggccgcctgctgctcctccctcgccaccgccgtctcctcctcctccgccaagcccctcgccggcatcccccccgccgcgccgcactccctctccctcccccgcgctcccgccgccaggcccctccgcctctccgcctcctcatccagatccgcccgggccagcagcttcgtcgcccgcgccggcggtgtggacgatgcgccgctggacgggaacaaggcgcccgacttcgatgcggaggcagtcttcgaccaggagttcatcaacgtgaagctgtccgactacatcgggaagaagtacgtcattctcttcttctacccgttggacttcaccttcgtctgcccgaccgagattaccgctttcagtgacagatacgatgagttcgagaagttgaacactgagatcctcggtgtttcaattgacagggtgtcctcccatcttgcatgg

SEQ ID NO: 3183 - DNA, 426 bp, Oryza sativa
  Clone ID: uC-osflcyp064h12b1
tcgggttaacgggctcacgctcttctgccccgtggacgccgccgtcgacgccttcctgcccaagtacaagaacctgacggccaaggggaaggcggccatcctcctctaccacgccgtgccggactactactcgctccagctgctcaagtccaacagcggcaaggtcagcacgctcgccaccgccagcgtcgccaagaaggactacagctacgacgtctccaacgaccgcgacagcgtcctgctcgacaccaaggtcaactcggcctccgtcaccgccaccgtcaaggacgccgacccgctcgccgtctacgccatctccaagttcctgcagcccaaggagctcttcaaggtcaccgaggacctggcaccggcgcccgcgccggagggccccaagaagaagaccaagatgaagaagccgtccaccac

SEQ ID NO: 3184 - DNA, 461 bp, Oryza sativa
  Clone ID: uC-osflcyp065a01b1
tttgtgacataaaaaaaaagaagtcaaagaggaaacctctttttgtgaagaatggagctgtcgtcgtttgccgtgttcaggtcaataatttgatttgtatcgagaacttctctgagtttcctcagcttggaagatttacgctccggactgaaggtaagacagttgctgtaggaaaagttgttgctgttccacctgctgggagctcaacatttaatgtttagaccttccagagcttgaggacaaatagaaggttccttgcctcaggtcaaactgttgactagtccggataagttggagcttctgcacaaaagagggaattggcgcaagaactgagttggagcgttgattactgatttcgtggcgttcgtggggtttcctcaattcagcatctgatcccatttccatttttttactacttacaaatttcatagtggtggtggcgagtctacaaatttcatagt

SEQ ID NO: 3185 - DNA, 527 bp, Oryza sativa
  Clone ID: uC-osflcyp065a05b1
ttgggacgtctccgccatggagaacaacttggccgcccacgccgccggcggcgaggacgacggcagcctcttcggcgccggcgccgacctgcccgccatggagctccccacctgccccgccgactttgacgggttccagaaggagaccaaggagatgctgaagcacaagaagggaacgaccacgctcgcgttcatcttcgacaagggcgtcatcgtcgcctccgactcccgcgccagcatgggcggatacatatcttcgcaaactgtgaggaaaatgattgaaataaatccgtacatgcttggaacaatggcaggaggtgctgctgattgccaattttggcataggaacttgggcatcaagtgccgactccatgaagctcgcgaacaagcggaggatctctattgctggtgcttcaaagcctttggccaacatcctgtactcctaccgtgggatgggactgcacattgggacaatgattgctggatgggatgagaagggtcccgggctgtcctatgttgatagtgag

SEQ ID NO: 3186 - DNA, 470 bp, Oryza sativa
  Clone ID: uC-osflcyp065a06b1
ttgaagaaaatagttccctgctccactatctgacgaacctatgtgctatagtgggaggggttttcaccgtctccggcatcattgactcgttcatatatcacgggcagaaggcactcaagaaaaaaatggagctaggcaagtacagatgatttacctgaaacatggactggccctcatgttccccaagttcccaagttccgtggcttgtaaaggatccattgcttaagacctgaagacgttgctttgctggaaggttttgctaaggccatcagaattgacgatattgcacattagttgatcaaaaactcgtttacatgtaaaaaaagacaatatcatagcgttgggcctgggggagtgctttgatgtctcaatgagactctctttgagtggccaaaactggcgaaatgagatggatagattaaattcaataaaataaattttcttattctctttttcctatctcttctaca

SEQ ID NO: 3187 - DNA, 475 bp, Oryza sativa
  Clone ID: uC-osflcyp065a07b1
cgggccggggctggtggtgccggggatctactactccgacgacaagatgctgcagtgcagggtgttcgcgtacgccgacacgcagtgctacaggctggggccaaactacctgatgctgccggtgaacgcgcccaagtgcgcccaccacaacaaccactacgacggcgccatgaacttcatgcaccgggacgaggaggtggactactacccgtcgcgccacgcgccgctccgccacgcgccgtcgacgcccatcacgccgcgccccgtggtggggaggaggcagaaggcgacgatacacaagcagaacgacttcaagcagcccggggagaggtacaggtacggggcgccggatagacaggagaggttcatccgccgcttcgtcggcgagcttgtgcaccccaaggtctcccctgagcttcgcgccatctgggttaactacctctcccagtgtgatgaagtcttgggggtgaagatt

SEQ ID NO: 3188 - DNA, 501 bp, Oryza sativa
  Clone ID: uC-osflcyp065a08b1
ttgccctccaagatcttcttggatgcccaaaggctgggcatggcgttctccgggtggtgacaagggccgcaaactctatgttgtcacctgtatcatcccctacagcagaagatgcacgatctccatctgctgctgtgatgatgacgacaaagtttgcagatcttccaagggttgtgacatcggaaaagaaagaatatccagtggatccgtcccttcctgatatcaagaacagcatctatgcttccgatgagttccgcatgtactcatttaagatcaggccatgctcgcgggcgtactcacatgattggactgagtgcccgtttgttcacccaggggagaacgcacggcgtcgggaccctcgcaagtatcactacagctgtgtgccatgccctgactctagaaagggagtttgccggcgtggtgacatgtgtgaatatgctcatggcgtgttcgagtgttggcttcatccagcacagtaccgtactcgcctttgcaaggatg

SEQ ID NO: 3189 - DNA, 298 bp, Oryza sativa
  Clone ID: uC-osflcyp065a09b1
tttgaggtcgccgggcgcccaccattgccgtcgcgtggcgaggcatgaagatcctagtggcggtgaagcgggtggtggactacgccgtcaaggtgcgggtgaggcccgaccggacgggcgtcgagacggcgagcgtcaagatgtccatgaacccattctgcgagatcgccgtcgaggaggcgctccgcctccgcgagtccggcgccgtcaccgaggtcgtcgccgccaccgtcggcccctcccagtccgtcgacaccctccgcaccgtgctcgccatgggcgccgaccgtgccgtcca

SEQ ID NO: 3190 - DNA, 421 bp, Oryza sativa
  Clone ID: uC-osflcyp065a10b1
ttgggcagatgctgagggccgggcagtggagcgaccacgattgaatctgaaaccccgctccaatgcagtaggacagtctgatgaaagtgctccaaaggaaaggcaatccctctttggtggagctcggcccagggaacaagttctcagagagcgtggaatagatgctttagcaagtgaccttgataagacatctccagttggcaggtctaaaagtgaatttgcaaagggtgagcagaaggtcgaagctatgtccattaacccttcaggtgaaaaggctgagagttttccagctggttctagaggcccaaggaatgctgataagaaagactacaggcgggatacagaccggagtgatgtgtataggcctacacgacgggaggacaacaggagagttgctagagatgtggagaagcccgagcac

SEQ ID NO: 3191 - DNA, 422 bp, Oryza sativa
  Clone ID: uC-osflcyp065a12b1
tatcggcttcacgctcaagaaattgctcattcactggatcttaggaaatatgatggaattgtttgcgtcagtggagatggtgtacttgtagaggtggttaatggtctgctgcaaagagaagactggaacacagcaataaaaataccattaggcatcatcccggcaggtaccggaaatggaatggtgcaatcacttgtgcattttgctggtgaatccttctttgtttataacgctgtgcttgcaattatcagaggtcacaagcgtccccttgatgttacctctgttgtgcagggaaagacaaggttttttagtgtcttgatgcttacttggggtctggtagctgatatcgatattgagtcagagaagtacaggtggatgggcagtgctcgtcttgacttttattcccttcttcgtgtggtgag

SEQ ID NO: 3192 - DNA, 496 bp, Oryza sativa
  Clone ID: uC-osflcyp065b01b1
ttcttatcgactattctcacattgaacaatggatggacttctcagcaacagaggttgatgccaatattggaaggtggttgtacccaaggcttggttttggcccttatgttcctgtgcttgaggaatttgctattacttcattgaagaggtcattgggtgctctgaacacacaccttgcttcaaacacataccttgttgggcattcagttactctagctgatattgtgatgacatgcaacctatattatgggtttgttcggatcttgatcaagagtttcacctccgagttccctcatgttgagcggtacttctggacaatggttaaccagcccaacttcaagaaggtcattggtgatttcaagcaagcagagtctgtgccttccgtttcagaaaaaggctgctccccctaaggaatcaaaagctaaggaggccaagaaggaggctccgaaagaggcccctaaaccaaaagttgaggcttcagaggaagaggaggcac

SEQ ID NO: 3193 - DNA, 439 bp, Oryza sativa
  Clone ID: uC-osflcyp065b02b1
ttggccttctcttgctggctaatgcagggcaagagttgcacgaggatcccctccccgcacggcaggacggcgagaagccgagaacctcacagcgccggccggaaacgcgggcttggctcgccgtcggcggcggtcggcggcgagaggcgagagcgagggcggtttgccgattcccgcgccgcagttcctcgaatcccgaattatcccttctcggcttctcccagctccaccaccggatccctctactctccacgggcggagagcgcgccgcgggagattcccgacgaggggatggccggtccggccgcgagcgcggtgcctctccacgcaggctcgactccgcttccgaggcgcaacccggctgcagtccgcggcctgatgagacctccgcttctgatggtggccaaggcgcagccttgcgttcttcgccggtttactc

SEQ ID NO: 3194 - DNA, 139 bp, Oryza sativa
  Clone ID: uC-osflcyp065b06b1
gttgtcttgctcgccacggggctgtgggtcctactagtgctgtccccggcgtcccacacgaggggcccatccgcggggctgacgaaggccgcggacgcataggcgtttgcggtgacagtcggaggaagcagaggctgct

SEQ ID NO: 3195 - DNA, 468 bp, Oryza sativa
  Clone ID: uC-osflcyp065b07b1
tctagatcaccggccacgagaccaccacgagtgcacgactacttgaggatggcgagcccaacaacaatggtgggagtggcaacctcggcgcatctccacaccaccaccaccggccggctcagctgcgcctgtgcaccaccgacgaggggaacaaggcggcggcggctcgcggtggcggtgcgggtgcgggtgcgggtgcgggcgtcggcgtcggaggcgatggcgacggagaagctcggcgtccgtgtggagcgcaacccgcccgagtcccgcctttacgagctcggagtccgcgagtggcccaagtgggggtgcgagaagagcaagtccccgtggacgtactctgccaatgagacgtgctacctgctgcaagggaaggtgaaggtgttcccggacggcgccggccaggatttcatggataccgcggcgggggacctggtggtgttccccaggggatgagctgcacct

SEQ ID NO: 3196 - DNA, 414 bp, Oryza sativa
  Clone ID: uC-osflcyp065b08b1
tttgatgggctcatgaataaggaagagttgcaacttgcattgtttaaaaaccaaaggaaggaaaatcttttcgctaatcggatatctgacctttttgatgcgaagaaaaggggggtcatcgactttggtgactttgttcgagctttaaatgtatctcatccaaacatcccaatggaagagaaaattgatttttccttcaagctatatgatatggacaacactgggtttattgaacgaaaggaggtaaaacagatgttgattgctcttctaggtgaatcagaaatgagattatctgatgagatcattgagacaatccttgacaagacgttctcagatgctgttacttatcaggatgggcgattatatagaacctagtgtgagaatattgtctcaaggaattcctctttatttgaa

SEQ ID NO: 3197 - DNA, 484 bp, Oryza sativa
  Clone ID: uC-osflcyp065b09b1
tctttagggggcgggcgtgcgtgcgtcgtcgatcgtcgacagtcgtctcttgccaccatgtctttcaccggcacgcaggacaagtgcacggcgtgcgacaagaccgtccacttcatcgacctcctcaccgccgacggcgtcccgtaccacaagacctgcttcaagtgcagccactgcaaagggattctctcgatgtgcagctactcgtccatggacggcgtcctctactgcaagacccactttgagcagctcttcaaggagacggggagcttctccaagaagttcgcgccaggttgcagatctacagacaaggaactggcaagggccccaagcaagatatgttcagcgttttctggaactcaggataagtgtgcagcctgccagaaaacagtgtacccactagaaaagctaactctggaaggtgagtcataccacaagagctgcttcagtgctctctggaggctgcatctgacccctcttctac

SEQ ID NO: 3198 - DNA, 491 bp, Oryza sativa
  Clone ID: uC-osflcyp065c03b1
tttatgcaagaatttaaggaaactggagataagagatagcccgtttggtgatgctgcactcttggggaattttgctaggtacgagacaatgcgatccctttggatgtcatcttgcaatgtcacgttaaaggggtgccaagtccttgcgtcaaagatgccgatgctcaatgttgaggtcataaatgagcgggatggtagcaatgaaatggaggaaaaccatggagatctgcctaaagtggagaaattatatgtgtaccgcacaactgctggggcgagggatgatgcaccaaattttgttaaaatcctatagagctagctgagagtagcaaggaatcctcttatttcataagatggtcggcggaatctgggaggaggccggggccgcggcaacagtggtaagctcttcaagtgtctcctcctctcctttgcagggacaggaaaaaccacgttggtgtgccttccttatctcggagcatctggcctgggatcat

SEQ ID NO: 3199 - DNA, 412 bp, Oryza sativa
  Clone ID: uC-osflcyp065c05b1
ctttcctttggatggaccaatggggggcttggttggggtggcctcggagagttctgtcagttgatgggtcattgcttaaaaagttattcctttcaacaacttccttgcaccaagagcttatttgttttgagcttccatcattgcattctactttcttggatttgctcactgcaacaataaaaggaatgcgaagccaacttttgccacatgctgctaatattgttcggttcataactaagtactttgaaatagcgaagttgtctactatgaggacaaaaggatacgggattgtgcaacaattgctgacatccatgggcgttgggatatccatgcacttgcttgaggccataggaagcaattcagttgctgatctggacaacagctgtggccaagatatgacgttattaagcac

SEQ ID NO: 3200 - DNA, 443 bp, Oryza sativa
  Clone ID: uC-osflcyp065c06b1
tttccctccaaaagcccaaaaagctcccgaaacgccaggaaagcggaaggtctcgttctcctcctctccccaaaaccaaatccccctctccgaaaatctccaaaaatccagcgaaaaccatccgatccatcgatcgatcgatcgccgcaagactgcttcgggtttttttttgctcttgctccgatcgactgcgtgcgcctcgaatcgaaatctcgagtgatatcacgcgggagttgatccagacttaaaccggattgcctgagaagttgatgggatcgcgcgaattctcggcgctgacgtgagatcgtgaaagggttggacatcaaattgctaggaggttgcggcgatttggctgcacgactgcatgaactgtttcgtgaacctgggactcaacttcgactcgaaccactacgtgggctgcctcatcatcttcctgctgcatt

SEQ ID NO: 3201 - DNA, 490 bp, Oryza sativa
  Clone ID: uC-osflcyp065c07b1
tgagagagagactccccctcactccttccccgacgacctgctcgatccgatccaatccgctcctctccagtccagatcggaaggaagccaggaatggggcacccccacccccacccttacgcgccggcggagcttcacctcccgggcttcgtgcctctccaactgtcccaggcccaaatcctcgtgccctacctcgccacctccctcttcctcctcctcgccgtctggctcatctccgggagatgcagtcgtaggctttccgacaccgaccgctggctcatgtgctggtgggccttcaccggcctcacccacattatcatcgagggaacctttgtctttgctcctaatttcttctccaaccaaaacccttcttacttcgatgaagtttggaaagagtacagcaaaggtgactccagatatgtcgccagagaccctgctactgttacagttgaaggaattacagctgtcttggaaggccctgcttcactcc

SEQ ID NO: 3202 - DNA, 495 bp, Oryza sativa
  Clone ID: uC-osflcyp065c08b1
tttggttcaccctctgaaggtttctctggaggaattgtacaatggcacatcaaagaagctctccctttctcgcaatgtgctctgctccaagtgcaatggcaagggctcgaaatctggtgcttccatgaagtgctctggttgtcaaggttctggtatgaaggtccaaattcgccagttggggccaggaatgattcagcaaatgcaacatccctgcaatgagtgcaagggaactggtgagaccatcagcgacaaggatagatgcccaggctgcaagggtgagaaggtggcgcaggagaagaaggtttttgaggcggtggccgagaagggcatgcagaatggacagaagatcaccttccctggtgaggctgatgaagcgcccgatactgtcactggagacattatcttcgtcctccaccagaaggagcatcccaagttcaagagaaagggagatgacctcttgtacgagcacaccctgaacctactgaggccctttgt

SEQ ID NO: 3203 - DNA, 484 bp, Oryza sativa
  Clone ID: uC-osflcyp065c09b1
ttggatcggctgaccaagaagatcatagatgagcatgcgaaggccctcaaggagagtggtgccaagcagcactttgtggatgctctgttcactctcagagaacagtatgaccttagtgacgacacagttattgggcttctatgggacatgatcactgccggaatggacaccacagtgatatcagtcgagtgggcaatggcagagctggtcaggaaccccagggtgcagaagaagctgcaggaggagctggaccgcgtcgtcggccgcgaccgcgtcatgtcggagaccgacttccagagcctcccttacctgaacgccgtcgtcaaggagtcgctccggctgcacccgccgacgccgctgatgctcccgcacaaggccagcacgaacgtcaagatcggcgggtacaacatccccaagggcgccaacgtgatggtgaacgtgtgggcgatcgccagggaccccaggtgtggagcaacccgttgag

SEQ ID NO: 3204 - DNA, 495 bp, Oryza sativa
  Clone ID: uC-osflcyp065c10b1
ttcgtgagttcgttcgccttcgccgccgccgacgccgccgatccccacccatcccgcgagcggagcggaggagggggggcgccgccgttcgtcctgctgcttccgccgcatcctgcgtcttcataacggaaattcaagacaggtggcaagacaaaatccaattggacataatggacaatatattagtggtatgcaagtccacattagctgacgatgaatcagctagtgaggtatcttcagggagtgacagtgacagtgattgcattcttggagatgattgcccatcagatgatgatgaagaggctgcacagatacacaagcgttttaaagaactgaaggataagttaaagacaggaaaagtagataagttggatgatgttgtttttgaagctggtgctgaacaagatggtaatgacaccccatcttttgatagcgatgatgaagagtcggtagaagaggttgcaagcgatgaaagggttctgctgaaaactcatc

SEQ ID NO: 3205 - DNA, 506 bp, Oryza sativa
  Clone ID: uC-osflcyp065c11b1
tgtcccctgaccgccgtggtcgccgcggctgcggctgccgctgcggcgggggactcgacgtcggccggcgtattccacggcgagtgcttcgtcgtgggggataacatcgacaccgaccagatcatcccggccgagcacctgaccctggtcccgtccaagcccgacgagtaccgcaagctcggctcgttcgccttcgtcggcctccccaccgcggcctacccgacgccgttcgtcgcccccggcgaggagaccacccgctacgccgtcatcatcggcggcgccaacttcggctgcggctcctcccgcgagcacgcgcccgtcgccctgggcgccgccggcgcccgcgccgtcgtggccgagggctacgcgcgcatcttcttccgcaactccgtggccaccggtgaggtctacccgttggagctagcggacactggagcctggaaggagtgcaagaccggggatgtggtcacggtggaacttgataattgcgtcatgatcaccacaca

SEQ ID NO: 3206 - DNA, 484 bp, Oryza sativa
  Clone ID: uC-osflcyp065d02b1
ttctcatacagttttcaaggccatgagaagacacagggttgagcctgatctctgttcttacacaacaatggtcttagcttatgtgaatgcttctgacatggatggggctgagaaattcttccgccggattaaagaggacggtttgaagccaaatgttgttgtttatggaactttgatgaagggctactcgaaattaaataatgttgagagagtaatgagagtgtacgagagaatgcggatgcagggtgttgaacccaatcagactatttatactaccatcatggatgtgcatggaaggaactctgattttggaaatgctgtcatctggttcaaagaaatggaggctcgtgggtacccagcagacaagaaagcaaagaatatccttctttctcttgccaaaactcctgaagaacaagaagaagcgaatgaattgacagggaattgtgcaattcagctggaagcaaaacccgatggaacaacatat

SEQ ID NO: 3207 - DNA, 272 bp, Oryza sativa
  Clone ID: uC-osflcyp065d03b1
gctctctctctctctctctctccctctctcagctctatctctcgaggcctctccctcccccgcgcccggcgacggcgatgggaggctcggagttggcggtggcccggcggctcggaggtggcagctgcggcgcacaaggcggtggcgggcggcagcggctgttgtgggaggggatgtggcgggcgccccctccgtcggatccggcgtcccctccgccggatctagcaggaggggaggcggcaggcggcggtgaccgctgtgggaggggaggc

SEQ ID NO: 3208 - DNA, 449 bp, Oryza sativa
  Clone ID: uC-osflcyp065d05b1
tttcattgggagcataacatggaataaattaatggtcaaagtatgttattgaacaccgtgtaaaaaatatatcccttaaaaaatacatgccttcagtaataataggttcaaagtatgttattgaacaccgtgtaaaaaatatatcccttaaaaaatacatgccttaagtaataataggttcaaagtatgttattgaacaccgtgtaaaaaatatatcccttaaaaaatacatgccttcagtaataatagcagtcaagcaacatgctttggggttgttctccatttaagaaattgaggtggtctataacttgggcagtgtaaatattgaagcatcaatgacagatatgcgcaatggaacaccaccacatcagttttcttccgttgctttgtataccctataccatttttgaagatcactattataccaaaccaactgctaacattttttt

SEQ ID NO: 3209 - DNA, 444 bp, Oryza sativa
  Clone ID: uC-osflcyp065d06b1
ttagaagaagagaacacaccgttcagttcatcctcacctcttgttctccacaattgcagataagttgcttcctctttttttgcagagaggagtggtggttttggtggtgcagatgatggctggcttgcagagatcagcgacaacattcagaaggtccggttcgtcaggcctggtctgggacgagcggttcttgaccgaggacgcataggcggccaaggccggcgatggccatggctgtggcggcacggaggagccccagccggagctccggcattccaagagcgtcgggagcatcggcatgatgcgccgtgtcgctggcgacgacggggacgaccgcgagaagacgacgaagcagcccaggaagaagaagaagaagaagaagatggacggtcagaaagaggacgacaaccgcagccagcaggtgttcaggaccaaggacattgt

SEQ ID NO: 3210 - DNA, 449 bp, Oryza sativa
  Clone ID: uC-osflcyp065d08b1
tctaagaaaaccgagcaagctcagctcaactgtcacggtgtcacctgtcagcgcccacaactgctcgctccgtcctccaaagcccgcgagatccaaagccgaacgccactagctagctgagagagaagcgccggccggcgagggggctagcgcgcgggaatggcggcgggcggaggcggcggctacagggcggaggacgactactactacctgttcaagacggtgctcatcggcgactccggcgtgggcaagtccaacctgctgacgcgtttcaccaagaacgagttttgccttgagtccaagtccaccatcggggacgagttcgccacccgcagcatccaggtcgaccgcaaggtcgtcaaggcccagatttgggacaaccgcggccaggaaagataccgagctttacaagtgcctattacagaggagcaataggtgcactgcttgcc

SEQ ID NO: 3211 - DNA, 481 bp, Oryza sativa
  Clone ID: uC-osflcyp065d09b1
tctcccaccgcctcctccaccccctcctcctccccccgcagagccgaaaccctaactccgccgatctctccaggtgcccaaggggagggaggggatggcggcggcaccgggggcgggagggcagggcggcggcgggatggacgccgtcctcctcgacgatatcatccgccgcctgctcgaggtgcggacggcgcgcccggggaagcaggtgcagctctccgagtcggagatccgccagctctgcactgtatcccgagaaatcttcctcagccagcccaatctcctcgagctcgaggcgcccatcaagatctgcggtgacatccatggtcagtacagtgaccttctaaggctttttgagtatggtggttttcccccagaagccaattatctattcttaggtgattatgttgatcgaggcaaacaaaagttggaacaatatgccttcctcctgcatacaaaaaaagtccccggggattttttt

SEQ ID NO: 3212 - DNA, 349 bp, Oryza sativa
  Clone ID: uC-osflcyp065d10b1
ttacagttcagttctaccacgtacaacagcagaagtgagagagggagaagaagacaagggaagaggaggagcttagctagccagccatggcgaggcgctctccttgcctcgccgtcgccatgctcctgcttggggcgttggcggcggcgagcgccttcattgatgaagcggcggctgctggccgggggctcggccatggcgcccgcttcatgagcaagcagggtcgtgtgacatacgagaagctgccggagccggagccgaagccaaagccaaagcctcatcctaaacccacgccaaaacctgagcccaagccagagccggagccaaaaccaatacctgagcctgagcc

SEQ ID NO: 3213 - DNA, 447 bp, Oryza sativa
  Clone ID: uC-osflcyp065d11b1
tgagaggaggcggcccgtccggcgtcgaggtgggcggcggcggatgggggactccggcggctccgtcgtgtcgatcgacgtggagcgcatctccttcggcggcaaggaacatcatatacataccaatcatggacccgtatctgttgcggtgtatggtgaccatgacaagccggctcttgttacttatccagatattgctttaaatcatatgtcttgcttccaaggattgctcttctgccctgaagctgcttcattgttgcttcacaatttttgcatttaccatatcagccccccaggacatgagttgggggcagctccaatttcgccaaatgctcctataccatctgttgatgatttggctgatcaggttgcagatgttctcgatttctttgggttaggttccgtaatgtgcttaggtgtcagtgcgggtgcttacattcttactct

SEQ ID NO: 3214 - DNA, 425 bp, Oryza sativa
  Clone ID: uC-osflcyp065d12b1
ttaatcaaaccctagctagctagctagctaagctagcacgcacccatggcgtcgtcttccacctcgagctcgctcgccgtggcagcgatggtggccgtcgtcctcctcctcctgggtgccaccgccacgtccacccaggcggcgcgcctcctcgacgaagaactccccaccgccgccatcccggcgatccccggcgtccccggagtgccggcggtcggccccgggatcccggtgatccccggcgtgcccggagtgccggtggttggccccgggatcccgttcgtgccggtgatccccggcgtgccggtgatcgtgccgatcatccccggcgtgccgatgatcgccggcatgacaaccctgccagtgccgccatttgtgccgccgattgatcccggcgccggcgcccggatccccggcgtgccgcc

SEQ ID NO: 3215 - DNA, 372 bp, Oryza sativa
  Clone ID: uC-osflcyp065e01b1
tttcgtccatggatggggttctttactgcaagacccattttgagcagctattcaaggaaacaggcaccttcaagaagaacttcccctcaggtacaaaggcaaacagtgaacaggctaagattcccagcaagctgtcctctgtgttctgtggaacccaggacaagtgtactgcctgcaagaagactgtgtatccattggagaagatgaccatggagggtgagtgttaccacaggacctgcttcaagtgcgcccatggcggctgccttctgacgaacgccttctacgcctcgcacaacgggatcctctactgccagaaccacttctggcagctgttcaagaagtccggcagctacgacaaccttgtgaagcccg

SEQ ID NO: 3216 - DNA, 485 bp, Oryza sativa
  Clone ID: uC-osflcyp065e02b1
tctgatgggaagatttgatctttcccacagggtagttctcgcaccactgacaaggcagcgatcctatggtaatgttcctcagcctcatgccattctgtactatcagcagagaacaaccaaaggaggccttttgattgctgaggccactggaatctcggacactgctcaagggtacaaagatactcctggtatttggacaaaggagcaagtggaagcgtggaagccaatcgtagacggcgttcatgccaaaggaggaatatttttctgtcagatttggcacgtaggaagagtctctaataacacttttcagcctaatgggcaggctccaatttcgagcaccaataagtcactaaaacctgcagtaagagccaacggcatagatgtggctactttctcaactcctaggcgattagagactgatgagatcccttttgtcgtgaatgattacaggggttgctgctagaaatgcaattgaagcaggattt

SEQ ID NO: 3217 - DNA, 495 bp, Oryza sativa
  Clone ID: uC-osflcyp065e03b1
tttgtcaacaaggctcttaacatggtctgctgctgggtggaagatccaaattcagattcattcaagcggcatcttgcaaggatacctgatttcctgtggctttcagaagatggcatgaaggcacagagctgggaaacagcatttataattcaagcgttttgtgctactgatcttgtaaatgagtatggttcaactgttaggagagcccacgagttcatgaaaaattcacagattatgaggaatcatcctggtgaccaaagttactggcatcgccatagatcaaagggttcatggactctttcgtcagcagacaatggatgggctgtgtctgacactacagcagaagcgctgaaggctgtactgttactggaaaagatctctagcaacgtggtcggggatccaattgaaatagaaaggctgcatgatgctgttgattgcctcctatctttcgtgaacaaagatggtaccctttctacatatgaatgtaaaagaact

SEQ ID NO: 3218 - DNA, 492 bp, Oryza sativa
  Clone ID: uC-osflcyp065e07b1
tcggagggctggaagaagctgcgccgtggggcggcgaggatggccgacggcgtggacgccagcgccggcggccagccgagaagccccaccgtatacgactgggtggtgatcagctcactcgacaggtgaaggcgtgatctatctaatcgagcagctaagctctgcatccggcgagaaactgcacctgcacaatatgaagcagctagaaactgaaggcgagcaaagaagaaaaaaaacactaaattctgctctttttcagttaagtttcagctcgtcgatccagagcatgaaatgttcagtgttcagctatctgcactactacagactgccgattttgtagccaaggatgtataaacgtatgcatgcttgtactaccaccgtataatatacgtacgtgtacgtaggagatcgatgcagacaaaaagtcttagcagaagaagggatccttgtacgtacacaacctgtagtgtacgtacacgatgcgatcgatga

SEQ ID NO: 3219 - DNA, 402 bp, Oryza sativa
  Clone ID: uC-osflcyp065e08b1
tctgtctgtggagacagcgcaaccatgggtgctgaaggcgcaagtgaatgtgtggtagaaaatggacctgagaaaacttcattttgatgcggtcccagtatttggtatgatgatcaggcagctaagacaagaaactgaactgacgtatgtagagggaccccccaactcccttggaatgttggcaggaaaactgtaccggcatccaacattttggctaacactcagcatattgttgtcctatgatatgctgtaaatgtacaaaactaagtagttcgatccactcattttctcgttcttcggctcgtatgaatgatgagttgtcggttatcttcaaggctcttgcactaatctgattagctacagttcctttttcttgtttctgaagctgaaaacagaattccc

SEQ ID NO: 3220 - DNA, 507 bp, Oryza sativa
  Clone ID: uC-osflcyp065e10b1
ttcaagatgctgcaggcgcacaggtgacagacaatcaatgcgaaatgcaaaatttcattgtcaaccatcaatttttgcacgagccaattttaggggttaacttgggtggaacagcagcatcaaacacactggaatgtgagcatgatggtgcgttacaagcttgtcagtcgagtgatcaagatggtgaccagaatcaaacatgccatgatgggcactccggggatttgacaaatcttagtatcattagcactcacgatagtttaactaatggcaaaaatgcttctcagaaaaggacaaactgtgaagatggcacggcaggtttagacggcccagttgtcaggagcgcgaatggcttgagaggagagatgccaccacttgggcaggagcaggatcgtacagttagacaaaagttgatactaacaatcgagtcagactctgattagcagctgatgctatttgatgtatggtccctgctatagtgctatgccccccagatgcatgcaccat

SEQ ID NO: 3221 - DNA, 475 bp, Oryza sativa
  unsure (1)..(475): unsure at all n locations
  Clone ID: uC-osflcyp065e11b1
tgcgtcttcgtactcgcctctctccgcgccctcctccgccgccgctcgccgccgttcgtctccgccgccaccgccgccgccatgagggagtgcatctcgatccacatcgggcaggccggtatccaggtcgggaacgcgtgctgggagctctattgcctcgagcatggcatccagcctgatggacagatgcccggtgacaagaccgttgggggaggtgatgatgcttttaacaccttcttcagtgagactggtgctgggaagcatgtcccccgtgctgtcttcgtcgatcttgagcctaccgtgattgatgaggtgaggactggtgactaccgccagctcttccaccctgagcagctcatcagtggcaaggaggatgcagccaacaactttgcccgtggtcactacaccattggcaaggagatngttgatctgtgccttgaccgcatcaggaagcttgccgacaactgcactggtc

SEQ ID NO: 3222 - DNA, 277 bp, Oryza sativa
  Clone ID: uC-osflcyp065e12b1
tctttgcgtcgtactctcctttcgtgtgccatgattttctgctccgagtttgtttgctcttcatcgaaccgtgggctaggagaagtcgcacaccaacacagcgaggattggccacggccaccgccttatgtcaagcacctcgggtcatctgtgctaccagctagggggcgtcgacaggggcgcgaccgagagggacctgaaggcacccattgaaacgaacatgacggccctacagcccgcggaaatgctcgatgagctaagagactatcgtgagaga

SEQ ID NO: 3223 - DNA, 492 bp, Oryza sativa
  Clone ID: uC-osflcyp065f03b1
tttgctcaccacaaacaagcctctcacaaccctcttaccaacggatgaaatagcaaccgcctaccatttctccctcctcctctcacctgtcgtctccttttgggactgcatcttccgcaagataagatactcattcagacctgagtgggtgtagcatcctgcactgcctgtttctttttagcgctagccagtgctttgctttctggcctggatcactccaaacaatgaactttgaagcttttgctttcccgtaattacaattacagtcactagtggagtttagctgaaaatagtacatagttgtcatggaaaaggccgcggccaatcaggcgggcaaagtcttgaagaaaggtaagaagaaacaagccaaggatgaattagatcgccagaagcaggctgagaagaagagacggcggctggagaaagcgcttgcaaactccgctgccattatatctgagctggtaaagaagaagcagacgaagagggaagaac

SEQ ID NO: 3224 - DNA, 283 bp, Oryza sativa
  Clone ID: uC-osflcyp065f05b1
tcgtatccctccacgagaaggacgacctcgtgggtatccgccaccaccgccgccgccatcgtggaggaggcggcggtactgatggagttcgtggcgttcgtcacaacacaacacacgccgggcacgccggctgagccagaggctgaagcggggggcgcggcggcgggggcagacaccggcggaggcgaacacgccggtcacagccgtgggctgcaggggcggaaccaatggagccggaaggtccggtggacatctagcaccttgggcccgaaaggcgtcggga

SEQ ID NO: 3225 - DNA, 506 bp, Oryza sativa
  Clone ID: uC-osflcyp065f06b1
ttgacgcgtgggcaatggtgctatttttattttcaatccaagaactggtcaactatttctgaaggtcatccacacaagtgtatgggctggacaaaagcgtcttggacaactggccaagtggaaaacagctgaagaggttgctgcattagttcggtcgcttcctgtagaagagcagccaaagcaaatcattgtgacaaggaagggtatgttggatcctttggaggtccatctgcttgacttccctaacattgtgatcaagggcagtgagctgcagctgccattccaagcttgtttgaagattgagaagttcggtgatcttattctcaaggccacagaaccccagatggttctttacaacatatatgatgattggttgaaaagtatctcatcattcactgctttctctcggattgtgcttatattgcgtgcacttcatgtcaataatgagaaggcaaagatgctgctcaagcctgacaaaactattgtttactgaccacattatattt

SEQ ID NO: 3226 - DNA, 370 bp, Oryza sativa
  Clone ID: uC-osflcyp065f07b1
ttcgacgtgtcacctcttcccgccctccggcctccctccccaacccaacccaagcctatctcacaaacccgcgcgctatccctctccccccttcccctctcacaccgcgagctcgcgtaggacacgaacgagatgaggccagcgtcgtcccccgtgccggccgtcctcacggccccggctaccgctgccactgccgccatcgccgtaaagccaacgccgcctcaacgcgcgcttcaagccagcaggcgcgagttggtggtggcggcgggaggggtggcggcggcggcggtggcgctgtggccgtgcgggggagcggcgcgggcggcgtcggacgacgagtacgtgagcgagacgaaggacgtgatccgga

SEQ ID NO: 3227 - DNA, 367 bp, Oryza sativa
  Clone ID: uC-osflcyp065f08b1
gcactggtcactgctccaagcagcaccagcctaacagttcaaaccaaattggctggaggcttcgacaagctgctactcgacagcctttacgaagacgagacgaggcggcggcagatcgccggagtcacctacaccggaaggattggaggaggagcacccaaccctttcgacaccaacgatccatttgctacggggagcagctttttgcccccatcccatgtccagtttgtagtgcttggccagcagccactgcagtactaccacgctgagcaccaggcccactacataccagcctgatatttccaggatcatgaacgtcgccatcacatgcctgttgcgacccattattgacaagattagattttac

SEQ ID NO: 3228 - DNA, 442 bp, Oryza sativa
  Clone ID: uC-osflcyp065g02b1
gctgttttgatcgatccagcaactagatcaacagtgctagctaggaagcatggcccgtgcacagttggtgttggtcgccctggtggcagctctgctcctcgccgacccgcacgccgtcgtggccatcacctgcggccaggacaactccgccgtcgggccctgcctgacctacgcccgcggcggcgccgggccgtctgcggcctgctgcagcggcgtgaggagcctcaaggcggcagcaagcacgaccgcagaccggcgcaccgtctgcaactgcctcaagaacgcggtccgcggcatcaaggggctcaacgccggcaacgccgtcagcatcccctccaagtgcggcgttagcgttccctacaccatcagcgctttcatcgactgctccagggtgagctgagccatcgatcagagagacggatcatatatatacagcagcgcg

SEQ ID NO: 3229 - DNA, 128 bp, Oryza sativa
  Clone ID: uC-osflcyp065g04b1
acgcccaccgttttttactccaaagaaaactggatgagacgggggactatggagaggaagggggggtgggcacaccaccgccacaaggagacccggggaaggacgggaccccgccgccgggggacccg

SEQ ID NO: 3230 - DNA, 400 bp, Oryza sativa
  Clone ID: uC-osflcyp065g05b1
tgtgcggaaaaaaagatttcgcccccatccggcgggcactcgcgcctcgcgagccgcgtccacctccgcgcgggcgccacgccacgccacgcccacccaaacagcttcgctcgccttcctcctctcggccctcgccgtgtccaccccccccgatcgagccgccctccccctccgccttccgcctccgcgcgcgtttaggagggggtcgggaggcccgaagctgggccggcgtttccgccccgcagggtccgggaaggagagatagggagaagggtcctcggctttctcgcgccgcgtgctttggactgggatgagctggtgcttgacagtatttctggaaatggttagtgggaggtcagcaaatggggaattggatgcctgctttagaagcctcatgctt

SEQ ID NO: 3231 - DNA, 285 bp, Oryza sativa
  Clone ID: uC-osflcyp065g07b1
ttttgggcaatgatgacagtaatcttcttctgggctgcatataagacagactttttcccgagaatatttcatgttgaaagcttttgaaatgacagctcaagatgattttcaaaaaacttggctatgctgttacctacaggtagcaccttagcaagctttattttgtcacagggccccgccgttgccatttgggggtgcccctggatttttgggagcctctgggtttttgggtgcaccaccgcataccggcgcaccggctgcaactgcctcaagaacgcggaccgc

SEQ ID NO: 3232 - DNA, 490 bp, Oryza sativa
  Clone ID: uC-osflcyp065g09b1
tctccctctctctctctctagcctccaaccatcgcttcacctgctcctctctatcaagttctctcccctctcttgctgtctctgcttgctgctgctgctgctcgattcggccggcggccatggcgtccagcgcgtcgcggttcatcaagtgcgtcacggtcggggacggcgccgtcggcaagacctgcatgctcatctgctacaccagcaacaagttccccactgattacgtacccactgtttttgacaatttcagtgcaaacgtggtggtcgacggcaccacggtgaatttgggtctctgggatactgcagggcaggaagattacaacagattgaggccgcttagctaccgtggcgccgatgtctttgtgcttgccttctccctagtgagccgagctagctattgagaatgtcatgaagaagtggttaccagagctttagcattatgcaccaagggtgccaattgtgttggctgggcccaattggatct

SEQ ID NO: 3233 - DNA, 497 bp, Oryza sativa
  Clone ID: uC-osflcyp065g11b1
tctagtaatgaacttgatattctagaaattcgctacggtgagctccttccgtatgttgacaggtttgtcatccttgaagctaatgccacattcactggcatcccgaagtcactctctttcttggaaaatatcaatcgctttgcattcgctggctccaagattgtgtatgacatgcttcctgtcatggaaatggatcccggttctcaccgtcagcccttccatgttgaggccggccaccgtcgtgcgcttaatatgctgctgcgaagatcaggcattgctgtgggggatgtattgatcatggctgatgctgatgagatccctagccctgagacggtgcagttgctcaagtggtgtgatggaataccgcaagtcatgcatctcgagctgaagaactatatgtactcctttgaatttcctataaactacaacagctggagggccacagcacatgtgttcactgagcatacattgtaccggcacttccgtcagagcaacct

SEQ ID NO: 3234 - DNA, 424 bp, Oryza sativa
  Clone ID: uC-osflcyp065h04b1
tctgacgcgtggggctgtttttgagagcaatgctatcgcgcgctatgttgctcgcttgaaggacaacagctctctttgcggttcttctcttatcgactattctcacattgaacaatggatggacttctcagcaacagaggttgatgccaatattggaaggtggctgtacccaaggcttggttttggcccttatgttcctgtgcttgaggaatttgctattacctcattgaagaggtcattgggtgctctgaacacacaccttgcttcaaacacataccttgttgggcattcagttactctagccgatattgtgatgacatgcaacctatattatgggtttgttcggatcttgatcaagagtttcacctccgagttccctcatgttgagcggtacttttggacaatggttaaccagcccaacttc

SEQ ID NO: 3235 - DNA, 484 bp, Oryza sativa
  Clone ID: uC-osflcyp065h06b1
ttcgccgccgccgcagcttcctcctctcgccatctcccgtcctctccttcaagtcagctacctgcttaatcaaccatgggtaaggagaagacgcacatcaacattgtggtcattggccacgtcgactctggcaagtcgaccaccacgggccatctgatctacaagcttggaggtatcgacaagcgtgtgattgagaggttcgagaaggaagccgctgagatgaacaagaggtccttcaagtacgcgtgggtgctcgacaagctcaaggccgagcgtgagagaggtatcaccatcgatattgccctgtggaagttcgagaccaccaagtactactgcacggtcatcgatgcccctggtcaccgtgacttcatcaagaacatgatcacgggtacctcccaggctgactgtgccgtgctcatcattgactccaccactgggggtttttgggctggtttctccaaagatggccagacccgtgagcacg

SEQ ID NO: 3236 - DNA, 383 bp, Oryza sativa
  Clone ID: uC-osflcyp065h07b1
ttcctctctcgtggtgtggtgtggacaagagaggaaggaaagatggagggcggcgtttggggggaggtggaccacctcgccggcgagagggccaccgcgcagttcgacgttgaacacatgaaggttgcctgggctggctcccgccacgccgtctatgtcgccgaccgcatggcgcgcctcgttgcttccgaccccgtgttccgcaaggataacaggactatgctccccaggaaggagctgttcaaggacacactcataaaggcagcccatgcgtggaagcgtatcgtcgagctccgtcttacagaagaagaggcaaatttgctaaggctatacgtggaccaacctggttatgttgatctgcactggggcatgtttgttcctgc

SEQ ID NO: 3237 - DNA, 387 bp, Oryza sativa
  Clone ID: uC-osflcyp065h10b1
ttcactggcaattgctggtatctcgcaaccgcaaggcacgggcaattgcttgtaccactgtatgtgtgccattgtagcttacatagtgtattagaatcaagttcaacctgttcgctgggagacttgttgtaacctgtaagtgttccatttgtgtaaccggagtgaaatctgacatattttgagttgaacatggttttgtcgtgtcgaccagatgtattaccgcagggcttggttggatgcagaaaggaaagcctcagcctgtggaatttgtacgtctatgcgacaccacgcatgtaattcggtttgcaactgcaagtctatatacgcaaaaatacattgttatgcctattaaataatatttatttaaaaattttaattttattatta

SEQ ID NO: 3238 - DNA, 495 bp, Oryza sativa
  Clone ID: uC-osflcyp068a01b1
tttcttattcgtttcctccgtctcactcctactcctcggctgcccccattcttctctggatatttttctttttcatcttctttgagttggagggcttgattttaggggggactgctcgatcggcagggttaattccgatctctttatccttcccggacagagccgggatcagtattaggctttttgctagaagcacaaaacaaaaggaatgccggaagatgtgcttctatgatcgagagctaccttgtgtgggaattggcaaggtagctcaaaatatttatgctttgtgtgctcttgatgatagtgaagtacgggtttatgcacagcaagtgctccttgtgcatttgcacgatggggctagatgtggcagttcaaccatcatgttagattaccatcttgttggggacggttgaaattatttttcatttattgcctctctcatctgatactccctcatcaatcatcatcactaagttacatgattagtgctttctg

SEQ ID NO: 3239 - DNA, 440 bp, Oryza sativa
  Clone ID: uC-osflcyp068a02b1
gcgttcgtttcacttcaaaacacctcctttaatgataacctgagggatgcttgagagtcatgaggcacaaagagccaattttatagattatacagagagaaatcagagccaccaaactagaagagcaccttcactgatgaagaagatatgatgagggagggagatgcatgggcagcacttctaagaagcaagctgcatgggctcgcaaagaggacccggagactggaagaggtgaacaagcaatagatacattaagtaaggcgtcgagaaggtcaagtatgctcccttgaaggcccggatactgatagaaagatgctgtggatgaagctggatgagttttccgacaaaagacacgacctcataaaagctgaacatgttgacccaatgccagctgacagaggccgtgatctgatcaccacaacattttacaagaagcgccc

SEQ ID NO: 3240 - DNA, 291 bp, Oryza sativa
  Clone ID: uC-osflcyp068a05b1
tgcttattaactaagacacccttccttgattgtgacactagcacgactcactttcctctatatacatatacatatatcctccttctgtccagctaacggttcatatgcttagctagctgtttgtcttggcgataccatttgcattgcttgcccagcatcgtcggcgtcgccgtcgggagcaaggaggaggagagaccatcgatcttgattgatttgaagctagacggcggaggaggcgaagatagggcaggcgaccaaagacatttcctaagagaaggctgtggagccgct

SEQ ID NO: 3241 - DNA, 528 bp, Oryza sativa
  Clone ID: uC-osflcyp068a07b1
tttctattccaaattcccccacgcgaagaacagccagcgccctcctcctcctcctacttcgccttcctcctggtttcttgccatctttccagggaaggaggaaccgcggcccggccgcattcttggacaagaattgttggcataaaggaacattctgttgatgctctaatggagtcaaaaggtggcaaaaagaagtctagcagtagtagttccatgtacgaagctcccctaggctacaagattgaggacgttcgcccagccggaggaatcaagaagttccagtctgctgcttactccaactgcgctcgcaagccatcctgatattccttcacatgcctttccccgtagagtaggaatttcctgcaatttttcctttgttttgttgcaataaatctcccttggctggctgctttctcaatctcttccctagtcttctccgatcctttctttcctgtctgggccactgctccttgcaacactagatcaaatgcgatgcccttggctgattctaggggctttgcccctgcc

SEQ ID NO: 3242 - DNA, 516 bp, Oryza sativa
  Clone ID: uC-osflcyp068a08b1
tctgtttccatactggagacattggtgagtggcaacctgatggaagtatgaaaatcatagatcgcaaaaagaatatcttcaagctttcacaaggagaatatgtagcagtagaaaatttggagaacatttatggtcttgtttctgctatagattcgatatgggtatatgggaatagctttgagtcattccttgttgctgtggtcaatccaaacaaggaagcattggagagctgggctgcagcaaatggaatcagtggtgatttggaggcattgtgtgagaaccccaaagcaaaagaatacattttgggagaactgtcaaaagtaggaaaagagaagaagctcaaaggttttgaattcataaaggctgtacatcttgaaccagtgccatttgacatggaccgtgatttgattactccaacatataaaaagaagcgcccttaattgctcaagtactaccagggaacaattgacaacatgtacagaagtgccaaatgagctcgccatgccgtctagaaca

SEQ ID NO: 3243 - DNA, 449 bp, Oryza sativa
  Clone ID: uC-osflcyp068a09b1
tcttaaaaaggctgcacccactggacacgttgagacacatcctcctctgagtcaacctgcttcatacgaacaacgcatctcatcagcgagcatgacaggaccatctccagcaggaggaagtggaactggaactgattccatagggtatgatggcaaccaagcagctacacagccatctcaacttcaaagtacatctgccaatgtccctgtgccatacgatgacaccttttcatttttaccgcctagtatgttgatggggtctgataatcaagaaaccggaaatgatggcatgggcctggaactaggccaattgcaacaagcaatttcacagagtcagtcgattcagccagcaaatgttggctatgatgattggactcgaagtcaaaacggtcagttcgctgatgacttcaccgaagatattcgcatgaaaagccaccaaatgctcgaga

SEQ ID NO: 3244 - DNA, 463 bp, Oryza sativa
  Clone ID: uC-osflcyp068a10b1
tcttattcaacaaggatgctatacaagctagcacaagagaaaccttttgcccctaagaggtactactccattgatcgtgttttccgcaatgaagctgtggaccggactcatcttgcggaattccaccagattgaaggtctcatttgtgattatggtttgacgctgggtgatctgattggtgtattggaggatttcttctcgagtctaggcatgtcaaagctgcgtttcaagcctgcctacaatccatacaccgagccgagcatggaaattttcagttaccatgaaggtttgaagaaatgggtggaagttggtaactctggcatgttcagacctgaaattgttcttcccatgggactgccagagggtgttaatgttatcgcatggggattttcactagaaaggccaacattgattctttactgcattgacaacatttcagacccttttggaccaaaagttgatt

SEQ ID NO: 3245 - DNA, 474 bp, Oryza sativa
  Clone ID: uC-osflcyp068a11b1
tgttaaaaatttctccccaatctcgcgaggctgtcgtcgtcgaatcgaatcctctcgcgtcctcaagatgcagatctttgtgaagacattgaccggcaagactatcaccctcgaggtggagtcctctgacaccatcgataatgtcaaggctaagatccaagataaggagggcatccccccggaccagcagcgtctcatcttcgctggcaagcagctggaggatggcaggacccttgctgactacaacatccagaaggagtcgacccttcaccttgtcctccgcctccgtggtggcatgcagatctttgtcaagactctgaccggcaagactatcacccttgaggtggagttttctgacaccatcgacaacgtcaaggccaagatccaggacaaagagggcatccccccagaccagcagcgtctcatcttcgccagcaagcagctggaggatggcaggacccttgctgactacaa

SEQ ID NO: 3246 - DNA, 468 bp, Oryza sativa
  Clone ID: uC-osflcyp068b02b1
ttttcttgccacagatgatgcagaggatggagggggtgctcttactaatgatcctggactggttcccaccaacacgtggagaaacgcgcgagacggcgcatgcttcaccccagaagactacgctcgccagaggggcaacgacgcttacctgaatatggtcgagatgaagatcaataagcatcttggcaaaggccatgctgtctctcggcgtccctagcagcatacaccctgtaataaccgatggtgtgaagcctggagaagtcagcctggagatcggcatgaccgtgccgtcgccagcaccgagctgcaacgcctgcagccgtcaggcccctgatgttccccaactcgacggcgaggaccttcctgtacaggccagcgttgctgaccgtgatgggcatcgccgtcatctgcgtctgcgtcggcctgctactccacacctgtccaaaggtttatgcagctcctacattc

SEQ ID NO: 3247 - DNA, 141 bp, Oryza sativa
  Clone ID: uC-osflcyp068b03b1
ttaacttgtggaggttggaatcagaaatcttgttggggttaattcaagcttctcaggccggagagcacgaaccagcttggagcaatccaaagaatggtgatgataacagtggatatggtaggggtggatttggactaggaa

SEQ ID NO: 3248 - DNA, 303 bp, Oryza sativa
  Clone ID: uC-osflcyp068b04b1
tggatacgaaatgttctggtcagtgtggtctgtcactagcaaaccatgttgaatgtgtatggccaagatgaagagctggtgatgtctgctatgttttgtagagggatgctaccaaagtaatgctagaatattacaagctgctatcagctgtactctctatgacaatgtttatactatgtttgctgtatggtgtggtctatgatttgaagtatgttggagactgattcaattaactgtcttggccatttgtgtgctgtaatgagcttattaagttatatagttgtgcttaatacaattattttc

SEQ ID NO: 3249 - DNA, 505 bp, Oryza sativa
  Clone ID: uC-osflcyp068b07b1
ttaaaaaaggaaaaaaagagagtcgtagttcgcctcttcttcctcctctcgttctcgcggcggcggcggagatggcgtcgttctcggaggctcccccgggcaaccccaaggccggcgagaagatcttcaagaccaagtgcgcccagtgccacaccgtcgacaagggcgccggccacaagcaaggtccaaacttgaatggtctgtttggaaggcagtcaggtaccacccctggttattcctactctacggccaacaagaacatggctgtgatctgggaggagaacacactttatgactacctgcttaatcctaagaagtacatccctggaaccaagatggtcttccctgggttgaagaagccacaggagcgtgctgatcttatttcctacctgaaggaagcaacctcttaaaaggagtggagctgtcgtaacatgagacaatcggacaattcattctacagttaaataaaaatatttagacatctgggtcgctctggttctacagg

SEQ ID NO: 3250 - DNA, 536 bp, Oryza sativa
  unsure (1)..(536): unsure at all n locations
  Clone ID: uC-osflcyp068b08b1
ttttagatccttccctacgaagattgtgtatgctttactaccgtcgtagccacaacagtttttcagcatctgaaaggctaaacccgtccctatttctctgggatacactaagatactctgtggtatctacagaaattgcttctcgtggtagaattgcaagctattctgaatcgaagtcatgcatagaatctttacgccatgaactgaattcatcaaatggatttatactgtctctgttatttcgtgttgctcactctgcgagaaatttgagtcgccttgaggttcttttgagattcgaaggtctacaactgttagcgagctctatttgctctggcacttctggtgataaagatcttctgaatgccactaagcggaaaggcattatgccaccgatgggtgaccccactagtgagggtggagtcttccctgatatccaattttggaaacaatgtgcggatccagtccttgctcaagatcctntntcatcattgttgtcaactctcttctgttacctgttcagtttctaatgtccactg

SEQ ID NO: 3251 - DNA, 525 bp, Oryza sativa
  Clone ID: uC-osflcyp068b09b1
tttcagctacaaacgcccacatcacacgcagaaatccgcatcaacagccagccatggcgtccacgctgaccaacgtcggcctgtctaccccggcggcggcggcgtcgtccctcgttaggccggtcaccggagctggacgcgtggtgtttccccgtgttggccgcggcgggttcgcggcggtgagggcgagcgggccggcgacgccgccggacatctcggacaagatgtcggagagcatcgacaaggcgaaggaggcgtgcgcggaggacacggcgagcggcgagtgcgcggcggcgtgggacgaggtggtaggagctgagcgcggcggcgagccacgcgcgcgacaagctcaaggagacctccgacccgctcgaggcctactgcaaggacaacccggagaccgacgagtgccgcacctacgacaactgattcttaccattatatgtttgctaatctctctgtaattaattataagttactgggttgaaaagattatttgtcgtagaagacagaggggagcttggt

SEQ ID NO: 3252 - DNA, 163 bp, Oryza sativa
  Clone ID: uC-osflcyp068b10b1
tttcaaatcattattctctcgcttaggtcggcttcacctatcgccgccgcctttcctcctccgcagcgtcgtcgccgtcggcgagcgaggcaggtggtgtaggtgggggtgatttgatttggtttggctagacttgtggacgtgctccgtcagatgaaatact

SEQ ID NO: 3253 - DNA, 501 bp, Oryza sativa
  unsure (1)..(501): unsure at all n locations
  Clone ID: uC-osflcyp068b11b1
tttcttctagctcgatctcgccgcgcgcgctcagctcgtcgacaaggcagtgtgcacccaccaagatagcgggatgatccagtgagcgcgtggaggcggtgtttgattctagattgttctagaaccgaacgagcgagcttagctagctagctagctgctgctgcttcgatcgatcggtcgttgcctcatgcaggagttccagtccatcccggggctcgccgggcggctgttcggcggcgcggcggcggctgacatccggcgcgcgcaggcgcagcagggcccggcgtcgcggtgcggcgggataccgtcgccggaggcggtgaagtgcccgcggtgcgagtcgaccaacaccaagttctgctactacaacaactacaacctctcgcagccgcgccacttctgcaagagctgccgccggtactggaccaagggcggtgttctccgcaacgttcncgtcggcggcggctgccgcaagaccaagcgtagcggcagctcgttcgc

SEQ ID NO: 3254 - DNA, 534 bp, Oryza sativa
  Clone ID: uC-osflcyp068c01b1
ttgtttcgtttcctccgtctcactcctactgctcggctgcccccattcttctctggatatttttctttttcatcttctttgagttggagggcttgattttaggggggactgctcgatcggcagggttaattccgatctctttatccttcccggacagagccgggatcagtattaggctttttgctagaagcacaaaacaaaaggaatgccggaagatgtgcttctatgatagagagctaccttgtgtgggaattggcaaggtagctcaaaatatttatgctttgtgtgctcttgatgatagtgaagtacgggtttatgcacagcaagtgctccttgtgcatttgcacgatggggctagatgtggcagttcaaccatcatgttagattaccatcttgttggggacggttgaaattatttttcatttattgcctctctcatctgatactccctcatcaatcatcatcactaagttacatgattagtgctttctgaatacataaggcatttgataagatggtagaataaaaggggaa

SEQ ID NO: 3255 - DNA, 461 bp, Oryza sativa
  Clone ID: uC-osflcyp068c03b1
ttttctcctacccctcaaaccacccgagaccgggaggtctgttggagcagcttgtccggggggccaaaaccctagccatgaagtcgctgtgccccaagccaggctagggcggcaagatccacccctccccactcggcggcggcgacggcgaccccgtccgcgcggcgctgcgcctcctccccgtcgccatcctcgcgctcgccaccgtcctccgccccgaggaccagcaggtgctcgcgtacctggtcacccgctgcctccagggcgccggcgctgcgcaccacccggagcgggagcacccgcccgcacgcggcggaggcggggggcgccgccgtcgcggtgcgcacccgccggccatcgggtgcggctgcttcgactgctacaccagcttctggtcgcgctgggactgctccccgagccgagagctcatccacgacgccattgaggcgttcgaggaccac

SEQ ID NO: 3256 - DNA, 489 bp, Oryza sativa
  Clone ID: uC-osflcyp068c06b1
tttattgtatcaaccacggagttcaaaggtgaatattcgttgccaagcaagaaatctcctcttgatcaatttgaaggtgtgaagacacatctttaccgtctcggtgcagaacatgaaaatggtaccctcaaaagctttgcatatactgatcagggcagcccaagtttgcttgatacaatcattctttctcagtgggaggattatgcttggaagggccattttggatatgacgtaactgcttgcaatctcaaggttgttgaaggtggatgaggcttttgttgctcagctgaatgataagcggaattcatgtgtcctcaaggaacatgacaagttccttgaacctgctggatgcctgaagccaaactgtatgaatagttatgatgaaacgcttctgtgcattgctcaaggtgacaaggatatacctgaaggtgttccttcaacaaaaccccctaaggattggatactgctgattgccaactgcatttctct

SEQ ID NO: 3257 - DNA, 533 bp, Oryza sativa
  Clone ID: uC-osflcyp068c07b1
ttcaagtgtcaactcctctcctctcctcgcgagttcgcgcaccgcctccgccgatctccatctccgccgccgtcctgctgcttccgccgcatcacatcccgacgaacaggggggagggccgggcggcgatctccatctggcgagcagagcagagcagcggaggtgaggggatcctgcatcatgtcggatatgaaggacaccaatgctgctggacctgaaactgttggaaatcctgaccctatggaccaaactgaagataactccatgccctcagctcaagaacaggaattagcaatcaagaagaaatttggaggactaatgccaaaaaaaccaccactcatctcgaaggatcatgaacgggcctattttgattctgctgactgggctctgggaaagtctggacagcaaggcgctgcgaaacccaaaggacctcttgaggcacttaggccaaagttgcagccaacacgacaacagcagcagcgttccaggcgcttgataacacctcatcagataacgaggatggagacggtgct

SEQ ID NO: 3258 - DNA, 519 bp, Oryza sativa
  Clone ID: uC-osflcyp068c08b1
tcgtccgtctccgctccagtgtctctccggtcggggaaactgcctcctccgccgccgccccacggtgaccatggccgtcgacctccgcgtttccatcgcccaccagacctccttcgcgctccgcctcgccgccgtcctgtcctccccggcgcacccggcgggtggcgccgggaggaacgtcgccttctccccgctgtccctccacgtcgcgctcagcctcgtcgcggccggcgccggcggggccacgcgggaccagctcgcctccgcgctcgggggcccggggagcgccgagggcctccacgcgttcgccgagcagctggtgcagctcgtcctcgccgacgcttccggcgccggcggcccgcgcgtcgccttcgccgacggcgtcttcgtcgacgcgtcgctgtcgctcaagaaaaccttcagtgacgtcgccgtgggcaagtacaaggccgagacccactccgtagacttccaactaaggctgctgaaagtgcttctcaagtgaactcatgggtagag

SEQ ID NO: 3259 - DNA, 525 bp, Oryza sativa
  Clone ID: uC-osflcyp068c10b1
aagaactctgctccaaggtcggcggcggcgctctccctagctagccgctccttctcctctgtcgccggcggcgcctccgaccaccgcagggctccgtcccgccgcctcccagggtagtcatggcgagattgatgtcgtccgccctcatcaggggtctcgtgagatcgagctgctcgccgaccgtagctgctgtggcccaaccaactatccatcagtttaggaactactcatcaggacttggtggcgattctactgcaactggggactcaagttcaacacgagttgctgctgatcctgatacacatcaagatttccagcctacaaccaaaagttccaacatgtcttttgatgacattgtttctcaggatatcaaggagaacccagtcctgatctacatgaagggttatcctgatgctctaggtgtgaggtcagtgcgttggcgttagagtcctcaagcaaatgatgtccctatcacgctagggatatttgggagaccccagctaaagagagtgccaagccacacca

SEQ ID NO: 3260 - DNA, 537 bp, Oryza sativa
  Clone ID: uC-osflcyp068c11b1
ttaggagtcatatcagatctcgcgaactacacgaggtgcatcactgcgatattgttcggacgccccaatcccgagcagttctgctgcccggcgatctcggagctccccaacaacgtcgccgccagatgcgtgtgcgccgctctcagggccaccggactatcaatcggtataaccgcgagcaataatgtcacaggtagcatcctcaagatctgcaacaaagctcccctggacctcttgactgtcaactgcagcagagcctagctgatcgcgatctggctctagctaataaagcatgcatgcactacgcgcgtactctacccttaaatcgtaattatatattgtgctgcttgcgtaattacttatatatgttactcgtatgtacttaatttgggtcctgtgcagctatgcttctagtcgactataccagtgtactgcatgcatgcttctgtgtgctagcttggtgattgatcgactagctagttgtccgtcttacaatatatcgttgaataaaagtggatgttaaatctcgtgactttg

SEQ ID NO: 3261 - DNA, 434 bp, Oryza sativa
  Clone ID: uC-osflcyp068c12b1
tcgtttctccccaacactcgcgcatcgcccgcccacactagggtttttgatccgcttcgccgccgccgtcgccgccgcctccttctcctcctcctccgcggccgtcaccgatctcatccgccgccgacgatggtggggctgggcgcgatgccggggtacgggatccagtccatgctcaaggaggggcacaagcacctctccggcctcgatgaggccgtcctcaagaacatcgacgcctgccgcgagctctccgccatcacccgcacctccctcggccccaacggaatgaataagatggtcattaaccatctcgacaagctctttgtcacgaacgatgctgcaacaattgtgaatgagctcgaggtccagcaccctgctgctaagatcctggtactagctggcagggctcagcaggaggaaatcggtgatggagc

SEQ ID NO: 3262 - DNA, 473 bp, Oryza sativa
  Clone ID: uC-osflcyp068d02b1
tgtgaatattgcatagtgcgagctaagcgcaattgggcgaacgccgcgagccgccaccaagccaaaccagagcactccgccgccgcgccatggcttccccgtccccgtcctcctcacctctccacccgcagcatcaacaccagcacccgcttcccccgcacccgcagccccagtaccaatccccaccgcctccgatgccgccgccgccccccgcggcgccactcaaagctatcgatctggaggtgaccgtcgtctcgggcaagcacctgaagaacgtcaactggcgccgcggcgacctccgcgcctacgtcgtcgcctacctcgacccttcccgccgcgccgccacccgccccgacgacgtcggcggctgcaagccggcatggaacgagcgcgtcgtcctccctctcccgccccacctctccccgcacgatccgtcgctgctcctctccctcgatgtcttccactccaagccc

SEQ ID NO: 3263 - DNA, 452 bp, Oryza sativa
  Clone ID: uC-osflcyp068d03b1
tttgtcttctctgaggaggttgcagtcctgaaccgctactttggcggtctcaaatctggcggcaacgcatacgtgattggagatcctgcaaagccagggcagaagtggcatgtctactatgccacccatcacccggagcaacctgcggtcactcttgagatgtgcatgactgggctggacaagaagaaagcttctgtcttcttcaagacttctgctgatggacacacaacatgtgctaaggaaatgaccaagctctcaggtatctctgacatcatcccagagatggaagtctgcgacttcgattttcgagccctgcggctactccatgaatgccatccacggccctgctttctcaaccattcatgtgactcctgaggatggcttcagctatgccagctacgaggtcatgggcttcaaccctgcttcccttgcctatggtgaccttgtcaaga

SEQ ID NO: 3264 - DNA, 465 bp, Oryza sativa
  Clone ID: uC-osflcyp068d08b1
tgtaagttctgctcggccatttgcacaagaaaatggtatccataattcaacaatgccacaacctgtttttagatcatctgctgaaccaacaaaggagaggcccacagaggtagtctttttatcttacttttgtagttagatatttaattgaagaatcagtattattatagaaaagtattgcaactttctagatgaactaagtgtcaaataataatgttggaattatgtgatgtgcccttgttcttttcgactttacttattgtgctcaagtaactaataatgcacagcttatgataacaaagttaagtaaaactggagataattgcagagcataagcccaggcatcctggatctgagtatatgctgtagttgaattgcaagtgatcatgttttctgactgccgcgcatcatgacattttagtgtttagcattctttcatgagaccaaatttattgcttttgtttg

SEQ ID NO: 3265 - DNA, 522 bp, Oryza sativa
  Clone ID: uC-osflcyp068d10b1
atccatttctctttctcccacctccaccggcgacgccaccgccgccgcctcctcctcctccgcctctctacggcagcctcgccgccgcgccgcgcagcgcagcgcagagcaacatggaagcgacgggcgccgccgtatccgccttctccaccgcgtcctcgtcgagtcccgcggcgcctagacacggccgtctcctggcgagccccgcggcgtggcgcagcgcacggacgctgccaccacgggccgtcgcctcctcccgcgcgacggtcctcgtctcgaaccctcctccgccgccgctgccgccgacacccgctcctgctgcggtcgcgccctccaaggtcgaccggtcggggcgggttctgtagcccccgcgccgctcgcgagctcgcgctgatgatttcctacgcggcttggcttgagggcgccgacgtgggtgcggctcttcgaccgcagaatcagcgcgagaagagaacctggctatgttttcgaaaggcgtgcgtggtgaactacaaccatatgagc

SEQ ID NO: 3266 - DNA, 401 bp, Oryza sativa
  Clone ID: uC-osflcyp068d11b1
tttcttccatctccccgtttcaaaccctagggggggttctctacccctgtttccctaaccctcgccccccaatccgcccgttccggccaccccaccgtcctggaatcccctctccgtcatctgcgtcgccgcttcgctcccgcccgatccccgcgccgtccgcggtcgtgccctcgaccacccctcaccccctcgtccacggtgttcggcgtagagcggggggctcgttccgcgcgggcgctctcccgtgccccccgcgggaagggaaggctctccattgaggcctcgctgatgaagttgcggccatgagtcggctctccttcaggccgagcccgctcgacattcacaagaagctccccattgtcaagtccgcgcgtgagcttgaggacgatgagaccacg

SEQ ID NO: 3267 - DNA, 414 bp, Oryza sativa
  Clone ID: uC-osflcyp068d12b1
tccgagtggttcacctgtcagggaatgagatgccccgcgaacactcacaagccgagcttccatgtcaatgccagcttgttaaagcagaatagtggcaaggggagcacctcggcgcagaggggtggagggatccctaatggtgtaaacatggatggcggaatcgatgaagaggagttcttcgagtggttgcagaatgcactgcagtctggcatgtttgaatcgtttggcgcgcaaaacgagcccccttcccctggaagtggaagcaatgccaagggtagtaatagcagtagtaagaaaaagaagaagggcaagaagcaatggttactgaagaaggtccgataatggcgattcttctttgagagcagaaagaagtaaaacatatggcgtttgctctgtatagctatgctagaaaac

SEQ ID NO: 3268 - DNA, 533 bp, Oryza sativa
  Clone ID: uC-osflcyp068e01b1
tgatgtctaaacttcctcatgccacaatttttaagccacagcatccatatgctaggcgtgtatcagaaacatttaaagattttcctccgcctgctgtggcgttagtggatgttcttctttcagttgatccagcagatcgaggaacagcatcttctgcattgcaaagtgagttttttgcaacaaaaccatatgcttgcaatccttcaagtctgccgagatatcccccaagcaaagagtttgatgcaaaacggcgagaggaggaagctcggaggcaaggtattgctggaggaaagcaacacaagtatgatcctgaaagacggactagagagtcgagagcagttcctgcacctgacgcaaatgcagaattagtgtcatctttgcagaaaagacaaaaccaagtcaatgccaagagcaggagtgagatgttcaatcccagcaaggaagactctgcatctggctttccgattgagccacccaggccaacttatcctgctgaatcgtctcaagactctcaacgtgtctacacaagaaca

SEQ ID NO: 3269 - DNA, 445 bp, Oryza sativa
  Clone ID: uC-osflcyp068e03b1
ttaagaaatcagtggctgctgctaccaagcagatggctttaaagaaagagcagagaaagcacaagagagctccatcttgacatatcaaagagtacgaggcatcactcaagtgagaacttaatttcagaggcatgcgttatcatggaccagagccgatcgctcatttacttcccaaaagtgaaaagagagcacacatctgagaatatccatggccagatttacatccctgagatcaactggctgctcatggtcctctgcattgctgtgactgtcaggtttcgcgataccaatcatatcggaattgcatccggattggcagtgatcactgtgatgctggtgaccacatgcctgacatccttggcgatcatgctgtgttggcaccggagtccggctctggcactcgtcttcttcctattcttcggcttcatcgaggtgctctactttt

SEQ ID NO: 3270 - DNA, 505 bp, Oryza sativa
  Clone ID: uC-osflcyp068e04b1
tgtttcttattgatgggccctatggtgcaccggcgcaaaactacaagaagtatgacattcttttgcttattggtcttggaattggtgctactcctttcatcagcattctgaaggatctgttgaacaacattaaatccaacgaagaggtggaaagcatacatggttctgagataggcagcttcaagaacaatgggccaggaagagcttacttctactgggtgaccagagagcaagggtccttcgagtggtttaaaggagtcatgaacgatgtcgctgaaagtgatcacaataatattatagagatgcacaattacctgaccagcgtgtatgaagaaggcgacgcaaggtcagctttgattgccatggttcagtcacttcaacatgccaaaaatggtgtggatatcgtctccggcagcaggattcgcacacattttgcgaggcctaactggagaaaggtggtctctgacttggcgaatgcccacataaactcacgcataggtgtttt

SEQ ID NO: 3271 - DNA, 377 bp, Oryza sativa
  Clone ID: uC-osflcyp068e06b1
tctctctcgcttgtatgtggatgtttggctggagggctgtatggacagtgttgcaactcaaccacatcaaagcgggagacggacgccagagatcctctaaaccagtttacgaggaggtgctaagctccgagcatggcagccttccaggagtacgccggcttccaggaggcttggatcccgctccggacaagaggccaccacgctcggcaggagacgatggctgaacacgcagagcgcatctgatcttgatctcaagtcccagctgcaggaattgattcctgaacaacaggaccgcttaaagaaacttaaatcggagcatggaaaggtccaacttggaaatataacagtcgatatggtccttggtgggatgaagggga

SEQ ID NO: 3272 - DNA, 267 bp, Oryza sativa
  Clone ID: uC-osflcyp068e08b1
tcgtaagaaatcagtggaagctgagaaaaagcaaaaggattaaaagaaagagaagagaaagcacaagaagcgccatcatcacaaatcaaagagtaagaggcatcactcaagtgagaactcagattcagaggaaagtgatggcagggatgagagaagaaagagtgttcaggcctcatagcataagagagaagagaaaaggtcaagacatgataagaaggatcacggacaagattcagaagactatgaacgaatgaaaagactccttgc

SEQ ID NO: 3273 - DNA, 273 bp, Oryza sativa
  Clone ID: uC-osflcyp068e09b1
ttttgcatgctactgtccaccgtacacgggaggcccactcgcagcttcctacgctaggagcaactccccccaaaggacttctggtgcatagtcctactgactcagagaagaccttattcaccatgggagtggccgatcatagccagctcaacctcatgaacgagactgacccagattagcccaccattaccctgagaccagaaaatcgctcatgctcctgagacatgcaacaagggccgccagcctgctccatgtgtgctatcatggaacaag

SEQ ID NO: 3274 - DNA, 503 bp, Oryza sativa
  Clone ID: uC-osflcyp068e10b1
tctttttcgcaaatcgcagccggccgccgctgtagtagcaaacatctccttcgtcttccctacgcgtccacccgaaaaagaaaaaaaaaagaacaggagaattatccccacttccagagtccaaacctccccgtccatggcgacggcgagctcgatccggccgccacgcgcggcgctagtcctcctcctgctcgcgctgtccttctccctcaccctcgccgcccacttcgagggctttggctccgacgacctccactccgcccacgccgacgcggcctcggcagacgacgaagacgacgaggggctcgacgtcgagctcccgccgccgccgcgcatctccctctccacttcaactccttccccttccgtcaccaccaccaccaccaccaccttcgttccaaaccctaaccccgatcccaacccgacgctgaccccgccgaaccccaccccgacgctcgatctctgggacgaggacgagttcgagggcatccctgtcccggagc

SEQ ID NO: 3275 - DNA, 531 bp, Oryza sativa
  Clone ID: uC-osflcyp068e11b1
tttagctagcttgcttgccgttcgttcgtgtgtgtgtgcgtgtgcgtaagcttaagaggttgattggctaagctagcaagccggccgcatggcgacttccggcgacctcgaagaggtgccggagccgggcatggatcacccggctgagccatgcatgggcgtcggcggcgaccagctggtgccgacgacggaggaaataagcctcccgctggcggccgagacgacgtcagatcaccatgaagcggcacagctggagcagtccgcggagacgtcgacgtcagagtcggaatcagaggaggtggccgccaagacgacgtccgattccagtgaggcggcggcggttattcccaagcacgccgcggagggttcgtcgacggcgtcagaggaggagcaggtagcgaagaaggagctgaaggaagccgaggaggacgatggcctgcaaggcgagagcgcgcgggagaggctgaagcggcacatgcgggagatggtcggtagggtgtgggtgcctgacatgtgggggcaggagaagct

SEQ ID NO: 3276 - DNA, 543 bp, Oryza sativa
  Clone ID: uC-osflcyp068e12b1
tcttccgacttccacgtcaaggtcgctgactttggcctctcccgcctcttccccctcgacgtcacgcacgtctccaccgctccccagggcaccccaggatacgtggatccggagtatcaccaatgctaccagcttaccgacaagagcgatgtgtacagcttcggcgtcgtcctggtggagctcatctcgtcgaagccggcggtggacatcacccggcagcggaacgagatcaacctggccggcatggccatcaacaggatccagaagagccagctcgaggagctcgtggacctcgagctcggctacgagtccgacccggcgacgaagaagatgatgaccatggtcgccgagctggctttccggtgcctgcagcagaacggcgagatgaggccgccgatcaggaggtgctcgaggggctcaagggggtacaggacctatgcgtgatggagaaagatggaggcaaagacaagaagggacctgacccgccattatcttccgacacggtgcatgctcagtgggatagcaggcagacgactcctaaca

SEQ ID NO: 3277 - DNA, 525 bp, Oryza sativa
  Clone ID: uC-osflcyp068f01b1
tggttatccccggcgagcgtgagatcgaagcaagctgctacacagatctcacgacatggccgaggcggcgtcggcggcggcggcggcgacgacggagcaggcgaatgggagcagcggcggcgagcagaagacgcggcactcggaggtcggccacaagagcctcctcaagagcgacgatctctaccagtacatcctggagacgagcgtgtacccgcgcgagcacgagtgcatgaaggagctccgcgaggtcactgccaaccacccatggaacctgatgacgacgtcggcggacgaggggcaattcctgaacctgctgctgaagctcatcggcgccaagaagaccatggagatcggcgtctacaccggctactccctcctcgccaccgtcctcgccatccccgacgacggcacgatcttggcgatggacatcaaccgggagaactacgagctggggctcccgtcgatcgagaaggcgggagtggcgcacaagatcgacttccgcgagggacccgcgctgccggtgct

SEQ ID NO: 3278 - DNA, 363 bp, Oryza sativa
  Clone ID: uC-osflcyp068f02b1
ttcatcacccacacattctcgaagaaggagaagaaggagaggagcagccatggcgtcgtcggcggcagcggcggcgagcacgttcctggggacgaggctggcggacccggcgccgcagagcgggaggatcgtggcgaggttcgggttcggcggcgggaagaaggcggcggcgaagaaggcggcgaggccgtcggcgccgacgacggacaggccgctgtggttccccggcgcggtggcgcctgactacctggacgggttgttcgtcggtgacttctgcttcgaccctgtcggtctctggaagccggctgatgtcctttagtttcagtttgccatcctggttcactaccctgtctcagatcaact

SEQ ID NO: 3279 - DNA, 515 bp, Oryza sativa
  Clone ID: uC-osflcyp068f04b1
acctctcgccgcgatccatccaaaatcccgcaagctgctgcaaggatcgtccaatcaatccgtcgtcctcctcctcctccgcctccgtctcaagaatgacagaatcaccgtttttgccgcgcgagaggctctttaagcagcagcagtattttcagaacttgaccaagcacacgtatctgaaagggcgttatgatgtggtcacctccgttgccattcccctcgctcttgccgcctccagcttgtttatgataggccgtggggtgtacaacatgtctcatggagtcgggaaaaaggagtgaacgacatggtttcctctcatttcagtacttcagcataggggtgatagcttcaaggcttcctatggtgtcttttaagttgcacaaataaatactgttgaagttaactcttgtttattactgctggaactgtggatttctgattaagcaagctgttgccagatgaggtagtattgaatatcagttgtttccattttacttaccatcccagttgtttcc

SEQ ID NO: 3280 - DNA, 400 bp, Oryza sativa
  Clone ID: uC-osflcyp068f05b1
ttactaaatcatcattacaaaggatattgcatgcagcaacaaaaaggaaacagtagctcctacattaccaaatggcaagccagtgctattcaatggatctcccactgccaatgccaatgtgtctcccaacaatggcgtcattgagaataatcagaaggctgtagctgcagttctcacgagtgttcctgctaaaaatgtcagcagcccagcaccactttcagtgccagaggtggaccatgatgggatcgaacgcattcaaaacggcagttaagtcccagaaatacctgaaaatggagggccagttatggttccaccacctcctgaagttccaggggttaacctgggaccaggctaaattaaaagggccttcggaaccaggccttggtttcctaagggttgg

SEQ ID NO: 3281 - DNA, 523 bp, Oryza sativa
  Clone ID: uC-osflcyp068f06b1
tttattaccagaaaagtctggactctggaagaaagaatgcggcgcggcggccggcggggcacggcacggtggacatcacagggaaggagaaacgcttcttcccgttgttcccaaatcccacagtcgcaggccaacgatcgagtggagtcgagcacaaggaaaaggaacgcatcgccatcgccatcgcctccctccctgtcctgtccagctcacctccaaaccctccatcttcttgatttactatacttgattccgtacaaccgctcatggataaagagccaaccatggaggatttgccttcaacgctggggcagccttctacttctgcatcatcggttgatgctagatattcagccgacaggactgaagattcacagctcttcctctccgtcccagctttaaaccaagctgcgtcttatctggcccagacggcctcatatcttacccagtgcctccctgtatctggttacacagctatttctgaagaagggcaagaactagcaactctgccacctgcgtcaac

SEQ ID NO: 3282 - DNA, 533 bp, Oryza sativa
  Clone ID: uC-osflcyp068f08b1
ttgcgtctcatcttcgctggcaagcagcttgaggatggccgcaccctggccgactacaacatccagaaggagtctaccctccaccttgtgctcaggctcaggggaggcatgcagatcttcgtcaagaccttgactggcaagaccatcacccttgaggtcgagtcgtctgacaccattgacaatgtcaaggccaagatccaggacaaggagggcatccccccagaccagcagcgtctcatcttcgccggcaagcagctggaggatggccgcacccttgctgactacaacatccagaaggagtccaccctccaccttgtgctcaggctcaggggaggtatgcagatcttcgtcaagaccctgaccggcaagaccatcaccctcgaggtcgagtcctcggacacgatcgacaatgtgaaggccaagatccaggacaaggagggcatccccccggaccagcagcgtctcatcttcgctggcatgcagctggaggacggccgcacccttgccgactacaacatccagaaggagttcac

SEQ ID NO: 3283 - DNA, 217 bp, Oryza sativa
  Clone ID: uC-osflcyp068f09b1
tcttatcatcgaagccccaacaagtcgcatgacatccatggcgacgccgtcgcccaagaccctcctcctgctcgtcctcgcgctatccgtcatcctcgtctcggccaccgcgttccaccaccaccaccaccacgacggaggagccgaagctggaggaggaggaggagggggaggcggcgtcttcgaggtgccctggcaatgccccccggcgtggcgg

SEQ ID NO: 3284 - DNA, 515 bp, Oryza sativa
  unsure (1)..(515): unsure at all n locations
  Clone ID: uC-osflcyp068f10b1
tctttgagataaacttcgtccatgtatttcggctcccagatccccagaaccccaaagaaggggaagccctcggagatttgacaggggcttcgggaggcagctgggtgtggatttgcctcgtggaactaaagaagataataaaaatcctttcagatatgattgaatgggaaagcaaacccatgctggaagcctggaattgaatcataaggctcactgctatttgacacaggattaccttgacagcattgcttgttgttctgcttctgcatctgtgctcaagccacagaaaagctgaaatcgtgcacttgggagggatttgcagattaactttacaattttcttcttttcgtttgtaaatanttatatcgggagtagatcacaatcactgttttacagctttatggctgttcttttttaatttattatatttacttcccccctcgttgcacttttttttcatggacattatgcctgtatgaggtncattaaacatgatcattcattaatttggactg

SEQ ID NO: 3285 - DNA, 518 bp, Oryza sativa
  Clone ID: uC-osflcyp068f12b1
ttcactacaatcgaaaatactttgtatcgaggttaggatactacaacgtaacgaccacacttgacacggcatccaccgctttagtctctatatatcgcatggcgcgcgcgtcgtttgtcgtagctgggcgtgtctacgggatgcattcaagaactggctacttgatccatgcattccagatggacagatcacgccgccggccggctcttgtgtatatatatggacggcgagtggagcgacggggcgcggtgtcgtcgccgacgatgtccggcggcggcgggcgggagcagatgaagggcgttgaggacgtcgctgctgctgattgcccgtggtcgtcgtagtcaccgtcacctactgttttttattattctgtctgcttaattatcattattatcttttattatttctatttctaattctcttattttgtttttttattactactttttttattttattttatttttattttttttttttttatatatttccttcttatatttaattattatttttct

SEQ ID NO: 3286 - DNA, 207 bp, Oryza sativa
  Clone ID: uC-osflcyp068g01b1
ctcttcccgcgtcaatccgccattgttactagtagtagtagagctctcttgttgttgttcttcttcttcgtgttcttcttcggttgattaaataatcgtagcagcagaagaagcagctgtttgtagacaaggtgtttgtggaaatgtcgtcgtcgtcgctgtcgccggcggggtcgtcggacggggactcggcgggggtggtggtgg

SEQ ID NO: 3287 - DNA, 486 bp, Oryza sativa
  Clone ID: uC-osflcyp068g02b1
gttttaaaattcttttcaagtcttaggtaggtcactgttggtgccaccttcttgagaagtttatgatctgcatgttcacctaagatatccagtcaagtgctaaaaaggtcacaaaaatgggaggcagaaaggacaatcatgactcctcaaatgccgacaaagggttccatggagcgtatccaagcggttaccctggtgcatatcccctaatgcaaggataccctaattcacctggacaatatccgactcccggtggataccctagtgcaccaccgggacaatacccaccagccggtgggtaccctggtgcacaatatccaccaagcggttaccctccatcacaaggtgggtaccctccaggagcgtatccaccaataagatatccacaacaaccaggctacccgtcagctggttacccaggtcatggccatggtccacccatgcatggaggtgggcatggtgcaagcgcatctggctatggagcgc

SEQ ID NO: 3288 - DNA, 509 bp, Oryza sativa
  Clone ID: uC-osflcyp068g03b1
ttcattgttgagggtgaaattgataagctctcaatggaagaagctggctaccgtaattgtgtcagtgtaccagatggtgcaccaccgaaagtatccagcaagctcccagataaagatcagctaggataagaagtaccaatatctgtggaattgcaaagaatatcttgacccggcgtctaggataatactggcaacagatgctgatcctccagggcaggctctggctgaggaacttgctcgtcgtcttggtaaagaaagatgctggagggtcaattggccaaagaagaacgagaacgaaatttgcaaagacgcaaatgaggcactgatgtttttaggaccacaagcattgagaaaggttatagaagacgcggaactgtatgccataagaggtcttttctccttcaaagatttcttccctgagatcgataattattatcttggaatccgaggggatgagcttggtgctcctactggatggaaatccatggatgagctttcaaggttgtttc

SEQ ID NO: 3289 - DNA, 520 bp, Oryza sativa
  Clone ID: uC-osflcyp068g04b1
ttagtaaggctcaaggacgtgaggccattactgccaaactttctgctaatttacttacagaagctgggagtgatcgtgtaattgtatgtgatattcattccactcaagcattgggatacttcgatattcctgtggatcatatacatggacagcctgtgattctggattaccttgccagtaagacaatatctaaggatcttgtggtggtttctcctgatgtgggtgggtgttgtcagagcacgtgcatttgctaagaaattatctgatgcccctttagctatcgttgataagagaagacagggtcacaacatgtcagaggtcatgcacttaattggtgatgtgaagggtaaggtcgccatcatggttgatgatatgatagacacagcatgaacatttactagtgcagctgctttgttaaaacaggaaggagcagaggctgtctatgcttgtagcacacatgctgtcttcagcactgtctttgcaaccctcctgctattgaaaggctctttggaggcatttt

SEQ ID NO: 3290 - DNA, 535 bp, Oryza sativa
  Clone ID: uC-osflcyp068g05b1
tgactccctcgccgtcgtcgattcccccaggcgagccggcgcattcattcctccgcggcgagcagaagcggtgtgcctgcctgcgatggcggcggataagccggctccggtgagggtgctgtactgcggcgtctgcggcctccccgcggagtactgcgagttcggcccggacttcgagcgctgcaagccgtggctccgcgccaacgccccgggcgtctaccccgacgagctcctcgcctcctcctcctccgccgccgccgacgtcgacaaggtcggggagcggcttcagggcgtcgggatctccgccgccgatggctccaccagtgcaggggatgcttctgcgtcgaagcaggaagaggtgaagcgcttgcctggtggtaaggtcaagaagaaggataaacaagaggttgtgattgagaagattgtccgcaacaagcgcaaatgtgttactgtggtgaaaggtctgaattattcggtgtcaagctgagtgatgcttcaaagaagctgggaaagaatttgcttcaggagcatttgt

SEQ ID NO: 3291 - DNA, 451 bp, Oryza sativa
  unsure (1)..(451): unsure at all n locations
  Clone ID: uC-osflcyp068g08b1
tttttggagaagagcctctgtgcttagcatatcaaagaattatgctgaatatcaaaacatatggcatgcaccaattatcaaagtttactatctttggtttattcatttctcttgatattcatttttatttagagcagttatgtataaatgtatggtacaaaatatgttctgtttcataaattattttctaatgcctgtttacaagctatatgacctcattctgccactgtaatttttctaggtggattgaattttccaagaaaagcgttgccaagagggtggctaatctacttaacggtgaacaaataggtgggaagaagaggtctccattttattatgacatttggaacataaaatatctcaagaaattcaaatgggatgatcttgntggtgaaatagctgagaagactcatatcaaggagcataaacttaacttggagatagcagctgc

SEQ ID NO: 3292 - DNA, 531 bp, Oryza sativa
  Clone ID: uC-osflcyp068g09b1
tttaaaaaacaaaagaagagcttgatgccataggagagcacaagagctcaaccacacacacacacacacagagattttgactattaattttcatcgtctttggttttaagttggtgtgtgttcttccatggccggcctgagtgtccttcttgagacacacaagatcgatcaccaccccaacatgaggcctccccaaatcatcagcaaggccaccctccatagccacccagagacgatgtcctcctcctctccggcgactgcgacgacggcgacgatgagctccttcttgcagcgctgcttcctctgccgcagggagctcgccgacggcaaggacatctacatgtacagaggggacagagcgttctgcagcgtggattgccggtgcaagcagatcttcatggacgaggacgccgccgccggcggcggcaactgcgccgtggtgcgcgccggccggcggcgggcggtcgtaccgtgcgagcaaacccgcgccggtggcttcgcgtactgatcgatcgaatcatcgatcagccc

SEQ ID NO: 3293 - DNA, 309 bp, Oryza sativa
  Clone ID: uC-osflcyp068h01b1
ttgttaggcacaggggttgcaagaagtcgcctaattctcctattgaattaggcacattttcgcccccacattgcctctcattgtaaaatagtatcaactgataatccacaggaactaaacaacaattaaatccaattatggacggattggtaggcctcttgaaaatacgggtggtgcgtgggattaaccttgcctaccgcgacacaagaggcagtgatccatatgtcgtccttcgtctcggctagcaaaaagtgaagactagtgtaaagaagaaatttgtgaattctatttggcttgaaaagctaactt

SEQ ID NO: 3294 - DNA, 441 bp, Oryza sativa
  Clone ID: uC-osflcyp068h02b1
tgttgtaccgggcggcggaggactcgacggccctcgggagaggcggcggtggcggtgggcggcggctcagcggcgcgtggcggcggcgctggtgcgaaggcgaagcggcgaggtggtgcggcggcgctcggcggccagcggtggcggcgatgttgcaagtcatcgattacaagtttctgaatcgggtgtggtcttgttgaagccccatgatgtgttgccaatggagattaattgattctagaagaagacctttgaacttttgtcttgtttttcttgaagatactagagatgtttttattgtgatgtagctagaaaattagaatcttaacatttttcctgaaatgcagtgtctcaaaccttgtagtttccagtagttttagttttgtagtttgtttttagttcctttggtaacgttgtagctgttgggtttttgccatcttt

SEQ ID NO: 3295 - DNA, 483 bp, Oryza sativa
  Clone ID: uC-osflcyp068h03b1
ttcatttgcttgttgacgagttccgcatccctgagagggagaacagaaaggcattagagtttgtttcatcatggaggttcgccaacggaatgtttgctatcgtcttgtcgtttggccttttgctcactgcactgcggagcaggaaggctcgatcatggcgctatggaacaggttggctccgtggcttcatcgccgactatggtgtcccactgatggtgctagtatggacaggagtttcctacattccatatggtagtgttccaaaaggaattccacggtgccttttcagccccaacccatggtcccctggtgcatatgataattggacagtcatcaaggacatgccaatgtgccactcctctacattattggtgccttcataccagcaacgatgatagccgtcctgtactacttcgatcacagtgttgcttctcagcttgctcagcagaaggagttcaatttgagggagcccccatctttcca

SEQ ID NO: 3296 - DNA, 534 bp, Oryza sativa
  Clone ID: uC-osflcyp068h04b1
tcgttgagccggaggaatcctgaccggaggtggggcttgccttcccctcctcgcgcgcgcgccgccgccgccgggaaggccggctggcgaggtagtcgaaaaatatcgcctctgaaggtcagcactgaggcatgggggagtgcagtgagcacaggtgttgggacgagctactaccggacgcactgggcctcatctttcgcaaactctcactcaaggatgtgctcaccgtggtgccgcgggtttgcaaatcctgggggcgggtggttgcagggccttactgctggcaggagatcgacatccaggagtggagccagcagcagagcaagccggaccagctcaagcgcatggttcgcatgctcgtcgcccgaagcggcggctcgttccaccgcattagcgtgtccggcctgcccggcgatccattgttcaccttcattggggaccatgcacggtcacttaaaaccatggagcttccaaggagtgatatcagcgactccttagtggaaaatgttgcgccaagatggtccaacgttacat

SEQ ID NO: 3297 - DNA, 530 bp, Oryza sativa
  Clone ID: uC-osflcyp068h05b1
ttctctcgatcatggccgccgccgccgccgcctcaagggcgctctgggcttgccgcaccgcctcctaccttcggatctcctccttccccagggctttctccaccgtccttaaagatctaaaatatgctgatactcatgagtgggtgaaggttgagggtgattcagcaaccataggggtcacagaccatgctcaggaccatttgggtgatgttgtgtatgttgagcttccagaagttggttccacagtatcacaaggaacgaactttggtgcggttgaaagtgtgaaagcaaccagtgatatcaatgcaccagtatctggagagattattcaagtaaatgatgaactaagtgaaaaaccaggatttataaatggaagtccatatgagaagggatggatcatcaaggttaagataagtgatccaagtgagttaaactcgctgatggatgatgagaagtacaagaagttttgtgaggaagatgatggcatacactgatcaatcccctaactgctggatttcaagaaactatgc

SEQ ID NO: 3298 - DNA, 489 bp, Oryza sativa
  Clone ID: uC-osflcyp068h10b1
tctctccaagcctgtggcgcagcgagaacaacccaccgtcatcaaggtggagaagagcgaggaggacgccgtggcggaggccatggccgaggtggcctcggcgctgcgcgccgtcggcgacaagttcctccgcatggaggagcggaggctggagatctctctccagatagagaaggagcggatggagtctgagatgaagcgcacccagacgctgctcgacgcccagcagctgttcgtcgaggccttcctcggcaagcagcagcaccaccaccaccaccacaagaaggccaaggtgatctccgtcgccgttgccgcagcaacagccgccatggatgaggattgatctactccatgttgttggtatggcctactatgtgtttagtaatgtttacttctcattgttaactgctggtgttgacttgtgataattctactagctgttgtttgtgtttgggagggtgattaaagtagtcaggtgtaggatatgga

SEQ ID NO: 3299 - DNA, 534 bp, Oryza sativa
  Clone ID: uC-osflcyp068h12b1
ttctcctcgtcttctcgccgccgccgcgagcggaatccccctctctccggctaaaccccgccgccgcggcgaagcaaaagcacctccctcttcgccgccgcccgccggcaatggcggggctgtcgctgcggtgcggcgactgcggcgtgctgctgcggagcgtggaggaggcgcaggcgcacgccgaggccaccaaccacgccaacttctccgagtccaccgaggccgtactcaacctcgtctgcgccgcctgcggcaagccctgccgctcccagaccgaggtggacctgcacaccaagcgcacgggccacacggagttcactgacaagaccatggaggcggccaagccaattgatctcgaggcggcgccgccgaagccggccggcgaggccatggatgtcgatgcctcggcaagcgccgagccacatgagatggtggcgcccgaggttaacaaggagatgccggccgacctcgaggcgatggggttcacgacggcgcgtgccactagggcacttcatttttctggtaatagca

SEQ ID NO: 3300 - DNA, 516 bp, Oryza sativa
  Clone ID: uC-osflcyp071a01b1
gttttgaaccgcaaatccccatttggtctcacctaaaaccctagctcgctcacccatggctccgaagaagcgaaaggcggatccggcggagtccccggtagcctcgtcggaggccggcgccggcaccaaccaccaccaggagacgccctcctcggagctcaagccccgggggaccatctacttccccatcaccgacgaccccccggagccgagcgcagagggcggcgccgagggggaggacggcgccggaggggacgacgatgaggaggacatcgcgaagctgctcgagcccctgtcgcgggagcagctggtggcgctgctccgcacggccgcggagactacccccgcgacgatggcggccgtgcggcgcgcggcggaagccgaccccgcgagcaggaagctcttcgtccacggcctcggctggggcgccggagccgacgacctccgctccgcgttctcccgcttcggcgagctcgaggactgccgtgtcatctccgacaagcaatctggcagatc

SEQ ID NO: 3301 - DNA, 434 bp, Oryza sativa
  Clone ID: uC-osflcyp071a02b1
ctttgacgaatttctcgctagggtttcgcggatcaaggcggcggcggcggctagggtttcgaggcgggccacatggcctcgccggcggcggagggggacgcggtgagcgcggggttcgcggagctggagcggcagcagcagctgctggcgagctgcacgaggctgtacaagcagctggaggagcacttcgcgtcgctggagcgcgggctggcggcgaggtcggactcgctccgccacaagcgccgcgcggcggaggcgcgggcctcggccgccatggactcgctccgccgccgcgaggcctccatcgatggctccgtctcccgcgcgctcgaccacctcgacgacctcgcctccgcctcgtcggtgccgtccgacgccgccgcggcggcggagggggtggccgagagcctgagggcgatgtgcgccaggatgga

SEQ ID NO: 3302 - DNA, 464 bp, Oryza sativa
  Clone ID: uC-osflcyp071a06b1
cttgtgaaagcagttggttccatgctattacttgaaaaagggaaactgtttgaaaggtgacagatgcgcatattatgatggaccacactcagtgggaaataatgcatcaaaacaggtggcaaaagttgctgccttacctttggagcagcttgagactcacaagaatgattggttgagcattaaagattctgtgcattctactaattacattcaggatggtgctccaataactaatgagaggggcaaaacaggcgctgatcaaccaccggttaattatgccaggacagctacaggtgcaataccggctgcttacaatgcaatgtcttgtcctaagtcatagaaggtgaaaagtagtacgccagcaggacttaaggaaagcttcactacgttttcaagtggggatcatcctgagtgctaccaggaccattttccaatggatagtgatcctgagcgagattggaacc

SEQ ID NO: 3303 - DNA, 479 bp, Oryza sativa
  Clone ID: uC-osflcyp071a07b1
gcgtttaaagcaggtcataactgcaactggatcggattacactggggtagagttctccaaaagattgtgtggcatgtcactgatctagaagtggtgagagactcgatgagcgcggggttcgcggagctggagcggcagcagcagctgctggcgagctgcacgaggctgtacaagcagctggaggagcacttcgcgtcgctggagcgcgggctggcggcgaggtcggactcgctccgccacaagcgccgcgcggaggaggcgcgggcctcggccgccatggactcgctccgccgccgcgaggcctccatcgatggctccgtctcccgcgcgctcgaccacctcgacgacctcgcctccgtcttgtcggtgccgtccgacgccgccgcggcggcggagggggtggccgagagcctgagggcgatgtgcgccaggatggactccgcggtgttcttcgggttcgtggtcgcgcggcggaagga

SEQ ID NO: 3304 - DNA, 406 bp, Oryza sativa
  Clone ID: uC-osflcyp071a08b1
ttaagttttgcacattgaactgcgaaaatgggcagatatcatggtgattgcgccattatcagctaataccctagctaagattgctggtggtttatgcgacaacctcttgacatgcatagtgagagcatgggactacagcaaaccactctttgttgccccagctatcaacaccttcatgtggaacatcccgttcaccagatcgcatcttgagacaatgaacctgctcggtatatctcatggcccctcccattaccaaaaggctgctctgtggcgattatggtactgctgcaacggctgagcctcatgtgagggttcgcatcccgcgggctggtcgacctagacaacctcttcttccacttagttgagccgtgcgacctggccgcagaagcctacgatgtagccgata

SEQ ID NO: 3305 - DNA, 389 bp, Oryza sativa
  Clone ID: uC-osflcyp071a10b1
tgttctgtaggcgcaacactaatggatgaggaggccatttatactgtggttaaggaaaatccaccagccttacttgctttgcgctggtattgggcatcggaaggaataggaaatacggatatggttgtactcccgtacaaggatagtttgctacttttgagtagatatttgcaacagcttgtcatggaatctcttgggaaagaatttgaccttgatggcaatcggtttaatcaaggtctaactgtgcatggcaacaaaggaagcaccgatcaatatgcctaacattcagcagctgagagaaggtgtacacaacttcttcgttacttttattgaagttttgcgtgaaaggcctcctgggtatgattggaagcttgaacctggagtaccat

SEQ ID NO: 3306 - DNA, 337 bp, Oryza sativa
  Clone ID: uC-osflcyp071a12b1
tgatgagacactcactgatataatcaagctagctagcttaatcacctagctatccgtcagtttagctagatatggctgcagataactgcaaggcggtggtcgccgcgattgtggtggcgatggtggctgcggcgccgggggcgtcggcggcgataacgtgcgggcaggtgggatcggcgatcgcgccgtgcatctcgtacgtgacggggaggagcggcctcactcacggatgctgcaacggagtgaaggggctgaacaacgccgctcgcaccaccgccgaccgtcaggcggcctgccgctgactcaagagcctcgccggcagcatcaaatttcttaa

SEQ ID NO: 3307 - DNA, 550 bp, Oryza sativa
  Clone ID: uC-osflcyp071b02b1
tatcaacagcgccttcgagccgtcctccatgatggccaagtgcgacccgcgccacggcaagtacatggcgtgctgcctgatgtaccgcggcgacgtggtccccaaggacgtgaacgccgcggtggccaccatcaagacgaagcgcaccatccagttcgtggactggtgccccacggggttcaagtgcggcatcaactaccagccgcccagcgtcgtcccggggggagacctggccaaggtgcagagggccgtgtgcatgatctccaactccaccagcgtcgtcgaggtgttctcccgcatcgacatcaagttcgacctcatgtactccaagcgcgccttcgtccactggtacgtcggcgagggcatggaggagggggagttctccgaggcccgcgaggacctcgccgcgctggagaaggactacgaggaggtcggctccgagttcgacgatggtgacgagggtgatgagggtgacgagtactagagaggttcagggctcttgcctggtgcctcggcaatgcttgattactgctgctatcctatgatctgt

SEQ ID NO: 3308 - DNA, 510 bp, Oryza sativa
  Clone ID: uC-osflcyp071b04b1
atggtaaagggtcaggcctgggtgaatgggcaggtaattggtcgctactggtcactagtagcgccagaatctgggtgctcatcttcgtgctactacccaggagcctacaatgagaggaagtgtcaatcaaactgtggaatgcctacacaaaactggtaccacataccaagagaatggttaaaagagtcagataatttattggttctgcttgaggaaacaggaggtgatccctcgctgatatcaactggaggctcattatgccaaaacagtctgctcaagaatttcagaaaattattatcctcccctttctgcctggccgcatctttccagcggccgtgcctcagtgaatgcagcaacttcagaactgcgcttgcagtgtgacgatgggcatgtgatccttgagattacatttgaagctatggacctccttcaggaggctgcctgaacttctccaagggaaatgccatgcattgagcactcttgatttggtgacagaagcatgtgttggca

SEQ ID NO: 3309 - DNA, 473 bp, Oryza sativa
  Clone ID: uC-osflcyp071b08b1
tgccgcagttcaggatatcatggagcagctatgtgctaacaatctttgacaaacgtgatggcggaaaacaaatttctaacacaacaaatgaaattaaggaatcagatgaatccgaggattcaatctgctgggttaaggctgatgatgaagaagctgaaattgcttcctttcttgaaattatgaaaactttttcagcccatcgcttgcttattgtggttgacaactttgaagacaaatctcctcattatcaaaagttaattaaggatctctctcaaaagttttacacgtgttggatgagtaaagaaggcagtgacacaattgtggagtatgactcttctaacactgaagagatagagaccaacagattggaggttatgtttggcgggacactggcactggatgaatatatccaccaaaaaaatctttgtacagttgttatggtgaagacatctgacattaagctgctaagagat

SEQ ID NO: 3310 - DNA, 270 bp, Oryza sativa
  Clone ID: uC-osflcyp071b10b1
ttgtaaggccgcgctgtggatgatagggcgggcgggctttcaagatgggttggttacctgccaggtgaagttctggtagatgcacagcatctggaaagagatgaacggaaaagcataagcttcagcgaacctgacgagggatgcgtggactattttcacaagctaaactaagatgccattgctgaacatccacaggtccgaagagttccacctggctggatcagctgcccagtttggaaaactagacaatatggatccaataaacgaggg

SEQ ID NO: 3311 - DNA, 430 bp, Oryza sativa
  Clone ID: uC-osflcyp071b11b1
tcgtgggcgtacgtgctaagctgcagcacatccgaaagctatatatggtacgataatggcaaactcaccgacgctgacaatgctggtgctcctagctattgggctatctctcgagctctgcgaagactgcgagtctgaggagagcgtggtcaccgaggcgttcttcaacgggaccaagaaccaggccccgaacggatgcgccggtaagagcttatacacacgggaatcgatcctgaacgccgaccgctgctactagggcttaggcaatgaccggaccaacgacaactccaaccgcgagatcgctgtcttcttcgcgcatgtcacacacaagactggacatatgtgctacatacatgatataaatggggcaaacatggactattgtgacaagagcaacatacaagtgccgcgccaaccgtgcaagaagtac

SEQ ID NO: 3312 - DNA, 465 bp, Oryza sativa
  Clone ID: uC-osflcyp071b12b1
tgtaatgaaccctaagattcaaagttagcaggggtggtgtgggctatttcataggctgtgatcgacatccgaaatgcaagtacattgctcgcacgctatcagacgatgacaatgaaactgaagcatctgatgaaactcaaaggactttcacacctaggttacttggagcgctacctgattctgatgaaaaggtgtttatgaaacaaggttcttatggccactacgaccaggttggagaggatagaaagggagtatcaccgaatagagctcctctctctgaggagaaagatattgactccatcactctgaaagatgcaatcgagctattgtagcatcccaaaattctgggaaaacaccctgatgatgatcttcctgtacttatcacacattctaaagctggatttagtatcagacacaggagaactcttgcttccttgccaaagagtgctgacccaaagaagatta

SEQ ID NO: 3313 - DNA, 468 bp, Oryza sativa
  Clone ID: uC-osflcyp071c02b1
tttttgagttggggattgattgattgattcggattgggatgaagaagaagcaggggagcatgggcagcaagtcgtacccgacggtgagcgatgagtacctggcggccgtgggcaaggcgaagcgcaagctccgcggtctcatcgcctagaagaactgcgccccactcatgctccgccttgcgtggcactctgctggcaccttcgatgtgtcgtccaggaccggcgggcccttcggcaccatgaagaaccccggcgagcagtcccacgcctgcaacgccaggcttgacatcgccgtaaggcttctcgaccccattaaggaccaacttaccatactctactacgccgacttataccagcttgctggcgctgtggccgtctaggtcaccggcggacctgaggtacccttccatccgggcaggcaggacaagcctgagcctacttctgaaggccgtgtttctgctgccacac

SEQ ID NO: 3314 - DNA, 554 bp, Oryza sativa
  Clone ID: uC-osflcyp071c03b1
ctagtgtctcccggatactacgatggcaggtattggaccatgtggaagctgcccatgttcggctgcaccgatgccacccaggtgctcaaggagctcgaggaggccaagaaggcctaccccgatgcctttgtccgtatcatcggcttcgacaacgtcaggcaggtgcagttgattagcttcatcgcctacaagcccccaggttgcgaggagtctggtggcaactaagctaagatcaagcatcgcgctggtggattgctgcctataataatagtatgcagctttgttttgggctatgttgatgatatatcaatatataatatgctatatatttttattttacaatttggttatgtaccatctcaatggcctctgctcttaacacatatgtaataatctcttccctccctctccgaccggttttattgtaagagtactacaattatcgttgggtgaggatatgtgaaaacaaagctccggctatatacacacaagatatgtatctagagcatatctgataaattcgtcgacaataaaaaaaatggatggtattacgt

SEQ ID NO: 3315 - DNA, 558 bp, Oryza sativa
  Clone ID: uC-osflcyp071c05b1
tttacgcgtgggctcgcttcttcttcccactaggcaaaagtacaaaccaccgagaaaacgcttctcagataaacatcatcaccatggcggcgtctcttgcctgcgctttcttcttcgacgccgagccggtgggcgagcagggcaggcacgcgctggacgcctgcgcgctctgcaccaagcagctcacgagggacagcgacatcttcatgtacaagggggacacgcccttctgcagcgaggagtgccgctacgagcagatgcagctcgacgcggtgtacgcgaggtcggccggacggaggcagcagcagcagtactccgggagggcggattcgcggcgcgggcaccgggagaccaggaaggtgtccgtggcgagctaatcaagctgcgtcgataatataatgatcagctgagaagaattggcgttgaatccagacgagatttcatgagctaagccacgcatcaccatgcggtgacgaaggagattgatttctccaagccgcgatgcctgacggcgccggagaagagtctgaggaagtccatccgcaagatgagaccttg

SEQ ID NO: 3316 - DNA, 428 bp, Oryza sativa
  Clone ID: uC-osflcyp071c06b1
ttctaaattactccggaaggaagggcaaaagatcaaagaggaagcgcatggttcagtaggtgtgacagaacctgattggatttcatttttgtcattactggttaattcagttggccagtacggttgtgtagttgatctcggacacaattttgatgatcagttgggaaggctaatcttcaggtgcaggacagacacgaaacattccagtggtacaggtgttttgctggcacacagcaagatgaaaatagttcagtacactacaataggtttgagaggataggcatggctcgagtatgtgctacaacataagagtagtacacaaattattcttgtgctactctgcaatgtgggtaccaaactcacgcaggaattgcataattcatgctctacatgcatttattttcctcttgtaacctaataacattttt

SEQ ID NO: 3317 - DNA, 529 bp, Oryza sativa
  Clone ID: uC-osflcyp071d03b1
tttttgtccggagttggaagcgatcgatggcggctactactacgggacgagttgttgcactcggcgcggtggccgtggtggtggcgctgacattcctcgccggcggcgcggacgccgactgctacgacttctgcttcaaggactgcatggccagggagaacaacatggtcgactactgcagctacgcctgcgacaagacgtgccagccggacaagcccacgctgtactcgtcgtcgtcgtcgtcccgcctcgccggcgacatggagtgccaactctcctgcgccttgggctcctgccaccgcctccttccggacggcaagggcgccgtggaggcctgcttcgggcagtgctacgacggctgcaagaccacggcggcggccagactgccgaggcctctccgcgccggccactacgtgctctctagtccccctgatgacgtagaccatgatccggaccaccgctacgtgttctctagcccccatgatgacgtagaccatgatcccggaccaagtgttcgctagtccaccct

SEQ ID NO: 3318 - DNA, 505 bp, Oryza sativa
  Clone ID: uC-osflcyp071d04b1
tgtttcgcgcgccacggagtccggccggttcgtgctgtggcagatggccccggagatgtggtacattgagctcgccgtcggcgggagcaaggtgcacgccggctgcaatggcaagctcgtgtggcgccacacgccgtggctcggcgcgcattccgccaagggccccgtccgccctctccgccgcgcactccagggcttggatcctctgaccgcggcgagcatgtttgccggtgcgcggtgcattggcgagaggaaggtgaatggggaggattgcttcatcctgaagctgtgcgcggaccctgagacgctaagggtgcgcagcgaggggcttgcggagatcatccggcatgttctctctgggtatttcagccagaagactggcctccttgtgcatcttgaggattctcacctcaccaggattcagtccaccaccggaggggacgcagtttactgggagaccaccatcaattcgtttatcgaggactaccgccccgtggagggtata

SEQ ID NO: 3319 - DNA, 488 bp, Oryza sativa
  Clone ID: uC-osflcyp071d06b1
tgtagagagagagagagagagcgaggatacgtctcctgacggaccgagctcgcgattccaatccccgcacggctctgtcctgaccgacgcctcggtctccgccggcggcgcgaccaggatcacagttgcgatggaacacagggaggctggctgccagcagtccgagggcccaatcctttgcatcaataactgcggcttctttggcagcgcggcgaccatgaacatgtgctccaagtgccacaaggagatgatcatgaaggaggagcaggccaagcttgctgcctcctccatcgatagcattgtcaatggttgtgactgtgggaaggagcatattgttgctgacagcggtagcacggcggtggcggtggctcatgtcgaggcgaagactctcgttgtgcaacctaccgatgtcgcgggcaccagcgaggaagtagctgcaggtccccggtcaaggaagggccgaaccggtgcgctccctgtaggaagag

SEQ ID NO: 3320 - DNA, 235 bp, Oryza sativa
  Clone ID: uC-osflcyp071d07b1
tccttccccccccccattcgtcgcctcctggggcggtgttcgcgagcaaaacccgcacccccaaatcgcaggctcgctcagctcgatctctctctcgtctcgccatggcccccagcgacgacctcgtctacatggccaagctcgccgagcaggccgagcgatacgacgagatggcggaggcaatgaatagcgtggcaaaagccagacgaggggctgccaaaggaggagaggaacc

SEQ ID NO: 3321 - DNA, 211 bp, Oryza sativa
  Clone ID: uC-osflcyp071d08b1
tgactccacgcggcgtcgccaccccaccccaccccaacccaagcccaaattcccacgcctcctcctcctcctcctcctcctccgccgcaaaccctaaccccaatggcggaggacggcggcggcgacagggaccagcagaaccagcagcagcagcaggaggaggcggcggcaccggcagccgcggcggcgggggtggggggaggggaggaat

SEQ ID NO: 3322 - DNA, 511 bp, Oryza sativa
  unsure (1)..(511): unsure at all n locations
  Clone ID: uC-osflcyp071d10b1
ttttcagatcatgtttgagactttcaatgtgccagctatgtatgtcgccatccaggccgtgctctccctgtatgccagtggacgtacaactggtatcgtgttggactctggtgatggtgtcagccacaccgtgccaatctatgaaggatatgcccttcctcatgccatcctgcgtctggaccttgctgggcgtgacctcactgacagcttgatgaagattcttactgagagaggttactccttcactaccactgctgaacgggaaattgtaagggacatcaaggagaagcttgcatatgtggcccttgactatgagcaggagctggaggctgcaaagagcagctcatctgtggagaagagctatgagctgcctgatggacaggtgatcaccattggggcagagaggctccgatgccctgaggttctctttcagccctctttcatcggtatggaagctccctgaatccatgagaccacttacaattncatcatgaagtgtgatgtggatatc

SEQ ID NO: 3323 - DNA, 486 bp, Oryza sativa
  Clone ID: uC-osflcyp071d11b1
tttttagcttctagaagcttcttccgagatgaaggtgatcgataagatccaggaggcggcggcggatgggcggacggtgttctcgttcgagtacttcccgcccaagacggaggaggggctcgacaacctgttcgagcggatggatcgcatggtggcgcacggccccaacttctgcgacatcacctggggcgccgggggatccaccgccgacctcaccctcgagatcgccaaccggatgcagaacatggtgtgtgtggaaacaatgatgcacctgacatgcaccaatatgccagttgagaagattgatgatgccttaacaacaataaagtctaatgggattcaaaatgttctggctcttaggggtgatcctccacatggtcaggacaaatttgttcaagttgctggcggattcgcttgtgctcttgatttggtacaacacattagagccaagtatggtgactattttggcattactgttgctggtta

SEQ ID NO: 3324 - DNA, 508 bp, Oryza sativa
  Clone ID: uC-osflcyp071d12b1
aagatggagctggttgatgctgcatttcctcttttgaagggaattgtcgcaacaactgatgttgtggaggcctgcactggtgtgaatgttgcggttatggttggtgggttccccaggaaggagggaatggaaaggaaggatgttatgtcaaaaaatgtctccatctacaaatcccaagcttctgctcttgaggctcatgcagcccctaactgcaaggttctggtagttgccaatccagcaaacaccaacgctctcatcttaaaagaattcgctccatccatccctgagaagaacattacttgcctcacccgtcttgaccacaacagggcacttggccagatctctgaaaaacttaatgtccaagttactgatgtgaagaatgcgatcatctggggcaaccactcatccacccagtaccctgatgttaaccacgccactgtgaagacttccagtggagagacgcctgtcagggaactcgttgctgatgatgagtggttaaatacggaat

SEQ ID NO: 3325 - DNA, 194 bp, Oryza sativa
  Clone ID: uC-osflcyp071e01b1
tgtggtgcccggtgcgaagggaggtgatatgtggggaattgaaaggggctttcgcgccgcctccctgctgccagaatctgcgaagcatcctacaagcgactccgtcgttcatgcagtcgcgccggcaatgccggttctccttgttccatacccaaccccgtctgtgctcattaacacctcccaatggggctcaa

SEQ ID NO: 3326 - DNA, 484 bp, Oryza sativa
  Clone ID: uC-osflcyp071e02b1
attccggccatggctaaggtagctctcagctccctcctcgtcgacggtggcgccgccgccttcgccgttcagccgtcgaagaaaaccggctccggtttgtttcgcaatcgcgtcatcaccgtcaggcggcccaggatttcagccaatctcggtggagatggggaggcgaagcctgcaggtaacaagaagaagttcatcaccagagaagaggagccagagcagtattggcaggcgccaggggagaggaagggcgagaacccgatgaagacaccgctgccatacatgatcatgtttgggatgccgacaccgttcgtcatagctcgcatcggctgcgataatggctggatcaaggtccccgtccggtgaacctcctaccgtccatgttgcatcatcatcagttcatcacatgaggcaatcttggaaggttgctacttgctgccaagatagtcctcactgcgaccactgcactcctaccgggagccct

SEQ ID NO: 3327 - DNA, 376 bp, Oryza sativa
  Clone ID: uC-osflcyp071e03b1
tttacctacttagaatgctattgtgacagttcttttgtcacacgtgttcaaggagatgggttaataatatcaacaacatctggaagcacagcttattcattggcagctgggggatcgatggttcatccacaggtcccagggatccttttcacgccaatctgtccccattcattatcattcaggcctttgatactacctgaatatgtgacattgcgtgtgcaagtgccaatcaatagcagagggcaggcatgggcatccttcgacggcaagggcaggaagcagctagggccaggtgatgcactcatctgcagcatttctccatggcctgtgcccactgcctgcctggtggactcaacaactgacttcctgcgaagca

SEQ ID NO: 3328 - DNA, 293 bp, Oryza sativa
  Clone ID: uC-osflcyp071e04b1
gtgtgagccgcatcttggaccatgaggacgggcccttcaacccggagaaggtccttgtggcggtcaagacatactggactgctgatgaatcagagcagcactagcacactgcacacagcacagaacacaggctcggctacctctctgaagactgaagaagtctgaacccccgattgttttcagagctgtgatgatggcatcggagttttgccatttcggtgtaacataacagaagatatcatctggtcacttgttttcttcctccaaaaaaaaaacaaaaaaaaataacttag

SEQ ID NO: 3329 - DNA, 63 bp, Oryza sativa
  Clone ID: uC-osflcyp071e05b1
tttctgcctttcctcgccccgtcgcgcggcgccggcacttaagcctataaccgcatccgcccg

SEQ ID NO: 3330 - DNA, 577 bp, Oryza sativa
  unsure (1)..(577): unsure at all n locations
  Clone ID: uC-osflcyp071e07b1
tgtaagcactgttgctagggcttctttcatgtagggaaaggaaaggtgatttcagttgcctgactgctgccagaatctgcgaagcatctacaagcgacgccgtcgttcaggcagccggcacggcaatgccggttccccttgctccatacccaaccccgcctgtgccatttacacctcccaatggggctcaaagccagctcgtgtgctctgggtgccgtaatctgctcatgtatccagccggagcaacgtcggtttgctgcgcagtttgcagtaccgtgactgctgtgcctgctcctggaaccgagatggcgcagttagtttgcggaggatgccacactctcctgatgtatatacgcggtgcgacgagtgtgcaatgttcttgctgtcacactgtcaacctggctatggaagcaaatcaagttgcgcatgtaaactgcgggaactgccgcatgctgctcatgtaccagtatggcgcacggtctgtcaaatgcgcagtctgcaattttgtgacatcagttggagcctcacctggtacagaccagaagcctagcagctgaactgttangtgccataaata

SEQ ID NO: 3331 - DNA, 406 bp, Oryza sativa
  Clone ID: uC-osflcyp071e08b1
tgctaggagaagcttgtatccagaaaatgataacccttcttcagtagaccgctctgagttctctggtgaagcttcttctgatgaagtagtgaaggacatgagcaccattgatgaagtagccaaagacatgtgccccagcgacgcagaacaagaaactctcaccagtgacatcagttgtctcaccaagatgaagaagactgatagtgaccatgaggatgaacttgatgagtatcaggatcagtctattagagatggatctacaaccttgagaactgtcaaagatgttggcatagattcatcactgagtgcctctccttctcgttggcctattgattttgagaagatgcggcaagagattattcagttgtggtacgaatgcaacgctcccatcgtacacagaacttac

SEQ ID NO: 3332 - DNA, 425 bp, Oryza sativa
  Clone ID: uC-osflcyp071f01b1
gtttaaccccaccaagtcctccaaggccatgggccgggacttgcgtgtgcacttcaagaacacccgtgagacagcttttgctatcaggaagttgcctctgggcaaggccaagaggtaccttgaggatgtgattgcccacaagcaagctatccccttccgtaggtactgcggtggtgtcggccgcactgctcaagctaagtcacgccattcaaacggtcagggacgctggcctgccaagtctgctagattcattctggatcttcttaagaatgcagagagcaatgctgaggtgaaaggtctggatgttgatactctttatgtgtcccacattcaagctaaccaggcccagaagcagaggcgccttacctaccgtgctcatggacgcatgaacccttacatgtcctacccgtgccacattgagctta

SEQ ID NO: 3333 - DNA, 466 bp, Oryza sativa
  Clone ID: uC-osflcyp071f02b1
gttcaagcaaggcaccaaatccccccaccatggatcaccgcctcctcctcctcggcctcctcctcctctccccggcggtggccgccgcctcagtccccggcgaggaggagccgctgatccggcaggtggtcggcggcggcgacgacaacgagctggagctgaacgcggagcgccacttcgccagcttcgtccagaggttcgggaagtcctaccgtgacgccgacgagcacgcgtaccggctctccgtgttcaaggccaacctccgccgcgcgcgccgccaccagctgctcgacccctccgcggagcacggcgtcaccaagttctccgacctcaccccggccgagttccgccgggcctacctcggcctccgcacgtcgcgccgcgccttcctgcggaggctcggcgggtccgcccacgaggcgcccgtcctacccaccgacgggctacccgacgacttcgactggag

SEQ ID NO: 3334 - DNA, 545 bp, Oryza sativa
  Clone ID: uC-osflcyp071f03b1
cttgttgaagcaaatccagctatttttactggatctgaggtccgtgtggagcaaccagagatgcctctaacgcactttgcaattgctttcaagggttcatcatgggctaaccctagctcaattcctcttatggtgatccaaagcatattgggaacttggaataggagcattggggttgggaactgctcagggtctgctttagctcgtggtatcagcaacggtaatttagctgagagcatgattgcattcaacactaactaccgagatacaggattgtttggcatctgcactattgctcagccggattccctatatgacctatcacagttaataatgcaagaatttagaagacttgcatttgaagtgtcggaaacagaggttgctcgtgctcgtaatcagttgaaatctgctcttttacttcacattgacggatccactgctgtttctgaaaataacggccgtcagatgctaacgtatgggcgagtaatgccattcttagagctctttgctcgcattgatgctgttgaccgtgatacagcaatgga

SEQ ID NO: 3335 - DNA, 541 bp, Oryza sativa
  unsure (1)..(541): unsure at all n locations
  Clone ID: uC-osflcyp071f10b1
gctttttagctaattaagcagcaacttaacttgatcttcttgtgaccgatcgatggctcgcccggcgaataataactatgcggcggcggcgatggtggtggcgctgctggtggcggcgccggcggcgagcgcggcgacatgcgggcaggtggtgagcatgctggcaccgtgcatcatgtacgcgacggggagggtgtccgcccccaccggcggctgctgcgacggggtcaggaccctcaactccgtcgccgccaccaccgccgaccgccagaccacctgcgcctgcctcaagcagcagaccagcgccatgggcggcctgaggcccgaccttgtcgccggcatcccctccaagtgcgacgtcaacatcccctacgccatcagcccttccaccgactgcttcagggtgcactgatgagcggatcaacgtcgacaagtgatgcgacaatataaaggagagatcgatccatcgatctccagctctcatttcgnggatgctatgtgcatgcgccgccgcaatgatcgagctagaaatatatatgca

SEQ ID NO: 3336 - DNA, 563 bp, Oryza sativa
  unsure (1)..(563): unsure at all n locations
  Clone ID: uC-osflcyp071f11b1
tttccaatcagtgttgctgatcgtgctcctaatgttgttgcaatcaatgtaagcccaattgaatatggccatgttcttctcattccccgtgtactggaccgcctgcctcagaggattgaccaggagagcttcttgcttgcactgcacatggctgctgaagccgcaagcccatacttcaggcttggctataatagtttgggtgcctttgcaaccatcaaccacctccactttcaggcatactacttgacagtgcctttccctgttgagaaggcagctaccaagaggattttccttgctgagggcacaatgaatagtggagtaaaggtgtccaagctgatgaactaccctgtgaggggactggtttttgagggaggcaactcactgagcgatctggccaatgtggcttccagcgcttgtatctggctgcaggacaacaatgtgccttacaatgttcttatctctgactgcggcaaaaagatcttcctcttccctcagtgctatgccgagaagcaagctctgggagaagtgagccaagagctactggacacgcangttaacccaac

SEQ ID NO: 3337 - DNA, 335 bp, Oryza sativa
  Clone ID: uC-osflcyp071g01b1
cgtttaagatcgttctggatggagaggtgacgagaccaccacgagcactcgatgccacccacccaccacacaacaccactcaccaccccacgcacgcgcctccactccgaatactcaccgccggaacggcgaatggcatccccgcggcggacggcggcggctaatgcaaggaatggaggaggggcggggaggacgagccggtggatggcggctgacgggagcatgcggtggggggagacgatcttactgatctacacacccttctggctaacgctctgcctcagcgtcttcggcccctttaagctttacgagaggatcacggagctggagtacct

SEQ ID NO: 3338 - DNA, 294 bp, Oryza sativa
  Clone ID: uC-osflcyp071g02b1
cgcgcattctctcatccacactgctcttcccccccgcgcgccggccatggccaccgcgacgctgcccctccgcctgctagcgtacaaaaccctaggggtcccctccgccccgtccctcccggcctcgcgatgctccctccccgtcgccgcgtccgcgccccgccgctgctggcggctcctcgcttccgccgaggagccggcgcccgcacccgtggaggcccacgcccatgcggacgtggcagaggaggaggaggctgaagaagaagaagctgcaacgcacaaatcagacaaggt

SEQ ID NO: 3339 - DNA, 511 bp, Oryza sativa
  Clone ID: uC-osflcyp071g06b1
ccatcgccggcaagagagagagagctagctagctaggatgggttctacagccgccgacatggccgcggcggccgacgaggaggcgtgcatgtacgcgctgcagctggcgtcgtcgtcgatcctgccgatgacgctcaagaacgccatcgagctgggcctgctcgagacgctgcagtccgccgccgtcgccggaggaggggggaaggcggcgctgctgacgccggcggaggtggccgacaagctgccgtccaaggcgaacccggcggcggccgacatggtggaccgcatgctccgcctgctcgcctcctacaacgtcgtcaggtgcgagatggaggagggcgccgacggcaagctctcccgccgctacgccgccgggccggtgtgcaagtggctgacgcccaacgaggacggcgtctccatggacgccctcgccctcatgaaccaggacaaggtcctcatggagagctgggactaccttaaggacgcagtcctggaccgcggcatcccgttc

SEQ ID NO: 3340 - DNA, 472 bp, Oryza sativa
  Clone ID: uC-osflcyp071g07b1
ttttacttctttgcaaaagaagagctcaactgcaatctaacggcggtgaaagaagacctgattaagcctgttactgtaagcttcaaagagggtcttggtcagaagttcagacagccttctggcactggaatcgacttctccgtgtttgaggattccgagttattgaagcagggggacatggatgtatatccacttgcagttaaagctgaaacaaccatgcctgttgatcaaaagttggaaggagaagatcaaaagatgaaaactccaaactcacagatcacacaggctctgtttgaaaagaaagaaagcggtgattatcaagttcgagttgctagccagatcctttgggtcaatggaactaggtatgagttgcaggaaatatatggaataggaaactcggtggaaggcgatgctgatgccaatgatcctgggaaagaatgtgttatttgcctcttcgagccaagggatacta

SEQ ID NO: 3341 - DNA, 469 bp, Oryza sativa
  Clone ID: uC-osflcyp071g08b1
tgttccattctcatttcccaaagaccgcaaaaaaattttccttccatctctcgccgcatttccctttccccctatgcggatccgctcccttgcatccaccgccattccccgcgtctgatccgtcgtcgttgtggaggatgagggaagggggagcgggcgaggggcagggcgcggccgcggatgaggcgacggggttcgaggtcgggatcgtcgtgcccaagctctaccgcggcgctgcggccgggtgcggcgaggtcgagaactgcgtggcgcggctggtgcaggagctggaggacgtagggctgatcgtcgagcgcgtccgcggcgtccccgcggagttcatcaagctgtctgcgcccatggggaccctggggagagctgcagcggagatgaacatgaagaagctaacttatatcggaatggaactgcagtttgaatgggaccaggttggagcattcgtcaggcagcc

SEQ ID NO: 3342 - DNA, 518 bp, Oryza sativa
  Clone ID: uC-osflcyp071g10b1
tttgattgttttactcctctggataaaggagtgaatagtaaacatccaggtggatttatttgggccagtgagaagacaggatttagacacctgtctcttcatgacaagaatggtgtgtgcttggggcccctcacacaaggtgattggatgatcgaccaaattgctggtgtcaatgagagttctggagttatatattttacaggcacattggatgggccattggagacaaatctttactccaccaacctatttccggattggagccttcccttgcaagtccccaagaggttgactcatggcacaggacgtcattcagtaattcttgaccatcagttgctgaggtttattgatgtgtatgactcaataaaatctccacctgtgatcctgctatgctctttgcttgatggaagtgtgataatgcctctatatgagcagcctctgactgttcacccgcttataaagttcagcagctgtctacagagatagtacagattgaaggaaaggatgggactgcttta

SEQ ID NO: 3343 - DNA, 576 bp, Oryza sativa
  unsure (1)..(576): unsure at all n locations
  Clone ID: uC-osflcyp071g11b1
tttttcctctcctcccgtcccgccgccgccgccgacgacgacgactacgtccagccctcctccgtaatcccccacttgttgggcctgcaccttgtggtagccactctttaatcaatggagagcacagagcccctacaggatatcatgtgcgagtttcgtgcgggtaagatgtcccttgatggaacacgagtgatcccagacacacgcaagggtcttgctcgcataggaaggggtgaagaaggcttggttcattttcaatggcttgatcgtggacagaatctagttgaagttgatcaaattgtcttccctgaggaggctgtctttgagaaggtaacacaatcttctggaagggtttacatcttgaagttcaggcacgatagcaggaaattcttcttctggatgcaggagccaagtgctgatgacgactcacaaatatgtcgccaagataatgcctacataaaccgancattagatggtgaggcagtttctattgaagctgaaatgtcacatgaagacacagctgatgatgacatctcctccagagctgggaanttagctgaccagagcatgactgct

SEQ ID NO: 3344 - DNA, 568 bp, Oryza sativa
  unsure (1)..(568): unsure at all n locations
  Clone ID: uC-osflcyp071g12b1
gcttttattacgtccacatatctgcagaatgcagacagcttattgcccgcatttttgtcaacaatccattgaggagaatcacgatgaaggaaataaagagccacccgtggttcttgaagaacctccccagggagctcacggagactgcgcaagccatgtactacaggagggacaactccgtgccttccttctcagaccagacctcagaagagatcatgaagattgttcaagaagcaagaaccatgccgaaatcatccaggacaggctactggagcgacgcgggttcagacgaggaggagaaggaagaggaagagaggccagaagagaacgaggaagaggaggaagatgagtacgataagagggtcaaagaggtccatgcgagcggngagctccgtatgagctcactgcgcatatgaaaaagtttgtgtgcagctattgtgtagataatccggcttactatggaactgcggtgtatgcaattttcgcttgtaatttgcttctgtttgggcgttcttcgtgtaacataacttacttgggggcgcttggacttcaattgcctgattatgtt

SEQ ID NO: 3345 - DNA, 82 bp, Oryza sativa
  Clone ID: uC-osflcyp071h01b1
ggtgatgacaccagggggaggcaggagcggccggcgcactagatcggggcgggcggatttaggggaggagcgcgctagccgg

SEQ ID NO: 3346 - DNA, 250 bp, Oryza sativa
  Clone ID: uC-osflcyp071h02b1
atctcattctcctaattgtcatcactagcttctagctagcttaattaattaattagccatggcggaggagaagcaccaccaccacctgttccaccacaagaaggacgacgagccggccaccggagtagactcctacggcgagggcgtctacacgtcggagacggtgaccaccgaggtggtcgccggcggccaggacgagtacgagaggtacaagaaggaggagaagcagcacaagcacaagcagcacctc

SEQ ID NO: 3347 - DNA, 376 bp, Oryza sativa
  Clone ID: uC-osflcyp071h04b1
atttctgtgttgatcaccctgacctacctggggagggggagcggcccaagagatcacgactgccgctacgaccacagctcctcgcccgccggcggcggaggctggctccatccgcgggcgatcgtacacggttgatgatcaggctgctactggtgctgagacagcgggaagactgacgaccactgagcctgcctgtgcacacagggtcgtgactgctgcgacactggccccatctgagcgaccaggaaggatggttggtcgcatacaagtggcggctccatgccaagaatttgcttacatacactatcatgatctgcaagactgaccacacttcaatggatggtgggacgtcgttagctctggccctgtggttgcc

SEQ ID NO: 3348 - DNA, 493 bp, Oryza sativa
  Clone ID: uC-osflcyp071h05b1
ccattcatcattattctatttattctgacctccatacttcgatcgagatattggacatcgaatgccactctttaaaatggaaaaaaaggagtaatcagctgtgacacgaaaaaaaacgaatccttttgtagctcatcatttattggcaaaaatagaaaaggtcaatatgaaggaggagaaagaaacaatagtaacgtggtcccgggcatctagcattctacccgcaatggttggccatacaatcgcgattcataatggaaaggaacatatacctatttacataacaaatcctatggtaggtcgcaaattgggggaattcgtaccaactcggcatttcacgagttatgaaagcgcaagaaaggatactaaatctcgtcgttaactgaattcagaatagaaagattcaaaataaaaaaaaaaagaaataggtaagcggggaataaccttatttatgacaagtttcaaactggtaaagtatacccctaggataaag

SEQ ID NO: 3349 - DNA, 361 bp, Oryza sativa
  Clone ID: uC-osflcyp071h08b1
ttttaaccaccaaatagaagggacgtaggtgagcaccaacagctacatcgggcatggctcgcgcgctcgcactcgtcgtgatcctcctcgccgctatcgcagtggcaccgctcgcggaagcctcgacagtcaccggcggctacagggtattgctggcctccgacgcgcccaatgagagcccggctgggcctgcagcggacccaggcccagcggaagagatcagcagtgaatctgctccatttccgagcgccgatgatgcctgatcgagtaataatgaagtccaagtgaataattcttcatcccaagaacattgatcaagcatatatgtcctacccttcctttataaaggctaacagagcct

SEQ ID NO: 3350 - DNA, 486 bp, Oryza sativa
  Clone ID: uC-osflcyp071h09b1
tgtctccatctgtgcacggagggattcattgtccctccggccaatttcccggccggccggaacggcggaacctcgtccatgatcacttgaaacacctcccttgctcttcatggccatggagacgacgagccaagattcgcaggtgatcatgggccggtacaagctcggccggctcctcggccgtggcacgttcgccaaggtctacaaggcctataagttggccaccggcgaggccgtcgccatcaaggtgttcgacaaggaggcggtgcagcggtccggcacggtggagcaggtgaagcgcgaggtggacgtcatgcggcgtgtgcaccaccgtcacgttattcgcctccacgaggtgatggctacgcggtccaagatctacttcgtcatggagtacgcgagcggcggcgagctcttcacccgcctctcccggagcccgcgtgtaccggagcccgtcgcgcgccgatactttcagcagctgatcac

SEQ ID NO: 3351 - DNA, 557 bp, Oryza sativa
  Clone ID: uC-osflcyp071h10b1
tttcatatggggcccggaacctggcgcaaggcctacggctcgctcaaggactccaccaaggtcggactcgccaacttcaacagcgagtacaaggatttggatatcgccattgtgaaggcaaccaaccacgtagagtgcccgcccaaggagcgatacctcaggaagatactctttgcgacctcggcgaatcgaccgcgatccgatgttggttactcaatatgtacattggctaggagattatccaagaccaagaactggattgtcgcattaaaaacattgatagtgatacatagattgctcagagaaggtgatgggacatttaaagaagacttcttgaactattcttatagaggaactattttgcagattccacaattcaaggatgattcgagccctttagatgaacgggtcgagtgctctagaattctaaaatatgatgctgaagcggatcgcctggtgaaattaccccaagcttctggcaaggcacacaagagaacaagaactctaccatgtggagatcttttagatcacttgcctgcattgagagactactactc

SEQ ID NO: 3352 - DNA, 548 bp, Oryza sativa
  unsure (1)..(548): unsure at all n locations
  Clone ID: uC-osflcyp071h11b1
ttcagatatagagcagaggaaagctaagctaaattagttagttagattactagtctctggcagctgggtgatcttaatttgatcaaagaagaagaagaagaagcaagtttttttagctcctgagtatattataggattaactactactaggatagtactcctatatgagaagaagatgatgcgcgggaaggatcagaaatttccggcgatgaagaaggagacggcggcggcggcgaaggaggaggtgtgggaggtgcggcccggcggcatgctggtgcagaagcggagcccggagtcggagccaccgccgggcggcgcgccggtgccgacgatccgggtgaaggtgaagtacaacggggtgtaccacgagatctacatcaactcgcaggcgtccttcggcgagctgaagaagctcctgtcggagaagacggngctccaccccgacgaccagaaggtggtgtacagggacacggagagggactccaaggcgttcctcgacatcgccggcgtcaaggaccgctccaagatgctcctcctcgaggacccca

SEQ ID NO: 3353 - DNA, 482 bp, Oryza sativa
  Clone ID: uC-osflcyp071h12b1
ataagctagatagaagggaggtcgatcttaacggcagtacttccagcttcgcacatcactacctgaacggagcaacttctattcttagtcgcaacaaaacagatggttcccacgctggttcatttgaccttgagaagcttgaagaacctttcttctcaaataaattttctgttcttatcaatgttctttcgagatacgggttgcaggaaaacatgaaatgcattgcttttgcgaaaagaataactgttgcaagagcaatatcaaacattctccaaaacttgaagtgtcttgaattttggaaatgtgagtttcttgcgggctgccactcaggatcaaagaacatgtcaaggaataagacggatgctattgctcaaaggttctcttctggtgaggcgaatcttttggctgctacaagcgtaggtgaagagggacttgatattcagacgtgctgccttgctgtgcgatttgatcttccagaaact

SEQ ID NO: 3354 - DNA, 255 bp, Oryza sativa
  unsure (1)..(255): unsure at all n locations
  Clone ID: uC-osflcyp073a04b1
cggccacctngtcctcctcgtcgccgcggtggcgttgctgtcagctggcttcctcccgcacgctgtggcgaagaagggcggcgccgtgccaccggcggttgctgacatatgctctcgcactccattcccagacacgtgcaagagcaccgccgggcggcacgcgtccaagtacccggtgatcgacgtcgtggctgtgctcaacatgccggtggacgcgttcttcaagcgcacggcgcatgccaaggagcgcgtgac

SEQ ID NO: 3355 - DNA, 184 bp, Oryza sativa
  Clone ID: uC-osflcyp073a07b1
tatattggtgattttgggggacctgcgatgctgccgttgagatgccacgagctggaagggtctgggctgccttgaagaggagttctgcatcgagagggaggagggcgaccagaagaacaacagggtgatcgtgcgcggtaagtttgacccggagaagctgtgcaagaagatctggtgcaaggcc

SEQ ID NO: 3356 - DNA, 208 bp, Oryza sativa
  Clone ID: uC-osflcyp073a08b1
gcacgccccgactatctaaggcagtgggggaatggatcatgcttttgccatgcattgggtgtgtatgctactacctgatggaactctgctgcgatgctgtttcaaggatcggattgtgagacatccggatcaccagtcacaaagacgggacagcggatgctgtttggtgtatatagggggcattccaattctgcaaatgaggtcgcaa

SEQ ID NO: 3357 - DNA, 347 bp, Oryza sativa
  Clone ID: uC-osflcyp073a10b1
ggaggttggagctgtgcaagatggtgattgcgcgcggccttttccgatcgaatgcctcttttttcctcctctcaggcaatcaacttattgaagtatgtaactagcactggaagtctgcaagggcactcgcaaaatttgtgtgatgcatcaaccagacatttcagttcagtaccatcgccccagtacaacttaactgaagagaatgggttcaaggggcatggcatgttggcaccattcacagctggttggcagaagaccgatgttcatcccttagtcattgaaagatctgaggggtcgtatgttatgaaatcgaacgaaagaagtatctagattcttttgcgggacta

SEQ ID NO: 3358 - DNA, 301 bp, Oryza sativa
  Clone ID: uC-osflcyp073b02b1
ccgccgaccaggcggaggaggccatcgtggcggacgccgggaaggaggaggcggaggtgcgcgcggccatgggcgtcgagcaggacggcaagttcagcatgacgagcctcctgtggcacggcggctccgtctgggacgcctggttcagctgcgcctccaaccaggtggcgcaggtgctcctgacgctgccgtactccttctcgcagctcgggatgctcttgggcctgctgctgcaggtgttcttacggacttatgggtagctggaccgcctaccttatcagcgttctctacgtcgagtacc

SEQ ID NO: 3359 - DNA, 297 bp, Oryza sativa
  Clone ID: uC-osflcyp073b04b1
ccctgggtctgccggtggcggcgacggtgaactgcgccgacaacaccggcgccaagaacctctacatcatctccgtgaagggcatcaaggggaggctcaaccggctgccgtcggcctgcgtcggcgacatggtcatggccaccgtcaagaaggggaagcccgaccttcggaagaaggtcatgcccgccgtcatcgtccgccagcgcaagctgtggcgccgcaaggacggcgtttaccatgtacttcgaagacaatgcttggggtgattgtgaatcccaagggtgagatgaaaggttc

SEQ ID NO: 3360 - DNA, 129 bp, Oryza sativa
  Clone ID: uC-osflcyp073b06b1
ctgcatacattggcttggacaagtgcccgcacgcgctgattccagtgcatggccgaatcaacctatctcccaaagataggctctgtggatacctaaggcacctaacggcaagggtaggggccattctac

SEQ ID NO: 3361 - DNA, 315 bp, Oryza sativa
  Clone ID: uC-osflcyp073b11b1
gggcaacatcgtctttcggacgctttgatgactccttcagcgcggcctccctcaaggcctacgtcgccgagttcatttccaccctcgtcttctgttttaccggcgtcggcttcgccatcgcctacaccaagttgaccggtggtgcgccgcttgacccggccgggctggtcgtcgtggtggtgtgcccacgggttcgggctgttcgtggcggtggccatctgcgccaacatctcctgcggtcacgttaacccggacgtcaccttcggactttgcccttcgcggccagatcaccatgcttaccggccgctttttact

SEQ ID NO: 3362 - DNA, 378 bp, Oryza sativa
  Clone ID: uC-osflcyp073b12b1
cgcataggcggcggacgaagagctcccggcgatgggcggcgacaaggagaacctcgacctctccgacctcaacgcctcgctgcccgccgccgccgccgctctcagcgccgaggaccgcgccggcctcgtcaatgccctgaaggataagctgcagagcttggcgggtcagcacacggacgtgcttgaggcgctctcccccaatgtcaggaagcgtgtcgaatatttgagggagatccagggccagcatgatgaaatcgagttaaaattctttgaagagagagctgcgcttgaagcgaagtaccagaagctttatgaacccttgtacacaaagaggtataacatagtaaatggagttgttgaggttgatggtggaaatga

SEQ ID NO: 3363 - DNA, 213 bp, Oryza sativa
  Clone ID: uC-osflcyp073c01b1
tttcaacgagggcaatctatccctggcgaggccgttatgtgagctaatgcaggatgcacaccatgaggttcctcaatggcttgtacgatactcggcccgttcttcgttcggaggtggtggtggcagaaacctccgatcaggcggtgcccgttttggtggccgtgacttccgtcgcgacaataggggtggaggtggtagaagttatggtggcgg

SEQ ID NO: 3364 - DNA, 320 bp, Oryza sativa
  Clone ID: uC-osflcyp073c04b1
catctgcccagggagtggattagggatgaagaattggctccggataaccttcgcggttgatccacaattactagaggatggtctagagagaaccaagtgtttctgcaagaggcatggtaaaatcaaggaagccagctagctcgtgaatagtttcaggctttcagcatccgtactcatggatgtgtagaaccggcatcatgtgagaataaagttgaatcaagttggacacttaaatcagcacacattatgtcgtcaaattcctcaatcgaggaacttgtgtatcttattagttattatatattcgaaatcaaatttaagtt

SEQ ID NO: 3365 - DNA, 357 bp, Oryza sativa
  unsure (1)..(357): unsure at all n locations
  Clone ID: uC-osflcyp073d01b1
agatgtccaagatggcggaggagaaggtgctggcggcgccggccaccgtcgacggcgggatgcagtcctccggggacctgcaggcttcgtcggcggcggcggcgcgtgtgcggcccgtcgagacgctcctccgcgccgcgccgctggggctctgcgtcgccgccatggccatcatgctccgcaactcggtcaccaacgagtacggcaccgtctcctactccgacctcggcggcttcaagtacctggtgtacgcgaacgggctctgcgccgnctactcgctggcgtcggcgttctacatcgccgtgccgaggccggcgacgttgtcccgctcctgggtcgtttttcttcctcgaccag

SEQ ID NO: 3366 - DNA, 370 bp, Oryza sativa
  Clone ID: uC-osflcyp073d04b1
aacatcgtcctcgccgtcgccgtggtggcagcgctggtcggcggcgggtcgtgcggcccgcccaaggtgccacccggtccgaacatcacgaccaactacaacgccccgtggctccccgccagggccacctggtacggccagccctacggctccggctccaccgacaatggtggcgcgtgcgggatcaagaacgtcaacctgcctccctacaacggcatgatctcctgcggcaacgtcccaatcttcaaggacggcaggggatgcggctcatgctacgaggtgaagtgtgagcagccggcggcgtgctcgaagcagtccgtgacggtgttcatcaccgacatgaactacgagcccatttcggggtaccact

SEQ ID NO: 3367 - DNA, 344 bp, Oryza sativa
  Clone ID: uC-osflcyp073d05b1
atattcgtcggtactccactacataggttgcttctattttatttctacacgatgcaggtaataagtgcgtgtgtttctgcttttgttagttcaggcgtactgcccatgttcatccgattgctgtcctaatcgttcgtgcattcattattagaatcaaacagttggagttagcatgtatgtcttaatctgctcaagaaacttcttgcaacccccaagttttcccccaaattgaagtctgcagttgactgcctaccatttagattctctatttctatttcatcgacttatacatccatcaacattttgttggtagaatgccctcttgaagtactgcccatgttcat

SEQ ID NO: 3368 - DNA, 314 bp, Oryza sativa
  Clone ID: uC-osflcyp073d07b1
cacaaatcccgcgcgggttgggaagagcgagctcgtgaggagagcagagggaaagcgcgagggggaaggaggtggaaaggtgcacaaggtcagactaagtttgcgttgaagaacaaaggagaggaaaaatgtcgcctgctgaggcatcgcgtgaggagaatgtgtacatggcaaagcttgccgagcaggctgagcgttccgaggaaacggtcgaattcatggagaaggtggcaatagaaccacctgatcggttgtgtgagcctcaacccgttagagcgaagccgggaaacctttgccttttcttgatgggcttt

SEQ ID NO: 3369 - DNA, 295 bp, Oryza sativa
  Clone ID: uC-osflcyp073d09b1
gggccgtaagttcttcgttggtggctactggaaatgcatcgggaccactgatctggtggacaaaattgtgaaaattctgaatgagggacagattgcttctacagatgttgttgaggtggttgtcagcccaccttatgtgttccttcccgtggtcaagagtcagctgcgcccggagatcccagtcgctgctcacaattgttgggtgaagaagggcggggcttttcaccggtgaggttagccctgagatgcttgtcaaccttagtatttcctggcttatttttggacactctgaaag

SEQ ID NO: 3370 - DNA, 284 bp, Oryza sativa
  Clone ID: uC-osflcyp073d10b1
ggggagctcctaggccgtctacctgctccggattctaccctcctcgttgctggtccaagcgaagcagcggtaatggcgtgcgggcgcaggcgtccacgactgagactaccgctgcgccggctgctgaggtgactactaaggtggagaaggtgtcgaagaagcatggggatggcgtggcgacgaacaagttcaggcccaaggagccgttcacggggcggtgccttctgaacacgaggatcaccggcgacgacgtccctggtgagacgtggcacatggtgttcagc

SEQ ID NO: 3371 - DNA, 363 bp, Oryza sativa
  Clone ID: uC-osflcyp073d12b1
acaagagagagagcgccagactctccccaggattcagccatgaagggggccaaatccaagggcgccgccaagcccgacgccaagttggctgtgaagagtaagggcgcggagaagcccgccgccaagggcaggaaggggaaggccggcaaggaccccaacaagcccaagagggctccctccgctttcttcgtttttatgtcagaccacttccccgattttcttctgccttcttttttttttttggaggggattttcgtttgatcttgtttcgcttagggaggagttccgtaaggagttcaaggagaagaaccccaagaataaatctgtcgctgctgtaagaaaagcagccggtgatagggggaa

SEQ ID NO: 3372 - DNA, 381 bp, Oryza sativa
  Clone ID: uC-osflcyp073e02b1
ccccagcgccggctgccgcgccccactccggcgaccccctcctcctcaacatcctcctctgaagtgccgtcacccagaattggtcccgcagctccccgcgaatccggtcccaagctaaccctagccgctggcctcctcctctgctgctgctgctgctgcgactccctaccgccgccgagatggccggtgctgagcaccgtgcaactcctgtggcgtacggttggctatctattccagaggcagctttttctgaaattggctaaagtgtttcctctccttttggagcttggttggcccctggagtattagcccttcctggaacctgaacaccttcctgatctgaagctccttggtcacttatcactcaaaaaataccaaaat

SEQ ID NO: 3373 - DNA, 379 bp, Oryza sativa
  Clone ID: uC-osflcyp073e04b1
ctcgccacttccaagcaaggggaagactggcaaggatggctggtatcccccaggccatggtgatgtgttcccctccttgaataacagtggaaaacttgataccttgttggcacagggcaaggagtatgtctttgtcgcgaactcggacaacttgggtgctattgttgacatcaagatcttaaaccacctgatccataaccagaacgagtactgtatggaggttactcctaaaacattggctgatgttaaaggtgtgaccctcatctcttacgaagggagagttcagctgttggagattgctcaagtccctgatgagcatgtgaatgaattcaagtcaattgagaagttaagatcttcaataccaacaacctgggggtga

SEQ ID NO: 3374 - DNA, 272 bp, Oryza sativa
  Clone ID: uC-osflcyp073e05b1
actacccattgttgcccagtactgtaaaccagacttgtgaacactcagcttgcacagtttaaccatcaaatcctgaccaggggacacattgtgttcaaggttctataggttccatggacctctgccactcagcacttgcaaacaagcaggtatatgatagtgattggctcttcacaggacgagccaccaccatgaaatgaaagaggcttgtctgacacattcggtgtccaatgattatatgagttatcgttacagacatatacactggttgc

SEQ ID NO: 3375 - DNA, 361 bp, Oryza sativa
  Clone ID: uC-osflcyp073e08b1
tgaggtcgtccccgatcatcttcctgctcctggccgccgccgtcgccatcgccgctccgtggcaggttgcgcacgccgcgggcaagtgcggtaagacgccggcggagaaggtggcgctgaagctggcgccgtgcgcgaaggcggcgcaggaccccggggcccggtcgccggtcgcgtgctgcgcggccgtgcgcgacatctgcacgcaccagagccacgcgtgcctgtgcgccgtgctgctgttcagcaccgtgaggcgctcccgtgttaagccggaggtggccatcaccatccccaagcgcttgcaacttgtcaaccgccccgtcggctacaagtgcggggcttacacgctgcccagcct

SEQ ID NO: 3376 - DNA, 494 bp, Oryza sativa
  Clone ID: uC-osflcyp073e10b1
tttccagaacacccagggtctcatctttgttgtggacagcaatgatagggaccgtgttgtcgaagccagggatgagctccacaggatgctgaacgaggatgagctacgtgatgctgtgctgcttgtctttgctaacaagcaagatctgccaaacgctatgaatgctgctgagatcactgataagcttggactgcactcccttcgccagcgacactggtatatccagagcacttgtgctacaacaggtgagggatttgaccgagggcctggactggctgttcagcaacattgccagcaaggcctaaattttaacaagatttgcataagctaggggagcttttggatggatcgatgggtatttagggctggggttggttcccaatatgtaaggtgaaattcggagctcaatagtattgagctttggtatgatttcacagtaatggttactgtacttgagcctacaagttttgaataacagttttccatgggtccgt

SEQ ID NO: 3377 - DNA, 435 bp, Oryza sativa
  Clone ID: uC-osflcyp073f06b1
ggaactcatggctgatgcagataggctgcaagccgaaaaggaaaggtttgagattgaatgggagctgattgatgaaaagaaagaggagctacaaaaggaagcgatcagaattgctgaagaacgaagagcaataactgagtatctgaagaatgaatctgatatcatcaaacaggagaaggataatctccgtgttcagttcaaaagtaattcagaaacactctctcgtgaacacaaagagttcatgagtaagatgcagcaagaacatgcaagttggctgagtaagattcaacaagaaaggcaagatctgaagagagacattgatatccagagggtggaattgctaaattctgctaaggcaaggcagatggaaaaagattcttatttgagggaaaggaggaagagtttgagcagaaaaaggccaaggaactcgaacac

SEQ ID NO: 3378 - DNA, 320 bp, Oryza sativa
  Clone ID: uC-osflcyp073f07b1
gcatcatgaggttaaggtgaaggacttcaagacccttctcttcggtgagaaggaggtcaccgtgttcggctgcaggaaccctgaggagatcccatggggtgagactggcgctgagtttgttgtggagtccactggtgttttcactgacaaggacaaggccgctgctcacctgaagggtggtgctaagaaggccgttatctctgcttccagcaaggatgcccccatgtttgctgctggtgccaatgagaaggagtacaagcctgacatcgacattgggtccaatgctagctgcactaccaacttgcttgctccacttgcca

SEQ ID NO: 3379 - DNA, 386 bp, Oryza sativa
  Clone ID: uC-osflcyp073f08b1
cagataagtctactgtgcttgaccgggcaatgattgagcataacctccttagtgccagtaaactttacactaatatcagctttgatgagcttggagcattattgggcattgaccctaggaaggctgaaaagatagcatcgcgaatgatttatgaagataggatgcgaggttcaattgatcaggttgaagctgtgatacattttgaggatgacactgaagagctgcagcagtgggaccaacagattgcgggactgtgccaagcgctgaacgacatttctggacagcatgtcaagcaagggaatggctattcctgtgtgagctcttcaagtgcttcgatggtactcgtgagaactgtggtcaccgcgtcaggcctcacggacattttg

SEQ ID NO: 3380 - DNA, 309 bp, Oryza sativa
  Clone ID: uC-osflcyp073f10b1
ggcgaagattaagatcgggatcaatgggttcgggaggatcgggaggctcgtggccagggtggccctgcagagcgacgacgtcgagctcgtcgccgtcaacgaccccttcatcaccaccgactacatgacatacatgttcaagtatgacactgtgcacggtcagtggaagcatcatgaggttaaggtgaaggactccaagacccttctctttcgtgagaaggaggtcaccgtgttcggctgcaggaaccctgaggagatcccatggggtgagactggcgctgagtttgttgtggagtccactggtgtttt

SEQ ID NO: 3381 - DNA, 137 bp, Oryza sativa
  Clone ID: uC-osflcyp073f11b1
tgttatttgccaatctagtaatcttctcttcgctggatgctggctatatatatatatctagaacatatatataatgtttttctgcatttttagagatatggaaacgacctttggttaaaaaaaaaaaaaataactat

SEQ ID NO: 3382 - DNA, 448 bp, Oryza sativa
  Clone ID: uC-osflcyp073g01b1
gctggtcaaaaggctaaggaggaacctttcaaacaaggtgaggatgacgcccaaaggagaaataaacttgtgcgagatatgagtgatgtaatgggagaaggcaatatagagagcatgctctcagttgaaatggggcttagagagctttcatcattgaaggtggaagatgctgttgtggttgcacttggtcaacaccggagacctagtattgttcggcaattcacatcagattttaaatcacctggtgaacctaaattcttggaggcgtttgatccttagccatgaagaggcagaagatgttagcttttagcaggcatggcttatatacttcttgagaagaagctaaactcatggtattgaggaagacattgctgaagaaccggttcagttttggattggtcgcaatgctatacccccaacttctcatgatgctatagatgtggagcga

SEQ ID NO: 3383 - DNA, 334 bp, Oryza sativa
  Clone ID: uC-osflcyp073g02b1
cagcaatcatctccgggttcatcccgccgtcggccgctgcggcggcggcggctgcggcggccaagaagcagcagggcaggagggtcacggccgacgtgctgtggccggggatgctgcggaaggggaaggcggcggcggcggaggaggactttgaggccgacttccgcgagttcgagcgtggcatgagcgacgacgaggcggaggggggcggcggcgaggaggaaggaggacgacgacgacgtggtcgtggtggtccccccgccggcggcgggcaggttcgtcgttcgtgccgcggccaaggcggcgcccccaactgcagatgggatgttgacta

SEQ ID NO: 3384 - DNA, 298 bp, Oryza sativa
  Clone ID: uC-osflcyp073g05b1
ccctctcgtccccggcgctggccggcaaggccgtcgcgaaggtgttcggcgaggggcgcatcaccatgcgcaagtcggcggcgaagcccaagcccgccgcgtcggggagcccgtggtacggcgccgaccgcgtgctctacctcggaccgctctccggcgagccgacgagctacctgaccggcgagttccccggcgactacgggtgggacaccgcggggctcttcgccgacccggagacgttcgccaagaaccgggagctggaggtgatccactccaggcgggcgatgctcggcgcgct

SEQ ID NO: 3385 - DNA, 380 bp, Oryza sativa
  Clone ID: uC-osflcyp073g09b1
caggaggcggcggcgaagatgtcgtggcagacgtacgtcgacgatcacctgatgtgcgagatcgagggccaccacctcacctccgccgtcatcgtcggccacgacggcaccgtctgggcacagagcgccgccttcccgcagttcaaaccggaggagatgaccaacatcatgaaggacttcgacgagccggggttcctcgccccgaccggactgtttcttggaccaaccaagtacatggtcatccaaggtgaacctggcgctgtcattcgtggcaagaagggatcaggaggcatcacggtgaagaagaccgggcaggcgctggtggtcggcatctacgatgagccgatgaccccagggcagtgcaacatggtggtcgagag

SEQ ID NO: 3386 - DNA, 381 bp, Oryza sativa
  Clone ID: uC-osflcyp073g11b1
agtatgtgttatatggaggacaacatgatttctgataaaggggtctactcaaatgatctccttatgctaagatggaagattcctttgttgagatctattgcatccatctttagtacccggccatctagtaaagagccgactactgttgaagagctttggaacgagaatgcctgtgttgaagaatgctcttctatcatgtatcacctcttgatgttatgccaggttctgccagttggacgggatatgtttgcatgttctttggcattcaaggaggttgcttcttcctattcctgtagaggcgcagtaacttcaatattttcacaaattcaaacttctaacaaagatgagtcccaaaaagtgagagtgagacctgtcatgaca

SEQ ID NO: 3387 - DNA, 451 bp, Oryza sativa
  unsure (1)..(451): unsure at all n locations
  Clone ID: uC-osflcyp073g12b1
tattttagtgcaagtgcaagaacagctagtagcttagcttagagagcaaattaagatgagctggtggcagagccagaagatcatccgcaagggaggagcaggaggaggaggcagtactgctgctccggccaccgccgccgccgccggcggcatcggcggcggcggcgccggcgaggtggcggtgcagaaggtgtaccacaacctggcacccaagccgacctttaggaagatcgacagcatcaaagaggacatcaacaagaaggctgacaggttcatcaagatgaccagggcaaggtttgttcaaccagaccaagtccttccggcagccggccggcttcgccgcggtgacggcggccggccgtgatgggaaactcttctgatcgatcgatccactcgccgtatatgccgccactgcaaataggagcttanatattaatatctacttaattat

SEQ ID NO: 3388 - DNA, 284 bp, Oryza sativa
  Clone ID: uC-osflcyp073h02b1
accatcgagggcggccaaaaaaaagagagaaaggaagagcaaaataacacattacaccatggcgcgattcgtcatcatctccgtcgtcgtcgtcgccaccttcgccgctgccgctgtcgttgaggcccgggttggacctatcgacgtcgcttcgaccaacctgatcaccaacccactcggtgccatcatcgacaatggccgcaagatcaccggcgccgtcgtcgacgagtgcgcctggacctgcgatcatgtcgcggcgggtaacaagaagatgtgcaacacgc

SEQ ID NO: 3389 - DNA, 234 bp, Oryza sativa
  Clone ID: uC-osflcyp073h03b1
ccccaccatggcgtccctgacacctgaagctgaagctcccggaggaggagtcctgttcgtcgccggcgacgacgttcgccgccgtgaatctgctcgccgccgccgtagccaccgagggtcctgtatttgatatgcctgacttcaagatgggtgggaagaagagtgatgatgctgctcccactgatgccggggatgaagatggtggtgatgatgacggggacgaggatggtgact

SEQ ID NO: 3390 - DNA, 255 bp, Oryza sativa
  Clone ID: uC-osflcyp073h04b1
tatggttgctgcattgtttggcatgttacaaggcatcacactacttttgcccaaaggtttactcctgtccggtaatgatgaggcttattatgaccaatatgctgctggattctctggaggactatttggtatgaaggtcgcgccgaatgcctggccagacgattatgcctttatttatggtgtggctatcacagcaaaatatgctgcccgggatgaattactacctcactcaggcctttattcctgggacatctt

SEQ ID NO: 3391 - DNA, 151 bp, Oryza sativa
  Clone ID: uC-osflcyp073h06b1
ctggtcaacattaaggtctaggagagtgtgacacgtacattgtcctcgtgctagcgtgctcgattttttttttgtcaaacaattttgtacttgttcttatttccttttttgcttaattagtgaataataattggatcacttggttcagctt

SEQ ID NO: 3392 - DNA, 241 bp, Oryza sativa
  Clone ID: uC-osflcyp073h07b1
ttgtcaagacccagaagacccatgcctacttcaagcgtttccaagtcaagttcaagagacggaggcagggcaagactgactacagggccaggattaggctcaccaaccaagataagaacaagtacaacacaccgaagtaccgctttgttgtgagatttacaaacaaagatatcacagctcaaattgtctatgctaccattgcgggtgatatcgtgatggctgctgcctactcccatgagct

SEQ ID NO: 3393 - DNA, 426 bp, Oryza sativa
  Clone ID: uC-osflcyp073h12b1
gctgcgtgcgtatcatctaggtgatcgaatttatcctgctgaattgccaattagatatgctggatattccacctgcttccggaaagaagctggttcacatggaagggacacggctggtatcttcagagtccaccaattcgaaaagattgagcaattctgtgttacaagtccaaatgacaatgaatcctgggagatgcatgaagaaatgataaaaaattcagaagatttctacaaggagattggcctaccgtaccaacttgtctccattgtgtctggtgctcttaatgatgctgcagctaagaagtatgatttagaagcatggttccctgcatcaaaaacctatagggaattagtgtcctgctcaaattgcacagattttcaagcaaggagacttggtataggttatggccagaaaaagaatgatga

SEQ ID NO: 3394 - DNA, 223 bp, Oryza sativa
  Clone ID: uC-osflcyp074a02b1
gaccggaactgcagggccgacccacgcgacccgttcgtgttactccccttggacgccgactccgaggagtgggtcgtgtatgagcgcccacgcggttacttcctaccggatccggaccgtaagaggaattgaccttagacgtgctatacaatgggaggatgcgtagcatgcttagtgcacacagggacctgggatacctggaggacggtggagaagcttctaa

SEQ ID NO: 3395 - DNA, 315 bp, Oryza sativa
  Clone ID: uC-osflcyp074a03b1
atccgttcgctttggcagaagaggaatccgggatggccgggggggtgtgatgacaaaagtcgcatgggatctctccgaggtggaacacccgtgctgcgacccccaagacggactggagggcatgcaaaaggcgcacgtttaacatcatttctagtacgactgcaactatcaagtgtgggggggaggtgcttactgagttgaatggcaagcgtacgggaatgttcttacgggttcccactgtggatgtctcagttgttgatctcacagttagaatcgagaaggatgcctcatatgaagctattaagagtgctatca

SEQ ID NO: 3396 - DNA, 218 bp, Oryza sativa
  Clone ID: uC-osflcyp074a09b1
acccgtctgtttggcagaagaggaatccggtatggccggcgggggggtgatgagaaaatggcgtggacctaccagtggaggacctagcgtacttcgaccccccagccggcaccgagtgcataccaaaggcgtgcgtggagaccggattcttctacgtggtcaaccatgcagaggaggagggatggctataaatgacttgaatggacagctcactggaa

SEQ ID NO: 3397 - DNA, 365 bp, Oryza sativa
  Clone ID: uC-osflcyp074a10b1
ctgggacgtgaaggttggtcggagagactcgcgcggcggtagtataatcggagcggacaacaacatcccgccgacgacgtcgggactcgacaacctcacctccctcttcgccgcgcagggcctctcccagaaagacatggtcgccctcttcggatctcacaccattggacaagcacgatgcacaaacttcagagctcacatatacaacgaaaccaacatcgacagtggctttgcgatgagcacgcaatgaggctgccctcgtagctcacgctcaggtgacaacaatctggcacctttggatattcagacgccaaccgtgttccagaacaactactacaagaacctggtcgtcaagaaggggctcc

SEQ ID NO: 3398 - DNA, 549 bp, Oryza sativa
  Clone ID: uC-osflcyp074a11b1
gttctctcctctccttctataatactcggcctccggctcgcttctcgctctgtttctccgagaattaggggggaggttggagctgtgcaagatggtgattgcgcgcggccttctccgatcgaatgcctcttcttcctcctctcaggcaatcaacttattgaagtatgtaactagcactggaagtctgcaagggcactcgcaaaatttgtgtgatgcatcaaccagacatttcagttcagtaccatcgccccagtacaactcaactgaagagaatgggttcaaggggcatggcatgttggcaccattcacagctggttggcagagcaccgatgttcatccgttagtcattgaaagatctgagggttcgtatgtatatgatatcgacggaaagaagtatctagattctcttgcgggactatggtgtacagctttaggtgggagtgaacctcgattagtcaaagctgcaactgagcaattacacaagttgcccttctatcacttcttttggaaccgtacgaccaaaccatctctggatcttgcaaaggaact

SEQ ID NO: 3399 - DNA, 386 bp, Oryza sativa
  Clone ID: uC-osflcyp074a12b1
gcgaaggtactgatgatgttatctctgctgcatgtaccgatgatgtatccatgctgaagactgaatcaatagatcgtcatggttctgacgaagttgatcattccactgccccgtctgctgccatcaaacaagagagtggtactgaagttacgtgtgacgcttctgttcctgtttctgaaagctctatatcaaaggaaatcggtacatcgcctgagtgtgatgatgatcaagtggctacagcagcacctcatccaccaacgccattatctgatgctactgatgtatctgctgatgtgcaaatcccagcaggaatatcggaggcaaagctagagcagccgaacgaaacgactagcccgtcgggtgctgctactgaagaaaataatact

SEQ ID NO: 3400 - DNA, 379 bp, Oryza sativa
  Clone ID: uC-osflcyp074b02b1
tcgatttgggggccgcacgtgcagcgttggtgcggggcgggttatctcctacggtgagaggagcaatggtggcgcccggaggcggatgaggagggagcggtgtaagctgccgcctgaaggcgtgctctttgtagcgcgatctatggtactggatattagtggctgggatgcagcacctgtttggtctctggttaccttggaatgaagatcgccacatttgccaatgccagaactacccttgaagcaaggaagggtgttgggaaggcatttatcattgcttttcgctctggtgctgttatgggcttcttgctggcatcaagtggtcttgaggttctttacatcgccattaatgtatttaagttgtattatggggatgact

SEQ ID NO: 3401 - DNA, 401 bp, Oryza sativa
  Clone ID: uC-osflcyp074b10b1
catcattatctactgatggccattttaatcaatcattttggggcattactctagtatagttgagtaattaacaattttttcaaaaaagtagacactttaattactcacagccactaatcacacaagtttgcgtcatctcccccatctacgggtctccggggccggacagagatcgacccagggaagaagctagccctcgccgacgccgccgacgccatcgacgtcgaggactcaatcaatcaaccaaccaaccaatcaatcaatcaagatgatggcggcggcggctggtgaaggggaggcggaggtgacacgtgaggtgattatctgcgacgcggagaaggacttccgaggggaatgcgctgtcggcgtggtccgagcagatcacggtgaggtccctggtg

SEQ ID NO: 3402 - DNA, 290 bp, Oryza sativa
  Clone ID: uC-osflcyp074b11b1
acgggttcgttttcctcctcttgttgacacggcaagcctccggcgccggtacagcgggtggcagagcgcccacgccacgttctacggaggcggcgatgcttccggcaccatgggcggaggttgtggttacggcaacctgtacaggcaagggtgtggtacgaacaccgaggctctgaggacggagctgttcaacgacggtgcggggtgcggagggcgctacgagctgtggctcgacaatcgggaggagttcgtgcctgatggactacatcaccgtgaccggcaccaacttt

SEQ ID NO: 3403 - DNA, 326 bp, Oryza sativa
  Clone ID: uC-osflcyp074b12b1
tcggtttcagcaagtggagccgacaatcacaccccgcgggcgcaaacagtaaccattccggcctcgaggaccccactaatacgggaattcctctacttccaaaactagccactgataacgctactcctcctccgatcccaaatggaagaaggatttttcgacgggtattcccgtgacgactacggggaaaatcgcggtaacattgcaacgaatggggaatcctgccgggatccagcttcagggtgcaccaccacaccatctagaagctgcaccttttccgcggcgacactgttctgctcacgggttagaagagaaaagacaccatg

SEQ ID NO: 3404 - DNA, 387 bp, Oryza sativa
  Clone ID: uC-osflcyp074c04b1
ggggctcaggccctggcggcggaggctgctcgggggcatggcgctctcctggccctcggccatccgcctcgccgtcgccgccgtgctcctcgccgcggtcggcgtcgcgcttttcacgctccccgttgacaagattttgaaggactttctggtttgggtcaaggataacttgggtccatggggtcctctggtattggctcttgcttacgtccctttgacggtattggctgttccagcatccatacttacacttggaggaggttatctgtttggcctgcctgttgggtttgttgctgattccattggagcaacaattggtgcaactgctgcatttttgcttggcagaacgataggaaggccatatgttctttccaaatgcaaagatta

SEQ ID NO: 3405 - DNA, 529 bp, Oryza sativa
  Clone ID: uC-osflcyp074c06b1
tcgcattcatccaccgtctcaatctcggtagtaatccgcgcggcctcgccgttagttccaccaccgggcgccaccatgtgcgggatcctggccgtgctcggcgccgccgactggtcgcaggcgaagagggctcacgtcctctcctgctcccgcaggctgaagcacaggggacccgactggtccgggttgtaccagtgcgagggaaacttcctcgctcagcagcgtctcgccatcgtctccccgctctccggcgaccagccgctgtacaacgcggaccggaccatcgtcgtcgtggccaatggagagatctacaaccacaagaagatcaggaagcagttcgcctccaagcacacgttcagcaccggcagcgactgcgaggtcatcatcccgctgtatgaggagtacggcgaggacttcgtcgacatgctggacggcgtgttcgcctttgttctctacgacacccgcaccaagacgtacatggcccgccgcgacgccatcggggttaaccccctttacatcggcaggggca

SEQ ID NO: 3406 - DNA, 496 bp, Oryza sativa
  unsure (1)..(496): unsure at all n locations
  Clone ID: uC-osflcyp074c08b1
cgcacgttgtcaccacaggctacgcaaaattctctccctttctactgcaccacctccactccgacgatcctcctcctgatcctgtgccggtcggtgatggcgtaccggttgctggagctcacgctggtctccgcgagcgacctcaagaaggtcactctcttctcgcgcatgcatgtctacgccgtcgcctccatctgcgggagcaacgtccccatgcccatgcacggtacccacgccgaccgcaacggcggcagcaaccccgcgtggaacaccgtgctccacttacccgtccccgaccgcttcgacacccgcggtctcgccctccacgtacagctccgcgcccggcgcttcttcggcggccaccgcgacgtctggtacgtgttcgtgcccctcgacgacctcctcgccggcgcgcacgaccgcggggagccgaggcccggtagctaccaggtgcgccgncccatgttcggccgcgcgcacggaacgctttactttt

SEQ ID NO: 3407 - DNA, 207 bp, Oryza sativa
  Clone ID: uC-osflcyp074c09b1
ccggaactgaatggccgacccacgcgaccggttcacttctcctcacgataaggcacgaggagactatatgctgccatctactgctcctatccgcgccgacgcaccccgccgagctacatctccgccgtgctgatcgcgtggagccgacgagaggagcggcggacaacgctacgaggagaggagagagggggaggggaggctaccgta

SEQ ID NO: 3408 - DNA, 289 bp, Oryza sativa
  Clone ID: uC-osflcyp074c10b1
gtttcattttgctgctcgatgcctcgccaccagggaaggggggtgcttttgcggtgtggtatgcatttgtacgctgcattggtgctatgattggcttcgctgctgcatccgctgggcctgggcgtgctggaggatcgtttgctgctgcgttcctaggcagcttcctcggcatcattgttctgatctttggtaatgtgagcaacatcggggcgctgaaggctgctgggcatctgaagggaatggaagacgagaagaggctgggcatggagaaaggggaaggcatgagtgc

SEQ ID NO: 3409 - DNA, 337 bp, Oryza sativa
  Clone ID: uC-osflcyp074c12b1
cgacgcctaacttttgtgatggcgtgaacttattggattatgggccggatttgatcttgggggcggcaatctttggcggccatgtgcgattctctggtgatttggtcggaagatgatcaagtggggcatcggtagcagcgggacgccggcggattcgtattatgaggaccggtcggattgcacggatgacgtgcccaagagcaaggtcaagatcaaggttggaaaaacattgagcgtccggtaatggcaagctgcatataagccctgatggcatgcttgacattgcctcagttgtacggccgatacaaaaagtaggtgtgccttcaacattaagggg

SEQ ID NO: 3410 - DNA, 107 bp, Oryza sativa
  Clone ID: uC-osflcyp074d02b1
actgcctggcgtgccgtaccggaacggccgggccgacccgagcgacccgttagctttcgatctatggatggcatgcatgcggtcgggttttgattcaaggacaagac

SEQ ID NO: 3411 - DNA, 228 bp, Oryza sativa
  Clone ID: uC-osflcyp074d03b1
tcgctttttagatcttcatacagtgaattttctgtgggctagaaagaaggtgatcgaacatcttcaggcatagctataactgagaatcctgagggtgcagcaatgagaacatgcagtgcttctcaaacatccagctggtaaaataacctactgctgcttctgtgtccattactccctccgcccccttaaaaattaaaccttcgtaccggtggtgcaacatcctggact

SEQ ID NO: 3412 - DNA, 510 bp, Oryza sativa
  Clone ID: uC-osflcyp074d04b1
tcgcattatcgaatcctctcttctcctcgtgcccaccaccaccaccgtagcaatggcgggcaacgggccgatcaacaaggaggacccgctcaactggggcgcggcggcggccgagatggccggcagccacctcgacgaggtgaagcgcatggtggcgcagttccgcgagccgctggtcaagatccagggcgccaccctccgcgtcggccaggtggccgccgtcgcccaggccaaggacgccgccggcgtcgccgtcgagctcgacgaggaggcccgcccccgcgtcaaggccagcagcgagtggatcctcaactgcatcgcccacggcggcgacatctacggcgtcaccaccggcttcggcggcacctcccaccgccgcaccaaggacggtcccgccctccaagtcgagcttctcaggcatctcaacgccggaatctttggcactggctccgatggccacacgctgccgtcggagacggtgcgggcggacatgctcgtgcgcatcaacac

SEQ ID NO: 3413 - DNA, 240 bp, Oryza sativa
  Clone ID: uC-osflcyp074d09b1
cgcgttcggttggacatacccggtcggtggacacctgtcggtgggtggaggagaagaaacttacgaggattcccctagtaacggcgaggcgaggataatggcggtagagcacgcacacccggtctccctagccgtcctcccgtcgtccccggctcaggcgacgccgttgccgctcttcctgaggtacgctgctttccgttgtgggggagatgccgccgaaagaataggccccttctgatt

SEQ ID NO: 3414 - DNA, 332 bp, Oryza sativa
  Clone ID: uC-osflcyp074e03b1
aacctatgttagctacttcttgttgcattgaatggtgcgttatcatatcattgggatatatattccacgatggccaaggtaatcacactaatccttgtcgttattacagtgtcaaccatgctagcctcacctgtggaatgcaccaagattcctggtgcctttcctattggaatgtctccatacaactttacgacaatgatagatatcttcaaagtggccatgttagtgccaacggaggattgcacctccaatgttgagaagtgcataaatgagacatgctcctacatcagaaaagcccttcatggtgttggtgatgctgccccacccagcaa

SEQ ID NO: 3415 - DNA, 479 bp, Oryza sativa
  Clone ID: uC-osflcyp074e04b1
ggttgcctggggccttgcccgctacgccgccattggtcaggacaacgggctggtgcggattgtcgagcctgagatcctcctcgacggtgagcatggcatcgacaggaccttcgaggtggcgcagaaggtgtgggcggagaccttcttctacatggccgagaacaatgtgatgttcgagggcatcctcctcaagccaagcatggtgacacccggtgccgagtgcaaggacagggccacccctgagcaagtatctgactacaccctcaagctcctccacagaaggatcccccctgccgtccccggcatcatgttcttgtcgggtgggcagtcggaggtggaggcgacgcagaacctgaacgcgatgaaccaggggcccaacccgtggcacgtgtcgttctcgtacgcgagggcgctgcataacacgtgcctcaagacgtggggcgggcagccggagaacgtgaaggcggcgcaagacgcgc

SEQ ID NO: 3416 - DNA, 347 bp, Oryza sativa
  Clone ID: uC-osflcyp074e05b1
ggaaaaagggtaaggaaaccagcgagcgatccagggaggccgtagcccgtagcgaccatgtcgattgctccgtcgagctcgctccgtgccctggtcgcccccatcctcccctccgtctcctcctcgccctctgctcgcccagggctccgcggagtggcggcaccggtacagcacgcgcgggcgcggcggcggaggggggcggcggtcgtggcgcgggcggcggcgctgccgtcggacgccgagtggctggagcggctgccggagaagaagaagccgctgtacacgcacagcctgccgtgcatcgaggcgtggctgcgcagcattgggttctcccagacccgcgagga

SEQ ID NO: 3417 - DNA, 230 bp, Oryza sativa
  Clone ID: uC-osflcyp074e07b1
tcgcttcctacccggaccatcttccaccatgggaggagacgctcaaactaccgcgctgcccaatccatggcggcggcggaggcggaggcggccggtcctctccggcgggctctcttcgtcctcgccgggctcgccttgctgctggaagcggcccctgaggccgaggcgtggtcgggggagaaccgtggtcatgacgttcggcactgctgccgtgactgcggcatctgtcc

SEQ ID NO: 3418 - DNA, 303 bp, Oryza sativa
  Clone ID: uC-osflcyp074e09b1
cacccgtcctattttagctacttcttgttgcattgaacgagtcggtatcatttaattgggatggtggttccacgatggccaaggtaatcacactaatccttgttgttattacagtgtcaaccatgctagcctcacctgtggaatgcaccaagattcctggggccttttcctattggaatgtctccatacaactttacgacaatgatagaaatccttaaagtggccatgttagtgccaacggaggattgcacctccaatgttgagatgtgcataagtgagacatgctcctacatcagaaaagcc

SEQ ID NO: 3419 - DNA, 458 bp, Oryza sativa
  Clone ID: uC-osflcyp074e11b1
gttgaacacaatcaatgttcattatcccgaccaaaatgccaatcataatatgtaccctggcacatggtctcttatgcctccaaacactggttttggtgtgaatcagcagaactacctaatgacgcctgacatcacactccctcaaaggtctcttaatgccaagtttggtgggaatggagcattcacttcgcttcgggcccatggcattgatcagcgctcctctggttggcttgggcatattgagccaagttctcacattgatgatgcctcatcgagtcttatcaagccacagcctttggttattgatcacaatgttcagaaagctaaaggctgttcatgcatgctatttgggatttctcttgacagccctgcaaaacctgaactattgatatgcccaccaagtgttgcatttgatgggaagctccaacaggatgcacttgaagaggatgaatgctctg

SEQ ID NO: 3420 - DNA, 271 bp, Oryza sativa
  Clone ID: uC-osflcyp074e12b1
ctcctttttctccgactcctcctccggcgtcgtcggcgtaagcagcggcgccggccatgggttgcggtggctccaaggaggacgtggtcaccggcaacaccaccgtccccgccgccgtcggcagcagcaagctcttccggaggaagtccttcgtctccgccagccaccgctcctcctcctagtcgtcttccaatggatgcacctccgtctacgtcaaggacgtcgcgacgaagaaggaggaggagaccgaggccgacgccttcgaggtgac

SEQ ID NO: 3421 - DNA, 492 bp, Oryza sativa
  Clone ID: uC-osflcyp074f04b1
tgaattccccattcttcctcgtcttggggcacagctccgatttagggttagctcctcctcctcatcgctgattaggattcgattcgaccggatccctcgccgccttcgccatggatgatggagatgagcccgtcccctacgtcatggatgagggtgcgctactacccttgctgtttccgccgccgctgccggccgacgacgacgccaccggcggcgtgagcccaagctgggtgtacctcgaagacagagcttacgtctcccccgatgccgtctccaactccaccaccgtcttcttcaccaccaccaccggcgtaagcatccatgtctccttctgcctcgcccgcccgtcgtgcctctcctacctctgcgtccactgcccccgccccggcgacggtgagggcgcctaccggttcactgtcgatccccaagttcttggtacgcacaccaatgtagcccttctccgggttccggacccaacgatgggcttcaccg

SEQ ID NO: 3422 - DNA, 239 bp, Oryza sativa
  Clone ID: uC-osflcyp074f10b1
ctttaatttatttaggaaatatgaaagtatcatgagaagggtacttcatgaacttgcacacatggtgcactccgagcatgatgcaaatttttttgctcttaataagcagttgaatgatgaagcagcttccttggactggaccaagtcaagaggttatgtgctgagtggtcgcaaaatattagattcctatgaagacgaatttgttctggagccagacagtggtgttgttggccacaaac

SEQ ID NO: 3423 - DNA, 156 bp, Oryza sativa
  Clone ID: uC-osflcyp074g03b1
ggagaacagaactgcattttacctggttctattatggaggcctgccaatgcaatgaatgttactctcttcatcaaaggtcttaccgtaagctgcatgtttgcttccggaggatccagctttctccactccacttacgcagggaaatgcattcctct

SEQ ID NO: 3424 - DNA, 277 bp, Oryza sativa
  Clone ID: uC-osflcyp074g10b1
cgtactatgtgcagagagcttagctagctgcgacgcacgcgacggtttgtacaaggtacagcgtagtatgacaccgaccgtcgcgaccaccaccccggccgccgcggcggcgacgacggcggcggcggccgaggtgaagccggcgaagcgctccgtcggtctcggcctccccgcgcttccgtcattattgcccggactcgcctcccacggtcagccccgtgtcgcgtccttctgcaagaggctggcgaggaacgtggtggccatggcggcgggggag

SEQ ID NO: 3425 - DNA, 417 bp, Oryza sativa
  Clone ID: uC-osflcyp074g11b1
tctgcactttccatgtggcacaacgcttgcatttctttgagaccaaatgcaattgatgggcaaacagtgatcctctttgggttgctgaatggcaccttaattggccttctcaactcttagtttaggattcaactccattggattctaccagatgacaaaattggcgatcatacctttcactgtgctgttggagacaatcttcctgaagaaaagattcagcgagagtatcaagctttctctactggtcttacttcttggagtgggcattgcttcagttactgatctcaagctaaatctacttggatccgtcctttctggactcgccatcgagaccacttgtgttgcgcaaattctcacaaatacaatacagaagagattgaaggtattctcaacgcatttactctaccaatctggacc

SEQ ID NO: 3426 - DNA, 486 bp, Oryza sativa
  Clone ID: uC-osflcyp074g12b1
atcttcttgatcactgcgatgtgccccttcgctggaaggatatgcataaatccaaggctgacattgaggccaactggagattttggtaaaatcctatcatgtttcaccatggcatttcactgtttggcgcacggtatttaggagctatttgtatagtaaatgctggagtattgaagtaaattatatgttcagcttattaactgcattgcgataagctttgatctagatccggtttcaattttcatttgtgtggtcgcatcctttaatttatatagcttcataagagtatactccgaagtacatgccgttttatgtatttttatgccttcatattctgattggctaatggctctaaaacaacagacgggtggcctcatcaagcgaattgctccctatgcaacctgacatttcaagatgacacccaacctttttgttcaatgtgctttcacaaacaggatttggagattgctcaagagctaggtgaat

SEQ ID NO: 3427 - DNA, 131 bp, Oryza sativa
  Clone ID: uC-osflcyp074h01b1
cttttacttggagatgacaagtctgggcatgtgggtgggctttgactaaaaacaaggcctaaacaagttctcgatgctgtcaaactcccccacgcttaaagaatataaatggtactagactggatgataac

SEQ ID NO: 3428 - DNA, 345 bp, Oryza sativa
  Clone ID: uC-osflcyp074h05b1
tcggtttgaccgagagtggccagccgatggatgtcagggacattgttggaccggttgaacgaagcagggtccggagcaccccctcgtgcgtggtgatttcgtcctgggttgggtttggacctctctccatcccggcacggcgctcatacgtgtgcaaagagtggcactatcgtgttgtagttgaataaataagatttgaagcgatgccttctgttgactgctgcgtatttgtacgatgtacatattatacattgatcttaatcttcatgtacttgctgcacgtgtaccaccagcttctttgcaattggaccatttcagcagatctgtgctaatccagattattgc

SEQ ID NO: 3429 - DNA, 183 bp, Oryza sativa
  Clone ID: uC-osflcyp074h07b1
cttatacttggagatgacaagcctgggcatgtgcgggggcttggactagttccaggggctaaacaagttctcgatgggtcaaattcccgacgcttaaagaatataaatgttactagactgggtgataactggagagaagatgttgcgggtgctaaactgcacttggaaaagatcgaaaatcat

SEQ ID NO: 3430 - DNA, 83 bp, Oryza sativa
  Clone ID: uC-osflcyp074h08b1
ccggaactcccttttcgacccaccccacccgttttatttccactccgagagcaaaaactctatggggccggttgaatcaaaag

SEQ ID NO: 3431 - DNA, 227 bp, Oryza sativa
  Clone ID: uC-osflcyp074h09b1
tcggcttccaggcgttgttgccggaaatgcgggtactggtttcttgatggctataatgggctcatgtatgatttggagagtcagaagctgggattcagtgagctaccgctggatgcgaaggatgatgaggatttccctcaccggtgccggtgtcagatcataccggcgggtgatggccggcttggcctcgcggttatagttggatccacattgcaattatgggagag

SEQ ID NO: 3432 - DNA, 154 bp, Oryza sativa
  Clone ID: uC-osflcyp074h10b1
ctcctcgccgggaggattagctaaacggccgcgccagagaatccaaattgacccggtacttggatccggaagtgtcctgggacaaggatcaaacggtggaactcgcgtgctggtactcctccgtgctcggcatccgcaagaacctgttcttcag

SEQ ID NO: 3433 - DNA, 533 bp, Oryza sativa
  Clone ID: uC-osflcyp074h11b1
ttagtgaagctggccctgagggccggccggattcccggtcgcccacctcactgtcccccttaattaaacaacaggggcacgcttgtctgagaaaaatggcggatctccttaaattagggtttcgatcattcgatggaattcacatgatggcgtcgttctcctcgttctcagtgagaattgccttactctttctggttttctgcttgatcggtttacaagctgcggatgggcaagctggtggcgacatctgcggcggggttccggatccatttgcttgcccaataaactgtgtccaggaggatctggtttgcggagccaatggagtcacgtactcgtgcggttgtgaggactcagcgtgcaatggagctcgtgtagtcaaaagaggagcttgcgacgctagtaacgctggaagtgattctgtacgtggataagctttgttattgattcatatcgtttggctcttcttgttcggactctcttttctcgttggtgtttctgatctcaagacttgtgtttgagatgttgatcatgtt

SEQ ID NO: 3434 - DNA, 469 bp, Oryza sativa
  unsure (1)..(469): unsure at all n locations
  Clone ID: uC-osflcyp074h12b1
tttctcttactcagcaacagctcgcagctcactctgtgagtctactactacgagctaagctggctcgcgccgccgccgccgccgtcgccgccgccatgagcaaggagaagcaccacaagcgggagcaccacctccggcgatgctgcggcgggatggcggcgtgcatcctggcgctggtcctcgtcgtcggcttcatcgcgctcgtcgtctacctcgcgctccgcccctccaagccgtccttctacctgcaggacctccagctccgctccgtcgacctcggcgacccctccctctccgccaccgcgcaggtcaccctcgcctcccgcaaccccaatgaccacgtcggcgtccactaccgccgnctcgacgtcttcgtcacctaccgcgacgaacccgtcacggtgccccgtttcctcccgccgacctaccaaggccaccgcgacgtcaccatctggtcgcccgtgctctc

SEQ ID NO: 3435 - DNA, 542 bp, Oryza sativa
  Clone ID: uC-osflcyp075a01b1
tattattttctcctccggctcttattcaatatgggggggtttattttaatagtgcggggcgccaccaccgtagcaatggcgggcaacgggccgatcaacaaggaggacccgctcaactggggcgcggcggcggccgagatggccggcagccacctcgactaggtgaagcgcatggtggcgcagtttcgcgagccgctggtcaagatccagggcgccaccctccgtgtcggtcaggtggccgccgtcatccaggccaaggacgccgccggcgttatcctcaagctcgacgaggaggcccgcccccgcgtcaaggccagcagcgagtggatcctcaactgcatccgccacggcggcgacatctactgcgttaccaccggcttcggcggtaccttccaccgtcgcaccaaggacggtctcgccctccaagtcgagctcctcaagcatcttaacgccggaatcttcggaactggctccgatggccacacgctgccgtctgagactgtgcgggcggccatgctcgtgcgcatcaacactcttcttca

SEQ ID NO: 3436 - DNA, 233 bp, Oryza sativa
  Clone ID: uC-osflcyp075a04b1
ccttgtagcaacttactaccttaattacctagccttgctcttctttgagctgtcttccatctctctctattttgcatggatctacttttatttttacctcaaattgtgaaatatggtaattattttcctctttttatatatgttgctaattaatcaacctgttggtttctttttgctcttgtgttatttgcaggttattaaataaagaagagagaatcatatatatacatttc

SEQ ID NO: 3437 - DNA, 325 bp, Oryza sativa
  unsure (1)..(325): unsure at all n locations
  Clone ID: uC-osflcyp075a05b1
atcagagccaaaaataatgcatgggtcattgctaaaggtaccctaggaagagaactttatatggcgatagagaaggctggtgaaacacttgtttatgcatctactgccatcgagaagtttagcaacaggtactgtgaaggagcattctctacagactagaacaccgaaatgacaacgattgttttatccaaaccactcacctatccagcttcgtcatttaggctgtgcggctcgctccctcatggtgtcgngaatatggatcttgctattctgaagagattcgtacatgttgtacagctgccatgttgttgcctttctatgcata

SEQ ID NO: 3438 - DNA, 590 bp, Oryza sativa
  unsure (1)..(590): unsure at all n locations
  Clone ID: uC-osflcyp075a07b1
attaaatcaagcaagcaagaagagacgagacgagggagagaaggagaagagggggccggccgcgggcgtcgtcgtgttcctccccccctctctctcctctcctctcctctcgatctccatccttccttccatccattcctccccgcacccttcgcattgctctcgtcgtctcgattcggtcgaggatctccaggaaaagaggaggaagcgatatgggttgcttttcatgctgcggagcggatgatgtcggcaagaagaagaagcgcgacgatccttacgtcccgatccctgatccaggtggtaactatggacgtagcaagcccgggcccccagccccttcgcgttctccccccaccagcagaaatctgccaattgcagtaccggcaattccccttgatgaaataaagggaataaccaagaacttcagcagtgatgctctcatcggagaaggctcgtacgccagagttttctttggtgtgctgagagatggcaggagatctgcggtgaagaagctcgactccagcanacaagctgatcaagaattccttgtgaggtttcagccgtttcacgactgaagcatgagaatatta

SEQ ID NO: 3439 - DNA, 425 bp, Oryza sativa
  Clone ID: uC-osflcyp075a08b1
tttttgaaccctaatccacaccctctcaagccggcggtgtttttatcgcggcggggagcgtggcggcgagcgcggcgggttcggccgcggcttcgggcgcggcggtcgcggcgaccgcggagggcgccgtggcgggcgccgcggcccgcgccaggaggaggagaagtgggtgcccgtcaccaagctcggccgtctcgtgaaggaaggcaggttcttcaagatcgaggagatctacctccactccctccccgtcaaggagcaccagatcgtggagaccctcgtgccggggctcaaggacgaggtgatgaagatcacacccgtgcagaagcagacccgcgccgggcagcgcacccggttcaaggcgttcgttgtcgttggcgacaacaacggtcacgtcgggctgggggtcaagtgcgccaaggagg

SEQ ID NO: 3440 - DNA, 562 bp, Oryza sativa
  Clone ID: uC-osflcyp075a09b1
tcgtttcagccgattcttacaattccgggatccacgggcccaaagacgacatccgcttgttgatcccatggttgtttcagagatccggcgatgcttgaatgagggaattgagttccaaggtgagctattgaattttcggaaggacggtgctccactgtacaacaggctaaggctcattccaatgcatggggatgatggttttgtgactcacgtcattggaatccagttgttctctgaagctaacattgatcttagcaatgtatcatatccagtgtataaacaacagtccaaccacagacccaacattcaagagatcaaccctgcttctcatgaacatattcctaagattcaaagttccgagtactgctgcatcctccagctctcagatgaagttctggcgcacaacatattgtctcgcttatcgccaagagatgttgcatccatcggatcagtctgcactagaatgcatgagttgaccaagaatgatcacctgagaaagatggtatgtcaaaacgcgtggggaagagacctcactgtgaggctcgagatgagcaccaagatg

SEQ ID NO: 3441 - DNA, 536 bp, Oryza sativa
  unsure (1)..(536): unsure at all n locations
  Clone ID: uC-osflcyp075a10b1
tttttgtataaacaaatttagtaattgaattaatgggttgtggtctgtatgaggggtgatatttcctctgcttaatccctttctgcgattaaaatctattcttaattatgtgcagctgggttttaggttattatacataatgaagagactgattccgatatctgcttttctgttggaggtactaattaatcctgaagttattcagttcaactagtattctgctcttttctttttgaatacccggatagaattccaacagaaagatggtgagaactgtagcagccatgatgtacttgtgaagcgtgtcaaagctgcatttgataggtttgctgaatctactgagcaatcatgtcgtgaaagatgtatggaggatttggtgagcaccactcgttatgtcccttggtcccttcacaataagaaccgtgccggattgagacacttttntgattactttgctgcacaagagcaattatccgcgaacacacttactgcccactcgactgggctgcatgagcattcttttggttgcatgacat

SEQ ID NO: 3442 - DNA, 286 bp, Oryza sativa
  Clone ID: uC-osflcyp075a12b1
tttgttttaggcagacaaagagcacgtcataaaggagggatttgtacaatagtgtgcggtgtgtatacctagcggaggattttggtcaatgcgtctgcctagtggtctctcgtgggctactgtatttatcccacccccgagaggctttcgcatggatcggatcaccgccagtatattaacgcggtggccggtggctagatggtgttgctaggcgatttagtaaaagggtcttgtgtaataatatacttctacatattgctatatgttacttggattcaggcaaatc

SEQ ID NO: 3443 - DNA, 554 bp, Oryza sativa
  unsure (1)..(554): unsure at all n locations
  Clone ID: uC-osflcyp075b01b1
ggaagttgaagaacaatgccatcgtttgcaacagtgggcactttgacaatgagattgacatgctcggccttgagacctaccctggtgtcaagcgcatcaccatcaagcctcagaccgaccgctgggtcttccctgagaccaacactggcatcattgtccttgctgagggtcgtctcatgaaccttgggtgcgctactggccaccccagttttgtcatgtcctgctcattcactaaccaggtcattgctcagcttgagctgtggaaggagaagagcactggcaagtacgagaagaaggtgtacgttcttcccaagcacctcgacgagaaggtggccgccctccacttgggcaagcttggtgccaggctgaccaagctctccaagtcgcaggctgactacatcagcgttccagttgagggtccctacaagcccgcgcactaccggtactaggctgcccagcacgactagcggctgtggcatgagaagtgtcaacttgaagttcgccatgacgactctggagtatnctgctttgtttcatcatctatatgccgcact

SEQ ID NO: 3444 - DNA, 483 bp, Oryza sativa
  Clone ID: uC-osflcyp075b02b1
cttctttgcaagattaaaagctgcccctcttgctgcggcagactgaagtcctgcaggatcagcgcctgaagcaagaagcgaagaatcaaacgagagcctagcagcgtagcagatcgatcgatcgatcgatattatggaggcgcgaggaagcagaggaatgcggctgtggctcctgtccgtggcggtgatggccatggcgatggcgacgaggtcgcaggcgcagctgcaggtcgggtactacgacacgctgtgcccggcggcggagatcatcgtgcaggaggaggtcagcaaggcggtgtccgggaaccccggcatggccgccggcctcgtccgtctccacttccacgactgcttcgtcagggggtgcgacgcgtcggtgctgctggactcgacgcaggggaacagggcggagaaggacgcgcccccgaacacgagcctccgcggcttcgaggtcatcgacagcgccaagtccccgctcgagac

SEQ ID NO: 3445 - DNA, 346 bp, Oryza sativa
  Clone ID: uC-osflcyp075b05b1
gttgtgttagtgatgacagcagctggagcaatatcagtggaggtgctagtaagcctcacaagggtaatgatcctagatggaaggcaatacatgctgtacggactcgagatggtgtgcttggaatgagccatttcagactgctcaagcgtctaggctgtggtgacattggcagtgtttatctctcagagttgagtgggacaaggtgctactttgcaatgaaagtaatggacaaggcttccttggcaagtaggaagaaattgaacagggcacagactgagagggagattctgcagcttttggatcattcattgcttgcaacactgtacacacatgttgagaccgacag

SEQ ID NO: 3446 - DNA, 513 bp, Oryza sativa
  Clone ID: uC-osflcyp075b06b1
cttttatatgactgaactcaaagtggcgccagctgatgtagagcttgtagcaaagaattgcaagtcattgatttcattgaagatgagtgagtgtgatctttcagatctgattagtttttttcaaacagacaatgcgctgcatgactttgctggaggagcattctacgaggtaggagagctcaccaagtatgaaaaagttaagttcccacccagattatgcttcttggggcttacctacatgggaacaaatgagatgcctgttatcttccctttttcgatgaaactcaagaaactggacttgctatacacttttctcacaacagaagatcattgtcagattattgcaaaatgttccaatctactaattcttgaggtgaggaacgtgataggagatagagggctagaagttgttgctgatacatgcaagaagctaccaagactccgaattgagccgggtgatgatgatccaggtcttgaggaagagcaaggaggagtttctcagcttggcttgac

SEQ ID NO: 3447 - DNA, 521 bp, Oryza sativa
  Clone ID: uC-osflcyp075b08b1
gttcaaagatggacttattaccaaatccagaaagggcctgtatcctgcagttgctcgctatgccagaggttttggtcctgaagaggtgcaagatctccatgagggggctagtcttgttgaagtggtcaggaaagtgaagcctcatgtgcttttaggactttctggagttgggggcatatttaatgaggaggttctcaaggctatgaaagaatccgattcccctcgtcctgcaatttttgcaatgtccaacccaactactaaagccgaatgtactcctgaagatgtattcaaatatgttggagacaatgcagtatttgccagtggaagccctttcagtaatgtcactttaggcaatggtagacaagggtacgctaatcaagcaaacaatatgtatcttgttcctggtatcggtttaggagcccttctttcaggtgctcggcatattacagatggcatgctccaatcagcagctgagtgccttgcgtcatacatcacagacgatgaaattcgaaagggcatct

SEQ ID NO: 3448 - DNA, 560 bp, Oryza sativa
  Clone ID: uC-osflcyp075b09b1
ggaaaacaaagtttttctttttatgggaagatatgtgaagagatacaggcagtacctcaatcaatatcatcatggagtccatcccttgtaataactcttcacaaaggtagaggcatggatgcaaagcatggtgcaaagagcgtcgacaatggaaggctgaagttttgtctgcagtcttttgcatcatttagtgtggccaataggacaatcatggccttatggaaagcaagatctttgagttccgagtacaaaatgcagattgctgaagaacaatcccaaaacaatgatactcttcagagtgaggacagtggaatatttgttggagtcgaggatgcaaagaaccttcagatgaacgaggttttctcctcctcgatttctgccaatatggcctcactaatggaagtgtttggaggaggttcatttgagatgaaaatcatgaataaagttggatgcctaaatattcagccacacagcgcgaatcagataagtctgatgaatatcaaagacaaattcattacaagttcagcaggaagtcgtcttccattggaggtgaagtgact

SEQ ID NO: 3449 - DNA, 509 bp, Oryza sativa
  Clone ID: uC-osflcyp075b10b1
aggtggtatccttaggaacagtgaaggcgagcgtgtcatggaacgatatgctcctactgcaaaagatcttgcttctcgagatgttgtttcaagatctatgacaatggaaatcagagaaggccgtggtgttgggccattgaaggaccacatctatctgcatcttaaccatctgcctccagaagttcttaaggagaggcttcctggtatttctgaaactgctgctatttttgctggtgttgatgtcaccaaggagcccattcctgtcttgcctactgtgcactataatatgggtgggatcccaacaaattaccatggagaggtagtgactatgaagggtgacaatcctgattctgttgttcctggtttgatggctgcgggagaagcagcatgtgcatctgttcatggtgcaaatcgtctgggtgcaaattcacttcttgacatagttgtttttggcagagcttgtgcaacagggtagctgaaaccgctaagccaggtgagaagcagaaacc

SEQ ID NO: 3450 - DNA, 207 bp, Oryza sativa
  Clone ID: uC-osflcyp075b11b1
tcatacacaaacctctgttactagcactaccatggatcattgcgcgagctggccgctgagctcgtaagacgccaatacgactactacgaacgcgagagctgcagagtagaacgacatctagttgctgacaggggggccgacatggccgatactgctggaggactaccatctgatcaagaaggcggcgtactttgccccgaagcgcat

SEQ ID NO: 3451 - DNA, 594 bp, Oryza sativa
  Clone ID: uC-osflcyp075c01b1
gtcgactagtgtagacagtgaaagcacagccagcggctcaccttccttttctagatcatcgcaacaaaaacacccgcttcttgacctgaaggatggtcgaagaaaatctatgactaggaaaggagatgacccagcacttactgattcttttccagggaggactcaagcaggtgatttatttagtgctgcatctagagcacggcaccatcttccgagtggaacaactatcgtggatcaaattgatcttcttcaagagcaggttaaaatgctggctggggaagttgcactttgtacaagctcactcaaaaggttgtcagagcaagctgcaaacaatcctgatgattcacaaattcaggaacaaattgaaaaattgaaaaatgaaattgacgaaaagaaatcgcatatacgtgtgctggagcagcgtatggcgcaatcattggaaactaccgaagacccagctattaggactgaaatgtcccagaccttttcaaagttaagcacacatttgagcgagaagacatttgagttggagatcatgtctgcagataatagaattctttaggaccagctaccagcaaaggtatcagaaaatgc

SEQ ID NO: 3452 - DNA, 566 bp, Oryza sativa
  Clone ID: uC-osflcyp075c02b1
gaaaaacaaagagaattggcacaacttggaaatgagggtgtagatgctctacaagctcatgatgacacatctgggagtcttgaagctctgagtgctgctgaattaaagttgaaagatatactgaattcaccttccgtggatgctgcatgcagaaagatagatgacttagctgagaaaaaggaattggattctgcgttagtcttaatgctttcaaaagcttggtcagctgcaaagggtactgacatcacaaaatctgaggctaaagatataatgtttcatctatacatgactgcagtagccaatctccagagacaaatgccaaaggatatcagaatactaaagcatcttataatgattgaggatccagaagaacgcttgagtgcattgaatgacgcatttactcctgggcctgaacttcagggggataatgttgatacattatacacgagtccagaggtattacacacttgggccagtgctattggtgatgcatattataacagcagagaaggcactctccttaggcaagcaagggacttgatgaaccctaaaatcatcaaagaatg

SEQ ID NO: 3453 - DNA, 483 bp, Oryza sativa
  Clone ID: uC-osflcyp075c06b1
cgttaatcggggccctgctcgccgccgtcgtctggtgggccgcctacctcgccgccggcgtctcctccgccttctgacccgccgccgcgcgctccggggaactcctcctcctccagccaaactacctccccccgcttctcccctctctaaaaccctagttcttctcggtcgctccgccgccgccatggggtacgcgcagctcgtcatcggccccgccgggagcggcaagtcgacctattgctccagtttgtatcagcattgtgagactgtgggtaggacaattcatatggtcaatctcgatcctgctgcagagcacttcagctaccctgtttctacggatattagggagctcatatcattggatgatgtcatggaggaacttgggatgggaccaaatggcgggcttatctattgcatggagcaccttgaagacaatttggatgattggttggatgagcaactggagggttatttggatgatga

SEQ ID NO: 3454 - DNA, 559 bp, Oryza sativa
  unsure (1)..(559): unsure at all n locations
  Clone ID: uC-osflcyp075c07b1
catgcttcagttccagctgaagctctcgaaccattctggacagatgtttatcggaaatcttggggtgtgaagttgtattccacatcgtctacaaaagaagtctttgagatgctaaccattctggaaggtgccataagacgggatttcttgtcatctgactttgagacaacaactgagttacttaatttaagcacgcaagattcagcttctcgaaatactgttccacgttctggatctgctgatgtacttccatgggttcctgacactgttgctgctgttgtcttaagattgttagacctagattctgccatctcatacactcttcgtcagaaggtgggatcaaacaaggagcggggagctggagagttcatgaagcttccgccaagatatactcctgctaagaccaaacaagaaactgaacctatgggaacaggttttgatcgacaagaaacatggctaactccaagcaacggacgaggcggtcggngtggccgtggacgaggtagtcgaggccgtagcacgggaggcagatccccgagtcgtggtggcaaggtccaag

SEQ ID NO: 3455 - DNA, 519 bp, Oryza sativa
  Clone ID: uC-osflcyp075c08b1
cagagccgcgcccactcctcgacggcggcgccggtggcgggggagacggccggcgaaccagtcgggtttccccagaatggcgctataaatggggctcctttgatgtttccggtgatgtaccctatgcttatgacgggtatgcatcctcagcagagcctggatgatcaggctcagggtccagggatctatgccatacagcagaatcaattcatggggagtactctcatgccactcacttacaggattccaacggaaagtgtcggtgctgtggctggtgaagagcaagcacaggatgctaggcaacaacatggccctcagagacaagttgttgtgaggaggtttcactttgcttttcagcttgacttggccctgatcatcaagttagcagcagttgtctttctgtttagccaggaaggatcaaaacaaaggctgtttcttctcatactgtttgcctcagtgatttacttatatcaaactggcgcaattacacctttactaagatggctgcagcgagcagga

SEQ ID NO: 3456 - DNA, 415 bp, Oryza sativa
  Clone ID: uC-osflcyp075c09b1
aatttcttgactaaccccattttttttcaggtatgtgaagtgcatgacgatggacaattcaagatgacagttgttggacctgatctacggcatggccaaaagccacaatacacagttcctccaaatgtttggtttggcgccttcttgacctgcgacatcgagtccttcaccgaagatggaagtgtgtttgtcaaaacgcctggaagagactctgagctgcactactctttcgtcggtgtaacctgtgctccagcattccagattgaagacgacgaaatggcaacacgggagagcatgaaagctttggctcctaaagcagaagctttcatcaactaccttgtgccttcagactgagttttattccactccaagtagctcgctctacgtagtgaactgtatgtaccaagctactgat

SEQ ID NO: 3457 - DNA, 481 bp, Oryza sativa
  Clone ID: uC-osflcyp075c10b1
gtacttgtgaagtactagaacttgtttgtgaaagatgaaggttttgcccgcagcttatacgtgagaacatgatacaatttgtgagaaggcagtctcggctatcttgatagtcagcaacggatagttcttgattgttatggctgttcttgttatacgaacagcaaggtgttggcattgatggactaacctatacacgaactggaagatagttggtggaatgaagagctagtgaaaattatgttagatagcaatggctgattgatagtaaatccatcaacttggactcagcatgacagttcaaacaaactggaagccttgaaaaactcggttaaaattcttcctgacataataagttgccttcaaatatcttacaggatttttaacagaacccccaaagtctccatatatttttttcgactgcatgtatatatgtgatgtcatgcactgacccatttaattaccataaatcatggtgtttgat

SEQ ID NO: 3458 - DNA, 492 bp, Oryza sativa
  Clone ID: uC-osflcyp075c11b1
tttgttcaacgcatatgctcaggttgctattggcacggaagatgtctacaagagtgctggggctgtcgagttggttacaaaagaactagggggaaagattttgcggcagccaggtacactaccagggctcaacacaaagattgcctctttccttgaccctgatggctggaaagtggttttggttgataacgccgacttcctgaaggaactccagtgaagatgagagatggcccaagttctgtgctaggaggcaaagcgcaaaccttatgtagtaatgccagtgcaatgtaataaagaagcggtttccgctctatgaacaagaataaattctggcacatgcgttgcgcttatgctagtactgtctgggtttggctgtaaatccgctatgcattgctacctgtatcagcatgactgttggagtgttgttgataacaaggaccagtttgtgcaggtgagctgaggttcctgataaaaaaaaaaaaacaaaaaggg

SEQ ID NO: 3459 - DNA, 441 bp, Oryza sativa
  Clone ID: uC-osflcyp075c12b1
tttcttctccgcgctgctcaaggcgcagccgcagttggtcaactactggaaggccaaggtctggtcacggttcttctgcctctcggtgtatgtgaccatgtacctaaatgattgccaacgtactacattctatgaagggattggtctggacaccaaagaattcgacatgcatgtgataattgagaccaaccgcacaacagcaaggattttccccgctgttcttgacgtcgagaaccctgaattcaagaggaagttagacaggatggtggagatcaacaaaaagatcattgccataggcgagtctgacgatatccccctggtgaagaacctgaagaggattcctcacgttgccgctctggtgtctgagatcattgctgggtacctcatgccctcaatcgagtctggctctgttgatttcgcttgaatcgagccccacttggc

SEQ ID NO: 3460 - DNA, 517 bp, Oryza sativa
  Clone ID: uC-osflcyp075d02b1
gttgtggtggtgaggacatcaaactggaacacgggggcgatggcggcggcggctcgatcctgagggatgcgagagttctctatctgttcctgtaactaaatctatattgttgagagaagaagatagcgatcctaacaaagagcccgggtgcgacggcgccgcgggcgcgctccgccacgcgtggcggcttgcggcgatggagcccgcggaggcggcgttgttcgtgctggcgatgccggccgtcgccggcgcggcctcgccgttcttcgtggtggccgccgccgcgagcgcgccggcgagcgtggcgtggcgcgctctgctggggttggtgtacgtgaccgtgtccggcgcggcgcaggtggtgtccatgtgcgcggtgaccgtgttctactacaagtgcaagctgcggtgcaaggaggcggattcgctgcgcaacgatgaacccgatgtttagtgaagaaatggagtacgttataaacatataattagatgaagcatagaggagaaagaggaggag

SEQ ID NO: 3461 - DNA, 169 bp, Oryza sativa
  Clone ID: uC-osflcyp075d04b1
agtaggtcgagcccgagccggccgagccggaggccgagcctgttaaggaggaggtggcgtcagagcccgccgccgccgccgaggcggaggccaaggaggccgagccggcggcgcaggtggccgaggaggtgaaggaggaggaggttgttcctttttttttttttctttt

SEQ ID NO: 3462 - DNA, 536 bp, Oryza sativa
  unsure (1)..(536): unsure at all n locations
  Clone ID: uC-osflcyp075d05b1
cataatttactcatgtcgatggtagaacaatggtcatcaatgtcgagtacaatcagcttgatccactccttcgtgcaaccggacatcctgatggagatgcaaattgtgaaacagggtactctccataccctggaaatataaaccagttgatactggagattggaccatatatggaggagctccagaaaacacacggtgccatttcggaatttgtaaaccctaagtatactgattctaccaagacagcatttaaatcgtccactcgtcttgagtgcatgatgcaggactatccaaaaacactacctccctctgcaaaagttggatttacggtgatggatgcgtggcttacttatgctcctgtaaagaataatcctgaagattctgctaaagttccaaaaggtaatccttaccatagtgctacttcaggagagatggcantttacagggcaaacagccttatttaagaaaggctggtgcacagatagctgaccctgtaattgatactttcaatggccaagaggtagaggttggccacg

SEQ ID NO: 3463 - DNA, 493 bp, Oryza sativa
  Clone ID: uC-osflcyp075d07b1
cgcatcgtctactcctcctccactcgaggttgaattcccccccccccccctctcgtctctctctctctctccgtcgcagatctcggcaagggggcaacaaggtaggaggcggcgatgggttcggcgagccgcgcggtgacgtgcctgagctgcccgtgcaagtgcctggcgtgcggcctcttcagctgcctctgcagcatcctcatctccctcctcgtcaccctcggcgtcctcgccctcatcttctacctcatcttccgcccccacatgatcgccgccaccgtcgactccgccgccctcacccagttcaccctctccaccaactccgccctcgcctacagcctcaccgtcgacctcaccgtccgcaaccccaacaagcgcgtcggcctctactacgacaacgtcgagtccctcgccctcttcgacggccagcgcttcggctacgcccccctcgactccttctaccagtccaccgaggcatccaccaagctct

SEQ ID NO: 3464 - DNA, 540 bp, Oryza sativa
  Clone ID: uC-osflcyp075d09b1
ctctggtggatctgataactctgtaaagatctgggatttgacagctggaaagctcttgcatgactttaggaatcatgaaggcccaattaactgcttagattttcacccccatgagttcttattggctacaggttcagctgataagacagttaagttttgggaccttgaaacttttgagttgattggttcttctggacctgagaatagccgggaatactttgtgccagctagtgtagttcggtctatgacattcaacaaagatggtaaatcacttttttgcggattacatgaaagtttgaaggttctttcctgggaacccatcatatgccatgatgtggttgatgttggctggtccacattaggggatctaattgttcatgagggaaaacttcttggttgctcatataaccaaagttgtgctggaatatgggtcgtggacttgatgaaaattgaaccgtatgctgttagcattgctgaagcacatttgaatgaaagcgtaaataggtcaatacaggctgataatagcatatcatcagtgtt

SEQ ID NO: 3465 - DNA, 512 bp, Oryza sativa
  unsure (1)..(512): unsure at all n locations
  Clone ID: uC-osflcyp075d10b1
ttgtttaaacaaacccctctcactcccactaccatgggtccttgcaagttccggccggggagctcgttcgacacgaagacgacgacgacgaacgcgggagctccggtgtggaacgacaacgaggcgctgacagtggggcccagggggccgatcctcctcgaggactaccacctgatcgagaaggtggcgcacttcgcccgggagcgcatcccggagcgcgtggtccacgcccgcggcgcctccgccaagggcttcttcgagtgcacccacgacgtcaccgacatcacctgcgccgacttcctccggtccccgggcgcccagacccccgtcatcgtccgcttctccaccgtcatccacgagcgcggcagcccggagacgatccgcgacccgcgcgggtttcgcgtcaagttctacacccgcgagggcaactgggaccttctcggaacaacttncccgtcttttcatccgcgaggcatcaagttcccgacgtattcacgcctttaagcccaccc

SEQ ID NO: 3466 - DNA, 443 bp, Oryza sativa
  Clone ID: uC-osflcyp075d11b1
tcggtcggagaccggctggccgtccggtggcggcggggtgggcgccaccgtggagaacgcggcggcgtacaacaacaacctgatccgccacgtctccggcggcgccgggacgccgcggcggccggggaagccggtggagacgtacctgttcgccatgttcaacgagaaccagaagcccgagggcgtggagcagcatttcggcctcttccagcccgacatgaccgaagtctaccatgtcgacttcgcggcctccagctagattaggcccggcccatttcacatttctttctttcagctgctgctactattttattatttgtcggatacagtattttcgtagtttcggttcgatctcatgtcaccggtgctctgatttggattcattgttcatttgttgtcgatgcacattggagtatgatttattcaaacgcacgaattttacg

SEQ ID NO: 3467 - DNA, 474 bp, Oryza sativa
  Clone ID: uC-osflcyp075d12b1
tgtcgatcctgggcaacgcggccgacgtcgcgcgggacctcaagacgggctaccggacgctgacgtcgccgcgcgccgtgttcatcagcgaggcgatcggcacggcgctgggatgcgtcgtcaaccccaccgtgttctgggtgttctacagggtgtacaagatgggcagcggcgacatgggcgacatgccctacgccaagctctaccgcggcttcgccatgctcagcgtcggcgacggcgagcaaggcctgcccaggcacagcatgctcctcttcaaggtcttcttcgtgctcgccctggcgctcagcgtgttccgggaggtggcgagccggaaggagtggcgcatccggcgctacatcccgagcaccatcggcatggccatcaccttcttcatgccgccgcgcgtgcccgtcggcatgtgcatcggcagcctggtggcgtacctgtgggagaagatggacgccggtcgcgggc

SEQ ID NO: 3468 - DNA, 545 bp, Oryza sativa
  Clone ID: uC-osflcyp075e01b1
cgcggagataagcccccccggcacccttatcaccaccagcagggccaccatgctctccctgtccgacccccacccccaccccggctccaccacggcggcggggggggggcgccaccaccaccggcggaacgcccccttcgggccgcaccaccgccgacggcgccgattcgcgcacctgacgacctccgccgggatccgggggcccgacgggcggtccatcggcggagggccgcgcgacaacaagctccccttcacccctccccccaccgcgccgcccgaccagctctaccagccgttccatccgccgccgtcgccgctccccgacaagtacaaggacctcgacctcggccagcgcctcgctgtgctccgggaccggctcgggctttggcacgagtacgcgccgctcatcttcgcgctgtcgagggaagggttcacgccgtcgtcgatcgaggaggccacggtgatctccggcgtcgagcagaaccgcgtcgtcgtcgccacccagggccgcgactcgctcgtcgccgaccagggcgggttccccg

SEQ ID NO: 3469 - DNA, 573 bp, Oryza sativa
  Clone ID: uC-osflcyp075e02b1
cacttctctcccctccccacgcaaccgccttcctccgccgccgtcgacgccgacgccgacgccgaccccttctcccaatctgcggattccagcgggggtcccccccccctcccaccggcggcgcccggtggtcgtggtcgtgggggaggggagtcaacgaacgagccgagccgcccgcttgccggagctctctatctatctctctatctctatctctatccctccagattccctcctccatcgaatctctgatatttggagggagcgactcgacgcagcatcgcatcgtaaggaaggtcccctccactgtcgatggatcagcaccagctcgacgaggagaaccagagagccgcgctcttccactcctctgccacattttcctctttgggagctgacggtgaggaggagagggagactgtgcccgtgctgtcctgacgatggccgacataaatctgacactgcccaggtcttcgaggatacggcgcaccagattagcattgatcccttggaatcaagtgggattattctgacaaccggtgagaatagcgcatatgttttgggatattttgcatc

SEQ ID NO: 3470 - DNA, 319 bp, Oryza sativa
  unsure (1)..(319): unsure at all n locations
  Clone ID: uC-osflcyp075e04b1
cttattcgccctcgccacccggggtggcagctcgaggcggtgacagtacttcgacaatcttaacagccccaccgcatcattgtacaatgttgtccaacctaattcaattcattgtaaatacaaccctaattcttcgcagccgcagaaaccggaacaacacccccaccaagttctgtaagctggggggagtctgttctgctgcctggagtctgttagcttgacccaggaggctgcaatgtgtaaaagtaaaaacagtgtataatcttttccaaggtagttccagcttctcccaggatttgtggagaggaggctgtagcng

SEQ ID NO: 3471 - DNA, 438 bp, Oryza sativa
  Clone ID: uC-osflcyp075e05b1
gtcgtcggcgagccagccagcagcctagccatgtcggaatcgaaggccgccgcggcggtgaccctccgcacccgcaagttcatgacgaaccgcctcctctcccgcaagcagttcgtgctcgaggtgctccacccgggccgcgccaacgtctccaaggcggatctgaaggagaagctggcgaagctgtacgaggtgaaggactccaactgcatcttcgtgttcaagttgcgcacccacttcggaggcggcaagtccaccggattcggcctcatctacgacaacctcgacgccgccaagaagtacgagcccaagtacaggctcatcaggaatggtcttgccactaaggtagagaagtcacgtaagcagatgaaggaacggaagaacagagcaaagaagatccgtggtgtgaagaagacacaggctggagatgctgggaag

SEQ ID NO: 3472 - DNA, 178 bp, Oryza sativa
  Clone ID: uC-osflcyp075e06b1
cttattatcagcaaccaattcgtaccgatcgatggagcgatctgatccagcaactagatcgacagtactagctaggaagcatggcccgtgcacagttggtgttggtccgcctggcggcagctctgctcctcgccgccccgcacgccgtcgtggccatcacctgtcgccaggacaactc

SEQ ID NO: 3473 - DNA, 281 bp, Oryza sativa
  Clone ID: uC-osflcyp075e08b1
tcggtcttgcctagtgcaaagccttccctgtcagcgtgattatggtttatgtttacgattggaatggctgttctgttcaggacttggatggagttacccctgtgatatctggagtgttggttgtatactggttgagctatgcacggtatgttgttgggtgcaatatttggtttgtattctgtcacaacaacagcaggatttttgagttaccaaagctaccgcagggagaagcattgttttagacccatgaaaacttggagcatcttgctatgatggagagg

SEQ ID NO: 3474 - DNA, 440 bp, Oryza sativa
  Clone ID: uC-osflcyp075e09b1
cttaaggccgtcttcctgatgccacacatggttgggaccacttaatgcaggtcgctgctgcccaaatgggcctgagtgacagggacatagctgatctttctggtggtcacaccctgcgaagattccacaaggagagacactactttccaggagcctgacacgtcaaccctttgatctattgacaactatcactagacccagcttgggagtcgctagaatgaacgccatgttcatctagcacgcgacagagctctactggctgacccacccttgcgagcactggaggagaaatatgctggggatgaggacgccttcattgcggattactactaggctcacctcaagctctctgaactgcgattcgttgaggagtacgaagcctctagagagtgccatattcactgaagattaatgacgatttgcattccgcgtcttagagt

SEQ ID NO: 3475 - DNA, 307 bp, Oryza sativa
  Clone ID: uC-osflcyp075e10b1
gtagattaaaggaaaaacagcgcaatgtggcctctggattggacagagatgtttgtcagggatctggttcctatatgtttggcttttcaaatccacaaatacggcaacttattcaggagttacccaatgcaaggtcatgcttaaagtattttgaaaatgctggagacacctttcgtgggtatagagctgttcatgtaaattggaaagatctagactattgtagtgtttgtgatatggatgaggaatacgaagacactttgttcttgcaatgtgataagtgccgtatgatggtacatgctagatgcta

SEQ ID NO: 3476 - DNA, 586 bp, Oryza sativa
  Clone ID: uC-osflcyp075e11b1
tcgcaaaattcgttgaaggtgacttgttttaattaagcataataagttgggtcagaactatgtcataacaagttcttcctccgggttgataatacttgtcgttttggacaaaggcaaggtctccaaaaagtaactttgataactattttctattataatatatataggaatatcaacaaatatatggttttactgaagtactttttaagactaatctacgcatatggttttcatatttttaagataaatattttagaaattatttgtagtcaaagattttaaagtttaactttacccttgtccaaaatgactaatattatcagcccggagggagtataacaaataaataacaagtattttgtgttccatcaacaaaaagggttacagaagataacttgtttttaagcttgtaactgtaaaaaaaactactaggtgttacttcaatactacaaaggaatctgattgatacatgtataggagttgattgagcatgatatatgacttgtgcagttgtgccatgcactaagagtagtttaaatgttactaatgctagcgcaactgctcaagtctttccttgcaatactat

SEQ ID NO: 3477 - DNA, 377 bp, Oryza sativa
  Clone ID: uC-osflcyp075f02b1
atgcgggaaagcgcgagggggaaggaggaggaaagactaagtttgcgttgaagaacaaaggagaggaaaaatgtcgcctgctgaggcatcgcgtgaggagaatgtgtacatggcaaagcttgccgagcaggctgagcgttacgaggaaatggtcgaattcatggagaaggtggcaaagaccactgatgttggtgagctcaccgttgaggagcggaacctgctttctgtggcttacaagaacgtgattggtgctcggagggcatcgcggaggatcatctcttctattgagcagaaggaggagagccgtgggaatgaggcatatgttgcatcaattaaggagtaccgtagcaggattgaaactgagcttaacaagatct

SEQ ID NO: 3478 - DNA, 558 bp, Oryza sativa
  unsure (1)..(558): unsure at all n locations
  Clone ID: uC-osflcyp075f03b1
ttctgttccagcgtgcaacatttacttgttttggtatgggctattattttctattagatatcgcttggctcatgtttcaggctgctcatcagtaattctttccctccatcttttcaagatatctacccaaggaattaaatctcagtcattcgaattgagtatggtaccttgctccttccctcttggtatttagattttactttcatagaatgcacaagcaccatcaggtagcagtaagccagtaacatgcaatcatggtgataaaccttgaactcctaaatcaatcaaataggttatattgtaagatcaacctttgttgaaaatcctagtaaagtgaatgggagaatgggttaacatgtaaccacggggataaaccttgaattcctaaatcgatcatatgggttatattgtaagatcagcctttgatgaaagaaaaaagttcatttcattgaaagaaaaaggtccattttaatgagctgcaaaattgtttaggcggctaagtggtcaggcgaaatagttccgggaagaanaatgcactttcttttcttggtaaagatg

SEQ ID NO: 3479 - DNA, 515 bp, Oryza sativa
  Clone ID: uC-osflcyp075f04b1
gtcgtatcgcacttgtagctctcgacccccgcaggtgatccctcctctcgcttagttcagatcgaaatcgcaaatggcgaagattaagatcgggatcaatgggttcgggaggatcgggaggctcgtggccagggtggccctgcagagcgacgacgtcgagctcgtcgccgtcaacgaccccttcatcaccaccgactacatgacatacatgttcaagtatgacactgtgcacggccagtggaagcatcatgaggttaaggtgaaggactccaagacccttctcttcggtgagaaggaggtcaccgtgttcggctgcaggaaccctgaggagatcccatggggtgagactggcgctgagtttgttgtggagtccactggtgttttcactgacaaggacaaggccgctgctcacctgaagggtggtgctaagaaggtcgtcatctctgctcccagcaaggatgccctcatgtttgttggtggtgtcaatgagaaggagtacaagcctgacatcgaca

SEQ ID NO: 3480 - DNA, 375 bp, Oryza sativa
  Clone ID: uC-osflcyp075f06b1
gctgctatcatctacaacaggggccatgcctgggatgaccattggatcttctggggtggccccttcattggcgctgcccttgctgccatctaccaccaggtggtcatcagggcaattccattcaagagcaggtcgtaacctgcatcagctattatcactgtcaagatgccaatccagagcaagctgtttctgatgggcgcggctgtttcccgctgcctgctttgttagtaattattgtggagtcgacgttcctcttcaagtttgttgtactactgtttttatctgaacacagacttgtaatttcagtactcagttgtgtatccctcttttactatgtgcaaattaagctatcctcctcctattggagttcggctc

SEQ ID NO: 3481 - DNA, 422 bp, Oryza sativa
  unsure (1)..(422): unsure at all n locations
  Clone ID: uC-osflcyp075f08b1
tctaataaagtatctgctggggacttcaatggctaggcctgttattgccaaggcaatggttgatgttgcaaaggaagttggtgcagatgcagttgctcatggatgcactggaaaaggcaatgatcaggttcgttttgagcttacattctatgctttaaaccctgagcttaaagtggtggcaccttggagggagtgggatatcacaggacgtgaagatgctattgagtatgcaaagaaacacaatgtgccaattcctgttacaaagaaatcaatatacagccgtgatcgaaatttgtggcaccttagccatgagggtgacattttggaagatccagcanatgagccaaaggaagatatgtatatgatgtcangtgcaccagaaaatgcaccttcaaacctgagtatttggagattggtattat

SEQ ID NO: 3482 - DNA, 531 bp, Oryza sativa
  unsure (1)..(531): unsure at all n locations
  Clone ID: uC-osflcyp075f09b1
tctgttaacaaagcgatccttcttgcgctccggcgcgggcgtctacccctcgcgcgggtgcctgagccaagaacaggatcggaggccaggccccatgcatgcatgttaattagtctgacactgatcacttcatcccattagccattagctgtttctcatccagacggacgcgccatccaacacacatcgatcgatcggaggttgattggccggccatgacgacgacggccgccggcggagccaccctgtgcgcggcgagggaggagcaggagctcctggccacccgcctgaatgtgaacggcatccggccgccgcattgcgccgcggaatccatcctcatctacctcaccgcgccggggctctccatgatgcccatgcgggtgatggcctccgactccatcgcctccgtcaagctccgcgtccagacctccaagggcttcgtcgtccgcaagcagaagctcgtcttcgatggccgggagctcgcccggaacgacagccgcatcatggactacggngtctcccacggcaacg

SEQ ID NO: 3483 - DNA, 560 bp, Oryza sativa
  Clone ID: uC-osflcyp075f10b1
gtggtgttccccgaccagacggggctcatggcgggcaccccggccgtcgcgtcgtggcaggtggcgtgcaacatcacccgccccaagaggcgcgccgccaagtgctgcgtctccttctccgcctactacgacgactccgtcgtgccgtgcaacacctgcgcctgcggctgcggcggcggcggcggcggcggcaacgacacggcgacgtgcgacgcggacgcacgcgccacgccgctgccgcccgaggcgctgctcatcccgttcgacaaccgcacggccaaggggcgcgcctgggccaagatcaagcaccgccgcgtgcccaacccgatgccctgcggcgacaactgcggcctcagcgtcaactggcacatcatgaacaactacaagtccgggtgggcggcgcggatcaccatcttcaactggcaggactacacgttcaaggactggttcgccggcgtcaccatgcgcgaccactacagcggctacgagaacgtttactccttaaccgcaccaagatgggggcgccgttcacaacagcatcttaatgaggggttgcccgg

SEQ ID NO: 3484 - DNA, 546 bp, Oryza sativa
  Clone ID: uC-osflcyp075f11b1
gtcagctccagccacacgagcctagttcaggtagatacaatggcgtccaccgcctctttcatgctcgccgtcttgctggcggtggccgtcgcggcggcgccggcgagggcggtgcgatgcccgccgagcgacaagcaggcgctgatgagagtgaagcagtcgctgggaaacccggcgacgctgtcgacgtggtccctggcgtcggcggactgctgcgagtgggaccacgtccggtgcgacgaggccgggcgcgtgaacaacgtcttcatcgacggcgccaacgacgtccgcggccagatcccgtccgccgtggcggggctgacggcgctcatgtcgctgtcgctgttccgcctcccgggcctctccggccccatcccggcgtgcctcaccgcgctctccaacctccagttcctcaccatctcccacaccaacgtctccggcgtcatcccggactcgctcgcgcggatccgcagcctcgactccgtcgacctctcccacaacagcctgaccggccccatcccgaactccttctccgaccttccgaac

SEQ ID NO: 3485 - DNA, 548 bp, Oryza sativa
  Clone ID: uC-osflcyp075f12b1
ctcggctgacggctcctcctcctcctcctcctggtcctccctcccgatcccctcccccgcacgaaactcaaagcatccccggcgccgcagctccccggaggaggaagcccccgcgccccgccccgaccagatccgatggccaacagcaacctcccccggcgaatcatcaaggagacgcagcgactcctcagcgagccagcgccgggaatcagcgcgtctccgtcggaggagaacatgcgctacttcaacgtcatgatccttggcccggcacagtccccctatgaaggtggagtttttaagcttgaactctttttacctgaggaatatcctatggctgctccaaaggttaggttcctgaccaaaatataccaccccaacattgacaagcttggtaggatatgccttgacattcttaaggacaaatggagcccagcccttcagattccgacagttcttttgagtatccaggcactcctaagtgcaccaaaccctgatgatcctctctctgataacactgcaaagcactgggaagccaatgagcagaagct

SEQ ID NO: 3486 - DNA, 482 bp, Oryza sativa
  Clone ID: uC-osflcyp075g01b1
gaattcctcgggtccgaccccacctgcgtcccgcatttaatttatgtcactgcactccaggaaccaccaaaagggaagggaaaatgaaaagaaaaggagggggaaaaacctcttctttctttctttctttcttcagtttggttgcgttgcgttgagtagatggtaatgccgcccacgaatccgcggcgagttcttgcgtcggagagtggcaatctgtaggagttttctgggagtttggttttttcaatctttcttgggttaagtttgtaacggaagaacagaatcaaatcgaatcgaatcggaagagaacgtaaattaatctgtggctttttggacgtcgctcggtcggcggcgatcggccggcgatggcgccgccgttgagggattactggctccggctcttccgcggcgcccgggacagcatcttcgacgccatcgacgcggccatagccgtcgcggagtaccgaccaccccgccgggct

SEQ ID NO: 3487 - DNA, 410 bp, Oryza sativa
  unsure (1)..(410): unsure at all n locations
  Clone ID: uC-osflcyp075g03b1
gaaccagatatttgtaaaccctatggctccaactatatttctagtggttcttctcttctctagccacatcatctcgttgacatctgctattggtagccaagtgatttcgcagcatttgtttggcattaatcttcctctctctggacatcatctgatactgaaggcttttgccatagttcctgctctgtactgtgctaaggttgcaggtgctgaaggaatataccaattactgataatctgccagattatccaggccatgctccttccatcatcagtcgtgccactcttccgtgttgcctcatcaagattgataatgggtgcccacagagtgtctntgcatctggagatattaacatttcttgcatttctcctcatgcttgtttcgaatatcatctttatggcagaaatgc

SEQ ID NO: 3488 - DNA, 467 bp, Oryza sativa
  Clone ID: uC-osflcyp075g04b1
gtgcggttggcgttgcgttttttcccctcgaatggcgggggggaatccgccggttgatgcagcagaggggcctcgcgcacaaccgccgctcccgcggcttctcccgatcccgccgcgccgtcgagggcgcctaaaccacacgcctttttttttcccttaaaaacgaatagatctctctcaatttcctgaaacttataataatttcaaaaacgccctagacgaggacgaggagacgatcgagatggacgccgtcgcggcgaatgggatcgggaggtgaggaggaaggcgcaacggagctactgggaggagcactccaaggacctcaccgtcgaggccatgatgctcgactcccgcgccgccgacctcgacaaggaggagcgccctgaggtcctgtctgtacttccttcttacaaagggaaatcagtactggagcttggggctggaataggacgctttactggggaact

SEQ ID NO: 3489 - DNA, 391 bp, Oryza sativa
  Clone ID: uC-osflcyp075g05b1
ataccttgttacctgggcccgttacaatgaggcgcagagggtactggcaattggatatttagaccctcttcttgtggaggatgaggatccaccaactcccaagacacaggaaagttctttcactggctccattgatccttaaatgagctgtcctgaacagtagctgcagaattacttcacgtataaatacagttctcgcctatactcctacgtcaagatttccatcacttttagaatttgtagttggtttatgtcccatctacatcatcaggaatatcagaatactgagctctatgctggaaataagtttgaacaatagccatcgctttgagctcatatcactgagtcatattttaatgaacgggggacacatcagctaacaatgtatact

SEQ ID NO: 3490 - DNA, 445 bp, Oryza sativa
  Clone ID: uC-osflcyp075g08b1
tcgaaaaatgccaactttcctggcttcaacttcaacacgtcgcatcagggggagtacgttggcatagcatctgagcctctctgcctcgttggcctggacattgtgtgcatctgcaagcctaaactagaaactgccctggaggtcatcatcaacggcacttcctatctcactgatcatgagtggaactgcattgttactgcaggcagccatgatggtatgctaactgagttctacaggtattggtgtcttaaagaagcatttgtcaaagctacaggtgctggcgttggatttgggttgcaacgtttggaattccaccatatgaattggactaatatttctctccgtattgatggagaagaggataggaaatggagggttttggcttttcaagattgatgaaaagcatctggcattcattgcaaagggcattcataggatgctattt

SEQ ID NO: 3491 - DNA, 473 bp, Oryza sativa
  Clone ID: uC-osflcyp075g09b1
attggttatggtgtgggagtttctggctgggccagctggcattcatctaggtaacctgagtaagggaatcacctattcgcttcacagaaacatcgggatcacagtatttgcgcttggtaccctacagatctttgcgcttttcctgaggcccaagaaggatcacaaataccgtatctactggaacgcctaccaccactcggtcggttacaccatcatcatactcggcatcgtcaacatcttcaaagggatgtccatcttgaacgtggagcagaagtggaagacgggctacatcatcacgatcagcatcctgcgtggcattgccgtgatcctggaagctgttacatggagcatcgtcttgaagaggaggaaggaggagaacaagttctataacggcgcttcaaacggtcacttgccactctctatgtaattcttgtagaggcaggagggacttgtgatccctacttaatttatca

SEQ ID NO: 3492 - DNA, 583 bp, Oryza sativa
  unsure (1)..(583): unsure at all n locations
  Clone ID: uC-osflcyp075g11b1
gaaaaggcctgtgtcaaggagagggtagtagcaccttgctctcctttgccttcagagaaaccggaagcaatggcgtctgctactctcctcaagtcatctttccttcccaagaagtctgaatggggtgccacccgccaggctgccgcccccaagccggtgactgtctccatggttgtccgcgctggtgcctacgacgatgagcttgtcaagaccgcgaaaaccattgcatcaccaggaaggggtatccttgccatggatgagtcgaacgcgacctgcggtaagaggcttgcgtcaattggccttgagaacaccgaggccaaccgccaggcttaccggaccctccttgtcaccgcaccgggcttgggacagtacatctccggtgctatcctcttcgaggagactctgtaccagtcaactgtagatggcaagaagattgtcgacatcctcactgagcagaanatcgttccaggtatcaaggtcgacaagggtcttgtgccccttgctgggctccaacacgagtcatggtgccaaggtctcgacggccttgcctcgcgcgaggccgcatactaccagcagggcgctc

SEQ ID NO: 3493 - DNA, 419 bp, Oryza sativa
  Clone ID: uC-osflcyp075g12b1
caaggaacacgggtgggcggctcgggagcggaaatcttagacgcccgcgcgcggtaataccggccctctcctccacctcgccaccgccggagcttgctggcgtgctgccggccagctgggaaggcggcggcgaggccagctgagctcggcggcatcctccttggcacgaggaggttggggcaaagccgacagcgtcaacctcagtggttggaggcgaagatggcagggcatcgtgtggaggcggtagatccggccctcccacccccgaatctggtccgtgcggcgacggcgcgagctctagcgactgcgtggcgaccgtggcagggccactgcggcggcgcggtggcccgtggtggcagcgcggcggctgggcctcggtctggctctggggtgggggcgggtcgggctggcagcgcgcc

SEQ ID NO: 3494 - DNA, 423 bp, Oryza sativa
  Clone ID: uC-osflcyp075h02b1
gtttgttgagagttgagacccgagagagcaccggggagagagggcgccgcaatggagggttccggtgctcaacctgtcggcggcgcggcggcggcggcggcggcgcccaagcggaacaacatggactacaccctcgcggcgctgaagctcttcggttgccagctggccggcgccaccgaggcccctccctcggagtcggacggcacctcgcaggcccagatgctctacggcatccgcttccagcgcgtctggctccaggtcgcctccccaccattccctattccccccatctcctagctccatctctccctgacgacttgtggcggcaggcagggcgtggtggtgctggcggactaccgcgacggcgccgggcacattcttgtggatgacggctcctgcgtcgccgagatcacgctcacaccg

SEQ ID NO: 3495 - DNA, 240 bp, Oryza sativa
  Clone ID: uC-osflcyp075h03b1
gcgcgttgttgtgtggccttggttgcttcggaatctcaccacgcaacctggacggattagagagccagatccctactctctctctcagctcaccacacctcgagtcgccgtcggcgacgacgctgctgatgattacctcctccgcgccgcgcactccttgcactagcccatggcgacggctatgatggctgcgacccgccacctcgtgctcccctcgccgcgcgccggtcgtcgagacca

SEQ ID NO: 3496 - DNA, 463 bp, Oryza sativa
  Clone ID: uC-osflcyp075h05b1
cgccgaccagagacagagagagatcccatctgctagcgtagctgccatggccgcctccaccgtctccggcctcgccggcgccaccctcgcccgccggccggccttctccaccggcttcacgacgggcgcccgggtgtcggcgaggaacccgctgctgacgaggaacctggagaggaacggcaggatcacctgcatgacgtttccgcgggactggcttaggagggacctgaacgtgatcgggttcgggctgatcgggtggatcgcgccgtcgagcgtcccggcgatcaacggcaacagcctcacggggctcttcttctccagcatcggccaggagctctcccacttcccctcgccgccggcgctcgactcgccgttctggctgtggttggtgacgtggcaccttgggctgatcctggcgctcacctttggccagatcgggttcaagggcaggaccgagggctac

SEQ ID NO: 3497 - DNA, 498 bp, Oryza sativa
  Clone ID: uC-osflcyp075h06b1
agagcagcggcaaagcaagtgatctctttagctcggagtcatctctgcatttgcatttgcagctgctcgtcacggcaatggcatccaccaacagctggacccacgagatcgagtcgccggtggccgcgccgcgcctgttccgcgccgccgtcatggactggcacacccttgcccccaagatcgcctcccacatcgtcgccagcgcccaccccgtcgacggcgacggcagcgtcggcagcgtcaggcagttcaacttcacctcagccatgccattcagccacatgaaggagaggctggagttcctggacgtggacaagtgcgagtgcaagtcgacgctggtggagggcggcggcatcggcaaggcgatcgagacggcgacgtcgcacatcaaggtggagccggcggcgaacggcgggagcgtcgtgaaggtggagtccacgtacaagctcctcctcggagtggaggtgaaggacgagatcaccaaggctaaggagtccc

SEQ ID NO: 3498 - DNA, 510 bp, Oryza sativa
  Clone ID: uC-osflcyp075h07b1
cttagaacgtgaagaacattcttatgattcctacgatttctgatgttagcacagtggaggaatggagggtggtagccaaagatattgtggcacgaaaaggagaattaggttaccgtgctacaattgttgattggcctggtctgggttattcagacaggccatcactgaactacaatgctgatgtgatggagaattttctggttcagttaattaattcaccaaatagtcctgtggcaaatacagatgatgaagtggtagtagttggaggaggtcatgcagcaacaattgcagtccgtgcggctgggaagggccttataaggccatctggcattgctgcagttgcacctacttgggctggaccccttcccattgtatttggccgaggttctgatatggagacaaggtatgggcttctacgagggaccctcagggccccggctattggctggatgatgtacaatgttctggtgagcaacgagaagttcatccaagtccagtacaagtctcacg

SEQ ID NO: 3499 - DNA, 487 bp, Oryza sativa
  Clone ID: uC-osflcyp075h08b1
gtcgctgtcacgcgcttcgtgctcgccgccttccaccttcgtgctaccccccgccatggcttcctccctcgccggatccgccctctccttcgccacccccgtcaaggcagtcaagactaattcgatatctttcaccagcgcaaggaagggaaatgcatttctccgcctgcagccagtgcctatgagatttgctgtttgctgtgccgcaaaaaaggagacagtggagaaggtttgtgacattgttaagaagcaactcgctgttcctgagggcactgaagtttctggtgcatccaagttctcagatcttggtgctgattcactggacacggttgagattgtgatgggtctcgaggaggagttccacatcagcgtcgaagagtcaagtgcgcagtcaattgcaacggttgaagatgccgctgcactcatcgacaagcttgttgagcagaaatctgctgaagcgaaatcatcttgatatgcacaaatcaca

SEQ ID NO: 3500 - DNA, 466 bp, Oryza sativa
  Clone ID: uC-osflcyp075h09b1
ctttgaagccaccaaaccctagccgcgagccctggcgttgctaggaaggggaagaggagagatcgagatcggagagatccatccatggcgctgcgagccctgatcagcgagatccgggggatgaaggtgcgggaggtgccggggtacctgaagccgcggctgagctgggagaacgtgaagaagagcagcgaccaggccgtcgaccgctacatcgacaagtacatcgagaccagctcgccggagccgctcttccacgtcatctacggcctcatggccttctcctacctcatcaacctccccaaggagcgccgtcacctcgcccacctcgaggagctcgagaggcagggcgccgccggcgccgcccaccactagatccgaggacttggggtttgtctgtggctgattcgatctaacagaaattctgttcttccaccgatgagctacctggagttgtgatgatgttcgt

SEQ ID NO: 3501 - DNA, 512 bp, Oryza sativa
  Clone ID: uC-osflcyp075h10b1
ccgctcttccccccgatctccccggactcccacagccgcagcgaacaaatcccgcgcgggttgggaagagcgagctcgtgaggagagcagagggaaagcgcgagggggaaggaggaggaaaggtgcacaaggtcagactaagtttgcgttgaagaacaaaggagaggaaaaatgtcgcctgctgaggcatcgcgtgaggagaatgtgtacatggcaaagcttgccgagcaggctgagcgttacgaggaaatggtcgaattcatggagaaggtggcaaagaccactgatgttggtgagctcaccgttgaggagcggaacctgctttctgtggcttacaagaacgtgattggtgctcggagggcatcgtggaggatcatctcttctattgagcagaaggaggagagccgtgggaatgaggcatatgttgcatcaattaaggagtaccgtagcaggattgaaactgagctcagcaagatctgtgatggtatccttaagcttctggattcccacct

SEQ ID NO: 3502 - DNA, 529 bp, Oryza sativa
  unsure (1)..(529): unsure at all n locations
  Clone ID: uC-osflcyp075h11b1
gcaccatcaatcaatcgatcgatcgatcgcgtgggcatcggcaacgccaccgcacgcaagcagcaagcagctgatctctcgctcgatcgatcgatctcgggaaacttggatttatacccatggcgcctcgcgcagcgctcttcctcgccgcgctcctcttcgtcgccatggtggtagtgccggtggcgagggcggcggaggagtcatccgccgagtccccctcctccgagtcctcctccgagtcgtcgtcgtcgtcctccgccgacgcgccggcggaggggcccgacgggccggcggcggcgcccggccccggcgaggggatcgacggcctctccgacgacaacgacgacgactcctccaactgagcccggccggccggccggcctcgtcgacctcgcgtcgtgaacaatccgttaatttgattgatgatctggagcgattaataaggatatatatatatgggtcgtcgtcctgcgatttgattacaacttgttctcttctcgnttttttttcggatgaaatttctcat

SEQ ID NO: 3503 - DNA, 505 bp, Oryza sativa
  Clone ID: uC-osflcyp077a01b1
cagtgcaactcagttgttggaatgaaaggatggatttttactctgaacaaagcgaaaggtgtggcaatgggcggcagcggaacgctgatctccatttaccctgaggatctcactttcctatttgagctggataagcggtgctattgcaatctcaaggtggtgaacaacagcgagcatcatgctgcattcaaggtccatggccttccatttcatgaccaatattttctaaaacttggcgagaaggcttgatgaaagtttgtttcatgtcaagacgacattaccgaggaagtattttgtccggccgaacacgagcattgtccagccatgggattcttgcacaataacaagtaaatagtaccttcgccgcataataagttaatctaatacgagatgtgacatatcccagtacttgtccaaattcatagtactagtatatatcacatcttggattagattaatttattctgggaccgagggaatacatgttcctaatttggcattttat

SEQ ID NO: 3504 - DNA, 563 bp, Oryza sativa
  Clone ID: uC-osflcyp077a02b1
cgcttacttacccacaagttaggtgcatgccatgggaccattcatggcgtgcgcctcgccaccggtactcacgctggccctgctcgcgtcgtgcggtgcccttctcgccacctccatgctcccggcgcgtgcgacggcgggcagctgcttggacgtcggcgacatggtgatgatggacaggttccgcgcttggcagggagctcacaaccgatcgtacccgagcgcagaagaggcgctgcagcggttcgatgtgtaccgccgcaacgcggagttcatcgacgccgtcaacctgcgcggcgacctcacttaccagctcgccgagaacgagttcgcagacctcaccgaggaggagttcctggccacgtacaccgggtactacgccggcgatggccccgtggacgactccgttatcacgacgggtgccggagacgtcgacgccagcttctcctaccgcgtggacgttccggccagtgtcgactggagggcccaaggcgccgttgtgccttccaagtcccaaacgtcaacatgcagtagctgctgggcgttcgtgacagcggcgacca

SEQ ID NO: 3505 - DNA, 568 bp, Oryza sativa
  Clone ID: uC-osflcyp077a03b1
cgttcgcgtggggatctatccatccatcccatcctggatccttcattcctgcccggcggcgagcgagagagaggcggaggagatccgagatggcggggagcgggtggaggaggatcccggcggcgaggaggccgcccatgtcgcgcccggcctcggtctgcctctggatcgtgctcgtcgccgccaccctggcgctcgcccaggcgaagaaatcgaaggcggatttgactgaggtcacccacaaggtctacttcgacgtcgagattgatggcaagcccgcaggacgggttgtcatgggacttttcgggaagactgttcctaaaacggcagagaacttccgagcactttgcacaggagagaaaggaactggaaagagtggcaaagcactccacttcaagggaagtgcattccacagaattatacccagctttatgatccaaggaggtgacttcacacttggtgatggaaggcgggttgaatctatctatgggacgaagttcggcgatgaaaacttcaagatcaagcacaccggaccaggcctcctgtccatggccaatgctgggagaga

SEQ ID NO: 3506 - DNA, 231 bp, Oryza sativa
  unsure (1)..(231): unsure at all n locations
  Clone ID: uC-osflcyp077a04b1
ctctctctctccccttccttccccgtgtcttccagaagggtgcctttcgtcaccgcgccacgcctcgccctcaccccgcgctccgtcgccgccgcccgccgcgccatggcctncgccgccaccccgcagccaagcccgcccagccccaaggcggtgcgggttgtggtgaaggaccggctgcagggggacttattccgggactggacggcggagacggcacgcgcgctgggc

SEQ ID NO: 3507 - DNA, 566 bp, Oryza sativa
  Clone ID: uC-osflcyp077a07b1
ttgttgaagaggaagtggttgcgccgacgacgaggggatcggtttgacggaggaggaggcagcgcgcgccggcttcgggtgtcgttgtccctgctcgccaggtgctcggttgtcgctgacatactgctgagcagaaaaccagcacccatcggcttagtacctgtctgctctgctgtctcagcctctcaggttgcaaaccccatatcccagagctcgacgccacccatgtggtttttcaacttcaaccgaaatggcccctctggcttctccggcgcctccaccgccgaggaggtcaccgccggcgtcgacgcccggggcttggccgccgtcgtcacaggcgcgtcgagcggcatcgggctggagacgacgcgcgtgttggcgctgcgcggcgtgcgcgtcgtcatggccgtgcgcaacgtcgccgccgggcacaaggcccgcgaggcgatccgggcggagatccacggcgccatagtccatgtgctggagatggacctcagctccatggattcggtgaggaggtttgccttcgagtttgactctctgaacctacctctcaacatact

SEQ ID NO: 3508 - DNA, 540 bp, Oryza sativa
  Clone ID: uC-osflcyp077a08b1
ttggagagccatagcctctctctctctctctgggtcgagatatctctctctttttgtctctagatctctcttttttcttgtatctctataggttgttagagcggcgacggcgagaagaggaaggagcaacaaggagtagatcatcagtatagagagcagcagcaatttgggaaggttcattattacagctctgttgtttcatttctttgaggagacgaagttagcaagcagggattgctgtttctgaatttcaaggagaagataacaatagcaaatgatgatgtcatctgggttccagctcggtgtgatcgggtctcttgcgctgtcggttgcatcatcagttgccattgtcatctgcaacaaagctctcatcagtacccttggtttacctttcgctacaacattgacaagctggcatctcatgatgaccttctgcaccctccatgtggcacaacgcttgcatttctttgaaccaaaggcaattgatgggcaaacagtgatcctctctgggttgctgattggcacctcaattgccctctc

SEQ ID NO: 3509 - DNA, 566 bp, Oryza sativa
  Clone ID: uC-osflcyp077a09b1
ttccacacggacacggccacaccacccaccaacggagagctgagcaggcgagcgagcggacatggcagcatcgctccaagccgcggccaccctgatgcagccggccaagctcggcggccgggcctcctccgccgcgctgccatcgcgcccgtcttcgcacgtcgccagggcgttcggcgtcgacaccggtgccgccggcaggatcacgtgctccctgcagtccgacatccgggaggtcgccaacaagtgcgccgatgccgccaagctcgccggcttcgccctcgccacctcagctctgctcgtctcgggcgccagcgcggagggcgtgccgaggaggcttaccttcgacgagattcagagtaagacgtacatggaggtgaagggaaccggcacggcgaaccagtgcccgacggtggagggcggcgtcgactccttcgccttcaaggccggcaagtacaacatgaagaagttctgcctggagccgacgtccttcaccggtaaggcggagggcgtggccaagaacgcgccacccgagttccagaagaccaagctcatgaccccgctga

SEQ ID NO: 3510 - DNA, 235 bp, Oryza sativa
  Clone ID: uC-osflcyp077a12b1
gtgtaaagaaacggtcaaagaaaacgccatgtgagaagggacttaaagtgccagaacaggatatagttcaatgtaacagcatggctgataagaaaagcagtagcaagaatgtcaaaaggacaaggaaaaatctgaaaagtgcactttgcaaccaaggaactcaaacaacacaagaaattttctgaacagccactcggggaaattccgctgatgatgcacccagagcttgaaacat

SEQ ID NO: 3511 - DNA, 505 bp, Oryza sativa
  Clone ID: uC-osflcyp077b02b1
cgttttgttgcgaccagaggccgcggctaaggtccgggatgtctgtgcgcaaggagacggtgctggacctggccaagttcgtcgacaagggcgtccaggtcaagctcaccggcggcaggcaagttacagggactttgaagggctatgaccagcttctaaacttggtgcttgatgaagcggttgaatttgaaagagagcaagatgatccattgaaactatcagggaaaaccagacagcttggtcttattgtctgtaggggtacagcggtgatgcttgtatcgccaaccgatggaacggacgagattgccaaccccttccaatctgatggtgcataaacctgcaggagctgatggttctcctagtcaagatccatgctctcccagtagagaggcctttgtattaactcatgtaatctggtgccacagtctcttatgactcgtgtctcttatgaacaccaagtggtggtctgttctgtaccactcgaaactgatttctgaagatcctt

SEQ ID NO: 3512 - DNA, 575 bp, Oryza sativa
  unsure (1)..(575): unsure at all n locations
  Clone ID: uC-osflcyp077b06b1
ctattagtaggaccagtatgttacccgaaagtatcatgggatttgtgtctggatggaactctgctgaagttgaatctgaagtaacctggctacctgattacgcggataaagctcatgatgacaaactcagcagtcaacatggtagtttaaatggttcattcctatccaattatgctggagtgtgctacttggaatcattactcgacagaggagcaaaagatgggttaatgttgattaagaaatggcttatggaagctttacaacatgagaagttatccttcccatccaaaggtcggcaaggagctgcctctgtttcagagcttcattctatggttcaaatgctctctcgagaccagttatccttagtaagaaacagaggggttatccaattggcactggctgctgaaatggctctccaggagcctcaaagttctcgctgggatgcctttacaagtgcagagagaatattaagtgtaacatctgcagagacaactcaaagtcttgccagtgagcttcgtgattttatcaacactagcacttcagttgaatctcacaagcaagctaatanaactgag

SEQ ID NO: 3513 - DNA, 545 bp, Oryza sativa
  Clone ID: uC-osflcyp077b09b1
tcatggttttatctctggctggaaattatgtgaaggacgatgtatggcatgctctaatagtcttaataagcaatgcatctgaactccaaggatactcagtgagatcattatacaaggcattgctagcttgcggtgaacaggaaagtttggttagggtagctgtatggtgcattggtgagtatggtgaaatgctggtgaacaatgttggtatgctggacatagaggaaccaatcacgcttggtttttttgtgtaacctgttcaggtaacagaatctgatgccgtggatgctgtagaggtctctcttaaacgatactctgcagacgtgacaactcgggctatgtgtctagtatctctcttgaagctctcttcccgattcccaccgacttcagagaggataaaggaaatagttgcacagaataaagggaatactgtgcttgaactacaacagaggtcaattgaattcaactccattatacagaggcatcagtctataaaatcatctttgcttgagcggatgcctgtgatagatgaaagctagtacttg

SEQ ID NO: 3514 - DNA, 548 bp, Oryza sativa
  Clone ID: uC-osflcyp077b10b1
ttctctccttgatagaacccgatacaggcaacgctgaaaaattgcctaacgaggctgacagtgttcaaagccctccttgcacagaacaagaagagtccattgaatcttcctatgttgaagtgagaagtactactgagggtcaagtggagagtgaagtaatagaaacgaatgaggaggaccagcatacgaccgcaggtggacatactgaagaacagatagaaaatttacatgatgataagtcgaaagaaacatgttctgaagaaatatctgatgagcaggcacctgaaataactgaaccagttagccacactgatcgaaattttgcttatgaaaggaaattcctgcaagttcgacatgcatggacaagaaagagagtatgatctcaaacaatgaagtcagcaactttgaaaaagcccttgagacacactcagatagtccaaatttgcatgttaaccaagataagaaagatgaaacagctgataaccaaactgtggtggaccataaacaccgtgtagacaagcttgaagattctaaatcgcaggaggagc

SEQ ID NO: 3515 - DNA, 367 bp, Oryza sativa
  unsure (1)..(367): unsure at all n locations
  Clone ID: uC-osflcyp077b12b1
ttattcgcttcttctccagaccttggagctcgccgtgagggatggagaggaaggacagaggtgagcggcgcgccgccgtgatgagggccaagtggaagaagaagaggatgaggcggctcaagaggaagcgccgaaagatgaggcagagatccaagtaatcccataggcgatcgactgatggaggaggagaaagcgtctttggctctcactgctgtcatctcatctatttaagttgtttagtttcctttagtaagagagaaaaaaaactaatcaatgtacttctcttgatctttgtcatgggagtaattgattgtactggacagcaatgtttccataattctattacctggagttatctgtcagcana

SEQ ID NO: 3516 - DNA, 413 bp, Oryza sativa
  Clone ID: uC-osflcyp077c04b1
agtttttccatcgttgacggcctcaagcccgagagcgggcgctctttcaccgacctcgtgttgccccgcggcgccaacgacgacgacggcttctgcgagatcgtcaatggcgcggcgaatcgcatcgtggatctggaggggatggtgcggcggatgatcctggaagggctcggtgtggcggagcaccagaggcgcatggcgatgcttctggacctgactcggagtgccgatgacagggcgcccaattacgacgagaaggcgaccgggtacatcgaccatcaggacaccaactggctcagcattgtgcgccagaacgaggtgaatgggaacgagatgcagaccacggacagtgagaggttacttgtcttgccgacgcttacgatcataatcgtcaacgtctgcaatgcccttcg

SEQ ID NO: 3517 - DNA, 547 bp, Oryza sativa
  unsure (1)..(547): unsure at all n locations
  Clone ID: uC-osflcyp077c06b1
cacctctactgcttgccagagctaggatatgtatctgagcttcctactcaagggaagatcttattaaaggattggaggttatcagcaaagttggtgacctcgtgggaatcaaatacttcccagtggaacatgaaaagactgcatctgttgagaaactgaagaagcttcaatgaacacctacaaccagaagaaatatactgggtgatctaggcagtgtgccatgcctcggttcggctcatgtgcctcggacccttttgattttcctttgtttctgaagtggcttagatctgtacagcttgtattatcatccatcatagtccaaaacacaacacaatgataagacactgttttgtcgagttcagaggaagcaaaagtttcgctgttacagctctgaatcttgcgagtaaagtgtctgaaatcatgtagagactcttcctcttttgattntagcttcctttgtagatgcaacgtcagttgcatcgattgtgtgtgaagtaagcttcactcatagtgtgaggtctggttgctgtgatcaagtgattaagcg

SEQ ID NO: 3518 - DNA, 522 bp, Oryza sativa
  Clone ID: uC-osflcyp077c07b1
ggtagagaccgtaaatcggctgctcgtcgaatcggcaatcttggagggcgccgcggcgctgtgctcccggcggaattgggaatttgagatggagcagcagttcatcctccgtgtgccccctccgtggcggagcggatcgaacgcctcatgaaccaagccgccggcgcgtcatcctccaaccccgacgacgcctccctcgatctctccttctcagaggatggaagaagtggcacatttatgattggaaatgaaagctttccagcatctctcttagatctcccaactgttatggagtcatacaagacatacaatgattcagtgctaattaaaacagctgatattggtcagatgattatggtaagagaagaagatgatcctgctccagaaggaattgaatacacacatggtcttactcctccaatgagggatgcacgaaggcggcgtttcccgagagagcctgacttaaatgtattcaatgccttccctttagctcctcatggaagcactttgtcaatcataact

SEQ ID NO: 3519 - DNA, 252 bp, Oryza sativa
  Clone ID: uC-osflcyp077c08b1
tattgcgaagtcgggttggtgcgtggctgattgattgttcttttactactgcaaaggcgtcgacagccccggctgcttgaacggttcttgacgtccccatagatgaaaccttcaccaacttttgcccccccaacccaagccagccaaagaccaaccgggtgggtgaaactcccactacgagcttcttacagtaaccagacagagttaaacgatacacgtgctggataaagaccaaattcgaacccatattct

SEQ ID NO: 3520 - DNA, 554 bp, Oryza sativa
  Clone ID: uC-osflcyp077c09b1
tatttctacaagtttctttgcatatctcctcttcggcgagggtaccctagatgatgttctcgctaacttcgatgcaaatcttgggattccatttagttccgtctttgatgatatagtgcgagtgagctatgctgctcacgttatgcttgtctttcccatagtcttctttgcccttaggctcaacttggatggactgctcttccccacatcaaggcacatttctcgtgacaacaagagatttgccataatcactatctcactcctcacagtaatttatcttgctgccattttcataccgagcatttgggatgcattccagtttactggtgcaactgctgctgtcctgattggtttcatcttccctgccatggttatacttagggatccttatggaatcgcatccaagcgtgacaagatcttggctgtaaccatgatcgtgcttgctgtcctctccaattctgttgctttatacagcgatgcaatgaatatcttccgtaaggaagaggaggcatgaatgtcagactccaaaggaatgtcatcaaatatcagtgatg

SEQ ID NO: 3521 - DNA, 529 bp, Oryza sativa
  Clone ID: uC-osflcyp077c11b1
cgcggttattcacagcttcttaagggcatcaacagctacggagctttcctcaaagtccctgcgctatccgagaacaagaatgctgcctgcttggctgagcagctagcacagcaattcaaagaccaaccttgcaccaacaccaccggagcaaacactgtccctggcaccgagcagcagttccccgactacccaaagtacctcgaccattgccatctcaacgcgtcggtgaccggagacggtcaggtgatgccggcctgcgttcctggacttgtacctgatgtggttctgaccaactacaccaagtcacagtacaaccagtatctgaatgacaccaagttctctggtgttgggatcgcgaatgagggagattgggtggtcgtggtcctcagcacgagctcgggttcaggtgattactcccctgctccccctggctccaactgggctccttcagttcatcccttcaaccaactgattcttttgttggtaggcattgtatgtttgctgatgaattgagagatttgatcatact

SEQ ID NO: 3522 - DNA, 423 bp, Oryza sativa
  Clone ID: uC-osflcyp077d06b1
cctccacgagttcatgctgaacacgagggtgtacccgtggcagaacgagttcatgcgcgagctccgcctgataaccagcgagcacacctatgggttcatgtcgtcgccgccggaggatgggcagctgctgccgctgctgctgaacctgacaggcgccaagaacaccatcgaggtgggcgtgttcaccggttgctccgtgctcgccaccgtgctcgccatcccggactacggcaaggtcgacgccatcgacagtagccgggagtacttcgacctcggccttcccgtcatcaagaaggccggcgtctcccacaaggtcgaattccgagagggcgccgccatgcccattctcgacaacctcctcgccaaccaggagaacgaagggaagttcgacttcatgttcgaggactccgacaaggggaacta

SEQ ID NO: 3523 - DNA, 557 bp, Oryza sativa
  Clone ID: uC-osflcyp077d08b1
tcgggctgcctggtccccggcgctcgcggcggttttggtggcggtggccgtggcgtcggcgtccaactcggagggggacgcgctgtacgcgctgcggcgcgcgctggcggacccccggggcgtgctccagagctgggacccgaccctcgtcaacccctgcacctggttccacgtcacctgcgaccgcgccggccgcgtcacccgcctagacttgggtaactcaaatttgtcaggccatcttgctcctgaactgggacaccttgagcatctccaatatctagagctgtacaaaaacaatattcagggcactatcccagctgagctcgggagtctgaagaaccttattagcttggatctgtataacaacaacattactggaaccataccgaaagaacttggcaagctgagttccttagtattcttgcggcttaatgacaacagtttaaacggtccaatcccgagggaactggcaaaatatctagtctcaaagtgatagaagtctcgacaatgatctttgcgcacgaatctactagcggccttttgagctttaccctgac

SEQ ID NO: 3524 - DNA, 556 bp, Oryza sativa
  Clone ID: uC-osflcyp077d10b1
tttgcagaaacaaacccctctcactcccactaccatggatccttgcaagttccggccgtcgagctcgttcgacacgaagacgacgacgacgaacgcgggagctccggtgtggaacgacaacgaggcgctgacagtggggcccagggggccgatcctcctcgaggactaccacctgatcgagaaggtggcgcacttcgcccgggagcgcatcccggagcgcgtggtccacgcccgcggcgcctccgccaagggcttcttcgagtgcacccacgacgtcaccgacatcacctgcgccgacttcctccggtccccgggcgcccagacccccgtcatcgtccgcttctccaccgtcatccacgagcgcggcagcccggagacgatccgcgacccgcgcgggttcgccgtcaagttctacacccgcgagggcaactgggacctcctcggcaacaacttccccgtcttcttcatccgcgacggcatcaagttccccgacgtcatccacgccttcaagcccaacccgcgctcccatgtccaggagtactggagggtcttcgac

SEQ ID NO: 3525 - DNA, 554 bp, Oryza sativa
  unsure (1)..(554): unsure at all n locations
  Clone ID: uC-osflcyp077e03b1
gtgtccattaggaaagctgcctcactttgtttaagggacttttggtttcctggttgatcgatcagaggctgctgagattggcgagatcatgtcgcagtacgggctcgaaccgcatgagtatggccctgtcgtggacgggctccgtaggaatcctcaagcttggctcgacttcatgatgaggcaatatgaccaactgttgctactccctttgtcaatctcttcatcagttatactagaaagcaaatgttgatgtcctgatggtgtctgagatactaatcagaaatgtttcgattatcctgtatgcgtttgccatagctcatataagaagctttcaacaatgaaaaccacacatatattagtaaacagcaagatttcaatcatataaaatataaaaattgatttggaattatcaaaccaacttaactaaccagagcaatgtatgcaggtttgagctgtgattggagaaaccagaccctaaaagagctatacagagcgctttaacaattgcgctatcttatgtcattggtggactggtccctcntcttcctacatgt

SEQ ID NO: 3526 - DNA, 327 bp, Oryza sativa
  Clone ID: uC-osflcyp077e04b1
gaaatagctcagtcgactgcgatggggggggcgttcattgcaacaacctgccgcgttgtggccgtcaagaccacctatgtctgccataatgagctatggaatgtccccatacttgacataccctgcgccgctaccggcctcatgaccatgagctaggaactgtggtactgacctgacaagctgaacaacctggggacattatagacgcatacaccgtgatacctgaggggcgagatcaagggcgactactggaggcacacgtaagagatatgaagagacccagaggcgtgatggaggaacatatcccatgaggagagacacggacgg

SEQ ID NO: 3527 - DNA, 116 bp, Oryza sativa
  Clone ID: uC-osflcyp077e05b1
gcctctcggcctccgccacccgcgcgcgcggcggcgctggtggtggctgcttcaagtgcggcgagatgggccacatggctagggactgcttcaacagcggtggtggtggaggtggt

SEQ ID NO: 3528 - DNA, 531 bp, Oryza sativa
  unsure (1)..(531): unsure at all n locations
  Clone ID: uC-osflcyp077e08b1
tcgcctcatcccattaaatttgctcaaataattgaatatgacaggcatgggttcttccatcggccgtgccaccattttctactgcgttgctctatccataattgccggcgccgcagcgacacaggtgccccccaccgaagcagagtccgtagaagcggcagagcttgcgtcctctgccttcaaggccgacacgttgccctcagcctcccgcaagctgatggccgttagtgacgtgccgctagcgccggtgtgcccggtgcggttcgacaagatgaaggggcccgccatcgagctgggaaagaagtgcaagacgacaggggtgaaggtgtgctgtgaggcgttcaagacattcgcatgcccgcacaacaagctgatcaatgacgtcaacaacggatgcgcggacgaaatgttctacaccatccacacctacggncaattgctgccgggaaccatctttaagatatgcctcgagggaccgcatgggatgaagtgttgaatcgatcgtgctgattcgactcgctcgatcgatat

SEQ ID NO: 3529 - DNA, 486 bp, Oryza sativa
  Clone ID: uC-osflcyp077e09b1
agagatggctatggcaatggcggcttcgctcgcggcgcaccaccacctcgccggcggcggcctcctccccacgccacgagcgagcgggaggaacggccgcagcggcatcaccatatccatgagagcgcagagaaagcagagcggtgactctgggagtgggaagggagacggcggagacgggcgagtcagcggtcggcggcgagtgtggcgtcgccggaaactgaccaaagaggatgacatgttgcggtacaagttggaacgtgtccctttcttagaagagaaagtgagaaaagttagggaaaatgggaagatcatatgcttggacatcaaccagctgatgttatctgaagagaatagatttgctttcacaatagaggtggctgaggaagctaactcttatcttgaaaagaacaggcatgagtatggacttgaaaaacctatactacatgtgctcagtgaccgcatgaatgaagctgggtttttctc

SEQ ID NO: 3530 - DNA, 463 bp, Oryza sativa
  Clone ID: uC-osflcyp077e11b1
gttctacctgaaggagaatgacgtcttccacaggggcattgatgtggccaagatgggacttgaactgaaggatctggttgacatcactgtagagacatacaattctgccgatgcatttgggcttactaacctgactgcaacttacatgctaaggcatgtactaacactatactactcagtgtacgactatgatatgctgaactctccagacctggattgtatacttgaacagcaagcgtccgactattgtattggtgttcttgacactgttcaaaatatggcctacttggacagctcctcgaacatacaggctatgtccatcaagctttctctatggaccgctcgcatttctgaagatgtgcgtgtcaagaccaggtgagcagagaccacattctgagatgatcaatagtctagactgacacttatgtacgcgatcgttgactcaggttcattgcagatcact

SEQ ID NO: 3531 - DNA, 321 bp, Oryza sativa
  Clone ID: uC-osflcyp077e12b1
ttataaaaaaaaaaaaaaaaaaaaaaaaaaaaaaggaaaattttaaaaaaaaaaaagggaaaaaaaaaaaaaaaaaaaaaaaaaaaaaaaaaaaaaaaaaaaaaaacaaaaaataaaaataaaaaataataaaaaaaatacgggtgggagttttaaaggatcccaataagtcacatattttaaagacacttaaaaaattttttttattttccttctataaaaaacccttggtaaaggttttaaattcactttgatggtaaacccgcggagataacaaataaattgcttttactaataaccccttttcacttgttaaaaatt

SEQ ID NO: 3532 - DNA, 526 bp, Oryza sativa
  Clone ID: uC-osflcyp077f01b1
gttttaccttcagagaggaaatacagtgtctggaggggtggttccattctggcttctgtcaggacctttcagcagatgtggatctccaaggccgaatacgatgaatctggtccaggcatcgtccacatgaagtgcttctaagtttgtgggcagatttgtaccattatcagctgattgagacgtgatctgcagattgtttgcatgcgtcccatggtttcagtagcacctgagggctgttggccatggggcaatgcggaaggtgaagtcaattggtgtactggaagaaatctgtccaggtagtgtgcagtgtaggtcgtctgagtcggtcagttttttcagacaatggcatcgcatcagggcattcctaatgtatgcaatggattggtgcgttgggtttcaccgggcaacaaggatgtttgcccgtgcagtttgaaagctttttgtttcgaatttttactaaccgaattgcgggtcttaatgattgcacctctaggtttggtttctcttttgaagatacctctttttt

SEQ ID NO: 3533 - DNA, 342 bp, Oryza sativa
  Clone ID: uC-osflcyp077f03b1
ctttgaggtgggttggcttctcctccccctctttaccttttcctcctcggttcggttccgtggttcgtctagggtttagtgggttgagatggcggcgccggatgtcgagtaccgctgcttcgtcggcggcctcgcctgggccaccgacgaccgctccctcgaggccgccttctccacctacggcgagatcctcgactccaagatcatcaacgacagggagacggggaggtcacgtgggtttggcttcttcaccttctcctccgagcagtccaatgcgcgacgccatcgagggcatgaacggtaaggagctcgacggtcgcaacatcaccgtcaatgaggccc

SEQ ID NO: 3534 - DNA, 531 bp, Oryza sativa
  unsure (1)..(531): unsure at all n locations
  Clone ID: uC-osflcyp077f04b1
ccctattggtgtagtcttggtcaccgagaaggttgcttgagcgataaacttcggcgaccacggtaccacattcgggggaggccctcttgtttgccaagctgcattgaccacattggataagatccagaaacctggcttcctagcagaggtggccaagaaaggagagaacttcaagcagcttctcagtaccaagctgagcggaaacgcccatgtgaaagagatccgggggatcggtctcattgtcggcatcgagctcgatgtcccagcgggtcctttggttgatgcgtgcttggatcgcggtgtcatagtgctgacagctggtaaaggcaatgttgtgaggctggtgccgccactcatcatctcggaaaaggagcttgagcaggctgcagaggtgataagggactgtctacctgcacttgatgcctttacctcttaatgtaagcaacatncttagcaatggaggctagaatgatcttncccttttgggaagaccctagcaatggatgtagaatgaacttccctttggggtga

SEQ ID NO: 3535 - DNA, 245 bp, Oryza sativa
  Clone ID: uC-osflcyp077f05b1
actgttgacgacgacgcgggtggtgccggcggcggagggcgactctcgggcaggagcggcgatggcgtcggcgggcggcggatccggcggcgccgccctcgggagggccggatccgccgccatagggagcggctacggcggcgacgggcggcggctcggcgacctcggctcggcggcccgccatctcctcctcaccgctgctgacaacgacgatgataaggcgaccctcccccctcctcaacacc

SEQ ID NO: 3536 - DNA, 356 bp, Oryza sativa
  Clone ID: uC-osflcyp077f07b1
tctcttgttctagatcgcgagcgcccgcccttgggtttgtttttttttttttttggggaaggctaattattctttcatttgatttaagaatacttttgtacatcttgtttacatgaatacaatttgttacatggatccatgattcatatctttgtttttgtttcaaaagctaaatcaaggattcatatgtgagttaaggccgcgcacaaatggcatagcctgcatccatcttagctttgcttgctgattacaaccatcttggaataatttcaaattcgcgttgacaagattgaacaatatgaattcatacaggttcaccttctactgctgatagcgaccacggccatgatccgatg

SEQ ID NO: 3537 - DNA, 380 bp, Oryza sativa
  Clone ID: uC-osflcyp077f08b1
tcgggctaccaccatagctgcgatggccatgcttaagccgtccaagatcgtggcgcggtcatcgccggcgccgtcggggagcggcagggtgcctagcatctcgctcaagagcctggccaagaagggcatgtcggtgtcgtcgtcgtcggcggcggcggcgcccgtggcggcggcggcgatggcgggcgcgttcttctcggcgctggcgtcgacggacgcggcgctcgcggcgcagcagatcgcggacgtcgccgtggcggcggtggttgccgaccacaaccgcggggtgccgttgatgctcacgatcgagctggccatagagtgggtgctctacaccatcctacagacggtgatgaaccagctgaaccgtattgcggtcg

SEQ ID NO: 3538 - DNA, 214 bp, Oryza sativa
  Clone ID: uC-osflcyp077f09b1
gttatatctcctccccggtctggtcgattcgaagccatggagatatagcctgcaagcttcatggggctggagcgagctcgtatttcttgatgcaagtttcagcccctccaagaacagggtaggagagattatttgtgttccttccattgctggttggttgctgcagtctgcatgtggtggattcttgggaagaaggtggtggtgaggtgaggtg

SEQ ID NO: 3539 - DNA, 557 bp, Oryza sativa
  Clone ID: uC-osflcyp077f10b1
tgttgaatacatgcattccaagggatttattcaccgggatatcaagccagacaatttccttatcggcttaggccggaaagcgaaccaggtgtacataattgattatgggcttgctaagaaatacaaggatctccagacccataaacacattccctacagggagaacaagaatctgacaggaacggcacgttatgctagtgtgaatactcatcttggaatagagcaaagcaggagagatgatctggagtctgttggctatcttctcctatattttttaagaggaagtcttccatggcagggtcttaaagctggtacaaagaaacaaaaatatgacagaatcagtgaaaagaaaatgctcaccccagcagaggttctgtgcaaatcttatccatcagagttcacctcatatttccactactgtcgttccctgcgattcgaagataaaccagattactcttatttgaagaaactctttcgggatgtatttactcgtgaaggataccaacttgattacatatttgactggactacaagcaaaaatcctcagatgggttcta

SEQ ID NO: 3540 - DNA, 553 bp, Oryza sativa
  unsure (1)..(553): unsure at all n locations
  Clone ID: uC-osflcyp077f11b1
ttgctaattttgtccatgaactaatgatagagaaagcaccatctgcgttagtgagtctggttggtcgaaaggagtacgaaagatgtgctcaggacgtctacttctttcttcagtctccagtttgtttgaagcagctagcatttgaagtcctagagctccttgtactagctgcatttccagagttggatgacattgtgaagaagtggcatgaagacaaacagcagttgtacgccctggaataatttttcatggtgaacgaattattccgcagggtcagatcaaacacgtatgcttgatgcagagtgcagatccattccagtgtaaataagggaatcccgaaatcagtgctgttttgacatttctgtttaaatggaggcgacttcgtgcagtgtgaatatgattagttagcagtttgtgagaacggtcccttctcccccatggaccagtaggcccgttttttgttcgacagactggtctctctttntttttctcatagaatcatagagtttggtatacataatgcagcttgaaagaagaggtacacagtattttt

SEQ ID NO: 3541 - DNA, 540 bp, Oryza sativa
  unsure (1)..(540): unsure at all n locations
  Clone ID: uC-osflcyp077g02b1
catttccataaatattagaggatgaatggttcaaaaagggctacaaacgcccagagtttgacgaaaaatatgacacgacattggatgatgttgatgctgtcttcaatgactctgaagagcaccatgtgacagaaaagaaagaagaaccagaagctctcaatgcatttgaactgatttcaatgtcagcaggcctcaatcttggaaatttgtttgactcagagcaggaattcaaaagggaaacaaggttcacatcaaaatgtccaccaaaagaaattgtccgcaagattgaagaagccgcaaaacctctaggatttgatgttcagaagaaaaattacaagttaagggctagaaaaagtaaagcagggagaaaaggaaatctcaatgttgctactgagatactgcaggttgcaccctctcttcatatggttgangtacgaaaagcaaaaggcgacaccctcggatttcacagttctacaagaaccttttcagaaccttaaaggatgttgtttggaaatcagatgatcttcaaaatcaactttc

SEQ ID NO: 3542 - DNA, 260 bp, Oryza sativa
  Clone ID: uC-osflcyp077g03b1
gcatatttttctcgcagaggttggtctgatgccagcgaaggggctacatcacgtggagtgtgtgaactgaggataataacctgggtttctgtcaaatcaaataagcgtttgacatgggtatgatgtagtttttatctggtgatgctgataaaccggccattagaaggccggttctgtaaattttgtaaatatcatgatccccttagctcctgggttgctaatctatgcgtacgtagcaaattgtttcaattaatgttgat

SEQ ID NO: 3543 - DNA, 188 bp, Oryza sativa
  Clone ID: uC-osflcyp077g04b1
cgcatccatccatggcgccgccgtgctccatctcctgcgggtcccacctgctcatcactgggtgcctccccaagccctccctccgcccacctagcctaccccaccccaagcccctccccgccgccctactaggcctagccgccgacggccccacgctacccgcccttgccgacggcgccaccaacccc

SEQ ID NO: 3544 - DNA, 399 bp, Oryza sativa
  Clone ID: uC-osflcyp077g06b1
ctcttgttctcctctctcctgtgatccccctccgctagggttttagctatctcccattgccgccatccatcagcatttcgattggatcactcctctcccccctgcaccgcctctcggatcccgccgccgcccgtcgttgacgcctccggcgacgcagactctatctctatgtgcatccatcccttctcgacctcgcgcaaatcccatccttatcgccccttctttgcctgcgaaagatcgggtcttttttttctgcccgtctatttgtcgcgataggttccacaatttagctgcctggagattctaccgccttgtaagagtccagaactcccgtcattgctccacttgtcctcgcctcgtttctcgaggagagaataagacgcaaatcaaactatactg

SEQ ID NO: 3545 - DNA, 387 bp, Oryza sativa
  Clone ID: uC-osflcyp077g07b1
tctggttgctcaagaggtagtagaggaggaaaaggaaacatagcgtcatttgaatgtggttttcattggtcatgttgatgctggaaaatcaactgccggagggcaaatacttttcttgagtggtcaagtcgatgacaggaccatccagaagtatgaaaaagaagcaaaagataaaagccgagaaagctggtacatggcttacattatggacacaaatgaggaagagcggctaaaggggaaaactgttgaagttggtagagcccactttgagacagaaactacaagattcactattttggatgcaccgggttataaaagttatgttccaaatatgataagtggtgcatctaacgcagacatcggtgttctggttatatttgccccaaa

SEQ ID NO: 3546 - DNA, 577 bp, Oryza sativa
  Clone ID: uC-osflcyp077g09b1
cgctgagaaaaaaaaaatctcccctcgaagcgaagcgtcgaatcgccttctcaagatgcagatctttgtgaagaccctcaccggcaagaccatcaccctcgaggttgagtcctcggacaccattgacaatgtcaaggccaagatccaggacaaggagggcatccccccggaccagcagcgtctcatctttgctggcaagcagcttgaggatggccgcaccctggccgactacaacatccagaaggagtccaccctccaccttgtgctcaggctcaggggaggcatgcagatcttcgtcaagaccttgactggcaagaccatcacccttgaggtcgagtcgtctgacaccattgacaatgtcaaggccaagatccaggacaaggagggcatccccccggaccagcagcgtctcatcttcgctggcaagcagcttgaggatggccgcaccctggccgactacaacatccagaaggagtctaccctccaccttgtgctcaggctcaggggaggcatgcagatcttcgtcaagaccttgactggcaagaccatcacccttgaggtcgagtcgtctgacacc

SEQ ID NO: 3547 - DNA, 497 bp, Oryza sativa
  unsure (1)..(497): unsure at all n locations
  Clone ID: uC-osflcyp077g10b1
cgctgcaaaaaaaatcttggagtgtataactgtgtaagctttgctcaatggcggaggagaacaagtccggctccggcgacctgatggcgagcggcaaggtagtcgcggaggcaaccatgtcggtgttccagcagaagagcgtggagggcgtcgacaagaaggaggtcgccggcgccgccgcggacctgctgcactcggcgtccacctacggcaagctcgacgacaagccggtcgggcagtacatcgacaaggcggaggggtacctcaaggacttcagctccggcagtggcggcgccgcaccgccaccgccggcagccggagacgccgcagcgccgaagccagcggcggaggagccgcccaaggagcctgcgccggctgagaaggaggaaggcaagccaccgtcgtcgtcggaagggttcggtctcgacgacgtcatgaagggggccgagtcgctgatggagaagaagggcggcggngaggaaagcgccggcagcggc

SEQ ID NO: 3548 - DNA, 537 bp, Oryza sativa
  unsure (1)..(537): unsure at all n locations
  Clone ID: uC-osflcyp077g12b1
ccctgcgcagcagctcagccgtcgctaccaccaccgcaagctcccgcctcgcgtgcagctagctgagagcgagcgctcgccatggagaacggcgccggcgccggggacgacgagtacacgcgcgacggctccgtcgacctccgcggcaaccccgtcctccgctccaagcgcggcggctggaaggcctgctccttcatcgtcgtgtacgagctgttcgagaggatggcgtactacgggatcgcgtcgaacctggtgatctacctgacggagaagctgcaccagggcaccgtggaggcggccaacaacgtcaccaactggtccggcaccgtcttcatcacgccgctcatcggcgccgtcgtcgccgacgcctggctcggccgctactggaccttcgtcgccggctccgccgtctacctcatgggcatgctgctgctcacactggccgtctccgtgccagcactgaagccgccgncgtgcgacggcggcggcggcgccgccttgccgcgcgcgtcggcgctgcagcttggcgtctacttc

SEQ ID NO: 3549 - DNA, 359 bp, Oryza sativa
  Clone ID: uC-osflcyp077h03b1
gggtcccttaacaactgggccacccacctcagcgacccggtgcacaccaccatcttcgacaccttctcctcatcctcttaatttaagctctttcgcgcgcaattcaaacgggatcgatgcgttggtgtgcgttcgcgcgcgctgtttagttttgtgatgacgagcgagctgggagggtatggagagaggagaggttctccctcagaggattactcctgaatccatgtaagctcgggtggggggttacggcgaattggccggcggctccttgatcgacatgtttcttgacaacagtaagggcgactttggaaatctgccaggtgaagaactggaccttaagaaacaagagttaagtattc

SEQ ID NO: 3550 - DNA, 362 bp, Oryza sativa
  unsure (1)..(362): unsure at all n locations
  Clone ID: uC-osflcyp077h04b1
aaaaaaacttcttttttattccccatccactcgtagcgggaaagagaagagaggggctctcccggcgctcggagcgcagaagcagcgagccgcttcccgaagggagcaagaaaattcgcgcccagtttggtcggcatgggcgcgaacggccacccgccgccggcgagcgccgccgcgcagaacgggtcccattccagtggcggcggcggaggaggagatggtggaggaaggtgggagctatccctanccccggcggtacggcggcggcgttcccgcacgaccccggccttgcgcgggagtggtccccggaagagcaatccaccctcgactagttggctcgcaagcctgcatctgatgctcct

SEQ ID NO: 3551 - DNA, 506 bp, Oryza sativa
  Clone ID: uC-osflcyp077h06b1
gttgtagctgtgcaagatggtgattgcgcgcggccttctgcgatcgaatgcctcttcttcctcctctcaggcaatcaacttattgaagtatgtaactagcactggaagtctgcaagggcactcgcaaaatttgtgtgatgcatcaaccagacatttcagttcagtaccatcgccccagtacaactcaactgaagagaatgggttcaaggggcatggcatgttggcaccattcacagctggttggcagagcaccgatgttcatccgttagtcattgaaagatctgagggttcgtatgtatatgatatcgacggaaagaagtatctagattctcttgcgggactatggtgtacagctttaggtggtagtgaacctcgattagtcaaagctgcaactgagcattacacaagttgcccttctaatactccttttggaaccgtacgaccaaccatctctggatcttgcaaagaactgcttgcatgtcactgcaaggaaatggaaaagtgtc

SEQ ID NO: 3552 - DNA, 333 bp, Oryza sativa
  Clone ID: uC-osflcyp077h07b1
tcgggtgggcccctcatcccttgcaccgccaagctctcctgatccccgctccgcttcgatctgctctattcagggctggttatgacagcacgaaggacattgtgcaaggatcgtggatgctagttctatgaaccaaacatctgtttgaatttagcataaagttaactgttgtcttcttctctccgcctttactccgttggtgagcatcttcgagtttcaatatgaaataaggaactacctgtttatactcaatgactgaaatgacgccttaaagttttgaatgcaatgcgtggactctgcatatgaagagctactttaattcagtagaacaga

SEQ ID NO: 3553 - DNA, 487 bp, Oryza sativa
  unsure (1)..(487): unsure at all n locations
  Clone ID: uC-osflcyp077h08b1
atgtgactctgtgctgaagaaacacgccataaggattctcaaaaggatattcatggatacatcttcggctatgggtgaaggagacagagaaaggttcattggctccttgatggacatgtctcttcacaacagtaatggtgactttcaaaatctggcaggtgtagatctggcgctcaagaaacaagggttaagcattctcaaagaaatatacttgaatccatcttcgattatgggcgaaggagacagagaaaggttcatcggctccctgatggacatgtttcttgacaacagtaagggcgactttggaaatctgccaggtgaagatctggacctcaagaaacaagagttaagtattctcaaagaaatatgcatggatccatcttcgtttatgggcgaaggtgacagagaaaaattcatcggcaccctgatggacatgtttcttcacaacagncagggcgacttgtttgaaaactagcaggtgatgatc

SEQ ID NO: 3554 - DNA, 427 bp, Oryza sativa
  Clone ID: uC-osflcyp077h10b1
ctttcctatacaaaatccgatagagtacttctaatgttctatttaggttgaaaaataattacaaggatccgtaggtaacttatagagtttgttttcaatccaggtgtcaagagggcataccaaagatcgtcgctccggcggcaatggaggagcagctgaagaggcctatgacgatgaagaagatctcggtgcaaaagaagtcgccgtcggggaagttcctgcacatcctccacgcctcgccgacggggaagctctcggtgaccaactcgccggaggcgccggcggtgatgatgaccacaccgacgaagcatgccgccgccgccgcgcagtcgaagcagctgctggggagcccctgggtggcctcgccgtcgtgcctctgctcgccgacgacgcacgccggctcgttccggtgcaggctccaccgcgg

SEQ ID NO: 3555 - DNA, 553 bp, Oryza sativa
  Clone ID: uC-osflcyp077h12b1
tagacgccggcccttggaagctagctagcatgtcaggccacattggcaccggcccgggccattccaagcttccggcgactggtccccagcacgagccgacgttcaagacttctggccggcccaccaagggtactgtcttacacggcccacaacaccctgtgctctcgccaaacaaaccccggagaactgtgacaactgtgacacaggcacagcgcgacacaacacgagggtaaggcacgaggaggcacaccgggtttgcgctcttgaaacccgccacacgcctctccgtgaaaagctctctctcggccaatcccaccccgtgaagctggtgccgtacaacccagagtaccaggacgagtcggtgctgtggaccgagagcaaggacgtcggccatggcttccgctgcatccgcatggtcaacaacatctacctcaacttggacgccttccacggcgacaagtcccacggcggcgtgcacgacggcaccaccgtcgtgctctgggagtggtgcaagggcaacacccagtgcttgaagatcctccctggggcccca

SEQ ID NO: 3556 - DNA, 540 bp, Oryza sativa
  unsure (1)..(540): unsure at all n locations
  Clone ID: uC-osflcyp078a01b1
atctttattgtgatactgctaacaagattggcacatgcaacctttccatttctgcgaagcgtcacggcgtgcaattctacgtggctgcgccgataacttcgattgatctctccctcccatctggggagcaaattgtgatcgaagagaggtctcccaatgagttgctgaactctgaaggtggcctatgtaagcaagtcgccgcgtcaggtatatcggtgtggaaccctgccttcgatgttactccggcaaatctgattaccgcaatcataacggaaaagggtgcgaccacaaagtctgatgctgatgagactttcaacatcaaagatttcatccagtctgcaaaattgtactctaccatgcagtgaggggtcacctctttagggtagtaaataatctgatgaagcatcctttttcttactatattgaaaaggcccatgttgtactgtcaaaaaaaaaattgctcctagtgaagcagaaaattaggtctttttgcgccacataattngatgtactgtgaagatatatgaccatgtgtgtctc

SEQ ID NO: 3557 - DNA, 542 bp, Oryza sativa
  Clone ID: uC-osflcyp078a03b1
gcgttctgtgctttgtaaaggtgttggtaacatcattgcattcggaaaaactgttggaattgcaagcagatatcatgagcggcatattaccatggtcgtctgttacaaaacaccatttcaaaggaaaggttgtgttaataatgcaaatactgattaggaaatgtggctttgatgctatcgacttagttacacctgaaaagtacaaggcttttgttagaagcgttgaagagggccgcaagggaaatcataatccagcagatggcgcagagtctgaggcacaacaacctacgcaacatgctgctaagagaaaacggtctgattctgatgttggaactggacaagagggaacacacactcgggcgccatcgaggagtttgccagctggaaagaaggaattcttcgttaaaggggccaggaatgctcgctctcctggtgtgaaaagccaacgaagcaaaccatcaggccgcaatggtgatagaactaatttcaaatccaaatctgaaccacggtcaggaaatggccaaaataccaagggcgacaaa

SEQ ID NO: 3558 - DNA, 500 bp, Oryza sativa
  Clone ID: uC-osflcyp078a04b1
gcagcaggtacaacagctgaaccaacagatggtactttgggagcaacaagtacagcagcagtatcggcagcagcagcagcagcaggatcaacagcaacagctacagctacaacagcatgcactgccagtccagttgcaggctgaccaaaaatacagtcagttaccttgctcgggggatactagacatgaacaaaataaaccgcagaaacttgaatttgaagtggatcatcaaagcgaacttgtgcagcagcagaaagcttatttccagcaacagtagcagatggatattatgcagcagcaggagatgtatcaacagcagcaacagctgcagcagcagctacttgaacagctattattgcagcaacaacagtatctgtcgcagatgccacagcagtaacacaacatgacacagcaacagcagttatctgaacagctacagcagcaactatttcagcagcaacagcagctaatggtcgttatgcagcagcagcagcagcaac

SEQ ID NO: 3559 - DNA, 412 bp, Oryza sativa
  Clone ID: uC-osflcyp078a05b1
tggcatcgcactgataggaatcctaatggcaagtccactgcatctttcactcctcaaatggggcaaccagcaaatgggattcttatggcaaatgacactagtgatggcaaccccgaagaagcaactgcctgcattgctgtgaccaaaaatgattcctatgtgatgtctgcatccggcggcaaagtctcattgttcaacatgacgacattcaaggtcatgactactttcatggcacctacacctgctgcaactgtccttgcattccaccctcacgacaataatatcattgctattggaatggaggactctaccattcaaatttataatgtccgtgctgacgaggttaaaagcaagcttaagggacattcaaaaaagatcactgggctggcattttcgcagtcaatgaatatgc

SEQ ID NO: 3560 - DNA, 482 bp, Oryza sativa
  unsure (1)..(482): unsure at all n locations
  Clone ID: uC-osflcyp078a10b1
gaactgtgtgaccagtcgaggaccaggaacggtcatggagtattctgttgttttggtcgaacaattatatggcaaagaaaaagctgatgaagttgctggtccaatggtcatgcgcccccagcatggtgtggagttctcattgaaagagttgaattcaactagttggaatgttggtgaaacacctcagattcttgtaccaattgctaatgggacagaggagatggaagcaactatgataatcgacatcctcagaagggcgaaagcaaatgttgtcgttgcgtccttggaggaaactttggagattgttgcatccaggaaagtgaagatggttgctgatgttctgttggatgatgctcttaagcagcaatatgatctcattttgttaccaggtggtcttggtggtgcccaagcatatgcaaagtcagataaactgattggtctgatcacgacgcangctgaggcaaacaagctatatggagcta

SEQ ID NO: 3561 - DNA, 450 bp, Oryza sativa
  unsure (1)..(450): unsure at all n locations
  Clone ID: uC-osflcyp078a11b1
gtgatgtccttggctgtctcccctatatctaaagatggtggaggacaattttcaaaggctctgaatcgtttccagaaagaggatcctactttccgtgtaggtctggatccagaaagtggagagacaattatttctgggatgggtgagctgcatttggatatctatgttgaacgcatcaggagagagtacaaggttgatgcaaaggtcggaaaacctcgtgtgaacttcagggaaactatcactcagcgtgctgaatttgattacttacacaaaaagcaatctggtggtcaaggtcaatatggacgagtttgcgggtacattgagcctcttccatcagaatctgatggtaaatttgagtttgataacatgatcattggacangcaattcctttaaacttcataccagcaattgagaagggttttaaggaagcttgcaattctggtttcgtg

SEQ ID NO: 3562 - DNA, 413 bp, Oryza sativa
  Clone ID: uC-osflcyp078a12b1
gtagtttactgcactgacagcgagtatggttgtggggggcccaattatgggtacccgcgagaagataacttagtaaagagcttcatgacctttgactcgtcagagaacacagttgttgtcaggagcaactccgacagtacttttgacattaacacgctagactcaatcgagaacaacctgaacgactactggagcaacataaagtgtcctagcaccgacggcgagaacttatggaagagcgagtggaacagctatggcgtttgctacggcctcaaggagttggactactttaaggccggtgtacagctcagaaagaacgcagatgctctatctggtttagctgaacaaggcataaagtcggactaccaactggacaacacggcgttcataagtgggcagtgaaccaaaaagtg

SEQ ID NO: 3563 - DNA, 470 bp, Oryza sativa
  Clone ID: uC-osflcyp078b01b1
caacataactgcaaattctcttcatcctggatctatcatcacgaaccttcttcgtcaccacagtatcctagatgttctccatcggacacttggtaaattggtgcttaaaaatgctcagcagggggcggccaccacttgttatgttgcattgcacccacaggtgaagggtgtgtccgggaagtacttcagtgacagcaatgtgaacgaggcgagtgagaaaggcaatgacatggagctggccaagaggctgtgggagtacagcatcgagctcatcacctgacctgacctgacctgattcatgaactgaatgagagatactatgtaatgttgaagtttgagagagtgcctgtaaagtaaattgtggtaacttaactatggcagctaccatctggtgtgcgtgcgtacgtacatcaaaccaacatgatactagtagtgagtaataagcatatgcgaatcttcctcctcaaaaa

SEQ ID NO: 3564 - DNA, 585 bp, Oryza sativa
  unsure (1)..(585): unsure at all n locations
  Clone ID: uC-osflcyp078b02b1
ggatgttattagtaaaactacccactgtgatcgaaaggatccattacagtatctagaggaggataataaaacagaaggtgaagatagttctgcccactgtcgcaaggtatctgatatgtccattgtaggaggttctcatggcaagaccaaggagacagcctcttctgaaaatgaggcgaataggcctgatggtttacattcaaccattggaaccagtgacaaagacaaattaggtagcattccagagaactcagcagctgaagaggaactaaataaagaagagcatcccaaattacaaaagggcttggggttcgaaatttctctttgtgggcacatgctacggccaggaatgggccaagcatcagctgaagaagttttccaacaacatcttgttcttgaggaagatttcaagttatcaggatcatcaattatgaaaaatgtaaaccttgttgtcaaatttgatagtcagtatttcttatggagtaaaatttctcatattattcttgggaaagctgtcttggtccgaactctgcacagaacatatngatgctattccgtttgacaccaagaaacacctacttcaag

SEQ ID NO: 3565 - DNA, 328 bp, Oryza sativa
  Clone ID: uC-osflcyp078b03b1
gctccagttacacgagcctagttcaggtagatacaatggcgtccaccgcctctttcatgctcgccgtcttgctggcggtggccgtcgcggcggcgccggcgagggcggtgcgatgcccgccgagcgacaagcaggcgctgatgagagtgaagcagtcgctgggaaacccggcgacgctgtcgacgtggtccctggcgtaggcggactgctgcgagtgggaccacgtacggtgcgacgaggccgggcgcgtgaacaacgtcttcatcgacggcgccaacgacgtccgcggtcagatcccgtccgccgtggcggggctgacggcgctcat

SEQ ID NO: 3566 - DNA, 506 bp, Oryza sativa
  Clone ID: uC-osflcyp078b04b1
aagttttcttcttctctctctcgatcccgtctcgtctggggagtttgttcccggttgcctgcgcgccgctctcctctccggtctactcctccgccgtcgccgtcggcaccgccgccggagctcctccctgctccctctactgggttggcggggagtggatcggggatctgcacgcaggggccgatttcttctcttcgtaaggagtagataacacagaatagttgaagatgagcagcataggcacaggatacgatctgtccgttaccaccttctctccggatggtcgcgtcttccaggttgagtatgccacgaaggctgtcgacaacagcgggactgttgttggaatcaaatgcaaagatggaatcgtcctgggtgtggagaagctagtaacttcgaagatgatgctggagggatctaataggaggatccattcagtgcactggcactctggcttggctgtgctgggttagctgcagatggcaggcaaattgtttcaagagcaaaat

SEQ ID NO: 3567 - DNA, 496 bp, Oryza sativa
  unsure (1)..(496): unsure at all n locations
  Clone ID: uC-osflcyp078b07b1
catcgccggcgagagagagagagttagctagctaggatgggttctacagccgccgacatggccgcggcggccgacgaggaggcgtgcatgtacgcgctgcagctggcgtcgtcgtcgatcctgccgatgacgctcaagaacgccatcgagctgggcctgctcgagacgctgcagtccgccgccgtcgccggaggaggggggaaggcggcgctgatgacgccggcggaggtggccgacaagctgccgtccaaggcgaacccggcggcggccgacatggtggaccgcatgctccgcctgctcgcctactacaacgtcgtcaggtgcgagatggaggagggcgtcgacggcaagctctaccgccgctacgccgacgagtcggtgtgcaagtggctgacgcccaacgaggacggcgactacatggccgtcctcgcccttatgaaccaggacanggtcctcatggagagctggtactaccttaaggacgcagtcctggacg

SEQ ID NO: 3568 - DNA, 496 bp, Oryza sativa
  Clone ID: uC-osflcyp078b08b1
gaaatctcaggttttcttctcgctttcaccggagaaggagaaggagaggaaggtgttgatcgaatcctcctccaatcgcgcgcgattcgatccccgttgctggctcgctcgctccgccgatccctcatccgatctgaatccccgatctgatggcggccaaccccggcaacaagatccgtaacgccaagctggttcttcttggagatgtgggcacgggcaagtcgagcctcgttctccggtttgtgaagggccagtttgttgagttccaggagtccaccatcggcgcggtcttcttctcgcagaccttggcggttaacgacgagacggtgaagttcgaaatctgggatactgcacggcaggagaggtatcatagctcggctccgatgtactatcgtggtgcggctgccgcaatagttgtctacgacatcacaaatgcggcctctttcacacgtgcataaaaatgggttcaagaacttcaagcgcaaggaaacccaaa

SEQ ID NO: 3569 - DNA, 470 bp, Oryza sativa
  Clone ID: uC-osflcyp078b09b1
ttgcttttgaatggctctcggcctccttcatttttcatagcatttgtgtagtgtgtgcaaatccatcatcgcatcttcatatctgaagaaatgaaggtgaccactcagctcaagcccatggcctcctcgtcgacgtcgccgtcgccgtcgcggctgccgcggagcgcgagcggcaaggcgcccacctcgccgccgtccagctccaacgcctcgcgccgccaccaccagcagccgccgcgggcctcggcgtcgacgcccgccaccccggcgccgtcgcgccaccacctcaggtcgctgtccatcagctgcatgacgatcaggaccgacgacgactcgccgccgccggtcgtcacccacaaggacaaggcggcgacggccaagccgctgtcctactactcgtcgatgctgtcgccgaggaagctcatgcagcgcgcgttccgcgcgttccgtcgagcaagtcgtctcgcgga

SEQ ID NO: 3570 - DNA, 480 bp, Oryza sativa
  Clone ID: uC-osflcyp078b11b1
tttcttcgtcgcagatccgatccaggaagagctcgccggcgccgttgccatggcgctcgcggtggagaagacctcgtcggggagggagtacaaggtgaaggacctctcccaggcggacttcggccgtctcgagatcgagctcgccgaggtcgagatgccggggctcatggcgtgccgcgccgagttcggcccctcccagccgttcaagggcgcccggatctccgggtccctccacatgaccatccagaccgccgtcctcatcgagaccctcaccgcccttggcgccgaggtccgctggtgctcctgcaacatcttctccacgcaggaccacgccgccgccgccatcgccagggactccgccgccgtgttcgcctggaagggggagaccctcgaggagtactggtggtgcaccgagcgctgcctcgactggggcgtcagcggcggccccgacctcatcgtcgacgacggcggcgacgccac

SEQ ID NO: 3571 - DNA, 371 bp, Oryza sativa
  Clone ID: uC-osflcyp078b12b1
ttgttgcagcagcagcaaggagaagaagaagagccgggatgcatatcttcgtgaagaccctaacggggaagaccatcacgctcgaggtcgagagcagcgacaccatcgacaatgtcaaggccaagatccaggacaaggaaggcatccctccggaccagcagcgcctcatcttcgccggcaagcagctggaggatggccgcaccctggccgactacaacatccagaaggagtccacgctccacctcgtcctccgcctccgcggtggcatcatcgagccctccctccaggccctcgcccgcaagtaccatcaggacaagatgatctgccgcaagtgctatgcttcgctgcaccccaaggctgtcaactgccgc

SEQ ID NO: 3572 - DNA, 503 bp, Oryza sativa
  unsure (1)..(503): unsure at all n locations
  Clone ID: uC-osflcyp078c02b1
accatttttaacccacttataccgtgaaaaacaatgagcacagttcccgtttccgtttccgaatttcgatccggcactgctatgtcgctgcgctggatcgcttgatgaaggagacgacggcatcaagctccgcctccgccttgtctcccccggcggcggcggcggcctcctcgaggaagtagacgtggccctcgccgccggtctcgtacagcgccgcctcctccccttcccacgcgctccccctcagcacctccacgtacatccgagctcggtcacgcatcgtgtcgagctcccccacggtgaccagtgcccgccggcagccaagcgccgcccattcctccgccggagtggacagcgggttgatgaacgggtggtcgatcccgtacctcccggcgcacatgaagccccatgatctctccgcccgccgcgggagctcggnngtcacgcgttccgacggcatgagctccccgccgcggaagaatgggtggagaagcaccatgcct

SEQ ID NO: 3573 - DNA, 522 bp, Oryza sativa
  unsure (1)..(522): unsure at all n locations
  Clone ID: uC-osflcyp078c03b1
attttgatggtttcggaaccggaattcggaattgcaggaggagtggatgcctttataaatgaggttcttgtccttggcttcaaatactcgatgtgtttcttggctaatcctaatccctagctgcttgtgtgctgcgtgtgcaatttctgacccttttgtggtggtgtatatcaacagagaaatctctagctttttcagcggcgaagcgaatccatggccgagcacctcgcttccatctttggcacggagaaggaccgcgtgaactgccccttctacttcaagatcggcgcgtgccgacatggcgaccgatgctcccgactgcacaacaagccgtcggactcgccgacgctgctgctctccaacatgtacctgcgtccggacatgatcacccctggaattgatgctcagggcaaccccatcgaccctgagacgatccaggccgacttcgaggatttctacgaggacatctntgagggactcagcangtacggcgagatcgagagcctncacgtgtgtgacaac

SEQ ID NO: 3574 - DNA, 162 bp, Oryza sativa
  Clone ID: uC-osflcyp078c04b1
gcttcttcctcctcagcctctcatccaatttttccattccgagaaatcgagcgaggaagctagagctaaaccaatcgaaggccacggccatggctgccgctccagccaccacgtcactgctgagcgcgctgctgcagcttcccctggccccgttctccggga

SEQ ID NO: 3575 - DNA, 416 bp, Oryza sativa
  Clone ID: uC-osflcyp078c05b1
cggattcgtttgctgagcagtattgaggaagcaattattgggataacttaatatccaagagcggctcctgatgcgcaggttatcttcatgggtgtagagccagaatctgcaaataagtaaacagtgtgattctgatttcctagccatgctgttccatacattcatccaacttctaagatgttctttactacacttgacttaaaaattccttccggttcagtcttttatggacaccctatgtgtttttagtattcttagctgttaatattgtctatagcgtaaattgtattatacatacctaaacttgcttgagtgcgaaattactccctgaacttataagcatttttttactgcacatccaataactcttttttttctcagtgatatgaatggtttactggatttattccgttgag

SEQ ID NO: 3576 - DNA, 447 bp, Oryza sativa
  Clone ID: uC-osflcyp078c08b1
ttctgttcctcctctcctccacacatccaggcaggcagcacaagaatcatccgggagagcgacatggccccggttgccgtgggcgacaccctccccgacggccagctggggtggttcgacggggaggacaagctgcagcaggtctccgtccacggcctcgccgccggcaagaaggtcgtcctcttcggcgtccccggtgccttcaccccgacctgcagcaatcagcatgtgccaggattcataaatcaggctgagcagctcaaagccaagggtgtagacgacatcttgcttgtcagtgttaacgacccctttgtcatgaaggcgtgggcaaagtcataccctgagaataagcatgtgaaattccttgccgatggtttgggaacatacaccaaggcacttgggcttgagcttgaccttttcgagaaagggcttggtattcgttcgaga

SEQ ID NO: 3577 - DNA, 513 bp, Oryza sativa
  Clone ID: uC-osflcyp078c09b1
ttcattatctgctatccgagacatgggcgacaagagggcttttaataggatcatgggtgctgttggtgtaccgctcgtcccaggttaccatggggctgaacaagacattgagctgttaaaacttgaagccaataagattgggtattcagttttgatcaagcccacacatggtggagggggcatggggatgagaatagttcaaaggcctgaggactttgtggattctgtattgagtgctcaacgagaagccgcagtatcatttggcataaacacgctgctggttgagaagtatattacccaacccagacatatagaagtccagatatttggagatcaacatggaaatgtgattcacctttatgagagagattgtagtctacaaagaaggcaccaaaagattatcgaggaagctccagctacgaatgtgacagttgagaataagcatatactagtgttgctgctgtatcagctgcaaggcagttggttactacagtgctggaacagtggaattta

SEQ ID NO: 3578 - DNA, 498 bp, Oryza sativa
  Clone ID: uC-osflcyp078c12b1
ttcttttaggaaagcatcgaaccttgcaaagaggggggtttcatttgaagatgttgggggaaatgataatggggatcttgtggtaacaaaaggtgaccagtatgatgtaagagaccatagtagtagcaaagaggtaagaaacctcgggaagccagtggatttagcaagccagtactacatagatggtgctgatgaggttagcttcttgaatataactggtttccgtgactttccgttgggagatttgccaatgctagaggtattactttgtgcatctgagaaagtatttgtgccacttacagttggtggaggtataagagacttcacagatgcaaatgggagatactactcaagtttggaagtagcgtcagagtacttcaggtctggtgctgacaagatttcaattggtagtgatgccgtttttgctgctgaagcctatttgcagactggtgtaaagacaggaaaaagcagcttggagcaaatctctagagtatatgg

SEQ ID NO: 3579 - DNA, 340 bp, Oryza sativa
  unsure (1)..(340): unsure at all n locations
  Clone ID: uC-osflcyp078d01b1
ctcgtcgtgtcgctccggttgctccattgatcggacgatctggtgaattgcatttgtgctgggagaagtaaaaaaaaaaggaaagagaaaaaaaagaaaatcacgccaaaaaaaattctcattccatttcgatttggttgcatgctaccactactactacattgctcatctgccatttagattagctcctttttcttcgtcttttgggtgagtgcgtttgggtgctcttgtgtaatcctccaataatggccgtacctacggtacttgtcccatcctgtggatcatcgtcctcctttccacatgtggttttatcaaanaaaaaaaaaaaaggaatcctacc

SEQ ID NO: 3580 - DNA, 573 bp, Oryza sativa
  unsure (1)..(573): unsure at all n locations
  Clone ID: uC-osflcyp078d02b1
agcgtattctctgaggatattcatggtggtgagggacttcctgtcaacgttggatcaagtttgcagggaggttggccggatgcagcaggacagaacagtcattggtggatcggctaggtcattccgcatctcagcaacatcctcattgccagttctaagtctctatggacaacggagagaaaacaactccgatgatgatagttcatcgtcatagggtaagaaggataaggaacatactgaattttggaatgaacatagacgcacaaacttttacagcttatagcagatgcagcaaatgctacattgctgctacaatgacgatgacaaaggaagcacatgtgtaccgtggggaacaccatgtttaggagagatcaggggtttatacacttggatcatgtggaaattcttttgtacaaaagaataataattataacaaagctctttttgttgagtaatttgcaatcagcaggctgagaaaagagtctcactttagtaagtatctgcagttgcttgcacgataactgcaatcttcttatgtaantattatattcatctagttgccactagtactaa

SEQ ID NO: 3581 - DNA, 508 bp, Oryza sativa
  Clone ID: uC-osflcyp078d03b1
gtcatgcggctgcaggacatcggcatgatcgacgccgtggccggcatgcgcgccctcgacatgaacaccgccgaggacgagatcgtccgcctcacccgcgaggtcgtccccggcatgatcgtcaccggcatggaggtcgccgagatcgacggcgccccgagaatgggcccgacgttcggagccatgatgatctccggccagaaggcggcgcacctggcgctgaaggcgctcggacggccgaacgccatcgacggcacgatcaagaaggcggcggtggcggcggcgcacccggagctgatcctggcgtcgaaggacgacggcgagatcgtggacgcctgagcgaatagaacagggtaaaaaaaaatccgcaagacgtggtggtgacacggaggcgttggggacgagaagaagatgtggactttcccctgtgtttttttttcgggatttgctttgatccccttgtttgttttagctctggatgttgattagcgtcttgttcatagcaatt

SEQ ID NO: 3582 - DNA, 440 bp, Oryza sativa
  unsure (1)..(440): unsure at all n locations
  Clone ID: uC-osflcyp078d04b1
gacgtgcttgtcctcgacggcaacgacatcgagctcgtctggcgctcatcagccctcatgaaccagaaatgccacgtgaagaacaaggatatcaggcaggtcttggatggtatctacgtgagcgacaagggacaccatcacagaggatgcgtaaactgctatgttcacctagtatcatgaagtgctgacacttgtctcccgtgtctgatcatcctctgagttgcgacactatgagagactgaattttgttatggtgggttatttnggactgcatggagcatggactttgagactgcgtagtgtaactgtgtgagattatggagggtacctatcattcacgtaagacagtttactggaagcattaagggttagtttggcagtgtgacgaggtttgagcagaataaaccaacacaaggacaaggagaatgtggagcattagt

SEQ ID NO: 3583 - DNA, 582 bp, Oryza sativa
  Clone ID: uC-osflcyp078d05b1
gcgtgctctccctagcccacgccgccgcctcctcctcctcgtcgcgcctcccgcccccgctacgccgcgccgcaaactctcctcactgcgtcgccgccgccgcgcctcccgcactcttctagcacccagatccagagccggtggggaagttggatgtgacagatcaaggccgccggatctgttgagctcagcagcggcagcagcttggcgatgatggcagcaatgtctcagacatgccctcctccccactggtgacaagcatgaggccacggccgaagcttatctttcgcacctgcatcagaccttgtaattctagggaagaagctcggtcaactgcgaccttataacgcagggaaggatggaaaggagtggctcctgcttgaagagctgcagggacagatcgccaggatacagggcagtcttgaggaatgtgaaccatggcaatctgcatagcccttcatttggaagctatgtccccccaactattgagtactattttttagctccacctcccttttcattcaggtaaaatggaaatatcattgaaagttggaaaaactatgtattggcgttgaatctaca

SEQ ID NO: 3584 - DNA, 350 bp, Oryza sativa
  Clone ID: uC-osflcyp078d07b1
gtaagtttcacaaatttgcagaggccctgaagacatcgagaccaggttctaggtcatcaaggaaggaccactgataaacaaatagcataggaacaatctgctgcagagtgcagtaggcccatcttcctggatgtatatatttctccagttcttgatgggagattacttatagaagatgctactggaataaagcacacatgctttattctgtgtaaaatgtacaatacagtatatagtagtgtagtgtactaacctttaatcccagccctcaaactattcatttggggttggcttgtacttattcagtgtattgttcatgtattgctctatgcatacttcactccagctac

SEQ ID NO: 3585 - DNA, 493 bp, Oryza sativa
  Clone ID: uC-osflcyp078d08b1
tgctaacaaagtcagattgggtgtcaattaggaaatgacctccatgggcaattgattcctggggactggggtgtttaatttatgagctcttttctggtgcaaagctaaccaggacagaggaccttcggaacactgcttcaatcccaaagtctttacttccagattaccagaggctcttgagttctgccccttctcgtagaatgaacccttctaaacttattgacaacagtgagtttttccagaacaagttagtagagaccatacagttcatggaagttcttaacttaaaggacagtgttgagaaagatagctttttccgtaaactaccgaacatagctgagcagcttcctcgtgagatagtcctgaaaaagttgctccctgtgctggcatctgctcttgagtttggttcagctgctgcaccagccttggttgtattgttgaagatgggttcctggcttccagctgaccaatttagtgcaaaggttttgcctac

SEQ ID NO: 3586 - DNA, 559 bp, Oryza sativa
  Clone ID: uC-osflcyp078d10b1
tcatttcatggtaaacggggccgccctcgcttggatgctaagtcccacactcgagctcctgcaccagaacctaagcaactgccctgtcggacaagtagtaggagagcgactaattgtagtagtaagacagttgcagggcttgatgcgtcagggagtgtggtgaggaaccagcttgcacagaacattgtacaggagggtagttccagtgtgatttcaaggacaccatgtcaggagctaccgctctcaattaggttgacggaccaacaaaacgagcatcaccttgtgaatggttcgtctaattctgagaacttagtgaaggtacctccatctcagggtggccaggtaactggtgccaagaagcgtaaatctggaaatgtgaggaggtttgagcagaataaaccaacacaaggacaaggagaatgtggagcattagtggtggctgaggatgttggttccactggaagaagaactggcgataagaataagacagagggctggtctaccgagttcatatcaccaagatcataagccagtgcgatttgcagcagtggaacaacga

SEQ ID NO: 3587 - DNA, 498 bp, Oryza sativa
  Clone ID: uC-osflcyp078d11b1
ctcaatctctcatctccagccgcgctgggtgggtttatatagataccagccgcggcttcacccaaaccctagccctattgcgcgcgggagacccgccggcgaggtgcgcgcacggagcgagccggggggcgggagggccagccgccgtcgacgacgcctgcagcagcgaggatgccgacggggtcggcgacgcagttacggtacacgcagacgccgtacaaggtgctccacctccggaacatgccgtgggagtgcaccgaggaggagctcgtcgagctctgcaagcccttcggcagggtccgtaacaccatgtgcaacgtcggcgccaaccgcaaccaggccttcgtcgagttcgcagatcaaaaccaggcaatttcaatggtttcatattatgcttcttcttcagaacctgctcaagttcgtggcaaaactgtatatatccagtacttacacagacaagaaattaccaacaatagaggaactggtgattcctctggc

SEQ ID NO: 3588 - DNA, 509 bp, Oryza sativa
  unsure (1)..(509): unsure at all n locations
  Clone ID: uC-osflcyp078d12b1
tttatatcgcgagcgccgccctttttttttttggttgtttcgcatacctaacaaaaggggaacatcactgccaagaaaacaaagtttcggtgaaagttctctttcattggctacaggccacagccgataagcatctacaggagtagattagtagtcgattgcagtggaaacgtcacatgcccgatggaagttccagctccggagatggtgtatggaattcagaaacacgcttgaacaaacgtagcagcagccaaagcagccagccattgacgcttagcacaatttgctggccattgacgcttagcacaatttgctgacaatccattggattattgctccggttctgattctgcttggcaaactgggaggtggtaagtatccaattgccagtatttctgcttcaccccattccatatttcctctgaaagacaatctttgactgggagcgggatgaactgtgtcgagtagccaagattngccaactctaacgctacgagctggcaatacac

SEQ ID NO: 3589 - DNA, 538 bp, Oryza sativa
  unsure (1)..(538): unsure at all n locations
  Clone ID: uC-osflcyp078e01b1
aacattcatgtacggccggaagctatctaaggactgcagctatgggcaatttgttctgctgtgttcaagttgatcagtctacagtggccattagagaacagttcgggaagtttgatgctgtgcttgagccaggatgtcactgcctgccttggtttgctgggaagcgtatagctggccatctcacactcaggttgcagcaactggatgtgcgctgtgaaaccaagacaaaggacaatgtgtttgtcaatgttgtggcatcgatccagtacagagctttggctggcaaggcaaatgatgctttctacaagctgagcaacacaagatctcagatccaagcttatgtcttcgatgtgatcagggcaagtgttccgaagctgaacctggacgacgcatttgagcagaagaacgacatnagcaaggcagtggaggatgagctggagaaggctatgtctgcttacgggtttgagattgttcagacgctcatcgttgacattgagccagacgagcacgtgaagcgagcgatgaatgaaatcaatgc

SEQ ID NO: 3590 - DNA, 455 bp, Oryza sativa
  unsure (1)..(455): unsure at all n locations
  Clone ID: uC-osflcyp078e02b1
cggacgcgtgggggagtgcatctcgatccacatcgggcaggccggtatccaggtcgggaacgcgtgctgggagctctattgcctcgagcatggcatccagcctgatggacagatgcccggtgacaagaccgttgggggaggtgatgatgcttttaacaccttcttcagtgagactggtgctgggaagcatgtcccccgtgctgtcttcgtcgatcttgagcctaccgtgattgatgaggtgaggactggtgactaccgccagctcttccaccctgagcagctcatcagtggcaaggaggatgcagccaacaactttgcccgtggtcactacaccattggcaaggagattgttgatctgtgccttgaccgcatcaggaagcttgccgacaactgcactggtctncagggcttnccttgtgtcaacgcttgtggaggaggaacggggctccgtctcg

SEQ ID NO: 3591 - DNA, 445 bp, Oryza sativa
  unsure (1)..(445): unsure at all n locations
  Clone ID: uC-osflcyp078e07b1
gtttatcgagaggaggagaagaagaaccgcacgacagcgcaccccacctcccgatcgccaagaaccacaatccccaatccacccaataactctaattcctcccccgattcgccctcgaccaagaaccactcggatcgatcaaagccgccacctttccaccaaatccccaatctttttttttcttcttcttttcttgcaattgatgcgcttcgccatcgggatttgaggggaggaagaagaaggggatggcgtgcagggggttcttcgagtgggtcctgaagctgctcaacttggtggtgatggtggtcgggctggccatgatggggtacggcgcctacctcctcgtggcgtggctccagctgctgccttcgccgccgacgctgccgcctgcgccggcggtggctcccggcggcggcngaagcggccaagatggtgcggctcggga

SEQ ID NO: 3592 - DNA, 555 bp, Oryza sativa
  Clone ID: uC-osflcyp078e09b1
gtcaacttggagaagttccttggaactattccaatggtgttcaatgttgttatcctgtctccgcatggatactttgcccaatccaatgtgttgggataccctgatactggtggtcaggttgtgtacattttggaccaagtccgcgctttggagaatgagatgcttttgaggatcaagcagcaaggccttgatatcacacctaagatcctcattgtaaccaggctgttgcctgatgctgttggtactacatgcggccagcgtgtggagaaggttattggaactgagcacactgacattcttcgtgttccattcaggagtgagaatggtatcctccgcaagtggatctcccgttttgatgtctggccattcctggaaacatacactgaggatgttgcaaacgaaattatgagggaaatgcaagccaaacctgatctcatcattggcattacagtgatggaaaccttgtcgcactctgctggctcacaaattaggagttacccagtgtaccattgctcatgccttggagaaaaccaaataccccaactcagacatata

SEQ ID NO: 3593 - DNA, 531 bp, Oryza sativa
  unsure (1)..(531): unsure at all n locations
  Clone ID: uC-osflcyp078e10b1
tggtgctccattgacgtatgagactgttgtacgtgctacggggagttttaatgcaagcaattgtattggaagtggtggctttggagcaacatacaaagctgagattgcacctggagttctggtggcgataaagaggcttgcgattggaaggttccaaggtattcagcaattccaagcagaggtaaaaactcttgggaggtgccgccatcccaatcttgtgacactcataggataccatctcagtgattcagagatgtttcttatatataattttcttcctggtggtaatttggaaagatttatacaagaaagggctaagagacctattgactggagaatgcttcacaaaattgctctagatattgcacgtgcacttggattccttcatgatagttgtgtcccacgcattctgcaccgagacgtgaaaccaagcaacattttacttgataatgaatacaatgcatacctttctgattttggattagcaagactactcgngaattcagaaacacacgcaacaactggtgtagc

SEQ ID NO: 3594 - DNA, 545 bp, Oryza sativa
  Clone ID: uC-osflcyp078e11b1
gtactggaattcgatcttacaccagtataccgagcggactacattcacacatgccttggtcttggggaaaaattccgagaatactactacaataacaggcttatgcaacttaatttggacctgcaaattcccacgacacaacctttcatggagtctcatcagcacttccttgctcagatagctgggttctttattgttgaggaccgtgtccttcgaactgcagatgggcttctttctgatagtcaggttgagacaatgtgggggacagctatttctaaggtcacatctatcttagaggaacagttctctcgcatggatgctgccaaccacctcctactcgtaaaagactatgtcactcttctgggtgcaaccatgaagaagtatggataccaaaccacatcattgcttgaaattcttgagaagaatagggacaaattctatcaacttcttctttctgattgccggaaaaagatagatggcatcttcactaaggactcatatgagcagatgatcattaagaaggaaaatgagtaccacatgaatgt

SEQ ID NO: 3595 - DNA, 438 bp, Oryza sativa
  Clone ID: uC-osflcyp078f01b1
ctccctcctcgcttcgcgtccgccgccgccgtcccggagaggtaagttcaagaggcagccctgtgaagctccaatggctcctaaagctgctcctgccaagaagggtgatgccaaggcccaagccttgaaggcagccaaggctgttaagtctgggacagccaagaagacgaccaagaagatccgcacatccgtgacatttcaccgccccaagaccttgaagaagtctagggaccccaagtacccaagagtcagtacccctgggaggaacaagcttgatcagtaccagatccttaagtatccccttaccactgaatccgcaatgaagaagatcgaagacaacaacactctggtcttcattgttgaccttaaggctgacaagaagaagatcaaggctgctgtcaagaagatgtacgacatccaggcaaagaaagtgaacac

SEQ ID NO: 3596 - DNA, 517 bp, Oryza sativa
  unsure (1)..(517): unsure at all n locations
  Clone ID: uC-osflcyp078f02b1
gtgaaacatcaaaaaaaatcaaacaaaaagaaaaaatgttgcccatctgtgaaattcgcaaaaccctagcgcggcggcgatgtcgaacacgagggtgttcttcgacatgaccgtcggcggagctccggcggngcggatcgtgatggagctgtacgcgaaggacgtgccgcggacggcggagaacttccgcgcgctctgcaccggcgagaagggcgtgggcaagagcggcaagccgctgcactacaaggggagcaccttccaccgcgtgatcccggagttcatgtgccagggcggcgacttcacccgcggcaacggcacgggagggggagtcgatctacggcgagaagttcgccgacgaggtgttcaagttcaagcacgacagccccggcattctgtccatggcgaacgccgggcccaacactaacgggtcccagttcttcatctgcaccgtgccctgcagctggctggacgggaagcacgtcgtgttcggccgcgttgtcgagggcatggacgtcgt

SEQ ID NO: 3597 - DNA, 588 bp, Oryza sativa
  Clone ID: uC-osflcyp078f03b1
gcgccacgttccgctccgccacgcgccgccgacgccgatggcgccgttccccgtggtggggaggaggcagaaggcgacgatacacaagcagaacgacttcaagcagcccggggagaggtacaggtcgtgggcgccggatagacaggagaggttcatccgccgcttcgccggcgagctcgcgcaccccaaggtctcccctgagctccgcgccatctgggtcaactacctctcccagtgtgatgagtcgttgggggtgaagattgcgaataggctcaacgtgaagccaagcatgtgaagaaactaaggcacaagaatgcatcatctcttgttaattaattggagtactaccaacaaataaggccagacaatgtcagatgcacgcatcttctgttgtcgttgggccatcttttgtatgcatcctattgttaattactagtacatgatatccaagtgatcatctgcaaggctacagaaattcttgtatacgagtaattaaaagaaaccaaaatggagcctgcatatgtgtaacttaattaatgtactggcgtattaatgccactgctgcatgttgaatacttcatcaagagt

SEQ ID NO: 3598 - DNA, 549 bp, Oryza sativa
  unsure (1)..(549): unsure at all n locations
  Clone ID: uC-osflcyp078f04b1
gcggcagtgcatacagtaaaaacgacagcaacgcaaaaactccgggctccctcttccaagatcccaaaaccacaaaccgatcaaaacccacacaaaaaaccgatcaaacggagatcaaaaaacgaaaccaaaaaagagaaaaattcccaccgaaaaaggagaaaaaaaaaaccgccgtcatcatggcgcgcttcttccgcgactccacctcctcgtcccgctctagcagtgacctcgccgtcgacgccgacgcctccgcctccgccgccaccaccgccgactcgtcgcgcacgccgccgctcccctccccgtttcccgacctcggggtgcccctctccgccgcggaactccgcgccaccgtctacgaggtcctcgtcgccgtcttccgcgccaccggcgccaagcccctcacctacatcacgcagtccgtagcctccgtcgtctccgccgacgnacccgncccctcattgtcgtcctccatccaccgctcgctggcgtcgacggcggcggcgagcagcagcaaggtgaagaaggcgctcgggctgagga

SEQ ID NO: 3599 - DNA, 545 bp, Oryza sativa
  Clone ID: uC-osflcyp078f05b1
agcatctactagggtttctctctctctcctccccccctacacagctcgccgctgccgccacaccaccgatggggaaggcgagcaagaagtccgtggccgtggccgtggccgtcgcgcccgctgctgtgccggccaaggggaagggcggcaagaagcggtaggcggaggacgagatcgagaaggcggtgagcgccaagaagcagaaggtcgcggcggcgccgccggccaaggccgtccccgcgcccaaggcggacgccaagaaggccaagaagcagccgccgcccaagaaggccgcgagcagcagcagcggcagcagctctgaggaggactcgtcggagtccgaggaggaggtcaaggtccaggtgaagaagactactaagcctgtcaagcaggagtcttcttctgatgagagcagcgatgagagctctgatgatgaggatgctaagcctgcggatccggttgctaataatggtcttaagaaaggcaagccagcgagcagcgattctgagagtgattcagatgatgaaatgggtgaggacgagaaa

SEQ ID NO: 3600 - DNA, 551 bp, Oryza sativa
  Clone ID: uC-osflcyp078f06b1
ccgttttcttccctccgactccggccacctccgcggcggcggagcattctagggtttcgcgccggctcgccgccggcgtacggagagggagggtgtaacacgcgcaggcctgcgccgtcgtcctgctctgggaacttccgcgtgcagcgagggatggacgagtgggttcgccaggccgaggtgtgggtgggacaagccgagaggtggatccggcagcagtctcccgagcaggtttacgtcgccgtcgcggtggtcgccgtgacggttctgttgctggtcgcagtttcgtggctgaaattcttgaaaggaaacaccatagtggtatctggggctcagtggtaggggcaaaactatttttttttaccagcttcgggatggatcaacacatcaaggaactgtgacttcaatggaacaaaacaacgatactttcgtgcttcattctgagctggagaggagaggcaaagtaaaacctgttcatgttgttgacgttcctggtcatgcaaggctcaaacccaaacttgatgaagtcctgtctcaagcagctggaatag

SEQ ID NO: 3601 - DNA, 552 bp, Oryza sativa
  Clone ID: uC-osflcyp078f07b1
ttcatcggcctctttcccttcccttcccctccgagcgaatcccctcttctcctcctcgcggcgctcgctgagcatggcggcggagggggaggccaagaaggacagcgccagcaaccctcccgggggaggaggcggcggaggtggaggggaggaggaggactttcccagccctgctgtccaaccaggccctgtcttttatcggcgagaagggcgtgggcaagaccggtatgcccttgaattacaaggggagcaccttccaccgcgtgatcccggagttcatgtgccagggcggcgacttcacccgcggcaacggcacgggaggggagttgatctacggcgagaagttcgccgacgaggtgttcaagttcaagcacgacagccccggcattctgtccatggcgaacgccgggcccaacactaacgggtcccagatctttatctgcaccgtgccctgcagctggctggaccggaagtacgtcatgttttgaccgttcctcgagggcatggccgtcgtcaaggccatcgagaagggggatcccgcgggggagcacc

SEQ ID NO: 3602 - DNA, 473 bp, Oryza sativa
  Clone ID: uC-osflcyp078f08b1
ccatttcgcggttccgccatggccaccgccgcggcgctcgcgctccacacgcagttccggccgccgcgctcgcctcgccgtctccggcagcatctagccttaccctcaggagtcctcatccgatcccccgtccgcgcctcggctgcgtcggcgtcggcgtcggcgccggcgcagcgggaggccgccgccgcgggagtcccgtggggctgcgagatcgagtccctggagagcgccgtgtcgctggagaggtggctcaccgattcggggctccccgagcagaggttggggatacagcgggtggacgtcggtgagcgcggcctcgtcgcgctgaagaacatccgcaagggggagaagctgctcttcgtgcctccctccctcgtcattacagctgactcaagatggggcttgcctgaggtggggaatgtgtgaaagagaaaatttgggccggattggtcgcttattggtacctacct

SEQ ID NO: 3603 - DNA, 487 bp, Oryza sativa
  unsure (1)..(487): unsure at all n locations
  Clone ID: uC-osflcyp078f09b1
cacatacacacagacgcactcacacactcagcttaagcgagcgagcgagtgaacgagagagagagacagagatggcgagtgttgcctccttcccggtgatcaacatggagaacctggagaccgaggagaggggcgcagcaatggaggtcatccgcgacgcctgcgagaactggggcttcttcgagatgctgaaccatggcatcgcgcacgagctgatggacgaggtggagcgggtgagcaaggcgcactacgccaactgccgggaggagaagttcaaggagttcgcgcggcggatgctggaggccggcgagaagggcgccgacgtgaagggcatcgactgggagagcaccttcttcgtccgccaccgncccgtctccaacctcgccgaccttcccgacgtcgacgaccactacaggcaggtgatgaagcaatttgcgtcggagatcgagaagctctcggagagggtgctggacctgctgtgcgagaa

SEQ ID NO: 3604 - DNA, 584 bp, Oryza sativa
  unsure (1)..(584): unsure at all n locations
  Clone ID: uC-osflcyp078f10b1
gagttttggaatttcttagtgaatgatattattgatattcttgaagaagattgtagaactgcaaatagttctcctgagactactcctgaagaggtctcaaatggggcagccaatgctttagcaaatggagccagagaaaggccattagttacattggtgcacaggacttttcagggtattttgaccaatgaaaccaaatgcctaatgtgtgatactatcacagcaaaagatgagacgttttttgatttgagcattgacgtggaacagaatagttcgctcacaagctgcctgaagagcttcttttccactgagattttaaatggcgaggataagttcttttgtgacaaatgcagcagtttgcaagaagcacacaagagaatgaagataaagaaggcgccacacgtattggtgatccacctgaagcgcttcaagtacgttgagcagcttagccggcacaagaaactgtcgtaccgagtggtatatcccctggagctgaagctgggcagcatgtctgaagacgctgactgcgagtactcccttcttgcnngtgtagtccatgtgggagcagccccaaccatggacac

SEQ ID NO: 3605 - DNA, 454 bp, Oryza sativa
  Clone ID: uC-osflcyp078f11b1
ttttatagcttagataactcttatgatgttttaatttggacatttgtgtactttgtagatgatccatacgagacctagtgtttgattaaaaaaaaaaaaaaaaaaaaaaaaaaaaaaaaaaaaaaaaaaaaaaattgaaaaaaaacaagaaaataaaaaaaaaaaaaaaaaaaaaaaaaaaaaaaaaaaaaaaaaaaaaaaggggggggcctttttaaagaatcaaaatttattaacgggtgattgaaaagaaaaatttttttaatgggggacccaaaaataaaataagggggcgccatttaaaaagttactgatgggaaaaacctgggcaaaaccaaaaaaaatatttttgaaaaaaatccccttttaacaaattggggaaaaaaaaaaaaggcccaaacaatacgcctttccaaaaattgtgcaaacctaaatgacaaagggaacacccctt

SEQ ID NO: 3606 - DNA, 549 bp, Oryza sativa
  Clone ID: uC-osflcyp078f12b1
cgcagagctgcaagtaccccgacgaccacccgtcggggctctgcgagtcggcgaggaaagcggcgtatagccggattggcaacatcgacatctacaacatatactcgtccacctgccacgaacagaaagtcaggccctcagcctccaagtgcatggatttggctgatccgtgctcccaatacttcgtggaggcgtacatgaaccagccccaggtacagaagacgatccatgcgaacacggagttgaagtatccctggactagatgcagggtttacaacctagaccacttcggcgactcgccaaagtcaatgctgccatacatcaaggcagtgataaccggccgcatccgcatctggatattcagcggcgacttggatgcgatggtgccggtgacggcgacgaggcagtcgatggagaggctccagctgcgggtggcggcggactggcggccgtggtcggcggacggcaaggacgttgccgggtacgtgatcgcgtacgacgggctggtgttcgcgacggtgcgcgggtcccggcacatggtcacgatcg

SEQ ID NO: 3607 - DNA, 532 bp, Oryza sativa
  Clone ID: uC-osflcyp078g01b1
caataagccagtctcacttcctcttgactctactgtaccatctgccagcagtaataagcctatgaatatacctgtgccaacctatctaccttcctctcagccaccattggctaatattgcagcaagtgcagccactgttgcagaaccagttacattggtcactcctggccaacttctaccaaccatttcatctacagtcctttcggctgatgccttggaaacagcttcagctatgattccatcccctaaggctgcctcctctatggtctcatcctctcaggctgccttggctgcatcctctcaggttacttcctctgtagtttcaccctcagaggatcaatttgcttcctcacctgttccatcacatcaacagctggagcaaaacaatgaagataggcacaccaagaaacctgaatggaaggctaaacaacactctgttgctccatccaacaaggaacccctgttgccagcacctaagcctactcttcagaagcctggtggagcttcctcatacattcaatacaacaataga

SEQ ID NO: 3608 - DNA, 68 bp, Oryza sativa
  Clone ID: uC-osflcyp078g02b1
caaattaattaaaaaaaaaaaaaaaaaaaaaaaaaaggagaggaataaaaaaaaaaaaaaggggagag

SEQ ID NO: 3609 - DNA, 457 bp, Oryza sativa
  Clone ID: uC-osflcyp078g03b1
gctcccgctctgaacttaacgctgcaaaaaaaatcttggagtgtataactgtgtaagctttgctcaatggcggaggagaacaagtccggctccggcgacctgatggcgagcggcaaggtagtcgcggaggcaaccatgtcggtgttccagcagaagagcgtggagggcgtcgacaagaaggaggtcgccggcgccgccgcggacctgctgcactcggcgtccacctacggcaagctcgacgacaagccggtcgggcagtacatcgacaaggcggaggggtacctcaaggacttcagctccggcagtggcggcgccgcaccgccaccgccggcagccggagacgccgcagcgccgaagccagcggcggaggagctcgccaaggagcctgcgccggctgagaaggaggaaggcaagccaccgtccgtcgtcggaagggttcggtctcgacgacgtcatg

SEQ ID NO: 3610 - DNA, 503 bp, Oryza sativa
  Clone ID: uC-osflcyp078g04b1
gaaccttctggtctggtttgttccatgacggtcaaggatgagatgttgttggctggtaccggagatggtcgcatcatggtttggaaaattcctgacaagaagggtgactctggaccagtggcaatcctcagtggccatgagcgccaagtgatttcgctcggtgtctcagtaacaaggctatactctggctcacttgacaagaccatcaaagtatgggaccttaaaactctgcagtgtgtccaaacactctctgagcacaaagctgctgtaacatctgtgctttgttgggatgaaaaactattatcttgctctctggacaagactgtaaagatctgggctgcttcaaagtctggagaccttcaagtgatatatacccattctgaggagcatggagtacgcacgctctttggcatgcaccgtgttggaaagacgccagttctgttttgctccctccacaacagcaactgcatacgtctgttcgacctgccatcgttcgacgagat

SEQ ID NO: 3611 - DNA, 475 bp, Oryza sativa
  unsure (1)..(475): unsure at all n locations
  Clone ID: uC-osflcyp078g05b1
gttgataccttcctcctacctgcactgcacaccttcattcgatttgttactccttcttgttttcttcttggattttaggattttaattttgacgagatttggtctgcatatagctatacagccatgtagttactactactacttagtataattcagtatgatgagatacatatgagcagtgataagcttttgccttggtgttttgctgcagagcaaaaaatccaaggaaaagttgatcagtgtgtggtgtgcttgttgttgtacatatttgtatgagtattattatatctctgtacccagtttactgtagtagaataagatttggaggtgtgagatgtnnaanaaaaaaaaaaaaaaaaaaaaaaaaaaaaaaaaaaaaaaaaaaaaaaaaaaaaaaaaaaaaaaaaaaaaaaaaaaaannaaaaaaaaaaaaaaaaaaaaaaaaaaaaaaaaaaaaaaaaaaaanngggggggg

SEQ ID NO: 3612 - DNA, 555 bp, Oryza sativa
  Clone ID: uC-osflcyp078g06b1
gttttgttggcccccattcctcccccaccccggtgtcgtgcgcttcgacgatcgcgtcggcgcctttttcccctatggcgctgccgaatcaggggaccgtggattaccccagcttcaagctggtcatcgtcggcgatggcgggactggtaaaactacatttgtgaagaggcatctcactggagagtttgaaaagaaatatgagccaaccattggtgtcgaagttcaccctctagattttaccaccaactgtggtaagatccgcttctactgctgggacactgctggacaagagaagtttggtggacttagggatggatactatatccatggtcaatgtgcgataattatgtttgatgtcactttaaggctgacttacaagaatgttccaacatggcatagggacttgtgcagggtgtgtgaaaacatccccattgtcctgtgtggtaacaaggttgatgtgaagaacaggcaggttaaagccagcaggtacattccacaggaagaagaatctgcagtactatgaaatttctgccaagagcaactacaactttgag

SEQ ID NO: 3613 - DNA, 479 bp, Oryza sativa
  unsure (1)..(479): unsure at all n locations
  Clone ID: uC-osflcyp078g07b1
ttttaatggagtgttcttgaaggtcaacaaagccaccattaacatgctgcgcagggttgagccatatgttgcatatgggtaagctaccataattacattcgagcctaatatattatatatatgcaccatcttgctattttattttgaattaccatctgttgttttactagaaatgtgatcttggcatttactagaataactggaacatttcacaattaaaggcttctaaaattgcttacactgaatttgtgttattaagtagcaactgtttgcatcattgtgttctgcatcaaaatcataacaaattgtagtcaatcaattttatattttaatttgaattgtctagggtctgaaatagttcaagcccctaatgactagagttgattattgatcttcttactagattagtgattcttatgttntaggtacccaaatttgaagagtgtccgtgaattgatctacaagaggngctatggaaa

SEQ ID NO: 3614 - DNA, 456 bp, Oryza sativa
  unsure (1)..(456): unsure at all n locations
  Clone ID: uC-osflcyp078g08b1
gcgtgggactaccgggggcggccggcggcgaggtcgcggacggggaggtggggcgcggcggcgatgatactggtggcggagctgaacgagcggctgacgacgctggggatcgccgtgaacctggtcacctacctgacggcgacgatgcacgccggcaacgccgaggccgccaacgtcgtcaccaacttcatgggcacctccttcatgctctgcctcctcggcggcttcgtcgccgactccttcctcggccgctacctcaccatcgccatcttcaccgccgtccaagcctcgggggtgacgatcctgacgatctcgacggcggcgccggggctgaggcccgcggcgtgcgcggcggggtcggcggcgtgcgagcgcgcgaccgngtcgcaaatggggtagctgtacctggcgctctacctgacggcgctgggcaccggcgggctcaagtcgagcgtc

SEQ ID NO: 3615 - DNA, 514 bp, Oryza sativa
  Clone ID: uC-osflcyp078g11b1
ttggtgatcacggcgtactcgcagcagcacacgttcgccctgcagcaggcgagcaccgtggaccgccgcctcgcgccggggctgtcgtcgttccagatcccagcaggctccatgaccgtgttcaccctgctcgccatgctcaccacgctccttgcctacgaccgtgtgctcgtcccgctagcgcgccgcgtcacgggactggaccgtggaatctcctacctccaccggatgggcgttgggttcgccatctccgtggcggctaccctcgtggccgggttcgtggagcgccaccggagggagtccgctgccgccgcgggcaccaccgacgcggggacgtcgccgctgtcggcgtactggctggtgccgcagtacgcgctccacggcatggcggaggcattcaactccgtgggtcacctcgagttcatgtacgaccagtcgccagagagcatgcggagcatggcgacggcgctgttctggctgtccatctcgctgggagctacgtcagcacgatgct

SEQ ID NO: 3616 - DNA, 365 bp, Oryza sativa
  Clone ID: uC-osflcyp078h01b1
cctcgatccgcctccgcctccgcctcgtcgtcgccgtcgacgcccccacccaccatggcggcgctcctcgcccggcaggcagcgcaggcgctccgcgcgcgccagatggcgcagctcgggccgtccgcgacggcgatgcaggggcacatccggacctacatgggcgcagggaagcccacgaggttcaaagaggatgaggagaaagagaagcttgcaaaggagatagcgaaagattggaatgctgtatttgaaaggagcatcaacacattgtttttgactgaaatggtccgcggtttgatgctgacactcaagtacttcttcgagaagaatgttacaatcaactatccatttgagaagggtccttt

SEQ ID NO: 3617 - DNA, 437 bp, Oryza sativa
  Clone ID: uC-osflcyp078h03b1
ggaaatctttgctaccggtattgtgcttggaagctagctggctctgatgaccgttattttgttctgggccatgcacaagacagactttttcacggacaaattcggtgtcagatcaatcaggaacagtgaacatgagatgatgtctgcactgtacctccaagtcagtattgcgagtcaggccctcatctatcgcacccgttgtggcagctggtccttcatcgaacgccctggtcttgtcttggtcactgcattcatgcttgcacagctggttgcgacattcctcgctgtctatgccaactggggctttgccaggatcaagggcattggatggggctgggctggcgttatctggctttacagcattgtgttgtacttgcctcttgacatctctaagatgattatccgctctgagctgagtggaagggcctgggacaacc

SEQ ID NO: 3618 - DNA, 547 bp, Oryza sativa
  Clone ID: uC-osflcyp078h05b1
cacaagctctagcttacagctcactaccagtgtacattgttgctagttagctagagctagatctcgatcgagacaatggcgggtgctcgcaggacgatggcgctggttgcgttggtggcggtggtggcggcggcggtggtggcggagagggcgtcggcggcggtgagctgcggcgacgtgacgtcgtcgatcgcgccgtgcctgtcgtacgtgatggggagggagagctcgccgtcgtcgtcgtgctgcagcggggtgaggaccctcaacggcaaggcctcgtcgtcggccgaccgccgcaccgcctgcagctgcctcaagaacatggcctcctccttcaggaacctcaacatgggcaacgccgcctccatccccagcaaatgcggcgtctccgtcgccttccccatcagcacctccgtcgactgctccaagatcaactaattactagcttgatcatctccagctgagatcgatatgtatgggagaatctagagagtgactgttcactgctagctttgttatttcttgctgatgcgacgtgcactat

SEQ ID NO: 3619 - DNA, 444 bp, Oryza sativa
  Clone ID: uC-osflcyp078h06b1
ctcctcttgatctccattcgtttttgagttcctcgttgggggcgcctctgtttcactcatgggcaagattaagatcggaatcaatgggttcggccgcatcggcaggctggtggccagggtggcgctgcagagcgaggatgtcgagctcgttgccgtcaacgatcccttcatcaccaccgagtacatgacatacatgttcaaggatgacacccatcacgcacagtcggagcattacgaggcctaggccacggactccacgaccctcatctttggcacgacagaggttgcggtgttcggatgcaggaaccctgaggagataccatggagtgcacctcatgctgagtccttcgtggaggctactgcagttcactccgttcttggcggggagaagaaccactggaatgctaacttggcttctgtggtcacttgtattgctaggagaga

SEQ ID NO: 3620 - DNA, 547 bp, Oryza sativa
  unsure (1)..(547): unsure at all n locations
  Clone ID: uC-osflcyp078h11b1
gttgtatacaacaatatctgcctgagcgaattttggcctttgtgagcagctaatgtgggggcctggatgcagtgccccatctaactcaatacagcggaggcctgtaggacaggcttttcagaatgggaaggggaaggaggtgcagaacaaggcaccaaggacaatggatgcgctctttgcacaaatgaagcagcagaggatgaggaccattccacagcagcagacgaatactgcccctggccggcagattgcccagcagcggcgtaatcagcaacagcggcgaggaagaggatatggtggccgcaatggtggtaaccaatgagttcaaccacatcaaatgtccttcatgggagcattttcagttcactggtttcttgggtgggagaagaacccctggaatgctaacttggcttctttggtcccttgtattggtaggagagtcgcggacagaatcttactgaagtctgtatgcagtttttctggtttcctatttctgcttcagcttgtataatgtccgatggagtgtatgaaaanttgccttttgtgt

SEQ ID NO: 3621 - DNA, 516 bp, Oryza sativa
  Clone ID: uC-osflcyp078h12b1
gttcttgctatcagcgatggcgccgttggcgtcggtggtcgccggaagcgttctgggctacctcatccacggcgaccgccatggcatcccggtgattgggtacctgaagaaggggataaacccgccgtcggcgcgcgatctcctcctgtcgtcgccgcacacgatggtcgctctcaggaccgggatcatcaccggcatcatcggcctcgccgagggaatcgcgatcgggaggagcttcgcaatgctgaagagctacaatgtcgacgggaacaaggagatgatcgccttcggggcgatgaacatcgtcggctcctgcacctcctgctacctcacagctggcccgttctcgagggcggcggtgaaccacaacgccgggtgcaagacgccgatgtcgaacgcggtgatggcggtggccgtgatgctgacgctgcagttcctgacgccgctcttccactacaccccgctggtggtgctctcggcgatcatcatctcggcgatgatcggcatcatcgacta

SEQ ID NO: 3622 - DNA, 499 bp, Oryza sativa
  Clone ID: uC-osflcyp080a02b1
cttttatattatatgaaggacagcgaggtgactgttggaagagagacagaagacataaaagttgctgttgatttgggaaaagaagggagggcaaacaaaatatctcgtagacaggcggttatcaagatggatgaagctggttcttttcatatcaaaaacattgggaaatgttcaatttttgttaatagcaaggaagtaccaagctgcagacgcatcatcttaagttcagattcgttaattgagataaaggatatgaggttcattcttcatgtaaaccaggatgctgtaacgcaattcgtcacacgcaccccgaagccggagcactagatcctaactggttttgttcagcaaccccttatgagaagctcaatgccacattgtcactggtaactagtggagatcattgagtgagcagcgctcacagggtgggctagatgtgctgctctactccttttcaagtaggatgtgataccaccatggaagctcatctcgctccgtg

SEQ ID NO: 3623 - DNA, 405 bp, Oryza sativa
  Clone ID: uC-osflcyp080a03b1
gttagaggtcacctcggtcacgcaggcaggaactggagctgaagtcgtcaactgtggccagaaacaacggagatcaagatgaccaggttgcagaacacaaggacaagtagcacttctgctcgctccaatcaagctccatttgctcaatgcccaccatacaataacatttctttggttgggcaggtttccagttgatcagatctagagagtataagcagcttaggtagctttaaagtagctttagactcattttctgctcttatccattatctagatgtcaagaaaaaagaaacaggaagcacttttcttagtttgacagatgccaagcgaaatcccctcagattaaacaatagcttacctatacatgaacagaatcaaatcaaatgaaatcttctatttgtcatg

SEQ ID NO: 3624 - DNA, 527 bp, Oryza sativa
  Clone ID: uC-osflcyp080a04b1
ccgttacccgacgacgccgccgcggcccgcgtcatgtgcttggctcgccgcctgcgccgtcgacgcgccggtctccgtcgccgggcgccctgctgcttccatcgcatactctcgcctctgaccccgagtccatctccccgtcccggcgtcgcctcggcctcgactcccgtctcctcgaggagttcgccccgtcgcctgcggccgagctccatccatcccgcgagcggcggtgcggtgttcctgctgcttccgcctgcgggcgggagagggaggagcgggtgaccatggtgagcatggaggtcaccgatgagatgttcaagtgcatggaggttgggctggccttccgggactataatggaagaatcagttctatggatttccacagcacgggtactaaatacctcgtgacagcatgtgatgatgaatcaattcgcctatatgacattcaaaatgctgtgtgtttgaagacgattaatagcaacaatatcggtgtgagcttgtgtgcttcactgataacccaacttatg

SEQ ID NO: 3625 - DNA, 365 bp, Oryza sativa
  Clone ID: uC-osflcyp080a06b1
gttaaacttgcttcgccctcagaggtgtctgttgatctgagcgatggtggcagcacagttgtcaaagggaaaaacataatcattgctacagggtctgatgtaaaatcactccctggagtcacaattgatgagaagaaaatcgtctcatctactggggccttgtgcttgtcagagattccaaagaaattggtggttattggagcaggttacattggtctggagatgggttcggtctggaaccgccttggttcagaggtcaccgttgttgaatttgccccagatatagttccatcaatggatggtgaagtcaggaagcagttccagcgcatgttggagaagcagaagatgaagttcatgctcaagac

SEQ ID NO: 3626 - DNA, 219 bp, Oryza sativa
  Clone ID: uC-osflcyp080a07b1
ttttgtccaatttggcggctcattctctagttgggcatgccgatctttctatgtgtactgtgtaccgttatataatactggattacatccggggcatactttgtgaagatgttgcttgatcaatgaatggcatatgacgcctttctccaaaaaaaaaaaaaaaaaaccctcaccagttcagttaaaagaataatagaaggtgtagtgttgttgattccc

SEQ ID NO: 3627 - DNA, 498 bp, Oryza sativa
  Clone ID: uC-osflcyp080a08b1
gtttggtcggccttagattatatggcaccagaggcgataactctgtgctatatgaccatgacctgacaagctatgttctctttgatagggatggtacgcaagttacccaggaaatagggacagaagtcggggaaacatttgagaaaattcttaaggagacggagaaagtaagagctgaacatgaagatgacatgcctcttattcaagccatctcaattgtgcttgacaggaatccacacctaaagcttgatggtttgcaatatgaagtactgcagtggtgcatatgtaggctggaggcatggtttgccacagatgtggataatatatctctgaaaaattgggatcaggaacatgtttttactggtggccatgggcttatggtgcatggttatgatcctgttatcaaagctcttgcgcaagatcttgatatccacctgaaccacagggttaccaaaatcatccagaggtacaacaaaactatagtatgtgttgaagatg

SEQ ID NO: 3628 - DNA, 427 bp, Oryza sativa
  Clone ID: uC-osflcyp080a09b1
ttataaaaaaaaggaaaaaaaaacaaaacacaccaggccaaataaaagcgacaatgggatcgctcaccaccaacatcgtcctcgccgtcgccgtggtggcagcgctggtcggcggcgggtcgtgcggcccgcccaaggtgccacccggcccgaacatcacgaccaactacaacgccccgtggctccccgccagggccacctggtacggccagccctacggctccggctccaccgacaatggtggcgcgtgcgggatcaagaacgtcaacctgcctccctacaacggcatgatctcctgcggcaacgtcccaatcttcaaggacggcaggggatgcggctcatgctacgaggtgaagtgtgagcagccggcggcgtgctcgaagcagccgggactgtgttcatcacggacatgaactacgagcccatt

SEQ ID NO: 3629 - DNA, 528 bp, Oryza sativa
  Clone ID: uC-osflcyp080a10b1
agcgcagtacgtgacacccgcacacgaagccatgggacgccgcgcgcgcgctctcctccacgcgccggcgccgctcctgctgctgctggcactggccgccgcggcggcggcggtcgccgtggcgtcgggcccgcccttctcctgcggcgcgccgtccagcgcggcgttctgcaacccgaggctgcccatcgagcagcgcgcggacgacctcgtgtcgaggctgacgctggaggagaagatctcgcagctcggggaccagtcgccggccgtcgaccggctcggcgtcccggcgtacaagtggtggtcggaggcgctccacggcgtctccaacgccggccgcggcatccacctcgacggcccgctccgcgccgccaccagcttcccgcaggtcatcctcaccgccgcgtcattcaacccgcacctctggtaccgtatcggccaggtgatcggcacggaggcgagggcggtgtacaacaacgggcaggcggaagggctcacgttctgggcgccaaacatcaacgtgttcag

SEQ ID NO: 3630 - DNA, 499 bp, Oryza sativa
  Clone ID: uC-osflcyp080b01b1
gtctaattgtccaggcggtaatggtagtatcttgtacctgaaccggtggctcactttttctaagtaatggggaagaggactgaaacatgccactgaaagactctactgagacaaaaagatgggctgtcaaaaaggtagaggaggtaggatgggcagttggtcagatctagtatggatcgtacatggacgatagttggagtcggcggctctcctaggcttccctcatctgggatccctggggaagaggatcaagttggcccttgcgaatagcttgatgcactatctcccttcaaccctttgagcgaaatgtggcaaaaggaaggaaaatccatggaccgaccccattatctccaccccgtaggaactacgagatcaccccaaggacgccttcggcgtccaggggtcacggaccgaccatagaccctgttcaataagtggaacacattagccgtccgctctccggttgggcagtaagggtcggagaagggcaatcactcgt

SEQ ID NO: 3631 - DNA, 525 bp, Oryza sativa
  unsure (1)..(525): unsure at all n locations
  Clone ID: uC-osflcyp080b05b1
tttcttaggagcaccccgtcctcctcaccgaggctgctctcaaccccaaggccaatcgtgagaagatgacccagatcatgtttgagaccttcaacacccctgctatgtacgtcgccatccaggccgtcctctctctgtatgccagtggtcgtaccacaggtattgtgttggactctggtgatggtgtcagccacactgtccccatctatgaaggatatgctctcccccatgctatccttcgtctcgaccttgctgggcgtgatctcactgattacctcatgaagatcctgacggagcgtggttactcattcaccacaacggccgagcgggaaattgtgagggacatgaaggagaagctttcctacatcgccctggactatgaccaggaaatggagactgccaagaccagctcctccgtggagaagagctacgagcttcctgatggacaggttatcaccattggtgctgagcgtttccgctgccctgaggtcctcttccagccttncttataggaatggaagctgc

SEQ ID NO: 3632 - DNA, 501 bp, Oryza sativa
  unsure (1)..(501): unsure at all n locations
  Clone ID: uC-osflcyp080b09b1
ttcagcttatagtcaggtgaggtctgagctgaggttgagagatggcacaggcaatggcgtctatgaccgggctgtcgcagggcgtgcagctgccggccgggcccaggcgcgccggcggcaggtccaggctcgccgtcgtcagggccgacgccgccgccgccgacgtccagaccggccgccgcgccgtgctcggcctcgtcgccaccgggatcgccggcggcgccctcgcgcaggcggcgctcgccgaggccgccaagcccatcaagctcggccccccgccaccgccctccggtggactccctgggacgctgaactcggaccaggcgagggacacggacctgccgctgagggagaggttctacctgcagccgctgccgccggcggaggcggcggcgagggcgaaggagtcggcccaggacatcatcaacctcaagccgctcatcgagaagaagcagtggccgttcgtcagggacgacctncgcctcagggcctcctacctgc

SEQ ID NO: 3633 - DNA, 526 bp, Oryza sativa
  Clone ID: uC-osflcyp080b10b1
tctcttccaaaaaagaaaaaaaaaaactcgttttcttttcttctcttctcttctcttgttgcggcgaagggggagaggaaggtcgaggtcgacgagatgggcggcggcaatgggcagaagtcgaagatggcgagggagaggaacatggagaagaacaagggcgccaaggggagccagcttgaggccaacaagaaggccatgaacatccagtgcaagatatgcatgcagactttcatctgcaccacctctgagaccaagtgcaaagagcatgctgaggcgaagcatccgaagagcgacctcaccgcgtgcttccctcacctcaagaaataatggcggtggcatctctctgctcaatcagaagagaaaaagagaagctgccataatccactagtatcatcttgtatgcaatgactggttgccctatgtatgggtctaaactttggtcagctgctgctgcttctttggttgtgtgcctcatctaaatatgtaatgctctatcaacctcttgtgcaacgatattaatctt

SEQ ID NO: 3634 - DNA, 349 bp, Oryza sativa
  Clone ID: uC-osflcyp080b11b1
tagtggaaccactacgttgagggtggtgatgctggtaaccgtgagaactacatcaacgaactcatcagaaggatgaactagttccatgagctcattgttagcgcactgtgtttggatgatattttaaagtaagcttattttgcactaggaagtgtatcaagaaaatcttgcaattttgatattcagaatctgacccttttatccggtggtttgatgttattcctaaatttgaagtgcttttaatcatgatatgcgaacatgtgttagtacttattatggctctactgcctttgtgttgacatcacggttgctgttcagctcttatgccatttatacaatgcttagcctg

SEQ ID NO: 3635 - DNA, 443 bp, Oryza sativa
  Clone ID: uC-osflcyp080c01b1
ctgttattggagctttgaaaggggaacttgcagcttgagcactcaacgcaccaatggttcctgctgaggtgctgtcagagcttgcaccttatgctgttctcgcacagaagcttgcgcacctggctgtgcagctagtggctgagtggcggtggtatcaagtccgtgaaagtgacctatgcttctgcaagggcttctgatgatcttgacacgagacttcttcctgcaatgatcaccaatgtgttgatcgaaccaatctccagcgatttcgacaatctgttcaatgctgacttcactgctaaacagatgacagttcgtatcactgaggagagaatctttgtggatgggtcacccgagacacctattgactacatccaaggtcatattgcccatgatgagttcaaatttcccagtgcaatatcagagagtggagagatcactgctga

SEQ ID NO: 3636 - DNA, 438 bp, Oryza sativa
  Clone ID: uC-osflcyp080c02b1
cgcttatcgcatcgacttcgattcgcttcgtttcgttctcgctgttgatttgttcgtgagatttgaattctagcaatggctcctctcggtgacggagcggcggcggcggcggcggcggagcccaacctggtggtgtcgttcggggagatgctgatcgacttcgtccccgacgtcgccggcgtctcgctggccgagtccggcggcttcgacaaggctcccggcggcgcccccgccaacgtcgcctgcgccatctccaagctcggtggctcctccgccttcgtcggcaagtttggtgatgatgagttcggccacatgctggtggacatcctgaagaagaacggggtgaacgcagaggggagcctggttgacgagcacgcgcgcacggcgctgggcgtcgtgacctttgaaagcaccgtcgagcgcgagttcatgctctac

SEQ ID NO: 3637 - DNA, 495 bp, Oryza sativa
  Clone ID: uC-osflcyp080c03b1
cattttctccccaggtgaggattcagccatgaagggggccaaatccaagggcgccggcaagcccgacgccaagttggctgtgaagagtaagggcgcggagaagcccgccgccaagggcaggaaggggaaggccggcaaggaccccaacaagcccaagagggctccctccgctttcttcgtttttatggaggagttccgtaaggagttcaaggagaagaaccccaagaataaatctgtcgctgctgtaggaaaagcagccggtgataggtggaaatccctgaccgaagcggacaaggctccctatgtagccaaggccaacaagctcaaggccgagtacaacaaggccattgctgcctacaacaagggcgagagcactgccaagaaggcacccgccaaggaggaagaggaggacgacgaggaggaatctgacaagtccaagtccgaggtcaatgatgaggatgacgacgagggcagcgaagaggatgaagaccatga

SEQ ID NO: 3638 - DNA, 464 bp, Oryza sativa
  Clone ID: uC-osflcyp080c04b1
gtcattggagacccagccttcctctcgccgccgccgacgccgacgacgaggagaggaggaggtggccatggcgaggcggagggtcgcggcgctcgcgtcccagctcctgcggaggcagctgctcatgcggagacccccgccgcggttcctctcatccgcggcggcggcggcttctggccccctcgaccgcctcaggtcgtcgcccttcgcgcgcacggcggcgcgagacgggagccctgctctttccccatggagccgcttcggagggcagaagaggggcatgttcatccagacgcagtcgaccccgaacccgcagtcgctcatgttctatcctggaaaggccggtatggaggttgggagctctgatttcccgaatgcttggaccgcgatgacatcttctttggccaggcgcttgttgcaatcgacggagttaccagagtattctttggatcccattttggaac

SEQ ID NO: 3639 - DNA, 474 bp, Oryza sativa
  Clone ID: uC-osflcyp080c06b1
cgtctcttttacccgctcttccccccgatctccccggactcccacagccgcagcgaacaaatcccgcgcgggttgggaagagcgagctcgtgaggagagcagagggaaagcgcgagggggaaggaggaggaaaggtgcacaaggtcagactaagtttgcgttgaagaacaaaggagaggaaaaatgtcgcctgctgaggcatcgcgtgaggagaatgtgtacatggcaaagcttgccgagcaggctgagcgttacgaggaaatggtcgaattcatggagaaggtggcaaagaccactgatgttggtgagctcaccgttgaggagcggaacctgctttctgtggcttacaagaacgtgattggtgctcgcagggcatcgtggaggatcatctcttctattgagcataacgaggagagccgtgggaatgaggcatatgttgcatcaattaaggagtaccgtagcaggattgaaact

SEQ ID NO: 3640 - DNA, 497 bp, Oryza sativa
  Clone ID: uC-osflcyp080c08b1
atactcgggagaagagatctaacagtcaactcgtaaaatactccctacgtttcatattttaaattatttgactttttttagttaaacttgttaaagcctatgtttataaaaaatatattagtattttaacataaaataaacatattataaaaatatgtttgagagtagaaacagccggcgaagcgtgacgatggacgctcgacggcggcggctgtccccggtggtggtcgtagcggcttttcttttcttccccctgttcttcgggagccagccggcggcggcgtacggcgaggcttcaggcgccggcggcatgacggcactgcagaagcacgcggcgttcttcgacaaggacaatgacggcttcgtctccccgaccgagacatacgacgggttacgcgccctcggacttggagctggcttctccatcttaaggctgcgttgatcaatggcgtactttcactcaagaccagacctcgcggatatctggacacagaggc

SEQ ID NO: 3641 - DNA, 495 bp, Oryza sativa
  Clone ID: uC-osflcyp080c09b1
ttactactgcagctacgcctgcgacaagacgtgccagccggacaagcccacgctgtactcgtcgtcgtcgtcgtcccgcctcgccggcgacatggagtgccaactctcctgcgccttgggctcctgccaccgcctccttccggacggcaagggcgccgtggaggcctgcttcgggcagtgctacgacggctgcaagaccacggcggcggccagactgccgaggcctctccgcgccggccactacgtgctctctagtccccctgatgacgtagaccatgatccggaccaccgctacgtgttctctagcccccatgatgacgtagaccatgatccggaccaagtgttcgctagtccacctgacgacatagaccgccatgtattcgctgctcctcctgatgttctcgctgctcttcctggtgagccggaccacgcctgacaaaactgatcacacaacttcgctacctgctgcgaacgaataatctagcgctgcatgca

SEQ ID NO: 3642 - DNA, 510 bp, Oryza sativa
  Clone ID: uC-osflcyp080c10b1
cccgccgccgtccgccgcgcgcacgccgccgccgccatggggaggagacctgcaaggtgctatcgccagatcaagaacaagccgtaccccaagtcaaggtactgccgtggtgtccctgaccccaagatcaggatctacgatgtcgggatgaagaagaagggtgtggatgagttctcccactgtgtgcatctcgtctcttgggagaaggagaatgtcaccagtgaggctcttgaggctgcgcgtatcgcgtgcaacaagtacatgaccaagtctgcaggaaaggatgccttccacctcagggttcgggttcacccgttccatgtgctccgtatcaacaagatgctttcgtgtgccggggcagataggctccagactggaatgaggggtgcttttgggaagccacagggaacctgtgctagggtggatattggccaggtcctcctttctgtgcggtgcaagcccaacaatgctgtccatgccagcgaagccctccgtcgtgccaagttcaag

SEQ ID NO: 3643 - DNA, 509 bp, Oryza sativa
  Clone ID: uC-osflcyp080c11b1
atcagctgctgcaatctctcacgattcagagaggaaggcctggcttatcctagcgtgggtcagcaccgttgccgggaacctcacactactgggctcggctgcgaacctcatcgtctgcgagcaggctagaagagctcagttcttcggctacaacctctccttctggagccacctccggttcggggtgccgtcgaccatcgtcgtcacggcgatcgggctgctcatcgtcaccagttactgaagaagaagaagaagaagaagaagctgacagcagcataaggtagcgtacaagaaggagatagatgaacgaaccctttggatcaataagagagagtacatgtaaaatttctaaaataggcttgtcctgtaaaactcgtgtgtgttttgtgtgtatctatgccagctgctgcgtctgtgcccttgctctattgttgtcgctaagcagacggtgattgagaaggatgcagatgtagcaggctaagcaacctgcattttcagtgtttttcttc

SEQ ID NO: 3644 - DNA, 423 bp, Oryza sativa
  Clone ID: uC-osflcyp080d01b1
gtttgaaactggaggatgcagatcggcagggagtgtgtactcggctactggccgtccttcctcttctgctacctagtacacagtgcgtcgatggtcgagtggggcggggaggtggtgaactcggagcccgacggcacgcacacgtcgacgcagatggggagcgggcggttcccggaggaagggttcggcaaggcgagctacttcaagaacatccaggtggtggacagcagcaaccagctgaaggcccccaagggggtgggcacctacaccgagcagtccaattgctacgatgttcagaacggcaacaatggcgactggggcacctacttctactatggcggcccggggaagaactcgaattgcccatgaatttggtgatgaagaagctgatgatatatatatatttatatatatatatataat

SEQ ID NO: 3645 - DNA, 491 bp, Oryza sativa
  Clone ID: uC-osflcyp080d02b1
gtctcgccggcgcccagcttctcttccttccttccttgttgaggtctgaggtcttggatggtggccttatgacacacggcctgcactagtgtttacagctccaagtatggcttccagagaatccttcatgagtaccattttcttcttcttgcttctgttctccctcggctgcaagtgtatagcttcagagttacacttacatgcgacccagactgcggtcctcaaggttgatgcctcaccgcaacttgctcgacagatccctgacacactatttggaatattttttgaggaaatcaaccatgcaggggctggtggaatatgggctgaacttgttagtaacagaggttttgaagctggaggccctcataccccatcaaacattgatccatggtccatattggtgatgactcttcatatttgtggcgactgatcgaacgtcatgttttagtcggaatactgttgctctaggatggaaggtctctgtgataatt

SEQ ID NO: 3646 - DNA, 428 bp, Oryza sativa
  Clone ID: uC-osflcyp080d04b1
gtgctattgagaaagttgaactagcccgaaatatgccagcagccaagagaaaggattttgggtttgttacttttgatacacatgataatgctgttgcatgtgctgatgggataactaattctgagattggtgaaggtgacagcaaggcaaaagtgagagccagattgtcgagaccattgcagagacctcctagaatgaagcatggattaagaggaaattttagggttgggcagggtgctcctcgaggtggacgttttgcatatgatcgtcctcctccacttcgccggtcttcacctcgtcttttaagacccgatgttagccgattaccaccaccggttaggagctgcatcactgaagaggttcatagatattagagcataggggccctgttatgtcaataccagatagagttaggcgtttgccttcat

SEQ ID NO: 3647 - DNA, 376 bp, Oryza sativa
  Clone ID: uC-osflcyp080d05b1
ccgttttccgcgccggagctgaggagggagagcgagcgagccagcgagggaggtggggcaacccagcgaggggccagatcgtgccgccagccccgctccgtcctctctccggcgaccctccgccccgcctgatcccgtggtggatcaactacaactcatctttaggaaagcctcttgaacattagccttgtgtgcctttcaacagtatggcctcggtaggtgtggtgcgttcttccttggggtttcagaacgaaacaagtacaagtggcgatgccgaccgacttccgaatgagacgagcaacatgagcatgagggctcataacaaggacgagaacgacataggctctccaccgcaatgggacagaacctggtcata

SEQ ID NO: 3648 - DNA, 116 bp, Oryza sativa
  Clone ID: uC-osflcyp080d06b1
tttctttcgcttcgcgagattggttgattcatctcgcgattgatcgagctcgagcggcggtgaggtgaggtggaggaggaggaggaggaggtgatcgggatggtgagagggtgggt

SEQ ID NO: 3649 - DNA, 496 bp, Oryza sativa
  Clone ID: uC-osflcyp080d07b1
tttattggtgtacatgtgtaaagtggatgggaagttcaaatttagcccagttagtgtaaacttcttgacagagattacaaaaattatctttgccatcatcatgctatgcatccaggccaggcgcctaaaggtgggagagaagccatttctcacagtttcaacattcatgcaggctgctcgcaacaatgttcttcttgcagtttctgctcttttctatgctatcaacaattacatgaagtttgtaatgcagctatattttaatcctgcaacagtgaaaatgttgggtaatctcaaggatctggtgattgctgtgctcctaaaggtgataatgaggagggcgtttctccacaattcagtgggaagcccttgctcttttgttgattggtatatggggtaatcagctcaaacactgcctgaaggttctagacgcacttggtcttcctgttgctgatggtgcctacctatacacattatttttcggaacaagttctgcatt

SEQ ID NO: 3650 - DNA, 426 bp, Oryza sativa
  Clone ID: uC-osflcyp080d08b1
tgttccttatgatgattactactatgaaggtgcatcgcttgtagccaaccagagctttcgagaaattgaacggaactcagatacttcaacgaagcgtggttccatatctttccgcactatgatcagggaagaccaacttcagcaggatggtgttgatgaaattggattctcctctcgtagtggtgctcatattggatcaccctcaccttcaggttcatccccaagtgctgcaatgcccatgctccctctaaggaagtacctagatactaagaagtattcacctgttccttttgcccttctactatgttctcccttttcttcttcctctttcttcctcttactaccttaatgataaccagttttgtggcaatcaaaggtttttgtaaagtttccaagtagcttgactcatcattagtttagtactca

SEQ ID NO: 3651 - DNA, 478 bp, Oryza sativa
  Clone ID: uC-osflcyp080d10b1
atattattggtatggacacagggtctttacaggaacctattcatgatgggaaaataagagcttctagtagggaacaaattaaatggctagagcaatcaatagcggcaaccagcagtaactggaaaatagttgttggatatgatccattctttgtttgtgctgaggcgcacacactggaaacaacaaagttgtatgagcctcttcagcgtttttttgcaaaatatggagtgaatgcatatattagcacgggaggtcattgtggttacttccgtcaagacaattcaatgctgtatattggaaatcccagccctgatgaccttacaagctcagatggtttcctcctgcatatagtcaaccttcttgagatggagtcccttttgataaatttagaaggcaaggtggttgaaagatttgtagtaaatcatcatcgactagaagccttgtaaattgtatgccttcaatttctagctcatgatct

SEQ ID NO: 3652 - DNA, 501 bp, Oryza sativa
  Clone ID: uC-osflcyp080d11b1
ctttcccctcgagttcttcaccggcttctttcccctcctctccggaccagggaagcagctaactgtctgcgcaagaaaggtggttcaagcacgatgggacggaaccatctttgcctggtcacttgcttgtggattctgtcatgcgcagttctgcttcatgcttctcctgatggattgctgagaattagcctgaataagaagagattggacaagaagaccttggacggtgcaaaattggcaagggaggaaagccatcgtctgagagccgacggtttaggtgatgacatagttcctttggacaactacctggacacgcagtactttggagagatcggcatcggcactccaccacagaacttcactgtgatattcgacactggaagctccaacttgtgggttccatcagtgaaatgttatttttcgatagcatgctacttacaccacaggtacaagtcaaaagggtcgagcagttacaaaaagaatggagaatcttgcagcatt

SEQ ID NO: 3653 - DNA, 238 bp, Oryza sativa
  unsure (1)..(238): unsure at all n locations
  Clone ID: uC-osflcyp080e01b1
gtgacgcggtacccgcaggtgtgcgagcggagcctcatgccgcaggcccccgcggtggggcgcagcccgcgtctcctggcgcaggccgcgctcaccgtcggggccgaccgcgcgcgctcctgctcgggctacctcgggggcggnggttcctccagctcgtccaagcgctccggcggcggcggcaggggcgttgcggtgggggactgcgcggacacgctgcgggacgcggaggagcggc

SEQ ID NO: 3654 - DNA, 353 bp, Oryza sativa
  Clone ID: uC-osflcyp080e02b1
gttttcttggtcttcacagccagaaagtacaagcgtgaagcggtgctggtcagtcttttgctgctacaaagggttccaagcaaacgatgatccaattgggctgaagttgtagaacggcgcagactgagttaatgtgaacgagagaacgaaacagatgaatgtatggtgtgggatctttaccagaaatcttgctccgcctcaggtcgctcgggtgaacggcaacatgggtggatttacctgtttgaggatatacaaagatgcctttcttgcctgtacatataaaatctctgtaatttctttggacattcttgcctttgcgtgggataggttaagcgttgcagaagggatagttt

SEQ ID NO: 3655 - DNA, 76 bp, Oryza sativa
  Clone ID: uC-osflcyp080e07b1
ccgcaccataaccccttagacgaaccagtccttttatattagaaaaaaaaatctcccctcgaagcgaagcgtttaa

SEQ ID NO: 3656 - DNA, 501 bp, Oryza sativa
  unsure (1)..(501): unsure at all n locations
  Clone ID: uC-osflcyp080e12b1
tttgacgcgtgggatccctgggatgggtgagtttggggataggtactttgggacagatgattatcagtcatcaacaccattcttttgtgatgagaaaaatcgtgtcaggcttttgtgagcatttaaatagacaaagtcctggcggcggcggcggcatcatctccatttttgagaaacttaaattttacatttggaaattcagatgcccatattgatgtattcattaccagaaactgtgtatcggttgaacattacaggccgatcttgcctaatgacataaacggagcaaattcctttatgttttttcttatgtcttctccagctttttagtcaggaagatgctgtgatctcattgaattccctatatctacctgtgaattgtgggtgtgtttagttcgcgaaaagaaaatttttgagtgtcacatcggatgttggatggggtttatggacatgaatgaatgaactaatttcataactcgtctgganaccacgagacttatt

SEQ ID NO: 3657 - DNA, 390 bp, Oryza sativa
  unsure (1)..(390): unsure at all n locations
  Clone ID: uC-osflcyp080f02b1
cggctatctatccatctatctactcagctttgcgtcctcccgcgaattcaccgcagcaatggcgtccctcgtcgccgtccagccggtcgccgtgaagggcctcgccggcagctccatcttcggcaggaagcttgccgttagggcgttgncccgggcgctctgtcgtaccacccccacgccgggcgccgncgtggtggccaagtacggcgagaagagcgtctacttcgacctcgaggacatcggcaacaccaccgggcagtgggacctggtacggctccgacgcgccgtcgccgtacaaccctctccagagcaagttcttcgagacgttcgcggggcccttcaccaagagggggctcctgctcaagntcctgctgctcggcggcggatcgc

SEQ ID NO: 3658 - DNA, 392 bp, Oryza sativa
  unsure (1)..(392): unsure at all n locations
  Clone ID: uC-osflcyp080f03b1
gaactgccacctcatcggccgctactggtcctacaaggcctccggcaactgcggcggctgcagctacgccggcacctactccgagaagaagtgccaggccaactgcggagacgcctcccagagatggtaccatgtcccaagatcatggctgaatcctagcgggaacctggtggtgctgctggaagagttcggcggcgacttgtccggggtcacgttgatgacgaggacgacatgaacaggaggaagaattgaagtggataatttagcagggggaattgcagaattgggatttgggagcgaggaaaggggngggcgtatagcaattatctatacataccgggtagatacggatacagctgggaatacgtacaatacgtatacgtatatgaact

SEQ ID NO: 3659 - DNA, 356 bp, Oryza sativa
  Clone ID: uC-osflcyp080f04b1
cgtcccgaccaggactacctgctgcacatcaaccaccggtggtctcacgacggcgccaagcagaccattgccaagctcgcgcacgacggatccggcaccaatgtcgaaccggacgtggagtcctgcaacccccactgtgtctccttcttcatcaaagaccccaataaggtgaggacgatcgatgagatgcgggagaggatgaggatgcgtggcctccgatgccatctcatgtactgcaggaatgcaacaaggcttcaagttgttcctcttctagcatcgaggtcacaagcactcaggtatcttttcgtacgctggggcctgtctgtgggaaacatgtatctgatcggcggggagca

SEQ ID NO: 3660 - DNA, 385 bp, Oryza sativa
  Clone ID: uC-osflcyp080f05b1
actatccttctcctccggctcttcttcagtatcgaatcctctcttctcctcgtgcccaccaccaccaccgtagcaatggcgggcaacgggccgatcaacaaggaggacccgctcaactggggcgcggcggcggccgagatggccggcagccacctcgacgaggtgaagcgcatggtggcgcagttccgcgagccgctggtcaagatccagggcgccaccctccgcgtcggccaggtggccgccgtcgcccaggccaaggacgccgccggcgtcgccgtcgagctcgacgaggaggcccgcccccgcgtcaaggccagcagcgagtggatcctcaactgcatcgcccacggcggcgacatctacggcgtcaccaccggctttgggg

SEQ ID NO: 3661 - DNA, 507 bp, Oryza sativa
  Clone ID: uC-osflcyp080f06b1
cctaattcgtcgctccgcttccctctccgatccgaagagatggcggtgccgctgctgacgaagaagatcgtgaagaagagggtcaagcagttcaagaggccccatagtgaccgctacctatgcctcaagccaagctggcgcaggcccaagggtattgactcccgtgtcaggagaaagttcaagggatgcaccttgatgcccaacattggttacggctcagacaagaagaccaggcactacctccccaacaagttcaagaagtttgtggtgcacaatgtctctgagctggagttgctcatgatgcacaacaggacctactgtgccgagattgcccacaacgtctctacgaagaagcgcaggagatcgttgagcgtgctgcgcagctcgacatcgtggtcaccaacaagcttgcaaggctccgtagccaggaggacgagtaggctgttttatcagtataatgttttggtctggtttgattgtaggaaactgtcgcgcctccaagtattc

SEQ ID NO: 3662 - DNA, 129 bp, Oryza sativa
  Clone ID: uC-osflcyp080f08b1
tttatacgaagcaagcaggcagcgcctgctagaggggcggaatatttaaaaaagggagcgctgtaactacccagggaccgactgccagaagaagtgccaggccaactgcggcgacgcctcccagagatg

SEQ ID NO: 3663 - DNA, 497 bp, Oryza sativa
  unsure (1)..(497): unsure at all n locations
  Clone ID: uC-osflcyp080f09b1
ctgcagagaaaaaaaaatctcccctcgaagcgaagcgtcgaatcgccttctcaagatgcagatctttgtgaagaccctcaccggcaagaccatcaccctcgaggttgagtcctcggacaccattgacaatgtcaaggccaagatccaggacaaggagggcatacccccggaccagcagcgtctcatctttgctggcaagcagcttgaggatggccgtaccctggccgactacaacatccagaaggagtccaccctccaccttgtgctcaggctcaggggaggcatgcagatcttcgtcaagaccttgactggcaagaccatcacccttgaggtcgagtcgtctgacaccattgacaatgtcaaggccaagatccaggacaagggagggcatccccccggaccagcagcgtctcatcttcgctggcaagcagcttgaggatggccgcaccntggccgactacaacatccagaaggagtctaccctcaccttgtgctca

SEQ ID NO: 3664 - DNA, 366 bp, Oryza sativa
  Clone ID: uC-osflcyp080f11b1
tgtcggcgccgtgccaccggcggttgctgacatatgctctcgcactccattcccagacacgtgcaagagcaccgccgggcggcacgcgtccaagtacccggtgatcgacgtcgtggctgtgctcaacatgcaggtggacgcgttctccaagcgcacggcgcatgcgagggagcgcgtgaccaaggtgtcccgcggcgcacagcctcagcagacgcaggcgctgagcttctgcgacaccatgtacatgaacacccaggacaccatcggcgccgcggagcgggcgatcaccttcagagacaaggctacggcgaagatcatgctgcagctcgctgtgcaggactttgagtcgtgcgatcggccctttag

SEQ ID NO: 3665 - DNA, 509 bp, Oryza sativa
  Clone ID: uC-osflcyp080f12b1
ttctaccaagcaagaaacaagaaacattacaccaaaaaactagctagctagccaatggcctccatgtcctccttccgacttgccgtggcggtggctgcactattggtcattggctcacatgccacagagctcaccttcaaggttgctgagggctctagcgccactagtctagagctcgtcaccaacgtcgccatctctgaggtggaggtcaaggagaaaggcggcaaggactgggtggggctcaaggagtcgggctctaacacctggacactcaaaagtgatgcaccactcaagggccccttctccgttcgcttccttgtcaagaacggtggctaccgtgtcgtcgatgatgtcatccctgaaagctttactgccggctctgaatataagagtggcatccaactctaagtaacaggcatgcatactcttgtgttgggtcatattggaattatgaacctctaaataattatgtcttaaaagagatcgctccatgttcgagcgaaccatta

SEQ ID NO: 3666 - DNA, 196 bp, Oryza sativa
  Clone ID: uC-osflcyp080g03b1
ggcagtgttgcatatccactctgttgttgaagagtgtgagattgttgatcttatagaggaaattgatatgaagaaaaagaaagaagctgatccaaagaagaaaaaaccaaagcggaagcctctttttgtgaagaatggtgcggttgtagtttgttggattcaggtgaattatttgattttgtttgagaacgttttt

SEQ ID NO: 3667 - DNA, 322 bp, Oryza sativa
  Clone ID: uC-osflcyp080g04b1
cgtttgggccaccgacgaccgctccctcgaggccgcgttctccacctacggcgagatcctcgactccaagatcatcaacgacagggagacggggaggtcacgtgggtttggcttcgtcaccttctcctccgagcagtcgatgcgcgacgccatcgagggcatgaacggcatggagctcgacggccgcaacatcaccgtcaatgaggcccagtcccgccgctccggcggcggaggcgggggctacggtggtggcggtggcggctacggcggcggtcgtggaggcggcggctactgaggaggtggtggcggcggctacgggcgc

SEQ ID NO: 3668 - DNA, 491 bp, Oryza sativa
  unsure (1)..(491): unsure at all n locations
  Clone ID: uC-osflcyp080g07b1
ctgggttctctcacaggaaacaattgaaaagatgggtgctgaggttgagaggttaacaaaacttaaagctagaagattgaaagaaattttcatgaagaaaaggtcagagttagaagagatatgcagatctggacacatagaacctgatgccagtacagcccctgagcaaactgatgagatgattgactctggcatgattgacccttctgagcttttggcaaagcttgaatcgcaaatattaaaagcaaacgaagaatcccttagcagaaaagatatcatggacaggataaataaatggatttctgcttgtgatgaagaagcttggctcgaagaatacaaccaggactcaaagaggtacagtgctggaaaggggtgctcacataaaccttagaagggcagagaagcaccggattttagtcaccaaaatcccagtatggtagataacctgataaatcgaacatttgcttgggaaaatgcaaganacaagccct

SEQ ID NO: 3669 - DNA, 433 bp, Oryza sativa
  unsure (1)..(433): unsure at all n locations
  Clone ID: uC-osflcyp080g09b1
gtcattggcctcatgcctatgattgatcagggtgagaaagatgataagatcatcgcggtttgcgttgatgatcccgagttccgccacttcaatgatctcaaggagctctctcctcaccgacttgctgaaatccgccgcttctttgcngacttcacgatgtatgaaaacaaaaaggttgtcgttaacgataaaatgtcacccgccactgcttttggggggcatcagtacttcatggagactttatgctgaatatattctgcacagcctgaggcgctaattaattatcatcgtcagatggagcaatcagaccctgatctcatgaagaaaataacaataaaagtctcttgggtgatgctctttttgagcagccatttttgcattatatttgaaaccagggatatattatgtttctgcatttgtgcagaatatatgc

SEQ ID NO: 3670 - DNA, 491 bp, Oryza sativa
  unsure (1)..(491): unsure at all n locations
  Clone ID: uC-osflcyp080g11b1
ttcggccgcatcgacgccgagctcgctcgcctccgcctccagccgcctcacgacgccgcggctgcctctgcacaccgggactgatccgccgaagtgctcgcgatagcaacatctggaagtgttgatgtgtactccaccctgtaatttgctaatccaatttggtactttttttttgttgcttttatcattttcctcgccgatctgttttggttgcgggaaaagggtttggataagcagtgtatccaaaattagtgtggctaggcagtggctgcttaacaaaataatgaccagctactagaccataacataataatgctgtttttatttcctgtaatacttgctgcccccaaacacaaatctgtgatcgaagcacaagttctggggagtacaacacggttaacaccacaagaaactccttgcagaacagtaaagatgcatgtgtcctatgtgaataaccnnnnnnnnannnnnnaaaaaaaaaaaaagggcgg

SEQ ID NO: 3671 - DNA, 341 bp, Oryza sativa
  Clone ID: uC-osflcyp080g12b1
ttgaagagggggaggagagcatggatcccgggcgggtcttgttcgactccggcgtggcgcggcgggcgtgccccggcggcgcgcagatgcttctcttcggcggcggcggcagcgccaacagcggcggcttcttccgaggcgtgccggcggcggtgctggggatggatgaatcgcggtcgtcgtctacatgctgagggggcgggggcgaatgcggacgttcttcacaacgcacgaggagctcctggaggaggagtacatacgacgagcaggctaccgagaagaagcggcggctgacggcggagcaggtgcaaatgctggagcagcgctttaaggaggagaac

SEQ ID NO: 3672 - DNA, 182 bp, Oryza sativa
  Clone ID: uC-osflcyp080h01b1
aggctgccgaactgtaaagctcacgggttgggcgaatctccactcctcactcgccccccactgaaatcgccaaaaacccaactgaaaaacccccccaccggaatcctcacgcacacacctcgccgcggaagctgtggcgtccgcgtaggagcagctgtttcttttttggatccaatccaatc

SEQ ID NO: 3673 - DNA, 495 bp, Oryza sativa
  Clone ID: uC-osflcyp080h04b1
tttatctcctccacctcctcctcctccccccgaggggatcggcccggctcctcctgctccgccgccgccaccgccgccgcagataggagaagatggccgcacttgataccttcctctttacctcggagtctgtgaacgagggccaccctgacaagctctgcgaccaagtctcagatgctgtgcttgatgcctgcctcgccgaggaccctgacagcaaggtcgcttgtgagacctgcaccaagacaaacatggtcatggtctttggtgagatcaccaccaaggctaacgttgactatgagaagattgtcagggagacatgccgtaacatcggttttgtgtcagctgatgtcggtctcgatgctgaccactgcaaggtgcttgtgaacatcgagcagcagtcccctgacattgacaggggtgtgcacggccacttcaccaagcgccctgaggagattggtgctggtgaccagtgacacatgtttggatatgcaactg

SEQ ID NO: 3674 - DNA, 268 bp, Oryza sativa
  Clone ID: uC-osflcyp080h07b1
tttctctcactcaaaacaacgtcggcggcagcgcctctccccaaccttcctcccaccagcgccgccgctccccctccccctccctccaccggtgaccggcgccaccgctccatctccccctcttcctcctgtctcaccggcacggcgcggagactgggaggggacccaccagcagcggcgcttgccctcgggcactaccccctttctgcaccgggggagctcttctttcggcacgaaatcggcggggggtggcgattcctaagccctt

SEQ ID NO: 3675 - DNA, 217 bp, Oryza sativa
  Clone ID: uC-osflcyp080h08b1
ctggctcctcaacacctgggcattcagatggcgagtctactaacagaacggtatatgttggtgggctcgatccaaatgtcagcgaagatgagctgaggaaggcatttgccaaatatggtgatggtgcctctgtaaaaattcctctagggaagcaatgtggctttgttcaattcgtcagcagaactgatgcggaaagaagcactgcaaggattgaatg

SEQ ID NO: 3676 - DNA, 494 bp, Oryza sativa
  unsure (1)..(494): unsure at all n locations
  Clone ID: uC-osflcyp080h10b1
gtcctcctcctccgcatcccccatcccctcctccccggcggcggcggcggcgcggaggcggcggcacgggagcggctagtggtttcgtcggcggaggcggaggcggggccaagatgttcgggcgcgcgccgaagaagagcgacaacaccaagtactacgagatcctgggggtccccaagaccgcctcccaggacgacctcaagaaggcgtaccgcaaggccgccatcaagaaccaccccgacaagggcggcgaccccgagaagttcaaggagcttgcacaagcttatgaggtattgagtgacccggagaaacgtgaaatctatgaccaatatggtgaagatgccctcaaggaaggaatgggtggaggcggatcccatgttgatccatttgacatcttttcatcattctttggaccttttttggtggngggtggcagcagcaggggcagaaggcaaaggaggggagaggatggnatccatccgcttaaggtttct

SEQ ID NO: 3677 - DNA, 495 bp, Oryza sativa
  Clone ID: uC-osflcyp080h11b1
attcccaagacgctcgagggaaaggctcccgagggggccactcccattgaggcaggacccaaggttgcccttgagaccacaatgatctccaataaggaggttgtggctgatcaagcacctgagaaggtagtggaggaggccaccgcgatggcagagttaccaccaaatgatgatgccattgtcatgcaagacaaggaggaggaagttgaagaaaagatcgtcgaggaggagaagccttcagccccagctgcagaggtgaacaataccgaggtggtcgaggagaccatagaggtaaagaacaccgaggtggacaaggggaccacagaggtgaagaactccgaggaggagaagccaattcagagctgataaacgaccatgtaaattcgctccatgattatatatgctcatccttatgcgtgtaatccattagggttggcatatatatctagttccatgtgacatggatgaaccatgtaatctttgatgtcacccctt

SEQ ID NO: 3678 - DNA, 488 bp, Oryza sativa
  unsure (1)..(488): unsure at all n locations
  Clone ID: uC-osflcyp080h12b1
gttaagccggcccgggaaacccaaggcccctctgccttcctcaagcgcgccggcgggcctcgccggcgcgcgacattgagctcaacccccccgtcgtagtcgcacgtcgagcgccaccaccaccgccagcgcgtcgcatcgtacgtcctccacgcgcggcgccgtgctaggcaacctcctctgctgatcgcccgcctcctcatgagcgtgtgacctgctgtcgaatggtgcggcggcacctgctgcgcggacacagcctggacaggttcctgccgatcaggagcctcatcatgtcgtccagctcttccttctcgtcgtcgtctccgtcgccgccgccgccgtcgtcgtcgtcgtcacggggaagcagcagcgcaggtggtgcggcgtcagcgtggccgaggaggacgaggacgatgncgccgtctccgcgacgacgaccccgccactgccgccgctgcagaagcgggtgctgtcgaggagccacgggt

SEQ ID NO: 3679 - DNA, 499 bp, Oryza sativa
  Clone ID: uC-osflcyp081a07b1
gatctacttcgcgtcgtcgtcgacgctgttcggggtcgtttgaatcctgttggggacgtggagatccggcggtggcaggacatcaagaaccctggctgcgtcaaccaggaccccatcttcaagagctacagcctcccgccgcacgagtgcggctaccccggcagcgtcttcaaccccctcaacttcgagcccaccctcgaggccaaggagaaggagctcgccaacgggaggctggcgatgctggcgttcttggggttcctggtgcagcacaacgtgacgcagaaggggcccttcgacaacctgctgcagcacctgtctgacccgtggcacaacaccatcatccagacgctgtcaggctgagcgtgtgatcgatttcatcagggccagggcatctcaaggagcttgatgagttcaggctggtgaaaccgatgattgggcgatggaagatgttctcttcttggttcttcttttttttttgtggagtatgcatgtataagat

SEQ ID NO: 3680 - DNA, 398 bp, Oryza sativa
  Clone ID: uC-osflcyp081a08b1
gtttgcatcaccagcgtaatgagtgtgtagcgccgcctctctcagcatcctgagctcgggcgctctactattcgttcgttcgatcattcagacgtccacaacaatttctgcgacacgaccgtcgacctacgtatgcggtggcgcggcaacatcatctgtggttaagaagaagaagaagaagatcgaagaaaaggaagaggatgggcaactgctgcgtgttcctgctcgtcggggcctacaagctgtggctctgccgaagctccaccggcccgcacacccgcggaggcaggcggttgatctgcgcctccaacatgcggtgcctctccacggtctccttcgtgtcggacgcagcgcgcgccgtgatgtcaaacgagccggcgaccgtgctgggcaacagc

SEQ ID NO: 3681 - DNA, 106 bp, Oryza sativa
  unsure (1)..(106): unsure at all n locations
  Clone ID: uC-osflcyp081a11b1
cttacccctgccctctcatcttctcctcctccgccattatatagcatccctcccgcctttcccacctcctcaanaccttcttcnntagctctctcctccccttctc

SEQ ID NO: 3682 - DNA, 509 bp, Oryza sativa
  unsure (1)..(509): unsure at all n locations
  Clone ID: uC-osflcyp081a12b1
gtttaggagaggagatcacggggaggaangnngggccgttttagacacatcggggggggctntatatangggaggagcccgctagcccggagcggcggcaatggatgaggagtactacttgatcgtgctggggacggggctcaaggagtgcatcatcagcggcctcctctccgtcgatggcctcaagggccttcacatggacaggaacgattactatggaggagaatctacatcccttaatctcactaagctctggaagagattcaaaggcaacgagaccgctcctgaacatctgggtgtcagcaaggagtacaatgttgacatggttcccaagttcatgatggccaacggtgcactggtccgtgtactcatccacacgagtgtgacaaagtatctgaatttcaaggctgtcgacgggagctttctgtaccacaatggcaagatccacaaagtttctgcaactgatgtcgaggccttgaaatctaatctaatgggctttttgaaaagcg

SEQ ID NO: 3683 - DNA, 440 bp, Oryza sativa
  Clone ID: uC-osflcyp081b01b1
gtccagcgtttggaatgcccggcgtgcatgtgggtggtttggaagacctgggggggtcgcctcttcctacccagattcagatctactcctactcctactaccaaggatgttgccatggctaccgctgttgaagccgtggagaacaagacaggctgagacccggtcaagggctctgctgtgaatgaaaggatactgtcatctatgtcccggagatctattgcagcacatccatggcatgatcttgagattggacctggtgcaccaactatatacaactgcgtcattgagattcctaggggcatcaaggttaaatatgaacttgacaggaaaactggactgatagtggtggaccgtgtgctgtatacatcagctgtgtaccctcacaactatggattcattgctcgcacgctgtgggaagacagcgatccggtagatgcgct

SEQ ID NO: 3684 - DNA, 523 bp, Oryza sativa
  Clone ID: uC-osflcyp081b03b1
atcggatgatgtcggcaagaagaagaagcgcggggatccttacgtcccgatccctgatccaggtggtaactatggacgtagcaagcccgggcccccagccccttcgcgttctccccccaccagcagaaatctgccaattgcagtaccggcaattccccttgatgaaataaagggaataaccaagaacttcagcagtgatgctctcatcggagaaggctcgtacgccagagttttctttggtgtgctgagagatggcaggagatctgcggtgaagaagctcgactccagcaaacagcctgatcaagaattccttgtgcaggtttcagccgtttcacgactgaagcatgagaatattatccaacttatcggatattgcgctggagggagcatccgtgttcttgcttatgagtatgcaccgaggggctccttgcatgacattctccatggtaaaaagggtgtgaagggagctcagccaggaccagctctatcatggatgcagcgagtgaagattgccttgagtgct

SEQ ID NO: 3685 - DNA, 379 bp, Oryza sativa
  Clone ID: uC-osflcyp081b05b1
ttcagcgacagagaggagcagagccgcacgaggggtcgtgtcatggcggggtcgccgtccctcagcacgctctccctctgcacgcagtcgccatcaccgtcaccggtggcgtccgcccgcctcgtggcaccggctgtcctcggtttcgccggggccccgcggttcccgacgctgcgggccgcgccacggcggctgacggcgcgggcggtggccggggacgccgaggacgagtgggggaaggagccggcggcggaccagggcggtgccgccgcggcggtggccgaggcgcccgcggatgtgccggtgacgagcgaggtcgctgagctcaaggcgaagctggaggaggcgctggacggtacggagcgcggactgcgcgcgt

SEQ ID NO: 3686 - DNA, 453 bp, Oryza sativa
  Clone ID: uC-osflcyp081b07b1
gttcagcgtttggaatgcccggcgtgcatgtggatgggatggatgtcctgaaggggagggaggtggctaaggaggccattgagagggcaaggagaggtgaaggaccgactcttgtggagtgtgagacttaccggttcagaggacattctcttgctgatccagatgagctcaggaggcctgatgagaaatctcattacgccgcaagggaccccattacagccttgaagaagtacatcatcgaacagaaccttgcaactgaatccgagctgaagagcatcgagaaaaagatcgatgatgttgttgaagaggccgtggagttcgctgacgcaagcccgctctctccacggagccagcttctggaaaacgtgttctcagatcccaagggctttggaattggtcctgaccggaagtacccgtgtgaggatcccttgttcacgcaaggcacggcccaag

SEQ ID NO: 3687 - DNA, 342 bp, Oryza sativa
  Clone ID: uC-osflcyp081b09b1
ctatagtacgaggacaagagatggataccgagcgatggcttataaagaccatcgcgtggtgctagagatgacaagagctcagagctacaaactagcggtaacagggctggtcacaatgcaagatcttcatttgagcaacaccgcactttaccagctgcactcagcaaaattgctccagtgctttctaggacgcccacccagccatcacattaggcaagatcacaaccatcagctgccacggtttcaccttctcaactccggaaatcaccttctaatgccacaccaccaaaggtggagaagccatcagttgtaccatctcctaaggttgactatgcaactcat

SEQ ID NO: 3688 - DNA, 417 bp, Oryza sativa
  unsure (1)..(417): unsure at all n locations
  Clone ID: uC-osflcyp081b10b1
ctctttccccggtgattcagaactcataaatgggtcttctttaatctacttcagcggtcagaagatatggnacgctatcatcagtgatctccttccaaaaggccttgcaaaagcccaaaaggtattgctctcaggctgttcagcaggaggcctagctacattcttccactgcgacgacctcaaaggacgtctcggagatgctgtcactgtgaaatgcttgagtgacgcaggatttttccttgatgtgtaacagtggagtctaatcaagcaaaaaaaaattactttggatgactgattcttgaactcattgggttgaaacacaaaaatttactttggttggtgtcctgcagggatgacattactggcaacaacactgttgagcctttctttaggagcctagtagctttgcaaggagct

SEQ ID NO: 3689 - DNA, 474 bp, Oryza sativa
  unsure (1)..(474): unsure at all n locations
  Clone ID: uC-osflcyp081c01b1
tttgactagggnaactagaagatgaccggngggtttttttgagatgacttcgcgggcttcaccccctatacagaatataccaaacaagtacacctcaaagatgcttctagctgctattgatgaaaatcataaagggacttatgattttatttacctaccaattgacttcaagaacaagtgcaatgtaggctatgctttcatcaatatgaccaatcctcagcatatcattccattttatcagacgttcaatggcaagaagtgggaaaagtttaacagtgagaaagtggcatcacttgcttatgctagaatccaagggaaatcagctcttattgctcacttccagaactccagtttgatgaatgaggacaagcgctgccgccccatactattccattcggatggtcctaatgcaagagatcaggaaccattccctatgggtacaaacatncgagccaggtcagggagatcgcgagc

SEQ ID NO: 3690 - DNA, 399 bp, Oryza sativa
  unsure (1)..(399): unsure at all n locations
  Clone ID: uC-osflcyp081c02b1
gtaatactttgtgaaaaacaaaaatacaacggggatattttgaattgctcttcgggggttgtaaccaantcttgtggcaatgaggggaggcattccaaggaaggaagccgaataggttgtacaagagtgcaaggaaatatacgagaactctcttgtagacgggaaccctcaaaagtctggttttgggtttggcaaattgaagtgcctaacagcacggaaaggcatatggagcaagcttggacagtaaatgatgctgcgactttcgagtagagtgaattcacgccctaagagaattgtttcatgttcatgtgacaattcttttgttcatttgttaagcttatggtattggcaccatgcccttgtgcaattttttgcccgggaagagcttaaggtgtatat

SEQ ID NO: 3691 - DNA, 489 bp, Oryza sativa
  unsure (1)..(489): unsure at all n locations
  Clone ID: uC-osflcyp081c03b1
gtcttctctcgcagggcaatacataggcaccgcggcagtccagactcttcaagacctgcttcgttgtcgcgcgactgcccgccgccgaccgaaaccccaccgtgtgcgtcgcgccgcgcaccggcggcgccatctgcaactccatctcgtcgtcgtcgtccactcccccctacgacctcaacgccatcaggttcagccccatcaaggagtccatcgtgtcccgcgagatgacccggcggtacatgaccgacatgatcacctacgccgacaccgacgtcgtcgtcgtcggcgccggctccgcggggctctcctgcgcgtacgagctctccaaggacccctccgtcagcgtcgccgtcatcgagcagtcggtgtcccccggcggcggcgcgtggctcggcgggcagctgttctccgccaggtnggtgcgcaagccggcgcacctgtttctcgacgagctcggcgtcgcgtacgacgagcaggaggactacg

SEQ ID NO: 3692 - DNA, 516 bp, Oryza sativa
  Clone ID: uC-osflcyp081c04b1
ttatattcccactctctcctcttcccgatcccgccaacacccaaaccctaaccctcgaagcgacgcaacccaccggcggcgatggggcagggcactcccggcgggatggggaagcagggcggcctccccggcgatcgcaagccgggcgacggcggcgccggcgacaagaaggaccgcaagttcgagccccccgccgcgccgtcccgcgtcggccggaagcagcggaagcagaaggggcccgaggcggcggcgcgcctgcccgccgtggcgccgctctccaagtgccgcctccgcttgctcaagctggagcgggtcaaggactacctcctagggaggaagagtctcggcggcagccaggaagcgctgcgacccagcgaggacaagaccgaggaagacccgaccaaggtcgatgacctccggggcacccccatgagcgttggctcgcttgaggagatcatcgatgagagccacgccatcgtctcgtcggtcggcgggccggaatactatgttggcata

SEQ ID NO: 3693 - DNA, 271 bp, Oryza sativa
  Clone ID: uC-osflcyp081c05b1
ttccgacctagccgacactacgtgctggagccagcagagagtaaaatccaacgtgattctctcggctggctgcgcctgtgtgtgcagctaagctaagcttgcttgctctctcttcttcttcgtgttgttgtttctctctctgtctcgctgtctgttgccaccattaatggctggctccgtgggtagctgagctctttgctggccgagctgagctagcctacctagctggggggagagagagagagagagagagagcataaggatcttggag

SEQ ID NO: 3694 - DNA, 426 bp, Oryza sativa
  Clone ID: uC-osflcyp081c06b1
ttgggcgaacctaatacccgcgaaccctcacgccctatttaacctaaccgcggcggttgtcacgatggtcgcgaagaccaacgccgatgtggaggcatctatactacgacgcaatgacgacgacctcatggacgaggacgccgacgaccccacgccggagcccgccccgcgcctacgatccaccatagcgggcggcggcggtggcggttacgacgggcaacgcaagaccaagggccgcgggatccgcgacgacgccgcgccccgtgactcccgcttagccggggccgggcgcgccttcgactttgactccctcggctccgacggtggccctggccccgtccgatccattgaaagatggattgggctaatcactggggttcatgaaaaagcctaagaagaagatctttacaatatttttccggactt

SEQ ID NO: 3695 - DNA, 91 bp, Oryza sativa
  Clone ID: uC-osflcyp081c07b1
gttagactagggtaaaaaaaaaaagagaagaggaaattacacctttttttttttttttgtccctctttacatgatctaagaaatgagggac

SEQ ID NO: 3696 - DNA, 475 bp, Oryza sativa
  unsure (1)..(475): unsure at all n locations
  Clone ID: uC-osflcyp081c09b1
atcaaatttcaatatttgatttggtgtcaaacggctactttaattattatggggggccttaattctcggactgcatttcttttctggaattcatatactgcattgtataggtcacaaatgaacatgcttggtcactcgtaccatttggcagccatgagctttctgcatgaatttttattcagctactgcacgattgttctctttccgtttcagtgatcatgttgaatgcgttcacatgctatgtccattcagttactgcatgatcattttatctgaattcctcttcttttgttttcaggccttggtttccctagttaccctggtgttcctgttgggtatatgatcccacaggtgccgtataataatgctgtgaactatggacctaatgggtatggaggaaggtaccaaaacaacangcccagtacacctatgagatcacctgctaacaatgatgcccaagattctctcactattg

SEQ ID NO: 3697 - DNA, 427 bp, Oryza sativa
  Clone ID: uC-osflcyp081c12b1
attgtcgctaaagagctagaagctgggctggagcatgtatgaggtctccaagtggaggttggcagggtgctcttgaagctccgagaaaatcttgaattatctatagcaagaagcaaccgagctcagcaaaacttccgtaacctgtcaacgaaagctggagttccccttagaactttcctgttcggcacgaagccaaagaaaccatcactcttttcatgcatgggtcctggggtgcataagcatcacagtggctcaagggctggtcgtagatgagaatggttggatcatcaactttcttttgtcaattaatacagaacagagctcagtgtacctgtcaattgatttgtggtatatgcagtttctcatagaccttaaatggaaagaaccctgcatctcttaatataaatttgggtcaccctgtccgctc

SEQ ID NO: 3698 - DNA, 467 bp, Oryza sativa
  Clone ID: uC-osflcyp081d02b1
cttttccacagggtagttctcgcaccactgacgaggcagtgatcctatggtaatgttccttagcctcatgccattctgtactatcagcagagaacaaccaaaggaggccttttgattgctgaggccactggaatctcggacactgctcaagggtacaaagatactcctggtatttggacaaaggagcaagtggaagcgtggaagccaatcgtagacggcgttcatgccaaaggaggaatatttttctgtcagatttggcacgtaggaagagtctctaataacacttttcagcctaatgggcaggctccaatttcgagcaccaataagtcactaaaacctgcagtaagagccaacggcatagatgtggctactttctcaactcctaggcgattagagactgatgagatcccttttgtcgtgaatgattacagggttgctgctagaaatgcaattgaagcaagatttga

SEQ ID NO: 3699 - DNA, 482 bp, Oryza sativa
  Clone ID: uC-osflcyp081d03b1
tttcagtctccactccactgaatcctcccacctgggctcgaaggactggcacgcggtagtgaagctgagaagtcacctgaggttgtgctggagtggcctaagaaggacaagaagaggcttctacatgctgtttaccgtgttggagatttggatcgcaccattaaatgttacacagaatgctttggaatgaaattactgaggaaaagagatgtgcctgaagagaaatatacgaatgcatttcttgggtttggacctgaggacaccaactttgcacttgaattgacatacaattatggtgttgataagtacgacattggagcaggatttgggcatttcgctattgcaactgaggacgtgtacaaattggctgagaaaattaaatccagttgttgctgcaagatcactcgtgaacctggtcctgtcaagggaggatccactgtgattgcctttgcacaggatcctgacggttacatgtttgagct

SEQ ID NO: 3700 - DNA, 303 bp, Oryza sativa
  Clone ID: uC-osflcyp081d04b1
gtagattccattattatacatactgttttgggcaaatttagagaggtgtgattgagtttggcacctacgacaacgttaaggccaagatccaggacatggagggcattcccgcggacctgccgcgtctcatctttgccggcaagcagcttgaggacggcaggacccttgctgactacaacatccagaaggagtcaacgcttcaccttgtcctccgtctcaggggaggcatgcaaatcttcgtgaagactctgaccggcaagaccatcaccctcgaggtggagtcttctgataccatcgacaatg

SEQ ID NO: 3701 - DNA, 353 bp, Oryza sativa
  Clone ID: uC-osflcyp081d06b1
tttatcaacttcgacggaggggatgtcgtgtttttgaggactagggggcattatctactttgccaaagatagttccataaaagacaggtgggctgaatatgagcttaatctcccaaattcaaaccgtggacctgatgtcggaagagtgtactttgtgatcctcgagatgtcccctggtacatacattgattaaaggtctggaaggcttataaggacttgtataagaatacagggatgggcatattcagattgcaatagcgaacccaaaccggaaggtacacctggtggttttgagatccggcatgatagacatgaatggtactgggtggtgcttcgtgcgagtgcacgacgct

SEQ ID NO: 3702 - DNA, 491 bp, Oryza sativa
  Clone ID: uC-osflcyp081d07b1
attggcacttccatctcattctcctagagtgtcatcactagcttctagctagcttaattaattaattagccatggcggaggagaagcaccaccaccacctgttccaccacaagaaggacgacgagccggccaccggagtagactcctacggcgagggcgtctacacgtcggagacggtgaccaccgaggtggtcgccggcggccaggacgagtacgagaggtacaagaaggaggagaagcagcacaagcacaagcagcacctcggcgaggccggcgccctcgccgccggcgccttcgccctgtatgagaagcacgaggcgaagaaggacccggagaacgcgcacaggcacaagatcacggaggagatcgcggccacggtggtggtcggcgccggcggctacgccttccacgagcaccacgagaagaagaaggaccacatgagcgccgaggagtccaccggcgagaagaagcaccacctcttcggctgatcg

SEQ ID NO: 3703 - DNA, 421 bp, Oryza sativa
  unsure (1)..(421): unsure at all n locations
  Clone ID: uC-osflcyp081d09b1
ttattctccatgctttcctctactgctcattggtaacattcggcaaatttgacagatgggtatattggtcatcttggtggacctgcaatgctgccgctgcgatgccaagatcaggaaggtcctgggctgccttgaagaggagtactgcatcgagaaggtggagtacgacgtgaagaacaacagggtgatcgtgcgcgggaagttcgacccggagaagctgtgcaagaagatctggtgcaaggccggcaagatcatcaaggagatcctcatcgtcgacgtctggccgncgtcgccgccgccgtcgtgcaagccgccgccgtgcgagaagcctccggaggactgcaagcccaagccctgccattgctgcagctgcgagaagcccaagcccaagcccaagccctgccattgctgcagctgcgag

SEQ ID NO: 3704 - DNA, 527 bp, Oryza sativa
  Clone ID: uC-osflcyp081d11b1
gtggatcatacttcggatgcatgatgaacgaaggggacagaggaggtcttatgggcgatccatgacaacaacaagatctttcgaatcatctgccgggatcgtatactcaaggacttgctgcagccggacaaagataaggagaccaaaagctcatggaaggttcttatcatggacaaatttacggtgaggatcatggcttatgcctgcaagatggcagaaattaccgatgcaggaatctcgttggttgaagatcttttcaagcgaagggagcccatgccttccatggatgcaatctacttcctccagccactgaaagaaaatgtcataatgcttctatctgacatgtctgggagatgtccactgtacaggaaggcatacatattctttagttcaccgattcctaaggagctggtctcttacataaagaacgacagcagtgtgataccacgtattggtgcactaagagagatgaatttggagttctttgcaattgacatgcagggattcacaactgaccatgacatggg

SEQ ID NO: 3705 - DNA, 428 bp, Oryza sativa
  Clone ID: uC-osflcyp081d12b1
gtatcctctgccccccagccatcggcgacgcgaggacgcgacgcgccccaccaaccaccaccgcctccgccgacctcgccgccatgctgtccgcgcgcgccgccgccaccgccgccgccgccgccgcctccccgctgtggaagcgcggcgagggtggcagcagcgggagcgggagcggatgcacgagctgcagggaggtgcggaggagggccgcggcggtgagggtccgtgcggcggcgccgaggagggtggaggcggtcgcgatggagtccgcggcggagaccgagaagaaggaggaggttgcggcggccggcgcggggttgaggacatggctaccgaggaggtgcccgtcacgccatgggccttctccgtcgcgagtggttacacccttttgagggatccacatcacaacaagggccctggcttta

SEQ ID NO: 3706 - DNA, 499 bp, Oryza sativa
  Clone ID: uC-osflcyp081e02b1
gtctgaactcttcatattgccctgttctgaagcggcttgtatctgtggccatgagagagcactattttaaggcagaccgtccagaaactctcttatgtgaggcatgaaatctggattatacgaacgctgaatacgtcgccatgctcaaccatcgacgactccaccggcggcgtgagcccacgctgggggtacctagactacagaggttacgtctcccccgatgccgtctccaactccaccaccgtcttctacaccaccaccaccggcgtaagcattcatgtctccttctgcctcgcccgcccgccgcgcctatactacctgtgcgtacactgcccccgccccggcgacggcgagggcgcctaccggttcactgtggatccccaagtcctcggcacgcacaccaatgtagccctcctccgcgttccgcaccccaacgatgggcttcaccgcggcattaaatcctacgactacttcgtctacacgggcccgccaggcccgg

SEQ ID NO: 3707 - DNA, 472 bp, Oryza sativa
  unsure (1)..(472): unsure at all n locations
  Clone ID: uC-osflcyp081e03b1
gttgcnncgaaggagaanannacgagngnccagggatggtgacagtgatggtggcatgtgatcccccagatcttcagtgacccagagaggaggggacggcgcgtggtgagctacaaggcatactcagtggagggcaagatcaaggcctcccgtccgtaggggactccgctgcatcaaggccaactgctccgaactgatcaatttctggtgcagacaggtgcttgcggtcaggttaaagaagttggcaaaaatgcttctgaagaaaggttaattgttgtttcatctcaggagattccagatgatccagtgtctccaacaattgaggcgcttattttgctccatagtaaagcaagtacacttgctgagaaccaccagttgacaacacggcttgttgtaccatcaaacaaagttggttgtattcttggggaagggtgaaaggtaattactggaatgagaagacggactggggctg

SEQ ID NO: 3708 - DNA, 268 bp, Oryza sativa
  Clone ID: uC-osflcyp081e05b1
atattcttttattcaacttgcatgtacgtgagggatcctatgaggttgattgcgcagtattcgtgcatacgagcggccctgaagatgaacaggatggccgtggcggtgctggtgctcgacgacgtggaggtggcgggcggtgctggcgctagcgcccacgttggagttggtgctggggctggggccgacgccggcgtgggcgttcacgaggggggtggagctgactccatgctcggagatggatgaacagcacaaattccagtgggaa

SEQ ID NO: 3709 - DNA, 533 bp, Oryza sativa
  unsure (1)..(533): unsure at all n locations
  Clone ID: uC-osflcyp081e07b1
ttttgaactcttcatattgccctgttctgaagcagcttgaatctgtggccatgaaagagtactattttaaggcagaccgtccaaaaactctctctgctggttcttctaatctgaaatataggaaccccaaatatctttccatgctcaaccatttaagattctaccttccacaagtgtatcctaagttgaataagatccttttcttggatgatgacatagttgttcagaaggatttgacaggactctgggaggttgatctaaatgggaatgtaaatggtgctgtggaaacatgtggggagagttttcaccgttttgacaagtacctcaatttttcaaatccaaatattgctcagaacttcgatcctaatgcttgtggctgggcgtatggaatgaatatgtttgatttggaagaatggaagaagaaggacattactggcatttatcacaaatggcagaacatgaatgaaaacaggctgctctggaagcttgggacactgccgncaggtcttctaacattctacangntaacacat

SEQ ID NO: 3710 - DNA, 522 bp, Oryza sativa
  Clone ID: uC-osflcyp081e09b1
gttatgtctactagagctggaccttgcttcacggtgctgttacatgctccaaggagcgtcatcctgcaagacccaaaaatgcgaatgtagagcttcaggttcacattgcgggggtgattgtggatgtattccctctaagcgtataatggggtggatgtgaacagaggaaaagatgggttgtggccggggtgcgggatgctgctgcagatccagccggccaccggcgggaaccgcctgcgcttctactgccccacctgcccctacgtctgccccgtcaaaaacaagatcgtgaagaaggcgagactagtgaagaaggaggtggagcccatcttcagcgacagcgacgccatgaagaatgcccctaagaccaccactacatgcccaaggtgccaaaatggagatgcatactacaggcagatgcagattcgatcagctgatgagccaatgtctacattttacaagtgttgcagagaagaatgccaatttgatttgagggaggactgactttagtaatattttttg

SEQ ID NO: 3711 - DNA, 427 bp, Oryza sativa
  Clone ID: uC-osflcyp081e10b1
ttatggccgccgcctcctcctctgccgccgtcggattcatctccccgtcccctcgttccgccccatggcaccattccatcaaacacctggtgggcgcggcctccatgttcctcgccgccgtggtggtggcgggcggcgctggcgctctcgcttcggcttcggcttggggttgtcgctggcgccgaccgcggcggctgcgccacctgctgccctacgagaccggccggattctgtggtgcgccacgggctccctgatcgtcgccctctcctcggccgtgctgatcctcggcgacgccggctccgcctccgcgttcgtcgtcgtcacgccgcggaagctgcaggccgacgagctcgccaccgtgcgcctcttcaggagaacacgccctccgtcgtctacattaccaacctcgccgtgaggcaggatgcc

SEQ ID NO: 3712 - DNA, 520 bp, Oryza sativa
  unsure (1)..(520): unsure at all n locations
  Clone ID: uC-osflcyp081e11b1
ttattcttttattcaattgcatgtccgtgagggatcctatgaggttgcttccgcatcttctggatacatcaactcaaaatggggtccactttgagatggctctttttgtgccaaaccaatcacaatacaacaagcttggtaccaattcatcagctcctgcagagcctgagcaaattgatttgtcatggcaattgtcgcttcaaagagtgtggcagaaattacttcatggtgataaaggtatgaacaacacaaattccagtgagaacagtctggtttttgaatcacttccactggcaatggagtggctgaggacaaatgcccgacaaaaccgatcaacttcttttcaggtcctggttactggctccctgcatctcgttggtgatgtgttgagattggtcaagaaatgatacttcttcttggaacgatatacacttanaagttcaaattgacgctgagccaatttcgcggtttacgtttgagatcccctgacggaacccggcggttacaggatacaacaatt

SEQ ID NO: 3713 - DNA, 429 bp, Oryza sativa
  Clone ID: uC-osflcyp081e12b1
gtccatctcctctgctctgctctccttccaccggctaacgaaccactcgccatcaaagcccccagagagcgcgccatggcggcgcagcggcggtggccgacgtcgacgctggcggcggtggcagtcgccgtagtagtactactggcggcgtcggcggcgacgacggcggaggcgcagtcggcgccggcggcggcgccggggccagcggggccggtgctggaccaggcgtgcctgacggcgctgctgaacatgtcggactgcctgacgtacgtgcagaacgggagcagggcgcggtggccggacaagccgtgctgcccggagctggccgggctggtggagtccaacccggtgtgcctctgcgagctcctctccggcgccggcgactcctacggcattgccgttgactacttccgcgccctcgcccttccc

SEQ ID NO: 3714 - DNA, 529 bp, Oryza sativa
  unsure (1)..(529): unsure at all n locations
  Clone ID: uC-osflcyp081f05b1
gtgggagcggtcgcaggaggaggaggacggcggcgtctgttgagaccgacggggagcggcgaggatgagcgcgtccaggttcataaagtgcgtcaccgtcggggacggcgccgtcggcaagacctgcatgctcatctcctacacctccaacaccttccccactgattatgttccgacggtgtttgacaacttcagtgccaacgtcgtggttgatggtaacaccgtcaacctcgggctatgggacactgcaggtcaggaggattacaacagactgagaccactgagttatcgtggagctgatgttttccttctggccttctcgctaatcagcaaggccagctatgagaatgtttcaaagaagtggatacctgagctgaagcattatgcacctggtgtgcctatcatccttgtgggaacaaagcttgatcttcgagatgacangcagttttttgtggaccatcctggtgctgttcctatcaccactgctcagggagaggaactaagaaagcaaataggcgccccatactac

SEQ ID NO: 3715 - DNA, 459 bp, Oryza sativa
  unsure (1)..(459): unsure at all n locations
  Clone ID: uC-osflcyp081f06b1
ttgtcggnnctatgcccaaactcaacaaangggatattttgaaatgttcaaacggttcttcagtgggtatcatgcccgaactaacttccttgaaaacaggaagtagcctggaatctgacatggtgtacaattggatcgatcgcctcacgcttctggattactcgtatatttggtataatacactgatgggcatgtcaaccattcctgtattacataacctaaatgagctaggtttgctttgctgccctggcataactgaagctcccaccctggcatcactttcgaaattatggatatacagatgtccagacttaagtgtgattggttcactcccctcacttaccaccttgtatctcaaagatccacttcttaaaggtgaggtattgtacagcctattgaatgacattgaccaccccaggctcaactgcatatcaattctttgtgaaaccatgatgaact

SEQ ID NO: 3716 - DNA, 542 bp, Oryza sativa
  Clone ID: uC-osflcyp081f07b1
tttcgtcactgccttcctctccaagtccatccgcttcctttaactaagatccggcctatccaggccatggcggcgaccatccagagcgtgaaggcccgccagatcttcgacagccgtggcaaccccaccgtcgaggttgatatttgctgctcggatggaacatttgcgagggctgctgtgcctagcggtgcatctactggtgtatatgaagctttggaattgagggatggtggttctgattacttgggaaagggtgtcctcaaggctgttgacaatgtgaactctattattggaccagcattgatcggcaaggaccctacagaacagactgtcattgacaacttcatggttcagcaactggatggaaccaaaaacgagtggggctggtgcaagcaaaagcttggtgctaatgctatcctggctgtctcacttgctctatgcaaagccggagctattatcaagaaaattccgttgtatcaacacattgttaaccttgctggtaacaagcaacttgttttgcctgtgcctgctttcaatgtcat

SEQ ID NO: 3717 - DNA, 527 bp, Oryza sativa
  Clone ID: uC-osflcyp081f08b1
gttgagttggggattgattgattgattcggagggggaagaagaagaagcaggggagcatgggcagcaagtcgtacccgacggtgagcgatgagtacctggcggccgtgggcaaggcgaagcgcaagctccgcggcctcatcgccgagaagaactgcgccccactcatgctccgcctcgcgtggcactctgctggcaccttcgatgtgtcgtcgaggaccggcgggcccttcggcaccatgaagaaccccggcgagcagtcccacgccgccaacgccggcctcgacatcgccgtcaggcttctcgaccccatcaaggaccaacttcccatcctctcctacgccgacttctaccagcttgctggcgttgtggccgtcgaggtcaccggcggacctgaggtccccttccatccgggcaggcaggacaagcctgagccttctcctgaaggccgtctttctgatgccacacaaggttctgaccacctaaagcaggtcttttttgcgcagatgggtttgagtgacaaggacat

SEQ ID NO: 3718 - DNA, 433 bp, Oryza sativa
  unsure (1)..(433): unsure at all n locations
  Clone ID: uC-osflcyp081f09b1
ttgcgtcttcgtactcgcctctctccgcgcctgcgcgctttaactcctcctctcccctctctcccttctccgccgccgtcgcagcatcaacccaatccgccgccatgagggagtgcatctcgatccacatcggccaggccggtatccaggtcgggaacgcgtgctgggagctctactgcctcgagcatggcatccaggctgatggtcagatgcccagtgacaggactgttggtggaggtgatgatgctttcaacaccttcttcagtgagactggtgctgggaagcatgttccccgtgctgtatttgttgatcttgagcctactgtgattgatgaggtgaggactggttgctaccgncagctctttcaccctgagcagctcatcaatggcaaggaggatgcagctaacaactttgcccgtggtcactacaccat

SEQ ID NO: 3719 - DNA, 404 bp, Oryza sativa
  unsure (1)..(404): unsure at all n locations
  Clone ID: uC-osflcyp081f10b1
gtgagcatctagctagggagagaaaggaagaggcgagaggagagagatggccactgcttatgctcccatggcgagccagctgatgaagagcagcttggtgtgctccaagccgagggggctgtctggtgcttcgctgacaaggaggccccgcttcacagtcaaggccatccagtctgagaagccaacgtaccaggtggtgcagcccatcaatggcgaccccttcatcggcagcctggagacgccggtgacctccagcccgctggtcgcctggtacctctccaacctcccggcgtaccgcaccgccgtcagcccgctgctccgcggcatcgaggtcggcctcgcccacggctacctnctcgtcgggcccttcgcgctcaccgccccgttcgcaacacgccgtgcac

SEQ ID NO: 3720 - DNA, 467 bp, Oryza sativa
  Clone ID: uC-osflcyp081f11b1
gtctgtcagaggaggagatcaaggggctgaaggggatgttcaagaacatcggcggggacaatagtgggaccattacgcttgaggagctcaaaaatgggttagcaaagcagggcaccaagttttcagacaacgaaattgagcaacttatggaagcagctgatgctgatggcaatggaattatcgactatgaggagttcgtcaccgcgacggtgcacatgaacaaaatggatcgagaagagcacctttacacggcattccagtactttgacaaggataatagtgggtacatcacaaaggaagagctcgagcaagccttgaaggaacaagggttatacgacgccaacgagatcaaggatgtcatcacagatgcagactctaataatgatgggaggatagattattcagagtttgtggccatgatgaggaaaggatcaggctgtgcagaagcaacaaacccaaagaagaag

SEQ ID NO: 3721 - DNA, 227 bp, Oryza sativa
  unsure (1)..(227): unsure at all n locations
  Clone ID: uC-osflcyp081f12b1
ngtttggccgacgactcctaaactcaacaaaccggctttttagagttgtacaagcgctttattacaacgctaacaattcatcaactaacttccgtgcgccgactccaggtcgacgacgccggggccctattcaatccgataaattgtcctcccttcgccttcggattagggttttaggataatacactgatgggcatctcaaccattactgtattacataacctaaa

SEQ ID NO: 3722 - DNA, 414 bp, Oryza sativa
  unsure (1)..(414): unsure at all n locations
  Clone ID: uC-osflcyp081g05b1
ctcgaagagaagcaaaatttggtgatttggtcgagcacggcgacgcatccacgcgagcccgcctccctctccatcccctccaccgtcgtcgagttagaccaaaccgccaagcgaagccacgacggatcgagccgccgccgccgccgccgtgcacgcccatatctagggtttcgatggagcccgcctcctcctcgtcgccggcgccggcgccggaagccgcggctgcggggaggagggtgccggaggcggcagagctgaagctgcggcggaggacgctggagacggtgctggagcagtgccagcgcgcgctcgagatgatgcgggaggctgatctgggcatcgccgtgtctgaggaggaggangaggggaaaggcccccacgccgtggcggcgaatcccgaggtggggggcagcg

SEQ ID NO: 3723 - DNA, 423 bp, Oryza sativa
  Clone ID: uC-osflcyp081g06b1
ctcttgctccgctccctccacctcctacgacgggccgcactactccgccgacgagccctccccctacgcccaccactccaagccgcagcccgcctacggcttccgcccccagcacgagcagcagcagcagccgtcctacgcctcctccggctaccgcccccagcacgagcagcagcaatcctacggctcctctggctacggatctaagccccagcccgcctatggcttccgcccccaggccgaggaggagaacacctacggctccggctatggatctgggtacggtggtggagggaaggaagcagcaggaagaggagagctacggctccggctacggtcgcaagccgcaggtcgaggagagctatggatcagggtatgggaccaagccgcagcaggaggagagctatggatcagggtatggat

SEQ ID NO: 3724 - DNA, 448 bp, Oryza sativa
  Clone ID: uC-osflcyp081g08b1
gttgcatctccttgtccctcgccttcctcgcctggcctcgcctcggctctcacacgacgcctcttcctctcgctactactagctcaagctaagctagcaagagcattccttgggctttttttcttgttcggggttgagaggcaatggcggtgatgactgatgtgtcgaccaccgggacggcactccggaccccggcggcgggggcggtgaaggagggcgacgtcgagaagctccggttcatcgacgagatgaccaccaacgtcgacgccgtgcaggagcgcgtcctgggggagatcctcggccgcaacgccagcacggagtacctgaccaagtgcggcctcgacggcgccaccgaccgcgccgtcttccgggccaaggttccggtggtgtcgtacgacgacctgcagccgtacattcagcgcattgcgaacggggaccgctcgccgat

SEQ ID NO: 3725 - DNA, 399 bp, Oryza sativa
  Clone ID: uC-osflcyp081g11b1
gtcgagaagcatgtcgctgaggcagacatcaggtttgtgtctgtcaacacccctaccaagacccgtggacttggagcaggcaaggctgctgacctcacctactgggagagtgctgctcggatgattgctgatgtctccaagtctgacaagatcgttgttgagaagtccactgtccctgtcaagaccgcagaggccattgagaagatcttgacccacaacagcaagggcatcaactaccagatcctctccaacccagaattccttgcagagggcactgcgattgaagatctcttcaagccagacagagtgctcattggtggccgggagactcctgaaggaaagaaggctgttcaggctctcaggaagtttatgcccattgggttcctgaggacaggatta

SEQ ID NO: 3726 - DNA, 423 bp, Oryza sativa
  Clone ID: uC-osflcyp081g12b1
ttctcttgctcttcgcctcgttcgtctccaacgagctcgtgagccgagggctgggccgtctattcgttcatctgctgctgtgtctcccctggtgaggtacgacaagatgttggaacattcggagagtgcaacagaaaaaattatgagcagcatcatggataccattgctgagaaccttcctaagcagaaatctgggaaatttgacgtaggcgctgcctctgacaaaatgaaggagaagctgtttggtcgtcagaagaccattcatcgagttctgggtggtggaaagcctgctgatgtgttgctatggaggaacaagaagatatcctccagtgtcctggctcttgcaacagcaatttgggtattctttgagtggttcgactaccactttctaacaattgtttcatttgcccttgtccttggaat

SEQ ID NO: 3727 - DNA, 419 bp, Oryza sativa
  unsure (1)..(419): unsure at all n locations
  Clone ID: uC-osflcyp081h03b1
tctagctccgcactcccacctcccttttcttttcgagggttttaacgacgtcggcggctacgaaaactattcctatggagttctggggtcttgaggatggtgaaggactgactgggagatccgaggtacctgatcaacgctatgcattaccgttcagagctggtcttgttgaacgctgataaatctctgacaatgctttgattgaactttctggggcaagctgcgaagccaaggcctttccctgtgcctgacggattgctgaaaacacaggaagagcttgctgaagaacaagaggccctaatggcnnatttcttctataccaggctactgagaagaatggggagattttctgattggtatacgccttnncccagatcatgaaacccactgaatcaagtccccaagcattcatatacccg

SEQ ID NO: 3728 - DNA, 476 bp, Oryza sativa
  Clone ID: uC-osflcyp081h04b1
tttacatccacaggctccctcctactctccctggcggccgtggagcggcgtctatcctcctccaccggcggcaaggcatctgagctcaacagcaagcaaatggcaggtggcagaattgcacatgcgaccctcaaggggccgagcgtggtgaaggagatctgcattgggctcacccttgggctggtcgctggtggtctgtggaagatgcatcactggaacgagcagaggaagactagatccttctacgacatgctcgagaagggccagatcagtgttgtcgtcgaggagtagtcttttgtgttgaaagtcttttgcctttgttttttgcaagttatttctgaaactctctggagagcatgacaaagctagtgccgtggagattgtcatgaaaaataagcatagcaatgtgagaacatttgatctcgttgaaattgcttcttttctgggattatcctaaaatctggctttaatatatg

SEQ ID NO: 3729 - DNA, 290 bp, Oryza sativa
  Clone ID: uC-osflcyp081h05b1
ttcgaattcctctccttccccaaaaaagattggggttcatttacgccacgcggggttaccgataaaaatccccaaaatttccgctcccaccccgtcggattctccccccgaatccgagagttcatcgttttccgccgatttatttttatctggttttgtaaaccagcagcccaattgctctctgccttcgtctacctcgtggaagattccgggtcaaattctagactttttggtgggttgcgtgcgaggggtgggggttgcttcgaaggcaagcgtggtgtggggggggg

SEQ ID NO: 3730 - DNA, 415 bp, Oryza sativa
  unsure (1)..(415): unsure at all n locations
  Clone ID: uC-osflcyp081h06b1
gtagagggcaatggagtggctgctaagctcagggtggttttgattgcctaatcgtggtnatcactgttncaaaatactcctttacaaatgtgcctttcctggatgatgttgccaataacagtgaaaaatggtgggtacatacatcataactctgtagatggctcttcacaaacagaacttttggctgtatggtcatggtctatattattctattaaggatatagtcaagattacgattatacatatggttagtaatcattggaactaaaggttttaatatgaaatgctttggttagtaaacatggtactaatggatgcttctattggagaatacttcaaataccaaacagtacgcgtataaacttctgccatttattggagaaaaatcttctacagaagatgctgctcatttctg

SEQ ID NO: 3731 - DNA, 230 bp, Oryza sativa
  unsure (1)..(230): unsure at all n locations
  Clone ID: uC-osflcyp081h07b1
gttggggcatcgaggagggactcggccgcatcgcncaccgttaaactctcctcgcggtctctcactctctctctcgcaccaccgatctcttccgccgctgcggctcacggctacgcagctctcttcccctcctcctcggctccgctctctacgatcgatctaggggttggtcttctgttgggggattgacgttgctcttccgcgcgatcgatcgacgccgcgtactgagg

SEQ ID NO: 3732 - DNA, 414 bp, Oryza sativa
  Clone ID: uC-osflcyp081h08b1
cttccctagaaggtgatgagtgctgcagctggggggatgtttactttgaactcaataaacttgagcaagagctacccaaagaggaaattgcaaggatggtgaaggactccgagggagatccgaggtacctgatcaatagcatccatcaccgttcagatctaagaaagaagatggctgagaaatctcataattcactatcatcaaactccctggggcaagctgcgaagccaaggcctttccctgtgcctgacggattgccgaaaacacaggaagagcttgctgaagaacaggaggcccctaatgccggagtcctcctatacgaggctactgagaagaatggggagatttcctgattggtatacgcctcgcccagatcatgaaaccgactgaatcaagtcaccaagcattcatata

SEQ ID NO: 3733 - DNA, 476 bp, Oryza sativa
  Clone ID: uC-osflcyp081h09b1
tctagctccgcctcccacctcccttttctttgcgggggtttttccgacgtcggcggcgacgacgacgattccgatggagttctggggtcttgaagtcaagcctggacagactgtcaaatgtgagcctgaagatgaacgctttttgcacctttctcaggctgctcttggggaatcaaagaaaggatctgacaatgcagtaatgtatgttaaaactgatgatcaaaagctagtcattggaaccctctcagctgacaggttccctcaaatccagtttgatttggtctttgacatagagtttgagctgtcacacacttcaaagactgctagtgtgttcttttctggctacaaagtttcccagccggctgaggaagatgaaatggattttgattctgaagaagttgagatgaagaggaggacgaaaagatcattccagctcccagggcatatggcaatagtgaagggagggaaatgagcag

SEQ ID NO: 3734 - DNA, 314 bp, Oryza sativa
  Clone ID: uC-osflcyp081h10b1
gtccattcaagctgaaggcacacactggatggggtgaagtagaagaggaaccactgacgttgagggtggtgatgctggtaaccgtgagaactacatcaacgaactcatcagaaggatgaactagttccatgagctcattgttagcgcactgtgtttggatgatattttaaagtaagcttattttgcactaggaagtgtatcaagaaaatcttgcaattttgatattcagaatctgacccttttatccggtggtttgatgttattcctaaatttgaagtgcttttaatcatgatatgcgaacatgtgttagtact

SEQ ID NO: 3735 - DNA, 444 bp, Oryza sativa
  Clone ID: uC-osflcyp081h11b1
tttggacatactctactactactagccagtagggtagcttactaactacgtggcgtatggcccccaccgtgatggcctcctcggccacctccgtggctccattccaagggctcaagtccaccgccggcctccccgtcagccgccgctccaccaactcgggcttcggcaacgtcagcaatggcggaaggatcaagtgcatgcaggtgtggccaattgagggcatcaagaagttcgagaccctatcgtacctgccaccactcaccgtggaggatcttttgaagcagatcgagtacctgcttcgatccaagtgggtgccttgtctcgagttcagcaaggttgggttcgtctaccgtgagaaccacaggtctcccggatactacgatggcaggtattggaccatgtggaagctgcccatgttcggctgcaccgatgccacccaggtgc

SEQ ID NO: 3736 - DNA, 362 bp, Oryza sativa
  Clone ID: uC-osflcyp081h12b1
gtcgaggctgtgcggtggttgccgacgacgacgaggaggtggaggatatcgcgcgccggcgatggggtactggtgggaccgcgtcgtgcttccggtgaggagggcgtggctcggcgtcgtcgtccgattcggggttcggcagacagggctgtggaggctgaggtaggaggtgagcacgtgcgagtacgaggacgtgcgcgtgatgtgggagatgctgagccgtaccagcacggggggggctggggcggggcaggccggcaccgccagcgaggaggcacaagacggttccggcagttccgggccgtggaccgagagcatttgcctatgagcggacttatagaacgtctctcttgagggcttgc

SEQ ID NO: 3737 - DNA, 335 bp, Oryza sativa
  Clone ID: uC-osflcyp082a02b1
cacccctatccccgccgccgccactcggtgcgcggtcatagacgacggcggcggcgtcgccactgcagccgccagccatgctccacctccagaaacaccttctcctcctctacctccctccccgcgccaccgcctccaccctcctctccctccgccaccatggcctcttctcccttacccgcttctccgccgccgccgccgccgataaatccgccggccacttcgccgtcgaggagtacctcgtggccacctgccacctcacccccgaccaggctaccaaggcctccaagtccatctcccacctcaagtccccgttcaggcccgacgccgtcgtc

SEQ ID NO: 3738 - DNA, 245 bp, Oryza sativa
  Clone ID: uC-osflcyp082a03b1
ccttatcttatgagcaagaagctcatctcctcctccggtctggtggcatttcatggccaccagcgcgcgaccagactcctcaagacctccttcgctggcgcgcgcctccccgccgccgcccgcaaccccaccgtctccgtcgcgccagacaccggcgggtccatctgcaactccatctcgcggacaatggccaatcccccctactacctcaacgccatcaggttcagcctcatccaggagcccca

SEQ ID NO: 3739 - DNA, 226 bp, Oryza sativa
  Clone ID: uC-osflcyp082a07b1
tctcatttgcagttgcagagcaagaagcatagagacgagaagatgaagcagaggaggaggagtccaagaattgaagcaggagaagaggaggtggtggtttgattcaagaagaaggagaagagcaagagcaaggatgttgcgaggagggactagcttgctggggatcgtcaacttcgtgacgttcctgatctctatcctgatccttgggggaggaatcttgctgcct

SEQ ID NO: 3740 - DNA, 126 bp, Oryza sativa
  Clone ID: uC-osflcyp082a11b1
tcagtcttcctctcgccgccgccgactcctacggcgaggataggaggaggtggccatgcctaggcgaagggtcccggggctcaaatcccagctactgcggaggcatctcctcatgcggcagacccc

SEQ ID NO: 3741 - DNA, 145 bp, Oryza sativa
  Clone ID: uC-osflcyp082b01b1
gcgcggtttgtgttgccccgtccgcctcttcctcttgccggaccggactccatgaggggcaggcgaccttgcacgaggtagcgagactatccacttgcatcggcggcaccttctataggggaggggagatgacttcaagtatgct

SEQ ID NO: 3742 - DNA, 118 bp, Oryza sativa
  Clone ID: uC-osflcyp082b02b1
ccctaagttatgttgcacgtcagtcaatgaagtcatggtggatttaattacagatgccaggaaacttgaagatggtgacattgtaaatgacgacgcaacctgtttttccaaataagtc

SEQ ID NO: 3743 - DNA, 154 bp, Oryza sativa
  Clone ID: uC-osflcyp082b03b1
ggtattgtgatagccaaacgcaaatgttgcagttaatgccggagatctccctctgcgatggatgctgcacaatgggtatgaagttccacgggatatgctgcagagtggttctgatgcacaatccgtccgttaggggaggaggggaattttccct

SEQ ID NO: 3744 - DNA, 145 bp, Oryza sativa
  Clone ID: uC-osflcyp082b09b1
ctttatcgtatcgtatagtcgactgtacaaacggaaggcgacgcttatcagtactacgctagctaagacaggatgagcagcgagaatggagagaacggacacggcgccgtcgacgaggtggtggagcccgatcagcagacgccgc

SEQ ID NO: 3745 - DNA, 376 bp, Oryza sativa
  Clone ID: uC-osflcyp082b10b1
tttcttacaagctccagatacggcagcggctgggtcggcaatgatacggtgcctgggagctcctcctgcccctcgtcttcctgctcggtctccatcgccccgcagggcatggatcggaggagcacgatgcggttgtcattagcactgcattggggtttagctagcacaagcatctggatgggaggatgaagcacaagctactgaagtgcctgactgttgcacctccaccgacttcttccaccgcggagccgggccaccgaggcgctgccgacgggtatcaaatccagcaacataacggtcaaagaagaaaggacagaggtggccagcaacggcggcgacaacgtccacaaaggcaatggagggagtggaagaggag

SEQ ID NO: 3746 - DNA, 193 bp, Oryza sativa
  Clone ID: uC-osflcyp082b11b1
tttcttccgacagaagcctcctctcggatgctgcggatcctttttttcgagatagctcgctccttattcaaccatgggtaaggagaagactcacatcaacattgtggagattggccacgtcctctccggcaagtcgaccaccacgggccatctgatctacaagcttggaggtattgacaagcgtgtgattgag

SEQ ID NO: 3747 - DNA, 274 bp, Oryza sativa
  Clone ID: uC-osflcyp082b12b1
tgtaattatcagaggacgcagacagcttgacttggacagtctccaaatttccccaagctgcagctgcgcatcgcaacctccgctctctcctaaaccccctctctccaatggccggctacccgccaaatcccggctccggctacccctacggcggcgccggcggctacggcgccccgccaccgccgtacgggtccttccccgccccctccgccccgccgtacggtgcgaagcctcccaaggaaggtaagacctgcttctcttgcgccccttacta

SEQ ID NO: 3748 - DNA, 236 bp, Oryza sativa
  Clone ID: uC-osflcyp082c01b1
catatatttgttggtgactgagagtgcaaaagcacgggggggaaaatatcagatcattgcttgcaagtgccaaggaatcagttaatcatagcactgggtctgggtcagaatctagttcagtacagttggaagcaccaggagctgaagctgaggatattactggtgtaaagaagatgaagatgatcacacgatcaatcatggaggatgatcaagactgcctgatggatactgttggt

SEQ ID NO: 3749 - DNA, 192 bp, Oryza sativa
  Clone ID: uC-osflcyp082c02b1
cccttgcttggtgggagctaacggatacggacgaagcccgcattagtgttgcttaagatatattggttggtaatcaggaacgttggcagtggtagagaactccatagttggataaaagctttttagaggtggatcggtaaaatgaaaagaaactcaaggccggtgaaataatgcgatcactcacatagacat

SEQ ID NO: 3750 - DNA, 325 bp, Oryza sativa
  Clone ID: uC-osflcyp082c04b1
caattgtccaaaaagctgccgaaacgccaggaaagcgcagggtgtagttctcctcctgtgcccaaaaccaaatccccctctccgaaaatctccaaaaatccagcgaaaaccatccgatccatcgatcgatcgagcgccgcaagagtgcttcgggttttttttttgctcttgctccgatcgactgcgtgcgcctcgaatcgaaatctcgagtgatatcacgcgggagttgagccagacttaaaccggattgcctgagaagttgatgggatcgcgcgaattctcggggctgacgtgagatcgtgaaaggggggggacatcaaattgc

SEQ ID NO: 3751 - DNA, 301 bp, Oryza sativa
  Clone ID: uC-osflcyp082c05b1
ggttatctttaacagacactccgtgccttaaaaatgcggggttctaatgctctagggcgcccttaaacacttgaatgtgttaatctcctcatcagatcttttcataacctaacatctgctaggaggaacctccgactctttgacgatcataagggggtgactggcacaattgatgatcatgctggagcctactatgagaatctaatgcacacttctttaaccaactcgtcactatttatgggcatccctgcaatagatcactcaagcgatatccatgacaaaacgcttcctaccttactat

SEQ ID NO: 3752 - DNA, 384 bp, Oryza sativa
  Clone ID: uC-osflcyp082c06b1
tccttacgcttctctcctcctctaatctcaagtctctgtgtcgtcgtcctcgcatctccactcgccatgggcaagattaagatcggaatcaacggtttcggaaggatcgggaggctcgtggccagggtggccctccagagcgaggatgtcgagctcgtcgccgtcaacgaccccttcatcaccaccgactacatgacctacatgttcaagtacgataccgtgcacggccaatggaagcacagcgacatcaagatcaaggactccaagactctgctcttgggcgagaagccggtcaccgttttcggcatcaggaaccctgacgagattccgtgggctgaggctggtgctgagtatgtcgtggagtccaccggtgtcttcactgac

SEQ ID NO: 3753 - DNA, 215 bp, Oryza sativa
  Clone ID: uC-osflcyp082c07b1
tccttcaccaacaatcgcgacgacgaaaagaagaagagaaatatgaatctcgtctcacccccaatggcgcagatcatcgacgggaaggcggtcgccgccgacatccgccgcgagggctatagttctttcttacctagtctgatgatgggctttctcatctctgtttgagcggatggatcgcatggtggtcgtacggtcccaacttcttctacatc

SEQ ID NO: 3754 - DNA, 355 bp, Oryza sativa
  Clone ID: uC-osflcyp082c11b1
tttctttggtggtgtctatgttggaggcgatcgaggcggctaaggttggaggcatgatccctgaaaatcagcgacaaggatgcctttcatgcttcaggcagtacaggggtccgtgacggatggagcacgctggagttgtatctgcagattgactgctacatctcgtgtaattcgattacatttgttttaaggtacgtaagcaaactggttatggagctagcatgcttaagacctttggtttgtgtagccctatgatgtaaattccctgttcatcccttctgtttatcaatgaagaaccagctcggttcgttcatccatgcttgaatgtccctgatgttaatattctaccagtatc

SEQ ID NO: 3755 - DNA, 214 bp, Oryza sativa
  Clone ID: uC-osflcyp082d02b1
gcgacttatcttacaccacggctattccccctccctacgcccgccttctacccgtccggcgccgcgatgcgaattatccgccccattccgcgtctttcccgacgctctaacgccgccacctctcctgtcccgatgcaccggctgatctcttctccctctttcatggcatctgcagcggctagctggtggtcaccattgcttgctcgtggaggac

SEQ ID NO: 3756 - DNA, 352 bp, Oryza sativa
  Clone ID: uC-osflcyp082d06b1
agaaatatggcttcttccaagatgacgctgctccccgtgctcctcctcctcgccgcggcctcgccggcggcgctgggcgccttcgacgtgaaccagatgctcgccgacaagtcccagtacgggtcgttcctgaagttgctgacgcagacgaaggtcgcggaggagacgaaccggttcaagtcggggtcgctgctggtcctacaagacaaggccatgaagccgatcacgtttttccccgccgacaagcagcggatggtcatggccaaccacgttctactcaagtacttcgaccccatccagctgggcgagatgaaggaccgcacccccatgcatcccacgctgttgtcaacac

SEQ ID NO: 3757 - DNA, 135 bp, Oryza sativa
  Clone ID: uC-osflcyp082d07b1
taatgaagttcttgtttcttagagaactttgggttttctttagataacagtaaagaaagggctcctttcgcaatcttcatgtaaggggagggttcagtaccacgttccgatctttctttcttctccacttctact

SEQ ID NO: 3758 - DNA, 352 bp, Oryza sativa
  Clone ID: uC-osflcyp082d08b1
tgctactcggcaacggcggtggcctcccttcaccaacctcccatgcgcggcgctcccttcctcgacggcagcgggcacagcgacgacgacggcgggcacggtgacgacgacggcggatctggacggcgggcgcgcagcggtcacggtgacggcggcggcggcgacggatctggatggcagcggcgccctttgctctcctctccaccgagcgtcgtcgccaacactagatccgcctgcagcttctccgctcctacacccaccaccgccgtattttccctcatctggccatccactccgctgatgtcgagcgcgcggtgttataagatcgttgcctagcttgtgaagaggggat

SEQ ID NO: 3759 - DNA, 153 bp, Oryza sativa
  Clone ID: uC-osflcyp082e01b1
cgattactccttggacttggaaagtttaaacccaggcgagcagatatatgaaaagaggatctccggcatgtatcttggagagattgtgcgcataatctcgcttaagcttgctcatgatgcttgcttgcttggagatgttgctcccacacaccc

SEQ ID NO: 3760 - DNA, 364 bp, Oryza sativa
  Clone ID: uC-osflcyp082e02b1
atttctttcccacccacagtggcacgaactaggagggcgggcttctttgatctctccggccactactactcatccatcaaatcaacgtcgctccccttctcctcttgcggcgcggctcctttccaagattctccgatccccaaacccccaatcgccagagcaaagaagggggaacatcgccaggaaaaagatcggtggcgagagaaggcggaaagcgaaggacagcgaggggagcaaaaggagagagagagagagtcttttccattttctttcgtttttcttttctccctgcaagaggcagctcggcgctgctgcgaattccatccatgccgttcgccgtcctcaggatgaggggtttgatgcc

SEQ ID NO: 3761 - DNA, 250 bp, Oryza sativa
  Clone ID: uC-osflcyp082e03b1
gccttgttaggccagaccggccacctgcattgcagggtggcgctctttaaatctgtgtggggctctctctctcggcaccacggacactcgtacagctgccgcctgccggagggttggtggcgtgtcccaggttccagaaaaaccctacagcgttgtgtggccgctcgaggagctgagctgtgtgagccctgcaaggtttgcatccacacgcttgggggggttccctcacctgctcgtccgagggaattca

SEQ ID NO: 3762 - DNA, 81 bp, Oryza sativa
  Clone ID: uC-osflcyp082e07b1
tgttctgctacagtaaaattcccctttctcgaccgctgttcctactcgattccggcggccttgtcgccggcgacgggagga

SEQ ID NO: 3763 - DNA, 264 bp, Oryza sativa
  unsure (1)..(264): unsure at all n locations
  Clone ID: uC-osflcyp082e09b1
tttgtacccaaattcagtgctgcgttttgcctttagcnagttttccaatgatgggggggcaagagcagctttaacacttggtggaaccgtgcttggttattaccctgtgagagttctgccatctaagaccgcgattttgccggtgaaccctaaatttttacctcgaacagaggacgagaaagaaatggtgtcaaggactgtgtattgtactaacatcgataagaatgttcctgaagatgctgtgaagagcttttttgaggggat

SEQ ID NO: 3764 - DNA, 127 bp, Oryza sativa
  Clone ID: uC-osflcyp082e12b1
tctgatctatccagattgcagcctcggcgcagtgaggtgagagtggatgatgcttcagattatggaaactctcagattgacctacaccaagctcgtgaacacattgagctttcactacttccccagg

SEQ ID NO: 3765 - DNA, 262 bp, Oryza sativa
  Clone ID: uC-osflcyp082f01b1
atggtgatcatactagctgatagtacatgcatgtgggggggggatgttatagctagaagcgcgtgggtatacattctgcatgcattggtaagaggtgtgaactaagctagcattacatgatttacaagtgggaataaatgtagagagaatatattctatacccactgagtttgttcaagttcatgactacaaaatagcactattataaatgaggttaattgcattttactaatttacaaataataatttgggggggcctttt

SEQ ID NO: 3766 - DNA, 175 bp, Oryza sativa
  unsure (1)..(175): unsure at all n locations
  Clone ID: uC-osflcyp082f06b1
gctttatttcgaatgctcctgactcctcctcgggtgctgttcctctcagagcccttgagctgcagtagcatcattcaagctggaccctnccagatcaaatcaaacccgctgggttggcctttcgtgttgagggattctatatctatagggaagtccatggcatcagttacttatc

SEQ ID NO: 3767 - DNA, 60 bp, Oryza sativa
  Clone ID: uC-osflcyp082f07b1
tttttcccctcgctcctgtcaccagatccggagctggtcatcataagagtgggggtggct

SEQ ID NO: 3768 - DNA, 274 bp, Oryza sativa
  Clone ID: uC-osflcyp082f09b1
cgctctctcgtttcgtctcgtcgtcctcccggagcgaccgcctttcgccctccctccatggcgtcgacggatgccgacgaggaccagctcctcaagagcttcctcgccgaggtcagcgaggccgaacgcgacaacgaagtgctcaggattcttggttgcttcaagttaaaccctttcgagcatattaagttgacatttgattcatcagcagatgaggtgaagaagcactataggaagtctgtctagcgggtcgatcctgatataggcaagcctt

SEQ ID NO: 3769 - DNA, 101 bp, Oryza sativa
  Clone ID: uC-osflcyp082f10b1
tttctttctaaacccccacctccgcgagctcccagtgggttttcttaggaagaagcggggggcaacaccagatggtgaagggacccacctggcaacgcgtg

SEQ ID NO: 3770 - DNA, 66 bp, Oryza sativa
  Clone ID: uC-osflcyp082f11b1
gaaaaagaaagaaactaaatacagggggacgtttacaaagagcttgcagagacagaaaagacgaga

SEQ ID NO: 3771 - DNA, 377 bp, Oryza sativa
  Clone ID: uC-osflcyp082g06b1
gtcttccttctccgtggtggcatgcagatctttgggaagactctgaccggcaagactatcacccttgaggtggagtcttctgacaccatcgacaacgtcaaggccaagatccaggacaaagagggcatccccccagaccagcagcgtctcatcttcgccggcaagcagctggaggatggcaggacccttgctgactacaacatccagaaggagtccacccttcaccttgtccttcgcctccgtggtggcatgcagatctttgtcaagacactgaccggcaagaccatcaccctcgaggtggaatcttttgacaccatcgacaacgtcaagggcaagatccaggacaaggagggcatttcccccgacccagagcgtct

SEQ ID NO: 3772 - DNA, 190 bp, Oryza sativa
  Clone ID: uC-osflcyp082g07b1
ttccttagatctcccacctcgaaccctagccatggcgatcgcggtgcgcgccctgcgccgcatccccctccacctcgccccctccctctcgcgggccttctgcgcgctctcgccggccgcccccgccccggccgctgcctccgccaaggtcgccgaccgcatcgtgcgcctccttgccatcgacccggac

SEQ ID NO: 3773 - DNA, 341 bp, Oryza sativa
  Clone ID: uC-osflcyp082g09b1
tttttaccaccaccctcttcatcatctatctcgggcggatcttttgaccgaggggcgcctttacccccacatcatcaagcccggctgctttaacaccgaccccatctttcacaacaacaagttcacctggtacacgacttcactctacccttgtaggtatgtggttagacccgctcggatggcgcaccggctcgccagagaagatcaaggagctgggcaccaaggagaccaagaacggtcggttcgacatgctcccagcattgggagctttgctttcacgcagagactaccgcaccctactccatatgcaacctatttgcccatatcgcctaccccggcca

SEQ ID NO: 3774 - DNA, 268 bp, Oryza sativa
  Clone ID: uC-osflcyp082g10b1
tcagttagttcgaatcgaaaagcgagcactcgattcgactgagagggcaccccactctccccaatccccaaccccggcggcggttgcggcggcggcacgcggcggagatgctgcagttcccggcgctgatgcggcagtggccgtcgccgccgctgattccggtgtccacgctgcttcccgttcccgccaccacccaggaggacgagctcctcctcgtcatggtcgagtccgacctcgtggacatgctgatcgagatccgcatgaccaa

SEQ ID NO: 3775 - DNA, 341 bp, Oryza sativa
  Clone ID: uC-osflcyp082g11b1
ttccatccaacacacatcgatcgatcggaggttgattggccggccatgacgacgacggccgccggcggagccaccctgtgcgcggcgagggaggagcaggagctcctggccacccgcctgaatgtgaacggcatccggccgccgcattgcgccgcggaatccatcctcatttacctcaccgcgccggggctctccatgatgcccatgctggtgatggcctacgacttcattgtcttcgtcaagctccgtgttcagacctccaagggctttgctcgtcgcatgcagaagcttgtcttctatggcctgtagctcgtctggaactacagtcgcatcatggacta

SEQ ID NO: 3776 - DNA, 343 bp, Oryza sativa
  Clone ID: uC-osflcyp082g12b1
ttgcatagtaagaaatgggcacataccatacagagattcaaagctcacacgcatactgcaaccttctctgggtggtaatgcaagaactgcaattatttgtacaatgagtcctgcccgtagccatatggaacaatcgagaaacactctgctatttgcaagttgtgcaaaggaagtagttacaaatgcccaggttaatgtagtcatgtccgataaagcactagttaagcaattgcaaaaagagcttgctaggttggagagtgaattgcgatgtccagctttctattctagtcttgaatcattggtgaaggaaaaggataaccaaatcctgaagatggtgaaagaa

SEQ ID NO: 3777 - DNA, 125 bp, Oryza sativa
  Clone ID: uC-osflcyp082h01b1
cccgttctcgcctcaaactctatgtgagggaaggggggcagtttatttaccagctgagaaaccaagaagcagcagcagcagccatgcgtacgtgcttcctactgctcctcgttatgttttggcgg

SEQ ID NO: 3778 - DNA, 304 bp, Oryza sativa
  Clone ID: uC-osflcyp082h04b1
cttgaagatagttctagccaaggagcaatgagtttgtctggtatcagctcgagttttgatataaccaatctgacatgcggaatttaaattgctctagtgaaagttgcatggccttgaatatccttttattttcttttaactacattgttgaacttacacgttactatacatctatgataggagtagcttagagtactcaactaggttcatcctgttatgtatggtcatcttatccttctcaattgtttctgatgatgcagcttgatgttgttcgagcaaaggtagtgcagattagtggaagggg

SEQ ID NO: 3779 - DNA, 191 bp, Oryza sativa
  unsure (1)..(191): unsure at all n locations
  Clone ID: uC-osflcyp082h05b1
cattatgantcggagccagggcggcggccgtgtccggcagcattgcaagtactactgcggggggggaaccagcgcctgcggtctcgtcaaccaggagatggccgtggcggcgccggcgacttccgacgacgactgagtggtgctcctcatggagcttcttgatggcgaggaggagatgggggacgactact

SEQ ID NO: 3780 - DNA, 425 bp, Oryza sativa
  Clone ID: uC-osflcyp082h06b1
ctgatacctgccacgctgagccatcaagagttgacggcgcgttcgttcctcgaagctctgccctgtctgctcagaatcagattgatgatgagctaggcggccacatctcttcaatcttcacttgatcatcatagtagttcatcgattgcttggagtgatttcccaagtacggcagggaagcatcaagggttacataattaccgtatgagaaagaatccaagtcattgaaacgtggagcgttggatcaccatcggacggcccatgtagcccaactccttcgctgccacgcgacgccccaggcccagcccaagccaaaaccaaaccaaacaaacccctgtccgtcacctatccaaacagataaaggtcgtgcgcgcgcacggacacctctgccgcgcaaaccaaagcccttttccatggacaccacc

SEQ ID NO: 3781 - DNA, 289 bp, Oryza sativa
  Clone ID: uC-osflcyp082h08b1
ttagttacatcctccaggccctcagcggctcaagcggggccctcaccatggacgtcggcaacgatcagctcggctccctcgcctccgacccctccgacgccggcgccttcgtccagaacaacatccaggcgttcccgggcgtcaacttccgctacatcaccgtcggcaacgaggtttccggcggcgacacgcagaacatcctcccggccatgcagaacatgaacagcgccctctccgccgtcggcctcggcaacatcaaggtgtcgacgtcggtgtcccagggcgtgac

SEQ ID NO: 3782 - DNA, 423 bp, Oryza sativa
  Clone ID: uC-osflcyp082h10b1
taagtaagcaagaagagacgagacgagggagagaaggagaagatggggccggccgcgggcgtcatcatgttcctccccccctctctctcctctcctctactctcgatctccatccttccttccatccattcctccccgcacccttcgcattgctctcgtcgtcttcgattcggtcgaggatctccaggaaaagaggaggaagcgatatgggttgcttttcatgctgcggagcggatgatgtccgcaagaagaagaagcgcgacgatccttacgtcccgatccctgatccaggtggtaactatggacgtagcaagcccgggcccccagccccttcgtgttctccccccaccagcagaaatctgccaattgcgtacccgcaattccccttgatgaaataaagggaataaccaagaacttcagcag

SEQ ID NO: 3783 - DNA, 497 bp, Oryza sativa
  Clone ID: uC-osflcyp082h12b1
tttcttcgccgcctccatcgccctccgggctcggcctgcgtcgacgacgccatggggagaaggcctgctaggtgctaccgccagatcaagaacaagccgtaccccaagtcaaggtactgccgtggtgtccctgaccccaagatcaggatctatgatgttggcatgaagaagaagggcgtggatgagttcccctactgtgtgcacttggtgagttgggagaaggagaatgtctccagtgaagctcttgaggctgcccgcattgcttgcaacaagtacatgaccaagaatgcaggaaaggatgccttccacctaaggggcagggtccacccgttccatgtgcttcgtatcaacaagatgctctcttgtgctggggctgataggctccaaactggaatgaggggtgcttttgggaagcctcacggtacctgtgctccggtggacattggttaggtttctccttttttttcgttgcaaggagagcaatgttaaacatgctg

SEQ ID NO: 3784 - DNA, 531 bp, Oryza sativa
  Clone ID: uC-osflcyp085a01b1
gtggttaggagaatccgccgctgcgccgtcttctccattgaagccaagctcccccaggccttctcgttctccccctcctcctcgagctctcgctggtgcggggagcgaagtggagaggagaggccgagagggacgagagatcgagagggagagggagcaccgaagcagcgggcggcagcatgcggccttcgctccgtactatctattttcttcttttgctacttccacatgtggttttttctagaccactctttccactaccaagcaagagtaatggaatagagaagagacccttacaaacttttcgaccatataacattgctcaccgtggctcaaatggggaaattcctgaggaaacagctgctgcttacctgagggctattgaagaaggtgcggattttatagaaacggacatccttgctagcaaagatggggccttgatctgctttcatgatgtaacactggatgctacaactgacggtgccagccgcatggagttttccaatagaagaagaacctacgaggtggaat

SEQ ID NO: 3785 - DNA, 527 bp, Oryza sativa
  Clone ID: uC-osflcyp085a02b1
gataaagaaaagaaaggctttcgtctcggtgggcaaaagcgcgagggcaaagcgaaggtatagcatctagtaggcgatggcgagctccggtttctcatggacgctgcccgaccaccccaagctccccaaggggaagacggtagccctcgtcgtgcttgacggatggggcgaggccaacgccgacaagtacaactgcatccatgtcgcccagacgcccgtcatggattcgctcaagaatggtgctcccgagaggtggagattagtgaaggctcatggaacagctgttggtcttcctagcgaagatgacatgggcaacagcgaagtgggtcacaatgctcttggtgctggtcgcatttttgctcagggtgctaagcttgtggaccttgctcttgcctctgggaaaatttatgatggagaggggttcaattacatcaaagaatgttttgacaagggtaccctgcaccttattggttttgtgagtgatggaggcgttcactcccgtcttgatcaagtgcagctgcttctga

SEQ ID NO: 3786 - DNA, 523 bp, Oryza sativa
  Clone ID: uC-osflcyp085a05b1
ttttcttccaagaaacaagaaacattacaccaaggagctatctagctagccaatggcctgcatgtcctccttccgacttgccgtggcggcggctgcactattggtcattggctcatgtgccacagagctcaccttcaaggttgctgagggctctagcgccactagtctggagctcgtcaccaacgtcgtcatctatgagcgcgaggtcaaggagaagggcggcaaggactgcggggcgctcaaggagtcgggctctaacacctggacactcaaaagtgaagcaccattcaagggccccttctccgatcgcttacttgtgaagaacggtggctaccgtgtcgtcgatgatgtcatccctgaaagctttactgccgactgtccatataaaagtggcatcccagctgtagacacaggcatgcatacttttgggctgcgtgatcttggaataagaacccctaaatattatgtcttaaaagagatcactccatgtttcagccaaccattaactaactttctatttaat

SEQ ID NO: 3787 - DNA, 389 bp, Oryza sativa
  Clone ID: uC-osflcyp085a06b1
gttgcatcacgactgaaccgaaaactcaagagaacaccgttcaagactccacaagtccacctccgcagccagaggtcgtcgacaccgaggactcttcagctgataagaactcatcagagaatcagcagcagcagggcgatacggccaaccagaaggagaagctgaagaagcctgacaagatcctgccgtgcccccggtgtagcagcatggacaccaagttctgctactacaacaactacaacatcaaccagccgcgccacttctgcaagaactgccagaggtactggacagcgggtggtgccatgcgcaacgtgcctgtgggtgcaggccgacgcaagagcaagagcgtatcggccgcttcccatttcctccagagggtcagggctgct

SEQ ID NO: 3788 - DNA, 145 bp, Oryza sativa
  Clone ID: uC-osflcyp085a09b1
tatatataaagggagacaattcagaacacacggggccaaataaaatcgacagggggatcgctcactcaccaacattcgacctcgcatgtcgccagtgcaggtcagcgcagatgctacagcggctctgagctgatctgcccaagga

SEQ ID NO: 3789 - DNA, 483 bp, Oryza sativa
  Clone ID: uC-osflcyp085a11b1
tcggtcgacgagccggccaccggagtagactggtacggtgagggcgtctacacgtcggagacggtgaccaccgaggtggtcgccggcggccaggacgagtacgagaggtacaagaaggaggagaagcagcacaagcacaagcagcacctcggcgaggccggcgccctcgccgccggcgccttcgccctgtatgagaagcacgaggcgaagaaggacccggtgatcgtgcacaggctccagattacggcggagatcgcggtcacggcggaggtcggcgccggcggctacgccttccacgagcaccacgagaagaagaaggaccacaagagcgccgaggagtccaccggcgagaagaagcaccacctcttcggctgatcgaccttatcacaacgtcgcctgagtcgggcgacgacctcgccgtacgaagtcggccgacgtgtcgtagatttgggtgagcaataatttgtctttcttctgcatgcg

SEQ ID NO: 3790 - DNA, 390 bp, Oryza sativa
  Clone ID: uC-osflcyp085a12b1
gcctgcaggaccggccgactggcggtcacccagccgttgtttacagcggccacagctaagcgggaccgctagggagtctacacgtcgccgaccgcgaccaaggaggtggtcccccgaggactctacgagttcgagggagcctataaggaggataagcgctacacgctcatacggccaaccggaaaggccggctgaagaagcctcacaggattctgcctgtctgacagggtcgcggcgaagaaagaccctgagaacgcgcacaggcacaagatcacggaggagatcgcggtctctgcggtagctggcgccggtggttgacagttgcaggagccatgcgcaacgagcatggagctccagaccgccgcaggagcaagagcgtataggacgctt

SEQ ID NO: 3791 - DNA, 454 bp, Oryza sativa
  Clone ID: uC-osflcyp085b02b1
tttgtcagtcgctgtaatagtttcgaggatgcgggcctgttactggaacaactgcgcttatttgataactttgtctatggtgttgcttatggtcttctggtcggttctcgagaagtttggtcacaagctcaatcgttatttaatcagttaggacgcatggactctccaacatcctctgccttttacaatgctcttactgatgtgctatggcatttcggccagaggcgaaaagctcagcaagttgtgtttgaagggataaatcgtcgtgtctgggacaacacatggggtgagttttgcttggacctgcaccttatgtcatgtggtgcagcttatgcaatggtccatgcctggctcctgaatgtgcgctctatcgtctttgaaggaagagctattcctgaatttttaagcattcttacagggtggggaaagcatagcatgattgctggggcaagca

SEQ ID NO: 3792 - DNA, 528 bp, Oryza sativa
  Clone ID: uC-osflcyp085b04b1
gttccagtgccacatgttcaacctgaagaacggtttctagtgggtcgcattggtccaaaagagtacaggctatacagggtcatcgtgaggtatgggtaccgtgatgtgcagaaggatgacatagagtttgaaaaggacctagtcagcagcattgcagagttcatccgcagtggggattctcaccacaacggtgttttggaggacacagacaagtcgtgtgagaaactgtcttccatcagtaatggtattccattgtggatggaggatggagaggtcgatgcttcagcatcccctcataaggagacagatacacagatcatatcaccaaaccgaaagaaagcaaggttcgtgctgccaaagaatgcccaggtggacagcgaagtgcgccgtgagctgcaggagctcatggatgcaagggaggctggaatgtccttcatcttaggacactcctacatgaaggcgaagagcgggtctagtttcataaagcgaatcgtgataaacttcttctacgagttcttgaggagaaac

SEQ ID NO: 3793 - DNA, 519 bp, Oryza sativa
  Clone ID: uC-osflcyp085b06b1
tttatttttggacggacgcgtgggcgacaacgaggcgctgcagtggggcccagggggccgatcctcctcgaggactaccacctgatcgagaaggtggcgcacttcgcccgggagcgcatcccggagcgcgaggtccacgcccgcggcgcctacgccaagggcttcttctagtgcacccacgacgtcaccgacatcacctgcgccgacttcctcctgtccccgggcgcccagacccccgtcattgtccggttctacaccgtcatccacgagcgcggcagcccggagacgatccgcgacccgcgcgggttcgccgtcaagttctacacccgcgagggcaactgggacctcctcgggaacaacttccccgtcttcttcatccgcgacggtgttaagttccccgacgtcatccacgccttcaagcccaacccgcgctcccatgtccaggagtactggagggtctttgatttcttgtcccaccaccccgagagcctgcacaccttattcttcctttttgacgac

SEQ ID NO: 3794 - DNA, 365 bp, Oryza sativa
  Clone ID: uC-osflcyp085b08b1
ttttatatcaagtttaacagtgtgggcgtggggcgcatattgtcgagcggaaggtgaggatggccacatctatgatcacctagcctctggcggcgccggcccggaccaagggccttgcttccatcttctgccggagatcctacttcgccatcgtctgcagcggtgggaagaagagcaagaccgacatgccctactggatcggaggtggcatgtcagtcgatattgatgcatctagcagggagagcacggtgaacggcgtgtaccaattcgatcacaagtgcggcgcaaacgtcgacggctacagcccagtctactacccaaaggaatggtgttccaccgatgacacctactttgggggaaccacc

SEQ ID NO: 3795 - DNA, 79 bp, Oryza sativa
  Clone ID: uC-osflcyp085b09b1
tgtcttatccaatttgccaacaacgcctacgggggaattttgtccatccgagagggattaaatcctccatacaacataa

SEQ ID NO: 3796 - DNA, 439 bp, Oryza sativa
  Clone ID: uC-osflcyp085b11b1
ttggttcatcaccatgcgcaagtcggcggcggagcggatgcccgccgcgtcggggagcccgaggtacggcgccgaccgcgtgctgtacctcggcccgctctccggcgagccgccgagctacctgaccggcgagttccccggcgactacgggtgggacaccgctgggctatccgccgacccggagacgttcgccaagaaccgggagctggaggtgatccactccaggtgggcgatgctcggcgcgctggactgcgtgttcccggagcttctcgtccgcaacggcgtcaagatcggcgaggcggagtggttcaaggcggggtcgcagatcgttagcgagggcggtctcgactacctcgagaacccgagcctgatccacgcgcagagcatcctgatcatctgggcggtccaggtggtgctcatgggcgccgtcgaggggtac

SEQ ID NO: 3797 - DNA, 439 bp, Oryza sativa
  Clone ID: uC-osflcyp085b12b1
tctgttcggtgtcgcccgacatcgagctgtggtgcgagttcattggcatccgcagcatgtactactgcgggccgctcacctccttcgactggaacgacgcctacccctgccgcatagggaccttctccatcgacaccacctgcaccatctgggacgtcgagcgggaggccgtcgacactcagtttattgcccatgacatggaggtctacgacatcgcctggggcggtgcccgcgtcttagcattcgtctccgccgacgggtccgttcgcgtgtttgatcttcgggacaaggagcattccacaattatctacgagtccggttctggcggcagctccaattcggcaggtgcagatggcggagctgccttaccaacgccgttggttaggttagggtggaacaagcaggaccctaggtacatggcgaccattatcatggatag

SEQ ID NO: 3798 - DNA, 515 bp, Oryza sativa
  Clone ID: uC-osflcyp085c03b1
gagcatttcccatctctcccactccttccgccatggccgactaccaccgcccctaccggagcgacctcgacctccgcccaccgccgccgccgccgtcctccgcctccttcccgcactccaacggctactacctcccctcctcctcctcctcctcccccaccgccaacggctacttctcctccaagggcaccggcggctttgcggccaacggcgaccggcggatcgagatctacaccacggcgccgcccccgccgctgccccctccgccgcgcctcgcgctcccgccgccgcccgggaggcgggacggctacctgggaggtggcggagcggggggtggcggtggaggaggcggaagcggtggcatgtggtgcttcagcgacccggagatgaagcggcggcggcgggtggcgagctacaaggcgtactcggtggagggcaagatgaaggcgtcgctgcggagggggctccgctggttcagggcaagtgctccgagatcttccacggatggtaaaaac

SEQ ID NO: 3799 - DNA, 497 bp, Oryza sativa
  Clone ID: uC-osflcyp085c04b1
attcttatcgccggatacccgaggaagaagaagaagaagaaaagatgagctactacggccagcaacctcccgtcggcgtcccgccgcagcaaggttacccggggaaggacggctacccgccgccggggtacccaccggccggctacccgccggcgcagggctacccaccggctgggtaccccccgcagcagggctaccctccgccgtacgcgcagccgccgccccagcagcagcagcacagtagcggcccttccttcatggagggatgcttggctgccctctgctgctgctgtctcctggacgcctgcttctgaggatagaggcgacgggtgcaagagagctgaagagatttgtttcatggagctgatcaaaccgaactgctatgagaaaatgctgctagatttcgtgttcggcattattacctgttaatcgccttgtttatgaacctctttgaacctgatttatttgatcagtgtttgatggatggctaaaactat

SEQ ID NO: 3800 - DNA, 101 bp, Oryza sativa
  Clone ID: uC-osflcyp085c06b1
ccagagtgacacctaagataaaacgggcagcatatatatgtacatatggttatttcctccttaagatatagtaacaaccatcgactgatttccatgtaaac

SEQ ID NO: 3801 - DNA, 205 bp, Oryza sativa
  Clone ID: uC-osflcyp085c07b1
tcggtaatatccagagcgtcgttgaagataggagaggcatatgtagtacgatggcgagtgggacaaacctcaagtagatataataatagtctgccctaccgtgccccatgagctcagatagactaaacgattcgaagaagaagacacagcttattacattgatgtggacgaaagcagagcgttgttcccatcagatagtgttgct

SEQ ID NO: 3802 - DNA, 79 bp, Oryza sativa
  Clone ID: uC-osflcyp085c09b1
tttgtattctcctaattgacaacattggcaagggggcccttataactaactgggggttacgacctccacaacaagatac

SEQ ID NO: 3803 - DNA, 253 bp, Oryza sativa
  Clone ID: uC-osflcyp085c10b1
atatcctaggcgccagccagggttaaggggtactcttgacgtgtggccagctgtgccaacctcaataggccacgataactgacttggtctaagatgagctaaatttgatcagaaatttactaatgaacaaatcgttaaaagcttgtttgattacgatttataatactagtacgaacccagtaagcgtgaaatatggatcctttagatcttattagtatatagcgcaatttaaagtgtgttaagaatgatctat

SEQ ID NO: 3804 - DNA, 543 bp, Oryza sativa
  Clone ID: uC-osflcyp085c11b1
ttggttctagatcgcgagccgcccttttttttttttttttttgacaggtaaaatgttggagacatccccctagaggaataatctcaatatgagcattgttttgcatagagttaagttcatagctatctatatgctcaacaggcctacaagaagaaactaaactctcaagttaaattaggcctgttgatattttacatgtttcagttcatttagtttaaggataacatatgtagttaataatgtaactacccaaccctcatccattaggtggtattgatagacaggtgccacttggcaggtgttaagagttttctgcagacaaactgtccgctaattacttcgacgagtcttcacgaactagagataaatggttatgcttggcaaaggaggcatttgtcaaagatggataaatgtcctctttagtacagctcttctcccggcaaaattttgctggatcagcaaataaacttgaaaacgggcacctgcttaacagaatggtctaagactggatagtcatttcttcaaacacattttctttaccaa

SEQ ID NO: 3805 - DNA, 463 bp, Oryza sativa
  Clone ID: uC-osflcyp085c12b1
tttgttcatcctcgccgccgacgagtcgacgggcaccatcggcaagcgcctggccagcatcaacgtggagaacgtggagcccaaccgccaggcgctccgggagctcctcttcacgacgcccggcgcgttccagtacctctccggcgtcatcctcttcgaggagacgctctaccagagcacggccgccggcacgccgttcgtcgacgtgctcaaggccggcggcgtcgtgccggggatcaaggtggacaagggcaccgtggacatcgccggcaccaacggcgagaccaccacccagggcctcgactccctgggcgcgcgctgcgccaagtactacgaggccggcgcccgcttcgccaagtggcgggccgtgctcaagatcggcgccgccggcgagccgttcgagctcgtcgtcaagcagaacgccgagggcctcgcccggtacgcgctcatctgccaggagaac

SEQ ID NO: 3806 - DNA, 515 bp, Oryza sativa
  Clone ID: uC-osflcyp085d02b1
gttaggagcacaaagtggtacatttctacctgggagctcattttgattctttcaatgtgtgctgcgagatattcactattggagataaatcctggagacagattgggagtttccatggagcaccgacagatagaggggtgcatgtgaatggagcagtgtactatctgacaaagttccgttacattgcttcgtcacgtatcaattgtttgaatcttgagagcgaaaattttgatgtgatgatgcttcccccacgcaagtcgtatggagggcattgctctttggcggagcttgagggaaagctatgcttgctagttgtggagggtggacatgataatccacctcgtacaatggacatattgatgcttgatagtggtgataagacaacctggacgcacagataccacatctcattgccatggttgatgccttcatgttattttactccaaaacacactttgttccatgagggaaaaatttgggttcagttgttggctcgaacctctactggtatgatc

SEQ ID NO: 3807 - DNA, 536 bp, Oryza sativa
  Clone ID: uC-osflcyp085d04b1
ctgtcatttgatgaagttgctggtaatccccttgtgaaggaaacattcaatgctgctcatgagaccgagagaaagcgtgctttatctgcacttctctcccagacaaaacagcaagaacgaaaggatgctgagattttagcagaagcaaaacgcattatggaaactcgtgctgctagcaaacatactgaggaagcgggagcactggcacactttgataatgttgatggtgtatctcccttgagcaacacacacccattgtcaactgctacacttccagctgcagcagtgaataactccatacctgcttcactgcgaatgcttcgagtgtatttgagaacccaagcgcttgatcaaatggtccaagcagcaagtgcctcggcgggccttagagttatcaaaagggttgaccagactttacaagacctcggagtgaatttgaagcccaaggtcccgacgaaagcagtttgcgtcgagcatcttgaactacggaatgagatacttacactgcttaacttacagaagcagctgcaaaataa

SEQ ID NO: 3808 - DNA, 149 bp, Oryza sativa
  Clone ID: uC-osflcyp085d05b1
ttcttatctaaattgtcagcttctataccacgggggggatgttcatggaagagtgggtctttcctctagaagatatcagaacagcctgcgactgagttccagattagatcagatgaactaaacaaggtgcacatgaacctacagcatat

SEQ ID NO: 3809 - DNA, 145 bp, Oryza sativa
  Clone ID: uC-osflcyp085d06b1
gttttatcaagatagtcatcttgtatacctcgggggggctgttcatggaagtatggggctgtcctcaacaggctatcagatcagtctgcggctgactgccctaacaactcagacagacttaacaagctgcagaagaacctacagc

SEQ ID NO: 3810 - DNA, 96 bp, Oryza sativa
  Clone ID: uC-osflcyp085d10b1
tgtttatgtgcagagcgtcagttgggactccgggggaatgttgacgatggacgagcggttccgaccactagtggctataggatatgtctggggctg

SEQ ID NO: 3811 - DNA, 290 bp, Oryza sativa
  Clone ID: uC-osflcyp085d11b1
tttttatcaagttcgttattggggactgattggcattgttgagtttgatcaaggggttcgaccatcgactaactattataaaagtcattgaccttgatacaaaagagagagcaatgatgtcggtagctgatgaatgatgctgatgatgtttgggtactacgtaggaaggtgaagtccggcgataattagttcaaagggatgtaacctgattgctattttatatatatatattatagaatatatgacatatctccttaagcctatagaggaagaatggaaaggggatagac

SEQ ID NO: 3812 - DNA, 446 bp, Oryza sativa
  Clone ID: uC-osflcyp085d12b1
gttccctcctgtcacattttccccaaataataatagaggaaggggaaaaacacatttgcagccacatcatccatggcctctctccgcaccattccggtgatcttcggcatcctcttctatgtccttgccagcactgccactgccaccgactcaccggactacgtcgtccaaggccgcgtctactgtgacacgtgccgcgccgggttcgagaccaatgtcaccgagtatatcaagggtgccaaggtcaggctggagtgcaagcactttggcaccgacaaggtcgagcgtgcgattgacggtgtgactgatgagaccgggacatacaagattgagctcaaggacagccatgaggaggacatctgcgaggttgtccttgtgcacagcccccttgcaaactgctctgaaatcgaggccgaacgggaacgtgcccgtgttttgctcaccag

SEQ ID NO: 3813 - DNA, 69 bp, Oryza sativa
  Clone ID: uC-osflcyp085e01b1
tttgatctgtgtgatttgagtgagtgagtgagattctttggaggagggattttggtttggtttggtttg

SEQ ID NO: 3814 - DNA, 413 bp, Oryza sativa
  Clone ID: uC-osflcyp085e04b1
ctgtttcttcactgcttactggtcccacggccatagttactcatataaatgaaaagattggtgctactggggtagtcagtcaagagtgcaaggcagttgtttcttaatatggtcaacagatcctagatcagctgcgagcagagacaaaaccagcgaaagtatgctcttcggtcggtttatgtacttttgatggtactcatggtgttagagctggtattcggagtgtggtggatgatgaagttggaaaatcaagtggtccctttagcagtgcgatgtgcaatgcttgtgagacagctgctgtatggatgcatacccaacttgcacaaaatcaaactcaggatctcgtattgcagtacattgatcagctatgtgaccgtcttcctagtcctatgggagaattaactattgactgc

SEQ ID NO: 3815 - DNA, 122 bp, Oryza sativa
  Clone ID: uC-osflcyp085e05b1
ttcttttcaaatgcgtcagttttgctatctcgggaaggatgtctatgtacgagtggggatttcctcaagaagatacaaaaacattctgcgatcgagtgcccttatagttcacacaaactatg

SEQ ID NO: 3816 - DNA, 249 bp, Oryza sativa
  Clone ID: uC-osflcyp085e07b1
tcgtttatattcagagagtaagatatgcatagggagtccacctttcaattggagcacaggaacaagaacgggatgcaatcataagagactaccctgtctggccagaacattacatatgaagtagactagttggacattattgtacaccttaattcaaagatctggaataaggaagagattggcctctaccagatagatatgctatatgatgatcagaattttcaggatggccgcatgaaatttgattac

SEQ ID NO: 3817 - DNA, 209 bp, Oryza sativa
  Clone ID: uC-osflcyp085e09b1
tcgtttatatccaaagcgtcatcttggactcgggggacttctagtccatcgacgtgtcaaaccgaactctacaggctatcggcacagtttttggcagactgcccggaaaactcagacaaactaaacaagctgaagaagaacttaatgcagattcaactaatatggattatactagagtgtcgtcactataagatcgtgctgctagatga

SEQ ID NO: 3818 - DNA, 367 bp, Oryza sativa
  Clone ID: uC-osflcyp085f01b1
tttgttgcgcacaagccccagcaccagcaagctgctactcatcatcagcgagagctagctagctgtgtgtgccacttacactgctgctgctgctggttctagctaagctcaccgatcgtcgtcttcgtcatcgccggtgacctggtgaattagtcgagagagatggcggcggcggtgacggtggaggaggtgaggagggcgcaaagggcggaggggccggcgacggtgctggcgatcgggacggcgacgccggcgaactgcgtgtaccaggccgactacccggactactacttcaggatcaccaagagcgagcacatggtccaagctcaaggagaagttcaagaggatgtgtgacaagtcgcagatc

SEQ ID NO: 3819 - DNA, 356 bp, Oryza sativa
  Clone ID: uC-osflcyp085f03b1
ataaaactcccgtctcgtcgtctccgctccttgcgagttcgcccaccgccgccggcgcgccgatttccatctcccgagcaaagcggggggagggccaccgccgccgccgccgccgccgccgtcgtcctgctgctcccgccacatcccgagatggagtcagtgccactaactgctgaagctattgcttttaccgagaaaaagatggacatgactttagatgatattattaagatgtcaaagaaaaagaatcctggaggcaagaaacctgctagacaacctatcaagaaacgtccattccagaatgacaacactaatcaagggaatgcaaaagttcagcgatttatggaaactagatc

SEQ ID NO: 3820 - DNA, 528 bp, Oryza sativa
  Clone ID: uC-osflcyp085f04b1
gtcggcaccgcctgcgtcaactccttcggtgacgagcagctcgccgtcgatatgctcgccgacaagctcctcttcgaggctctggaatactctcatgtctgcaagtatgcgtgctccgaggaagtcccggagctgcaagacatgggtggaccagtcgatggtggtttcagtgtagcattcgaccctcttgatgggtccagcattgtcgacacgaacttcacagttggaaccatatttggtgtctggcctggtgacaagctgacaggcgtcaccggtggagaccaagttgctgccgccatgggcatctatggccctcgcactacttacattatcgctctcaaagactgtcctggaactcatgaattccttcttcttgatgaaggaaaatggcagcatgtcaaggacaccacaaccattggagaggggaaaatgttctctcctggtaacctgagggctacatttgataatcctgaatatgacaagctcatcaactactatgtcaaggagaaggacacattgcgttacact

SEQ ID NO: 3821 - DNA, 173 bp, Oryza sativa
  Clone ID: uC-osflcyp085f05b1
gttttatccaaagggtcagcttctcttccacgtagaggatgatcatttaagaatgggggtatcctccagacaccaccggctgtgtttgcgacagacggttcgaaaagatcggacgaactaacctagctgaagaagcaccaacagcagacgtccattacagtggaggatgccag

SEQ ID NO: 3822 - DNA, 209 bp, Oryza sativa
  Clone ID: uC-osflcyp085f07b1
tcggtcatattatgagagtcattttgtgtacggggggtatgttgtacatggaagagcggtgatatcctcgatagagtactagttctgtctttgactggggtttagtaaggtgcggaggatctaggctatgtgctgaggaacaaagggcatattctattgctgtggattatggtagagtatggtcactatgagttagtgatgctagagga

SEQ ID NO: 3823 - DNA, 202 bp, Oryza sativa
  Clone ID: uC-osflcyp085f09b1
tcgtttatatccaaagcgtcatcttcgattccgcgggaatgatgaccatcgaagtgcggttccgacctccagaggctaccggaacagcttttgactgagtgccctaataaatcagacatactaaaaaagctgcacaagaatctacagcatataaaactaaagtgtaggaaactagagtatggtcactatgagatcgtgatgc

SEQ ID NO: 3824 - DNA, 322 bp, Oryza sativa
  Clone ID: uC-osflcyp085f11b1
gtgcagtgggaatttggatcgaccatggatgttgtggctgtgcaaacaaaatcaattcctgaaaggatcaaggattggactaatgtggttgttgcctatgaacttgtgtgggccatagtaactggtgaagttgctacaccagatcaagcacatgaagtgcatgatggactgaggaagtggctcgctgctaatgctagagcagaagttgctgattcaacagtgatcatgtatggaggttccgcaactgctgcgaactgcatggagctggcagcaaatcctgatgttgatgcgttttctggtctgtggtgcttcattgaagtct

SEQ ID NO: 3825 - DNA, 420 bp, Oryza sativa
  unsure (1)..(420): unsure at all n locations
  Clone ID: uC-osflcyp085g01b1
gtcgtttctcggctgccgccgccattacgtcactactggaacttccttccaggcaacccaccacccgccaccgcacctgcccataaaacccggccacatccatcaagcagcaacagcaactaccagtttggaactaccatcccccgtgaccacctgcccgctttcccgcacaaagttcactagtagttactgctccaatatggagtagtactaatcctccgtatactcgaatcccaggatctctcccggtcggatgctcactcgtcttccccaccactcgtcgccccttgtcttcccctgccgnctttccgacgccgccgccggccggacgctctccaccgncaccggcagcaactccaccaccgtcaagatggctcggtcggcgctcgacgaggtcaccgacgccggcgccttcgaccg

SEQ ID NO: 3826 - DNA, 447 bp, Oryza sativa
  Clone ID: uC-osflcyp085g02b1
ccttgtctcccccgattcaactcgggaccaccggccacctctagtacatcgccatggttcttccctgcgtactggccccccatctccgagctccttccctccgtgctggcgccctccccgctcttcacctcatgcgcagcttgagcagtcaacggggcggagtggcctcggcagcggcacggagagtactccgcggcggtggtctgcttccggacggactctcctccttcccttccagccgccaaggcgcatgtgaattggcgggcgcctcgtcgacatcatctgcggcatcggcgccatcacagtggcttgatctgcggttgtttcttggtctccacgccaccggcaaccttctgcagtcatggcggccgtcgaacctgaccgggcctttcggatccagtgttcggctgtgcgtaaggcgcgagctgctttccagatttcctcaag

SEQ ID NO: 3827 - DNA, 519 bp, Oryza sativa
  Clone ID: uC-osflcyp085g03b1
aatagtgagaaagctggttgaaatgatgtgcagtgtttttgttgcttcttggactggagtgatcaagtatcatgggcctcgcccaagcacacggcctcatcaggtatttgttgcaaaccatacatcgatgatagatttcattattctggagcagatgacagcatttgctgtcattatgcaaaagcatcctggatgggttggatttattcagaagactatcttggaaagtgttggttgcatctggtttaatcgcaatgatctcaaggatcgtgaagtggttgcaaaaaagttacgagatcatgttcaacatccagacagcaatcctctcctgattttccctgaaggaacttgtgttaacaaccagtacactgtcatgttcaagaagggtgcttttgagcttggctgtgctgtatgcccaatagctatcaaatacaataaaatattttgtgatgccttctggaaatagtagaagcaatcgtttaccatgcacttggtaagcttatgacatcatgggcaggt

SEQ ID NO: 3828 - DNA, 539 bp, Oryza sativa
  Clone ID: uC-osflcyp085g04b1
atttttaatcaatgattttacctgtcatctaaagcgcaaaatgctcacacagggccgcctgtttttatctccaagaattattgggttctacactaatctttttggccacaaaacaaaattcttctttctttgggaagatatcgaggacatccaagtgatgcctgcaacactatattcaatgggaagtccatctctgcttattattcttcacaagggcagaggaatggatgcaaggcatggagcaaagcaacttgataatgaaggccgactcaagtttcatttccagtcttttgtatcgttcaatgtggcacataaaacaataatggcgctctggaaggcaaggtccttgacccctgaacaaaaagtacagctggtagaagaagaatcagaaatgaaagacctccagaataatgaaagtgattctttcttaggaatagaggatgcaaaaatgtcagaagtattttcatctacaaaaccttttgatgtatcaacactcatgagcatatttgagggtggtcctttggagcatcaagtgatgg

SEQ ID NO: 3829 - DNA, 237 bp, Oryza sativa
  Clone ID: uC-osflcyp085g06b1
gttttatcaaaagggtcatcttgtatacctgggaaatgttgtttatggaagtgtggtggcgtcctccagaggctatcggaactgtcttcgactgagggtcagtataaatcagacagactaaaatatctgaagaggcacctacagcgtattctactacagtggatgaagctagagtaaggtcactatgagatcgtgatgctagaagatgcacacacttttcgagagtgctgcgagaat

SEQ ID NO: 3830 - DNA, 75 bp, Oryza sativa
  Clone ID: uC-osflcyp085g07b1
gttatatgaaaagagacatcttgtattccgggggaatattgaacatggaagtgtggttaaatcctccataggata

SEQ ID NO: 3831 - DNA, 166 bp, Oryza sativa
  Clone ID: uC-osflcyp085g08b1
tgttatatcaaaagtgtcagcttgtacaccggggtaattatgtacatctaagagttattataaccactagacaacataataactgtatatgtcagacttgcttattaaatcagacaaactatgctagctgaagataacttaacagcatattctactactgtggatg

SEQ ID NO: 3832 - DNA, 216 bp, Oryza sativa
  Clone ID: uC-osflcyp085g09b1
tcgttcttattaaaattgtcatcttatgaaccaggggcatattatacattaaagcgcgtttcttacctccataaactacaatatcagtcttcgactaaagtcctcaagaacttaaacaaactaaattatattatgatttaattattctggatcagattactgtgtatgaagcgtagagttaaaaaacatcctggatgggatgctacaatataaaca

SEQ ID NO: 3833 - DNA, 381 bp, Oryza sativa
  Clone ID: uC-osflcyp085g11b1
tttagatgataatagttatctagggctacggggatatgctgtaggtggtaatgctatgctgacttacaggaagcactggctatctctcggtctggagacagcattggctacgagaagttatattagctgtagaagatcccatatgattgaaaaaaaccatggattaagacagaatgtaagcatgatgagagcatgttgctggaatcaaaccccacttttgtataatggtatggaaaccctgatgacaatggtctacatacctattagggatacagggtgtacgctaagccaggggagtaccgacatttcactagcaatgataaagccttgacactataatacgcttcaaagcatgagcaatatgttgactgtgttggtgga

SEQ ID NO: 3834 - DNA, 358 bp, Oryza sativa
  Clone ID: uC-osflcyp085g12b1
tcttttcgttccgatcggcgagctaaaagcatgccgacccgctctagatgacctggcgatcacgatgaccgggcagtaccaatttatatctacttttccctatcgtccataagcttgaagagtagtgacctgctcaccacccatgacgatcagtgcataaaggacctgctcctgaacgcattcaagtgggctgcgaccaacatggactaattgagctgcccatatggcaagtcttgtgctgaagctgacgacaaccgttttgctggaatttcaccatacaatgttcaatttcagaaactgctagtacatataggatcttaccaaagatagcgcagccatagagacatagctttttaaa

SEQ ID NO: 3835 - DNA, 438 bp, Oryza sativa
  Clone ID: uC-osflcyp085h01b1
tttacttgtccgtttttttttttaacaaaatggtgaaggctagcctacaaaattagaggctaattctgacaagcaactccggtatacaaagtagaccaacacacgatggaaaaaaggcacaggcaacaccattatttgttccgattaaccgtgacaatatgattcaactgcgggcaaaatttaaaggtgacaccagtaaaaacaatgctgcgatgctcttagaccgttcacgcacgcggcttcccaccaagggttgggaactgagcctgatcttcaatggatggtgcagatgtagaatatgggccacgttggtaaccaccaccatatccacgaccggcacgatctccacgcccccttccacgaccacggacggcatagtacctttctcctttcgcaggcttcaagaactcattgatgcttacagacttcttggcacgc

SEQ ID NO: 3836 - DNA, 479 bp, Oryza sativa
  Clone ID: uC-osflcyp085h04b1
gttgaaaccctcagctgcgcgctgcagccacgctgctataaccctaggttcctaaatcctccgatccggggaccccacgcactcggattccggtactcgtcatctgccctatctccttcgctgctgcctgctgatagtgccgccgtggtcttgccttggaccacgcactactccctcgtccatgtccgtcgcagtgttgcgaccaagcctgctccagctggggggctcgtctgctcctgaccctgcaagggaatgatctacattgagggcgggctgttaaaagcgccgccagaacactgcttttcatgagagccgtgtccgctggccctgacaggaggcgttcgagcgccctgtccaggggcgagcttgacgacgatgagaacactctagcgctcaccactgcgcccgcggtgctcaacaactactaggcctagtatgtgctttatgagtaggcacagtctacatatagtgagaagaat

SEQ ID NO: 3837 - DNA, 406 bp, Oryza sativa
  unsure (1)..(406): unsure at all n locations
  Clone ID: uC-osflcyp085h07b1
tcgagagcatctagctagggagagaaaggaagagacgagaggagagagatggccactgcttatgctcccatggcgagccagctgatgaagagcagcttggtgtgctccaagccgagggggctgtctggtgcttcgctgacaaggaggccccgcttcacagtcaaggccatccagtctgagaagccaacgtaccaggtggtgcagcccatcaatggcgaccccttcatcggcagcctggagacgccggtgacctccagcccgctggtcgcctggtacctatccaacctcccggcgtaccgcaccgncgtcagcccgctgctccgcggcatcgaggtcggcctcgcccacggctaccttctcgtcgggcccttcgcgctcaccggcccgctccgcacacgccggtgca

SEQ ID NO: 3838 - DNA, 433 bp, Oryza sativa
  Clone ID: uC-osflcyp085h09b1
tcggttggggtgtcactcgccttccccgcaagacccacaggggtctccgtaaggtcgcctgtatcggtgcctggcatcctgctagggtttcctatactgttgctcgcgctggtcagaatgggtaccaccaccgcactgagatgaataagaaggtttacaagatcggcaagtctggccaggaaagccatgctgcctgcactgaatttgacaggactgagaaggacatcactcccatgggtggcttccctcactacggtgttgtgaagggcgactacctcatgatcaagggttgctgtgttggccccaagaagagggtcgtcaccctccgccagtccctgctcaagcagacctctcgtttggcgctcgaggagatcaagctcaagttcatcgacacctcgtccaagtcgggcacggtcgcttccagaccaccgac

SEQ ID NO: 3839 - DNA, 433 bp, Oryza sativa
  Clone ID: uC-osflcyp085h11b1
tttagatgctgatgcacgacaagggggagggggaactgctgatccaaaagcaggtctgggacagtagggctcccagttctgtcactgcagagaagcagcaggatgctgctactgagaagccaaagctaccaaatggcctcaatggagagctgaaggctcctgccgagaacggaacatctgcaggctgtacctatgcagcgaaggtcgccacaaacacgcatcgactgagaagcctgaccttgtcaacgcgaccgtcaaagctagtttactggatcacatacctacacgttccctagctgggcatgaagaacatgactgccctgaagaactcaacaggcttgaggtcccaaggaactgatggcctagacaactctgtatctgtgagactggcagcacggccccaagatcctgctgactggctgatactggggag

SEQ ID NO: 3840 - DNA, 451 bp, Oryza sativa
  Clone ID: uC-osflcyp086a01b1
ggttaagcaaaaacgatctcgatccgcgattttttaaatatccagaatgatccatcccggtaaagataagataagaactgctcgttagatagaatggattcaattttgatttggagttgcttcttttaggtaaaagaaaaaataagtaaaagcaaagaccttaattttactttacaggaaatgcgttttttttacttcatttttttctttcttttggtattcgagtcgaagaaatacgagaattctataactaccaaaaaactttcttttcattgcaatagtttaactagttaatagttaattagttttgttacggaaaaatggtatggaaaaatagattgctaatctaatatattaattaaattaattaaacgggaggttgatagtttatttgttggagaagagtcaattcttctcttatcatttcaggattggattgatcatctcgagt

SEQ ID NO: 3841 - DNA, 390 bp, Oryza sativa
  Clone ID: uC-osflcyp086a02b1
cgtacgtgtacacacaccctgcctggttccccgtccacctccgcctccgcgaccgtcatggcgctcgccggcgtccttcccggcgcgctcagatcggcggcggctgtggacggagcggtagaactcctcgccgccgagcgccctactacacccctgcgcccacacctagacgtcgccggctgtgccgggaggacggcgaccaccgggctccagcgccgcatgagagccgggccttcaacccggtccctacagcttgaagccgccgccgtcgtctatggcgtcggtgcccgaaaggggaggaccgagaccacccggttacagcgccggattagaggccggccttcacccggggttcttccacttgacgagcctggaccggtccggggagga

SEQ ID NO: 3842 - DNA, 383 bp, Oryza sativa
  Clone ID: uC-osflcyp086a05b1
gtttttaaagtatagacacagtgatacaatggcctgcatcaacacattccagagctgctccgtcctcaagggagcaaagatcaatggtaccaagatcggaggagggaggggatcaccaaccttccggtgccgggcatcgacgttcatggacgggagcctcctgctagagatcgacgagaaccctgaagccatcatctccggtgagtggccggagaacttctccctgctcaactacgacgatcttcgggcctacctccagtcacaggaggccgctgcttaagccgacaaccagcgtgtggcgctcctgagtgaagccatgtcggcgcctgtgcttggagccactggcgagcaaacgcttgaggaggttgagtgccactttgaga

SEQ ID NO: 3843 - DNA, 252 bp, Oryza sativa
  Clone ID: uC-osflcyp086a06b1
gctgttcggtggcacggccgcgacgaagggaggcggacgtcggggggcgcgacgatggcgactgcgacgggatggcgacgggggccgcggcgaagggaggcggtcgtcgtggggcgcgacgatggcgactgcgacggggggcgccgccgcctagtcccagctactctccctccctatgtatctctctctgtgagggtttctgtctctctctgtccattcggccgatctcacagggcggctggggagggggtg

SEQ ID NO: 3844 - DNA, 545 bp, Oryza sativa
  Clone ID: uC-osflcyp086a07b1
ttgaaccatggcatcgcgcacgagctgatggacgaggtggagcgggtgagcaaggcgcactacgccaactgccgggaggagaagttcaaggagttcgcgcggcggatgctggaggccggcgagaagggcgccgacgtgaagggcatcgactgggagagcaccttcttcgtccgccaccgccccgtctccaacctcgccgacctccccgacgtcgacgaccactacaggtatacttaccctgcatgcatgcgtcatcatcaatcatcattaacaaactcaatttagtctttgttaatttatctgcatgcttctgaaagaaaagcttaagttgcaaactcgcctaaatgatcgtcagtattttaatcggaagtagtacactcacaaagcaaaggcttacaaagtatcctagctactgtagagtgtaggcctgaccaaaacctcaacaaagttacacctgacacgacgcgctctactatagaaatgcccacttctgtaaacagctactgcaaccaaaggtgacaggattatcgaccaaaaggagatgc

SEQ ID NO: 3845 - DNA, 415 bp, Oryza sativa
  Clone ID: uC-osflcyp086a09b1
ttttgcctcacactcactcgctcagcactacttgcaccccctagctgagatcagtagtaaacggtcagtcaattgttgcaaagcgatcagctactggcgatggctcagggaaggggcagtgctgcaggacgacgcaacgccgccgtgctggcgatggtcctcctctgcgtgctcctccacggcgagctcgccgagtcggccgtgtacaccgtcggcgaccgcggcggctggggcttcaactccggcggctggctcaggggcaagcgcttccgcgccggcgacgtgctcgtgttcaagtacagcccgtcggcgcacaacgtggtggcggtgaacgcggcggggtacaagtcgtgcagcgcgccgaggggtgccaaggtgtacaagtcgggcagcgaccgcgtaaccctggcgcgcg

SEQ ID NO: 3846 - DNA, 370 bp, Oryza sativa
  Clone ID: uC-osflcyp086a10b1
ttttagatcgccctcgacccccctcgcccgccggcttcgccgatccccatacgtcgagcaccgccgccgccgccgacgccggcgttccgccacatccccgcctcgctgcccgattatatcattattacaccttgctgcggcttttattgattcgtgaatcgtgatggcgtgccggggcttcttcgaatgcctactgaagctgctcaactttgtcctcacggtcgccggcctcgccatggtcggatatgggatttacctgctcgtcgagtggatgaggatttccggccgcggcggcggggcaccaccttcaaccgcgccccctgctgagttagcttatgacttggccacccatgctcacggatggggtcct

SEQ ID NO: 3847 - DNA, 482 bp, Oryza sativa
  Clone ID: uC-osflcyp086a11b1
tgttgaagaagaaccgcgttagggcttcctgccccgccgccggcgagagtgggctttgactcccctcggagccgcctcctcttcgtctcatctccccgcggccttgttcatccccttctacgagccttagcgccgcaccgcaggttccagctcggtggctggagtttaatttttatttgttctccatggcgcttcggttcgaggtattaggaagattcaatcgtgctcgtgcagctcgattaacactaccccactttacttgtcagacaccactgtttatgcctgttggaactcaaggtacaataaaaggcctgactactgaccagttagaggaaataggttgccagattatacttggaaacacctaccaccttgaacttcgtccaggttctcaacttattgacgacttgggtggccttcacaaatttatgaattggaaaagggcgttgctgactgactctggtgggttccaaatgggttct

SEQ ID NO: 3848 - DNA, 447 bp, Oryza sativa
  Clone ID: uC-osflcyp086a12b1
ttttctcctcttttttttttttttccccttgcccaccaccaccaccgcctctctcgccggcgaagaggaagggggaagcgcggctgcggcggcggcggcggcgcgcggcggaggtagggcttgaggtcctgaggtctctcctccgtctcgatctgcctcctaacccgaagcgagagggattttgcgcggtgagggtgggggtccgtacagcccggccgccgcatcccggggtggcgctgaggcttgcatcagcttgcctctatctgaatcttctggccgtgaaaagaagctagaattatttttctttgtcaagaccaaaaagtatttattcaaaccaaacactatgaccacacaggcttgtaagaagagaagagcacgttatataagcagtgaatcagaaaactctggtacagactctgaggttgagggaagcaaacttttcaaaaa

SEQ ID NO: 3849 - DNA, 415 bp, Oryza sativa
  Clone ID: uC-osflcyp086b04b1
gtttttccagaaccttctcttcttccttgttcgttcatcccctaaccctttctttgttcatctcgttcttcctcttgtcgtctcgtcgagatggccgggattggtccgatcaggcaggactgggagccggtggtggtgcggaagaaggcgcccaccgccgccgccaagaaggatgagaaggccgtcaacgccgcccgccgatccggcgccttgatcgagaccatgaagaagtataacgctggaacaaacaaggcggagtccagtggtacatccctcaacaccaagcgggtggatgacgacacctagagccttgcccatgagcgtgcctcaagtgacctgaagaaaatccttatgcaagcaaggctggacaagaagatgaccccaggcacagttttgacagatgatcaatgagaag

SEQ ID NO: 3850 - DNA, 351 bp, Oryza sativa
  Clone ID: uC-osflcyp086b05b1
gttggatcatccctctggttccaggattcgttcctgttggcgttggtggagggcccagcacaccataaatataatgggcatcttctgctgcttccagtccgaggacagaggaggcgacggggacggcgatggcgacggagcgcctccctcgacctcctccgagcctgcccctcgtccccagaagctgcagccgccggaggacgacgacgatgaccaacgccccgccgcataatcaatcatatcgatcggctctctctctctctctctatacatgtactaccactatctatataatatgtcatatacttctacttcacttatacagtatatagctacagtacctacctacat

SEQ ID NO: 3851 - DNA, 390 bp, Oryza sativa
  Clone ID: uC-osflcyp086b07b1
tgtgcggcggcggccgtgtacgaggtgggcgacaagaccgggtggaccatcttgggcaatcccaactacacagtctgggccgcctccaagaagttccatctcggcgacaccgtcgtgttcacgtacaacaagcagctccacaacgtgatggcggtgagcaaggcggactacaagaactgcgacgcgagaaagccgatcgccacctggtcgacgggcaacgactcggtggtcctcaacgccacgggccaccactacttcctctgcggcttcccgaaccactgcggcatcggccagaaggtggacatccgcgtcgccgcctccggccactcctctgctgccccttccatggcgcccgccccggcctccggctccgaggcacccgtcgccccc

SEQ ID NO: 3852 - DNA, 235 bp, Oryza sativa
  Clone ID: uC-osflcyp086b09b1
tttttcgcccgcctcgtcttaaaacgccttctggaaaattccgccaatccgagagggatttttcctcgcaaccaaccaaaccaaccaaacccccaaccaagcgagcaagccgccttcgccgggggggcccccaccctgacggcaaccctagccctccgatcaccggcgctgagactgatcccgccgccgtaggaggaggaggaggaggtggtggtggtggtggtgatggaggggg

SEQ ID NO: 3853 - DNA, 561 bp, Oryza sativa
  unsure (1)..(561): unsure at all n locations
  Clone ID: uC-osflcyp086b11b1
tatggtacgctttggcgatgtgatttaagggctggtggggtggtgcttgttggtcatttcagcagctttgtgcggtcggggtggtctcggtgccgatggcgaggaagcagcatatcgccatattcaccacggcgagcctgccatggatgactggaactgccgtcaaccccctcttccgagcggcctacctcgcgaaggccggggactgggaggttacgctggnggttccatggctttcgaagggggaccagctgctggtttatcctaacaagatgaaattcagtgtgcccggggagcaagaaggctatgtgcgacggtggctcgaggagcgaattgggctgctgccgaagtttgagataaaattctatcctggaaagttctcaacggagaaaagaagcattctacctgctggggacatcacccagactgtatctgatgataaagcagacattgcagttcttgaagagccagagcatcttacatggtaccatcatggacgaaggtggaaaaacacattcagaaaagttataggtgttggtcataccaactatttggagtatg

SEQ ID NO: 3854 - DNA, 342 bp, Oryza sativa
  Clone ID: uC-osflcyp086c03b1
gttatagttatggctatgtgagggattcactggatttgtgttcaacccttaagacatgtcaggcatgttaggcttaagacattacgatttttaatttctattttttggtacaagaatctccatgtgaatttaggtgtatgcctgtttgtcagcatctatgatattttatttaagttgtaaaatctgctcgtgtaagttttgtccatattcagccaatacagtaagtgaaccacccagattgccttaaaaaaaaaaaaaaaaaaaaaaaatattaaacaaatttaaaaatttaaatatgttaataaaaaataaatggccggtccttttagggggccctatctt

SEQ ID NO: 3855 - DNA, 557 bp, Oryza sativa
  unsure (1)..(557): unsure at all n locations
  Clone ID: uC-osflcyp086c04b1
gttactccagaaccttctcttcttccttgttcgttcatcccctaaccctttctttgttcatcttgttcttcctcttgtcgtctcgtcgagatggccgggattggtccgatcaggcaggactgggagccggtggtggtgcggaagaaggcgcccaccgccgccgccaagaaggatgagaaggccgtcaacgccgcccgccgctccggcgccgagatcgagaccatgaagaagtataacgctggaacaaacaaggcggcgtccagtggcacatccctcaacaccaagcggctggatgacgacaccgagagccttgcccatgagcgtgtctcaagtgacctgaagaaaaacctcatgcaagcaaggctggacaagaagatgacccaggcacagcttgcacagatgatcaatgagaagccccaggtgatccaggagtacgagtcaggtaaagctattccgaaccagcagatcatcgggaagttgaaagggctcttgaacaaagctgcgcggcaagaaataatgtctactattaggcccctgagcatagtgntggagcaacc

SEQ ID NO: 3856 - DNA, 234 bp, Oryza sativa
  Clone ID: uC-osflcyp086c07b1
ttttcaatccaaaaggcttacaagagaagcaaccatccggaagaagatggccatggcgacgtcctccgcatccaccgtctccttctccgcccgcccgtccgccgcgagcgcggtccggccgtgcgccgccgcggggagggcgagggcgcgggcggcggcgggggagagcggcaagtggtgggcgccgctgctggggtggtcggggaaggccgactacatcgaggccccggcgcc

SEQ ID NO: 3857 - DNA, 522 bp, Oryza sativa
  Clone ID: uC-osflcyp086c08b1
tttccttgctaccaagcttggcgctcgtcttacggaggttcgcaagaatgggacctgcgcatggctcaggcctgacgggaagacccaagtgactgttgagtaccgcaatgagagcggtgccagggtccctgtccgtgtccacaccgtcctcatctctacccagcatgatgagacagtcaccaacgatgagattgctgctgacctgaaggagcatgtcatcaagcctgtcattcccgagcagtaccttgatgagaagacaatcttccatcttaacccatctggtcgcttcgtcattggcggacctcatggtgatgctggtctcactggccggaagatcatcattgacacttatggtggctggggagctcacggtggtggtgccttctctggcaaggacccaaccaaggttgaccgcagtggagcatacgtcgcaaggcaagctgccaagagcattgttgctagtggccttgctcgccgctgcatttgccaagtatcatacgccatcggtgtcccagagccact

SEQ ID NO: 3858 - DNA, 515 bp, Oryza sativa
  Clone ID: uC-osflcyp086d02b1
gtgttcaccatggcgctctcctccccggtgatggcccgcgcggcgccgtcgacctcctccgcgctcttcggcgaggcgcggatcaccatgcgcaagaccgccgcgaagcccaagccggcggcgtcgtcggggagcccgtggtacggcgccgaccgcgtcctctacctcggcccgctctccggcgagccgccgagctacctcaccggcgagttcccgggcgactacgggtgggacaccgcggggctctccgccgacccggagacgttcgccaagaaccgggagctggaggtgatccactcccggtgggcgatgctgggcgcgctcggctgcgtcttcccggagctcctcgcccggaacggcgtcaagttcggcgaggccgtgtggttcaaggcgggctcgcagatcttcagcgagggcgggctcgactacctcggcaacccgagcctgatccacgcgcagagcatcctcgccatctgggcggtgcaagtggtgctcatgggcgccgtcgaggggta

SEQ ID NO: 3859 - DNA, 264 bp, Oryza sativa
  Clone ID: uC-osflcyp086d03b1
gttgttcccaagggatccaaccatgaagtacccttggtccaagccaaaggaaggcacaccgttgttcaaggacagatacccacctatagaaacctacaagtgatcagaagtactagaccgtattcttttcgaaacaaaatagcatttctttgcatggatttgtaaaacatgcatggtgccacaatcttcttggatgtatcgagagcaaagtgagatctcacataaaagaaagggaaatgataatgatgcaatattacactagcc

SEQ ID NO: 3860 - DNA, 537 bp, Oryza sativa
  Clone ID: uC-osflcyp086d04b1
attccctcatcccattaaatttgctcaaataattaaatatgacaggcatgggttcttccatcggccgtgccaccattttctactgcgttgctctatccataattgccggcgccgcagcgacacaggtgccccccaccgaagcagagtccgtagaaggtagtagcacatgcctctcctgcaaaaattactgatcagctaactaatgcgttcattttttttggtacacgtactgatcacggcacgcgcttgtggctgcacgtatgcatatcccagcggcagagcttgcgtcctctgccttcaaggccgacacgttgccctcagcctcccgcaagctgatggccgttagtgacgtgccgctagcgccggtgtgcccggtgcggttcgacaagatgaaagggcccgccatcgagctgggaaagaagtgcaagacgacaggggtgaaggtgtgctgtgaggcgttcaagacattcgcatgcccgcacaacaagctgatcaatgacgtcaacaacggatgcgcggacgaaatgttctacacca

SEQ ID NO: 3861 - DNA, 551 bp, Oryza sativa
  Clone ID: uC-osflcyp086d05b1
cgtgcttctgatatctgtcaggcaatagacgaaaggaaagcagactgggatgctttgtttgagccatatccattttttgaatcgtatagaaattatctaaagattgagatcacagcaagaaatgaagatgacctcaggaattggaaaggttgggtagaatcccggcttcgtacgcttgtattaaagattgaacgatttacacgtgagatgctcctctcacatcctaatcctagagatttcatcgacagctccaggccattgcattgtttttactttatgggtctctggaaaaaacaaatcagccaagctcaagaagctgagcagtatgacattagagcaattgtgaatgaatttaaaagcaatatccatgcatatcaacactggagagaaggaatggaaattgaagtttcccatgtaaaaagaaaagatatcccatcatttgtttttcctggtggaatcacgccttctcgcccatcaagaacagttggcaaggaagctcgggctgtttcaagaagtaatatttcagctaatggtcaagaaaagaaatgttc

SEQ ID NO: 3862 - DNA, 355 bp, Oryza sativa
  Clone ID: uC-osflcyp086d06b1
cttataggtgggttggcttctcctccccctcccggttcggttcggttcggttcgggtccggttcgatttcggtttttccttcggttcgggggttggtgggaaagcatggcggcgccggatgttgagtaccgctgcttcgtcggcggcctcgcctgggccaccgacgaccgctccctcgaagccgccttctccacctacggcgagatcctcgagtccaagatcatcaacgatcgggagacggggaggtcgcgcgggttcgggttcgtgacgttctcgagcgagcaggccatgcgcgacgccatcgaggggatgaacggcaaggagcttgacggccgcaacatcaccgtcaacgagg

SEQ ID NO: 3863 - DNA, 550 bp, Oryza sativa
  Clone ID: uC-osflcyp086d07b1
tctctcagctctcacagctcactgcatcaatggttgcggccaccatggcgctctcctccccggtgatggcccgcgcggcgccgtcgacctcctccgcgctcttcggcgaggcgcggatcaccatgcgcaagaccgccgcgaagcccaagccggcggcgtcgtcggggagcccgtggtacggcgccgaccgcgtcctctacctcggcccgctctccggcgagccgccgagctacctcaccggcgagttcccgggcgactacgggtgggacaccgcggggctctccgccgacccggagacgttcgccaagaaccgggagctggaggtgatccactcccggtgggcgatgctgggcgcgctcggctgcgtcttcccggagctcctcgcccggaacggcgtcaagttcggcgaggccgtgtggttcaaggcgggctcgcagatcttcagcgagggcgggctcgactacctcggcaacccgagcctgatccacgcgcagagcatcctcgccatctgggcggtgcaggtggtgctcatgggcgccgtcgaggggta

SEQ ID NO: 3864 - DNA, 442 bp, Oryza sativa
  Clone ID: uC-osflcyp086d09b1
tttatatatgccaaaccaatcccaggaaccttcgtctgcaacatcggtgacatgctgaaggtttggtcaaacggaatatatcagccaacacttcatcgagttgttaacaactcccctcgctaccgtgtatctgttgcattcttctatgagtcaaacttcgatgctgccgtagagcctgttgagttctgccgggagagaacaggtggtgttgccaagtatgaaaaggttgtgtacggagaacacttggttcagaaagtcttgacaaacttcgtcatgtaaaatttgtggaaaagaacatgcattgtactccaatgtctgatcgcaacattcgtcactaaaataaaatcatttgtaaatttgtcatagcacagtagaacagtcatattgaagaatggaatgcatccttaattgaaatcacaagcgatgtgaataatcttttcgt

SEQ ID NO: 3865 - DNA, 546 bp, Oryza sativa
  Clone ID: uC-osflcyp086d10b1
tttttataagcagaagccaaccattataaccacccaaaatcgaatcccccaaccaaaaaagaagcaacaagaagaagaagagaggagaaagtgagagtgcacacacactatagcatagcactactctcttctttaggagagagcacacagttccaagaaaagctctgagcttcttccatcgatctctcggccatggcacggtggctacagctgccgtgcagcctcctgctcgtcatcatgctcgtcgccgccacggccgccgccgccgacgtcgtcgtccgcgacgacgagaagtgcgccgcgtgcggcctgcccagcccctgcggcacgacgtgcacgtacgccagcccgccgccgcccgacgtgctgccgactccggtctactacccgccgccgacgcccgtctactaccccccgccgtacccgacgacggtggcctaccctgcgtcgaccacgcgcgagaccaactgcccgccgccgccgtacggaggcggaggctacaacccgacgccgagctacaacccgacgcccggctacaacccgacg

SEQ ID NO: 3866 - DNA, 553 bp, Oryza sativa
  Clone ID: uC-osflcyp086d11b1
tattcgctctcgtccccttccctctcctctctcgctcgctcctcttccgcggcgcgcgcgccggcgactcgccgcgtcgggccggccgacaaccgccgcgagggagaagccccctccccttggggggcacccatgacgtcgtgcgggtgcctggtgctcgagaaggtggaggaccacggcggcgaggcggcggggagggggagagggaggctcgcgcagggtggcggcggcggcggcggtggctgcggatcgtgcgcgggggagtggaggagccggtcggagaccatgttccccatctacgtgatggggagctcgcgggccagctccgccgcggcggcgcggggcatagtcgacgccgccggggaccccatatgggaggccgtcaagtcggaggccaagtctgaggcagagaaggaacctattttaagtagcttcttgtacgccagcgtactatctcatgactgtctcgagagggcgttgagtttcgtccttgcaaacaggctcgaagatccaacattgcttgcaactcagttaatagacattttcaatgatg

SEQ ID NO: 3867 - DNA, 541 bp, Oryza sativa
  Clone ID: uC-osflcyp086d12b1
ttgtcctctcctctccacgccgaccgccatggccgccgccgccgaggtcgacgcggcccccgacctccccaacggatcctccgccaccgccacaaccgacgacgccgccgaggagaagcctgatgtcaaaccccaggtggaggtggaggtggagtacgtcccggagcaggcggacctggacgacggcctcctcgccgacttcaagagcatcttcgacaagttcaccttcaaggattcctctgccgacgccgaggatgacgagaagaaagatgaggctggcactgatgccgcaaagaaggctgcagggtctgattcggacgacgacgagcaggggacacagcaaaagaaggaagggggcttgtccaacaagcaaaagaaactacaacgaaggatgaagattgcagaactgaaacagatatgcaatagacctgatgttgtggaggtctgggatgcaacggcatcggatccatcattacttgtctatctgaagtcttacaggaacactgtacctgtcccaggcattggtgtaaaaggccaaatt

SEQ ID NO: 3868 - DNA, 480 bp, Oryza sativa
  Clone ID: uC-osflcyp086e03b1
gtttttctctcaaaaccgcgggaatcaatcaatcgccgttcgcgtcgcgccacgagatattttcccccaagaaaagttggagtgagggatgagtgctatggcgatgtcgtcgctgaacccgaacgcggcgccgttcatcccggcagcgttcaggagggtggaggacttctcgccggagtggtgggagctcgtcaagaccacggcgtggttccgcgaccactggttcaggcagcaccagatgtacgaggacgctgcggcggaggaggaccaccaccgccaggtgttcgacgacgacctcgccgcgctcctgcccgacgactcgctcgacctcctcgacatggtcgacaccgacgacctcttctacacccccgacccccccgttcaccacaagccgacgacgactcccaccctcgacgccgacgtgctcagggcgctcagcctcaactcgccgaggttgggcggcgccgggatggtgaggca

SEQ ID NO: 3869 - DNA, 542 bp, Oryza sativa
  Clone ID: uC-osflcyp086e04b1
attcgtacttgttggcaaagtggacttcactgtcaggcatctttcttcagcagttgagacatttccaaattcattcactagtttctcaactggtcaaccttgcatcagtacatcgcccaagcagtgcgcagcttacactgcacctgctaactctcaaacaacttggacaatgcgcgctaccttccctgaatatgtggttgctcttgctaccatcgttggatctgttctcttcacaatatttggtggtgttggaattgcttgccttccattgggacttatattctcatttgtccggcgcccaaaagctgtcattacacgctcacaatatataaaggaagcaactgaactaggtaagaaggctcgggaattgaagaaagcagctgaagcccttcaccaagaagagaaaagtgggaagaagggcagaaaatggcgcaaaaatgtcaaggcccttgggaaggaattagtacttttagaagatgacatgaaggctctttgagagatgtacccttcaggagaacaggctgaggctacctgggctttga

SEQ ID NO: 3870 - DNA, 477 bp, Oryza sativa
  Clone ID: uC-osflcyp086e06b1
ctccttgtccccaattgagcaaaccctagccgccgccgccgatcaatctcctagctgctgcctactatggcgatgcgctacctcgccggtaagctgcgggcccccgcccccgccgccgccgctctccgtcgccctcgatccctctccgccaacgcctcccagggaggacgcagcaatgcaactacagagaatgttgcgaggaatatggatggtgatctgggttgggtacgggaagaaatagctaaacttgaaaagttaagactggaaatcgaggagacaacaaggtacaacaggctccacaagcggtgtttaattgggtctgtgtttgctgggttcggccttggaggtctcgcttgtgcctggtatactcgtagctacaggaaggccctcaaggagcattttgacaacccgatcggttggatgccgccgtattcaacatcttcgcctgagtagcctgggttggggatccagctcact

SEQ ID NO: 3871 - DNA, 520 bp, Oryza sativa
  Clone ID: uC-osflcyp086e07b1
tttcaccttggctgactacaacatccagaaggagtccacccttcacctggttctcaggctcaggggtgggatgcagatcttcgtgaagaccctgactggcaagaccattacccttgaggttgagtcgtccgacactattgacaacgtgaaggcgaagatccaggacaaggagggcatccccccggaccagcagcgtctgatctttgctggtaagcagcttgaggatggccgcacccttgcggattacaacatccagaaggagtccacactccacctggtgctccgcctccgtggtggccagtaagtcctcagccatggagctgctgctgttctagggttcacaagtctgcctatttgtcttccccaatggagctatggttgtctggtctggtccttggtcgtgtcccgtttcattgtgtactatttacctgtaatgtgtatccttaagtctggtttgatggtgtctgaaacgttttgctgtggtagagcagcatggaagaactataatgaataagtgatc

SEQ ID NO: 3872 - DNA, 518 bp, Oryza sativa
  Clone ID: uC-osflcyp086e08b1
tgtcccacactgctcctgctgcctctctctctctcccctccggcttctccgccgccgcgaacgcctctcgactccggcgagttcatcaccggcgttcacgaggatgactacctcaaggcgtcttgctgacaggaagagcgcaaagttccagaagaatatcacgaagaggggttcagtgcctgagactactgtgaagaaggggaatgactaccctgttggacccatggtgcttgggttcttcatttttgtcgtcattggatcatccttgttccagataatcaggacggcaactagtggcgggatggcttaaattggagctaaattcagttatttatgctgtgtctgagagagaggctgtacctgtactttgtagtgaagtttgttcctggatgatatcgtgtagagggtccatgttgtgtccgtttgcattttactaaatctaaactagatgttggtacctgaatcttacagactttaaacttaaatggatataattgaactttgatctggagacttac

SEQ ID NO: 3873 - DNA, 541 bp, Oryza sativa
  unsure (1)..(541): unsure at all n locations
  Clone ID: uC-osflcyp086e10b1
tctcgttgccaccacaggctacgcaaaattctctcccttcctcctccaccacctccactccgacgatcctcctcctgatcctgtgccggccggcgatggcgtaccggttgctggagctcacgctggtctccgcgagcgacctcaagaaggtcactctcttctcgcgcatgcatgtctacgccgtcgcctccatctccgggagcaacgtccccatgcccatgcacggcacccacgccgaccgcaacggcggcagcaaccccgcgtggaacaccgtgctccacttccccgtccccgcccgcttcgacacccgcggcctcgccctccacgtccagctccgcgcccggcgctccttcggcggccaccgcgacgtcggggacgtgttcgtgcccctcgacgacctcctcgccggcgcgcacgacggcggcgagccgaggccggctagctaccaggtgcgccgncccatgtccgcccgcgcgcacggnacgctctacttctgctacaggttcaccgacgtcaagcatcccgccctcgaagccatcga

SEQ ID NO: 3874 - DNA, 426 bp, Oryza sativa
  Clone ID: uC-osflcyp086f01b1
tttgtaacctgacaacttgaagctcaccgaatttcttggtttcactcatcatgcataagccagcaaagtagccaacacaatcgaaaataccaaaaccgagagtgtcaatggttgttttgtcagaggacttgcattaggcaaccatggatatgcatccggaggtggcatgacacaattatcaccattgaagtacacgcggtgtgggaaggcccatcccttgtcaaaggtgaagtccttggaatccttacgcagaagaagttctgactgtgcatttccaagtggaccagcttgcatgagcaaatcgttatagaacttaactgcccagaacatcgcaggatcatctaaaatagaaggaataaacttcattagataaagagagagagagagagagataaaggaacgtattacaagtgcacttcaattttc

SEQ ID NO: 3875 - DNA, 344 bp, Oryza sativa
  unsure (1)..(344): unsure at all n locations
  Clone ID: uC-osflcyp086f02b1
gttcctaaaccctatccggtgccggccgccctctccctctccctctccggcgccaccaccgagcgccgccacctctgccacccctcgcgccgccgcgtccacccccgacgctgccccctccttcctctccgatcctcctcctccgccgtcggtccactctccgcccttcgccgcctccgttgccggccaccaccggccgcgttcacgccacgcctngtntcgcctcgctgcccccacccccgtccccaccccgtaggtagttgcatgtaaagaggagggattcggttctccctcgtggagagcttctcactcggggcagcgaaagaggccacattgacaggagc

SEQ ID NO: 3876 - DNA, 445 bp, Oryza sativa
  Clone ID: uC-osflcyp086f03b1
attttatcagcgtgaagcagcggcaagaacacaaaaatggcggacgagaagctcgccaagctgcgtgaagccgtcgccggcctctcgcagatcagtgacaacgagaagtccgggttcatcagcctcgtcgcccgctacctcagtggcgaggaggagcatgtggaatgggcaaagatccacacgccgacggacgaggtggtggtgccgtacgacaccctggcggcgccgccggaggacttggaggagaccaagaagctgctcaacaagctcgccgtgctcaagctcaacggcggcctcggcaccaccatgggatgcaccggaccaaaatcggtcatcgaagtgcgcaacggattcacattcctcgacttgattgtgatccagatcgagtccctcaacaagaagtatggcagcaatgtcccactgcttctgatgaactcattcaaca

SEQ ID NO: 3877 - DNA, 472 bp, Oryza sativa
  Clone ID: uC-osflcyp086f05b1
attctacacaagggattaactcatcactcacttagctaattaaatcttcgaccatgtcggacaagtgcggcaactgcgactgtgctgacaagagccagtgcgtgaagaaaggtaccagctatggcgtcgtcatagttgaagccgagaagagccacttcgaggaggtcgccgccggcgaggagaacggcggctgcaagtgcggcaccagctgctcctgcaccgactgcaagtgcggcaagtgaagtcacgaagcaaccgaacactcgccgccggcgagtcacctaccttaattagtccacaataaaaaccacccatatgagtgtggtttgtgtgtgtgctgattattgctgaattaaacccgtgtgttatcgattaattaagcagctggtcgcttcggcgactatgcgtgtatcaacgtatgaatttgtgtgatgtgatgtacccgtgctattctcagtgaaattaatcaatc

SEQ ID NO: 3878 - DNA, 549 bp, Oryza sativa
  Clone ID: uC-osflcyp086f08b1
gaggcggcgacggagctggtgcggaagggcgccacgctcctcctcctcgacgtgccccagcgcaccctcctcggcgtcgacacccaggtgttctccgtcgggcccaagttcaaggggatcaagatggtgcctccggggccgcatttcctctactactgctcccccaacaggcacgcaaatgagttcgcacctactgtcggattctttcttactactcacccatctgaggtgattgttcggaagtggcatgcacaggaggagagattaataaaactacgagaagaggaggaaatcagatattctgaagcagtaagacatttcgagtttgacagtcagcttggaccatataatttggattcatttggagattggaaacaactctcaagctacttgtcacaaagtgtcattgaacgtcttgagccaattggtggagaaattacaattgcatgggagtcatcatggatggataaagctccgcaaacagacatggagagacgtttaatggaccaactaaaagatggaaaatttgcaaaagaatgctcctgtgca

SEQ ID NO: 3879 - DNA, 548 bp, Oryza sativa
  Clone ID: uC-osflcyp086f09b1
gtgccattgccggccacactcctcttcctcctccatcgccaagaaccaccacgagcaatggcgtcgctgtccatggccacaacgctgccgtcgctggccggcgccgcaccggcggcgaggaagaggagcggcgtgacgtacgtggaggggatgaacgcgtacagcgggctcaaggcgctcaacaaggtgaccctgctcggcgtgcgcaagaccgccgactactcgttcgccaaggtggtggccaagctgagccccgccggcgggaagagccgcggcggcgcgttcggggcgcagtgcaacgccgccggtgagatattcaggatcgccgtcatcatgaacgggctcgtgctcgtcggcgtcgccgtcggcttcgtgctgctccgggtggaggcggccgtcgaggagtcggagtagtggaccccgatcgagccatagcaggcagggcccagccagccatggctggttggccccgataagccgtgatatataactgtgatgtatgtttcgataaaatttgctttcgttttgacccatgacgattggtgata

SEQ ID NO: 3880 - DNA, 502 bp, Oryza sativa
  Clone ID: uC-osflcyp086f10b1
tttttggaccagcagcgtctcatcttcgctggcaggcagctggaggacggccgcacccttgccgactacaacatccagaaggagtccaccctccaccttgtgctcaggctcaggggtggtatgcagatcttcgtcaagaccctgaccggcacgaccatcacgcttgaggtcgagtcctcggacacgatcgacaacgtgaaggccaagatccaggacaaggagggtatccccccggaccagcagcgcctcatcttcgccggcaagcagctggaggatggccgcaccttggctgactacaacatccagaaggagtccacccttcacctggttctcaggctcaggggtgggatgcagatcttcgtgaagaccctgactggcaagaccattacccttgaggttgagtcgtccgacactattgacaacgtgaaggcgaagatccaggacatggagggcatacgcccggaccagcagcgtctgatctttgctggaaagcagcttgagg

SEQ ID NO: 3881 - DNA, 547 bp, Oryza sativa
  Clone ID: uC-osflcyp086f11b1
tgttgaagcaggggagcatgggcagcaagtcgtacccgacggtgagcgatgagtacctggcggccgtgggcaaggcgaagcgcaagctccgcggcctcatcgccgagaagaactgcgccccactcatgctccgcctcgcgtggcactctgctggcaccttcgatgtgtcgtcgaggaccggcgggcccttcggcaccatgaagaaccccggcgagcagtcccacgccgccaacgccggcctcgacatcgccgtcaggcttctcgaccccatcaaggaccaacttcccatcctctcctacgccgacttctaccagcttgctggcgttgtggccgtcgaggtcaccggcggacctgaggtccccttccatccgggcaggcaggacaagcctgagcctcctcctgaaggccgtcttcctgatgccacacaaggttctgaccacctaaagcaggtcttttctgcgcagatgggtttgagtgacaaggacatagttgctctttctggtggtcacaccctgggaagatgccacatggagagatctggctttga

SEQ ID NO: 3882 - DNA, 510 bp, Oryza sativa
  Clone ID: uC-osflcyp086f12b1
gttcattgagctagggttagggagaggcgctgccagccacacagccgcacgaccacacgcgcctcagcgccggcgcgccgcctccccggctcccgtctcccctcgcgcctcctgactcagtctccgcctcggcaccgcctcctcgcctcccctccctagctctgctcccccagtcctgttggttgtcgcccagcgccggcgaccgtagccatcggccggctgcctgggcgcttgggaccggcccggcgaccgcctccctggaaagggaagacagggaggagtcgaggcgacaccgccattctgccggcgccgggcgccctcggctcctccccattcgccacctctccctcctcttgacgaccgtcgaccgagaccgagaccgacgagctccctagctccctctctagcactcctgctgcaaagcaaagtgcaaagtaggactacccaaagaaaaattcttggctacgccactggttgccaccttccctcgctacctgtgcctcgctcggt

SEQ ID NO: 3883 - DNA, 439 bp, Oryza sativa
  Clone ID: uC-osflcyp086g02b1
gtttgtaaggacagttgcacaggcatttcaagatgggaattatgttgggcttctgacaatcatattatcattccttttcttagttcttgggattgtttatgtccaagaagccgagaggaaaattccgctaaattatgcttctcgatacagtagtcggagtggagggctccaacgatctgcatatctaccatttaaggtcaatagttctggtgtcatgcctataatattttctacatcttctttggctttgcctggtactttggcacgatttactggcttagactttcttaaaaaggctgccatatccctaaatccaggaggtgctttgtatattccaactaatgtactgcttatagcctttttcaattactattacaccttccttcaattggatcctgatgatcttagtgagcaattgaagcggcaaggtgcttcaata

SEQ ID NO: 3884 - DNA, 508 bp, Oryza sativa
  Clone ID: uC-osflcyp086g05b1
gcttgatgggatccagggcccggtgtacgtcgggacagggtgcgtgttcaggcggcaggcgctgtacggatacaacccacccaagggacccaagaggcccaagatggtgacctgcgactgctgcccttgcttcgggaggaagaagcggaagcacggcaaggacggcctcccggaggccgtcgccgccgacggcgggatggacagcgacaaggagatgctcatgtcgcagatgaacttcgagaagcggttcgggcagtcggcggcgttcgtgacgtcgacgctgatggaggaaggcggcgtcccgccgtcgtccagccccgccgcgctcctcaaggaggccatccatgtcatcagctgcggctacgaggacaagaccgactggggtctcgagctggggtggatctacgggtcgatcacggaggacatcctaacggggttcaagatgcactgccgcgggtggaggtcggtgtactgcatgccgaagagggcggcgttcaaggggtaagcg

SEQ ID NO: 3885 - DNA, 540 bp, Oryza sativa
  Clone ID: uC-osflcyp086g07b1
tgttgagggagcctcgcgccggctttggatttttcgttctgcctcgcgaccgacgataaaaatcgtgcgtccgatgaggcccttctcccctcatctccggcaagccgcggcggcggcggctgctgcggccactggcgctcctcccctcgccgcagctctcctcaagaattcttctgctccccttatccatggccggctcagcttcagccacacgtcgctgcagtcaccgaacaaccgcgggaaacgaacaggctgggcggtgcgtgtgctgccgctgacggaggagaacgtggagatggtgctggaccaggtgcggccgagcctgatggcggacggcggcaacgtggcgctgcacgagatcgacggcctcgtcgtcgtgctcaagctgcagggcgcctgcggctcgtgccccagctccaccatgacgctcaagatgggcatcgagacgcgcctccgcgacaagatccccgagatccttgccgtcgagcagatcgtcgacaccgagaccggcctcgagctcaaccacgacaacgtcgacag

SEQ ID NO: 3886 - DNA, 475 bp, Oryza sativa
  unsure (1)..(475): unsure at all n locations
  Clone ID: uC-osflcyp086g09b1
ttatcttttagcttctcagccttttgcctctctttctactctctttcttggccgtctctcttatatccctcaatttaaccatcgagggcggccaaaaaaaagagagaaaggaagagcaaaataacacattacaccatggcgcgattcgtcatcatctccgtcgtcgtcgtcgccgccttcgccgctgccgctgtcgttgaggcccgggttggacctatcgacgtcgctccgaccaacctgatcaccaacccactcggtgccatcatcgacaatggccgcaagatcaccggcgccgtcgtcgacgagtgcgcctggacctgcgatcatgtcgcggcgggtaacaagaagatgtgcaacacgctgaggaagctgccggnggtgagctcgccgaaggagctcctgacggcggcggtgaagctgtccatgaggaaagcgaatgcggcgagggcgaggttcgaggcggggccagggcggc

SEQ ID NO: 3887 - DNA, 508 bp, Oryza sativa
  Clone ID: uC-osflcyp086g12b1
tttcttacttttgacagtggtggctacaacattaagactggaccaggctgcagtattgagctgatgaagtttgacatgggaggctctgcagcagtttttggtgcagcaaaagctttgggccaaatcaagccccctggagtagaggttcattttattgttgctgcttgtgaaaacatgattagtggcacaggcatgagacctggtgacattgtgactgcttctaacgggaagactattgaggtaaataacactgatgcggagggaaggcttacacttgctgatgctttggtgtacgcttgtaatcaaggtgttgacaagattattgatctggcaacacttactggtgcatgtgtcgttgcacttgggcctagcattgctggaattttcacgccaagtgatgaactagctaaagaaagtgctgcggcatctgagatatcaggagagaagttctggagaatgccactcgaggaaagctactgggagtcgatgaagtctggtgttgctgaca

SEQ ID NO: 3888 - DNA, 335 bp, Oryza sativa
  Clone ID: uC-osflcyp086h01b1
catgattcagagcagcagctctttccacaagccattacatggttccctttgaagaaggtagagatcttggcacaagccaaaaacattgagcgtgtttgaggacctggaactggaaccaagatcatctatgaaggaaagtagccaacacaatccaaaatgccaagagcgggagcgtcaatggttgttttgttagagggcttgcattaggcaaccatggatatgcatctggaggtggcatgacacaattgtcaccattgaagtacacacggtgggggaaggcccattccttgtcaaaggtgaaagccatagaattcttccgcagaagtagttctgac

SEQ ID NO: 3889 - DNA, 444 bp, Oryza sativa
  Clone ID: uC-osflcyp086h02b1
cgttatccgacgttggcaatgatctacgtgctgatcaaggcgaaggacggtgacgcagcactgaaaagattgcacaacgaggttgtggacacagaattgttcagtcgtttgcaggaaatccatggcaaggattaccacagcttcggggagagaaagctggtgcctgtagtcagcgatgacagagaagccaacgttggcatggaccatgagcttgccggcgtgatcgccgacgaggtcgacatcatggtcaactcagcagcaaacaccactttcgacgagaggtacgatgttgcaatggacattaacaaccgaaggccattcaggataatgagcttcgcgcagcggtttcggaggctgaagctgttcttgcaagtgtcaacagcatatgtgaacggacagaggcaaggtgtggtgctagaaaagccatttcgttgggggacacca

SEQ ID NO: 3890 - DNA, 378 bp, Oryza sativa
  Clone ID: uC-osflcyp086h03b1
gtttttagcagaagtagtagcagaagcaagaaaacactttgagcatttttgttttgttctccttgcagttacagctgaagcagcaagcagaagattaaccctcttggctaagattcaggttaacctgcagcgagaggttagctcagctcagcttagcttagcttaagctttgctcgagcttgccgtgcactccactgtctcttttccggtgggataatttggtgcggcggtgagctgccggccatgttgaccgtctcctccgcgctgtcggcgatcctctactgctgcttctcccccaccggagggcaccggcacggtcaccgcgccggcgcgtacttactacagcagccacccgacgagcaccaacacctactacta

SEQ ID NO: 3891 - DNA, 358 bp, Oryza sativa
  Clone ID: uC-osflcyp086h06b1
catatgagagctccttactggcttccatggagagggcataagggggagaaccggcacctgcgcccgagaagaaagatctcaggcacaatctgatcgttgacgatcaagtgtctgcgcagcctacatcagagggtgcctcggacgaggctgcagtagcttgctacacgagctggcgtccacttacaaggataggcctcgctgtactttcgatgtctcagcgttttctgaaggatcatgagaaagaggatacttggaggcttgtaggaaactacgcctttcagcggatgaagaaggctgattgacaaggtgagaggggaattactgatactgagtcaaagcttgaaaggctagaaatctt

SEQ ID NO: 3892 - DNA, 498 bp, Oryza sativa
  Clone ID: uC-osflcyp086h09b1
ttgtcagcggccatggggcaaatgggctgcggaaatcagagatcctcgcaaaggtgtccgcgtctggcttggcaccttcaactctcctgaggaagctgccagagcttatgatgctgaagcacgaaggattcgaggcaagaaggccaaggtcaatttcccagatggggctccagtggcttctcagaggagtcatgctgagccctcctccatgaacatgcctgctttcagcatcgaagagaagccggccgtcatgtcagcaggcaacaaaaccatgtacaacacaaatgcttatgcctaccctgctgttgagtacaccttacaggagccatttgtgcagattcagaatgtctcaattgttcctgcaatgaacgcgattgaggatactttcgtgaacctgtcctctgatcaagggagcaactcctttggttgctcggactttaaccaggagaatgatatcaagacccctgacataacttccatgcttgcaccgccatgaca

SEQ ID NO: 3893 - DNA, 532 bp, Oryza sativa
  Clone ID: uC-osflcyp086h10b1
tgtggaaggtctcgttctcctcctctccccaaaaccaaatccccctctccgaaaatctccaaaaatccagcgaaaaccatccgatccatcgatcgatcgatcgccgcaagactgcttcgggtttttttttgctcttgctccgatcgactgcgtgcgcctcgaatcgaaatctcgagtgatatcacgcgggagttgatccagacttaaaccggattgcctgagaagttgatgggatcgcgcgaattctcggcgctgacgtgagatcgtgaaagggttggacatcaaattgctaggaggttgcggcgatttggctgcacgactgcatgaactgtttcgtgaacctgggactcaactcgaactcgaaccactacgtggcctgcctcatcatcttcctgctgcatttctccccgcagtttctgttaaatccatccaattgtaatttcgaattcgagtagtaatcgtgaaggagagaaacagaaccccaacaatggcgaacaacaggtcatatggtgaaatgttaggagaaagtccc

SEQ ID NO: 3894 - DNA, 508 bp, Oryza sativa
  Clone ID: uC-osflcyp086h11b1
tatgaatcggcggcggcggcgacgctggagaggcggtcctgcgacgatggtccacgtcagcttctaccgcaactatggtaagacattcaagaagccacgtcgcccttacgagaaggagcgtcttgatgcagagctgaagctagtgggtgagtacggactgaggtgcaagcgtgagctgtggcgtgttcagtatgctttgagccgtatccgtaacaatgcaaggcacctgctcacacttgatgagaagaatccacgccgcatcttcgagggtgaggcactgcttcgccgcatgaaccgttatgggctccttgctgatgggcagaacaagcttgattatgtccttgccctcactgttgagaactttctcgcaaggcgtcttcagactcttgtcttcaaggctggcatggccaagtccatccaccatgctcgtgtcctgatcaggcaacgccacatcagggtcggcaggcaaaatgtcaacatcccgtcgttcatgctgagggttgagtct

SEQ ID NO: 3895 - DNA, 457 bp, Oryza sativa
  Clone ID: uC-osflcyp086h12b1
tcgagagccgagaggtttgcgcccttgcagttgcggggtgggaggggagaatggcgccgccgctgctgccggcggctgaggaagacggtggttgcgtggcgaggtggatgcggagggatgtgctgctggggctggcgctggggcagttcgtgtcgctgctcatcacctccaccggcttctcctcctccgagctcgcccgccgaggtatcaatgcaccgacatttcagtctctgatgaactacatccttctctcccttatctatggaggtatactcatctaccggagacagcccctcacgataaaatggttctactatttgatccttgggattattgacgtggaagcgaattatatagttgtgaagtcttatcagtacacatctttgacaagcgtgatgctcttggattgctggtcaatcccttggtcgttattcttacatggattttttgaagacca

SEQ ID NO: 3896 - DNA, 521 bp, Oryza sativa
  Clone ID: uC-osflcyp088a01b1
gtttcacgcatctttgtggaagagcttggtgctgctgaaagctcattgttgaactgtgttccgaaggaagactttggagggggccatccagatcctaacctcacctatgcaaaagaacttgttgaccggatgggccttggaaaatcctcaaatgctgaacccccagaatttggtgctgcagctgatggtgatgctgatcgcaacatgattctgggtaaaagattcttcgtaacaccttcagattcggttgccattattgcagccaatgctgttcagtcgattccttacttttcttctggccttaagggagttgccaggagcatgcccacatcagctgcccttgatgttgtcgctaagaatttgaatctcaagttctttgaggtgcctactgggtggaaattttttgggaacttgatggatgctggaatgtgctcaatttgtggtgaagaaagctttggcactggttctgatcacattcgtgagaaagatggtattttgggctgttctagcatgggtatcta

SEQ ID NO: 3897 - DNA, 500 bp, Oryza sativa
  Clone ID: uC-osflcyp088a03b1
tttcatgtgtagactgtaggatggccacgctctcttcctgcagccgcctgagcaccggcggcggcgccgtccagcgccgtccccggcggccggcaagcgctgcgaccatcacctgccaccggagctcctcctcctcctcgtcggccagggtagtccgcacaggcgccgccgcggcgcctgccgcggccacggcgcccgccgtgccgcagaccaacgagtgctcgcttccgacatgggcggagttcgagctgggcaaggcgccggtctactggaagaccatgaacggtcttcctccatcggctggagagggcctgatccttttctacaacccggcagcgaccaagatgacccccaacgctcagtttggcatcgcgtttaatggtggttttaaccagccgatcatgtgcggtggtgagccgaggcagatgacgctgcaagagaggggatcagctgatcctcccatatacaccatcaggatacgtgtgccgagcatgccatga

SEQ ID NO: 3898 - DNA, 178 bp, Oryza sativa
  Clone ID: uC-osflcyp088a04b1
ccaacgcacgcggttagcaccttttatgggattgtctaatgccatggctgccttctttcgggttgcttaacaaatggggaagcacgagatgctttctccgcaagcataccgttaccgtagcatctggcatgcagatgcagaagctgcgccgttactgaaagatgtaccagaagcagtg

SEQ ID NO: 3899 - DNA, 127 bp, Oryza sativa
  Clone ID: uC-osflcyp088a06b1
tgactttttcaacgcacgcatcttgcacctcatattggcttttaatttgccatgggggcttctaaatcacctacctgccaatcgataaacacgaatactcattctgatcaagaacacagttattgta

SEQ ID NO: 3900 - DNA, 560 bp, Oryza sativa
  Clone ID: uC-osflcyp088a08b1
atcaagtccaaggaacagctgcttcttgaagctaatcaggttgctgagcagcaagaagcaacaattaaggagctccggagtgaaattaaaagaaaagaaattgatttttccagatcgaatgaattgagaaaggccaatgaacagaaactaaaaatcgccgagcaagaacttgagaggcagaatatgggatggttagcagcacagaaagagttaaaggaagtggcgcaactagcatgcaaggatatggatggtatcaaggatacagtcagtgacttcaaacgtgtgaggtctctgctggatgctgtacggtctgaactaatcgcttcaaaagaggctttctcctcctctcgaaaacagatagaagatcaagcagtgcagatgcagaaacaatttcaagaactctccggtcaaaggctattgctttcatctttcaaccagaacttggaagctgctcggttggagattcaaggcacggcaaaggagctcaatgctgcacagtctcgctgtcatgaactttgatcacttgtacttcaggaaaaggagaaggttgagtctctgga

SEQ ID NO: 3901 - DNA, 534 bp, Oryza sativa
  Clone ID: uC-osflcyp088a09b1
gtttttagtctcgtttgcctcgatcctctcgttcttggttggtcggcgccatgagtaacaccctgcttcgaatctacccttccgagctgaagatacccttcgagctcaagaggcagaattcggggatcctggagctcacgaataagaccgatcatcatgtagccttcaaggtgaaaacgacgaaccctaggaagtactcggtgagaccaaccaccggaatcgttctgcccagagggtcttgcggaatcacaatatctatgcaaccgccgaaagagatccctacggattataactgcaaggacaagtttctcatccaaagcgtcgtggtagaggatggcacaacgcagaaggacattcacagtgacatgttcagtaaagaggcaggcaaggtggtcgaggagttcaagctgagggtggtctacatccctgccaatcctccctcccctgtgccagaggaagaagaggatgagattgattcccttgattcagatgtggaccatgaagtgcaaatgccatctacgttcgatgctgcat

SEQ ID NO: 3902 - DNA, 523 bp, Oryza sativa
  Clone ID: uC-osflcyp088a11b1
gccaggataggcgtgaagagggagaggtatggcaagcctcgccgacgccattgatgctttacaagcgttggtgagaggccaggagaggcgtggagagggagagttatgagcgcaaggacattacgacaagatcgttattcctaatgggtgagataggcataaacgattacaaccaccacttcttccagaacagatccttcacagctgagatcaaacccttagtgccactagtgattttaaagattgaaaatgccaccaaggttttgatcgaccttggtgccaagaccatactggttccagggatcccgccaatgggctgcattccgaggtttctcaacttgctccctagcaagaaccacaatgactatgacaagcttggatgtctgaagtggctgaacgacttctctcagtaccacaatcgtgctctcaaacaatgttacagaggattcatcatgatcctaccgtcaccctaatctatgccgactactatggagcaatgttgaagatagttcgaagccctcag

SEQ ID NO: 3903 - DNA, 289 bp, Oryza sativa
  Clone ID: uC-osflcyp088a12b1
tcgttaccctcctctcctcccctcctcgtcgcggggctagggttacgccccctgctcctcctactcctcctcctactagtgtgggggcatggccgggagcgaggcggtggctgcccacgaggcggagatggacccggacttctcgggcgggggcggggggggccccagctacgagtacgccttcaactcggtcaacatctttcgaccgggtgcatacggatccaggtccttcgcgggggacgacaacgacgaccacgaccacgcgcccgggttcagccgggaccgctgg

SEQ ID NO: 3904 - DNA, 365 bp, Oryza sativa
  Clone ID: uC-osflcyp088b01b1
gctgcactccactcgccgccggcgaccgatgctccgcgccgccctcctccgctcaggctccggcctccgccggcctcccatggccgcgccgctctccaccgccgccgccgcctcgtggctctccgacagcgcctcgtctccgcctagggtgcgcctcctcatcggcggggagttcgtcgagtcgcgggccgacgagcacgtcgacgtcaccaatccggcgacgcaggaggtggtgtcgcggatcccgctcaccaccgccgacgagttcagggccgccgtggacgccgccaggaccgccttccccgggtggcggaacacgccggtgaccacgcggcagcgcatcaagctcaagtaccaggagctca

SEQ ID NO: 3905 - DNA, 132 bp, Oryza sativa
  Clone ID: uC-osflcyp088b05b1
ccagcgcacgcggttggcacctttgatgggattgtcaaaggccatggaggcttcggtttcggatgcgtgccaaccggtaaagaagaatgcggattcacaccaagaaaacagttaccggagcatatggctaca

SEQ ID NO: 3906 - DNA, 157 bp, Oryza sativa
  Clone ID: uC-osflcyp088b07b1
ttttaacaccaacgcacgcattctggacctagtattcgcttttcaaacgccaggggagcttccaaatcacttacctaccattctacacactagaatgctcattctcaccaagaacacagttgttgcagcacattattacatgatccacgaatcaccc

SEQ ID NO: 3907 - DNA, 160 bp, Oryza sativa
  Clone ID: uC-osflcyp088b08b1
gtcttaaccaccactcgggttctggacctgggcggcacttttaaatctccaggagagcttagaaaccatgtacggaccttgcgacacaggtgcgtgcgcatcatcaacaagaacacaggtgggtctacacactacagcggattcacgaacacccttctgt

SEQ ID NO: 3908 - DNA, 155 bp, Oryza sativa
  Clone ID: uC-osflcyp088b10b1
gttttaatgaccattcgggttttggaccttggggtagcttttaaatttggtggagtgattacaaatcttgtaaggacattgtgaaacacgattctatgtatcagaaaggatattataggggggtctatacactacatctgtataacgagcacggt

SEQ ID NO: 3909 - DNA, 519 bp, Oryza sativa
  Clone ID: uC-osflcyp088b12b1
tcgctaagttagaagaccaaggctcagaccccagttgagttttgcctgtggagtggagctgaagccccgctaggatcgccttttccgctgctactgctttcttttaggtgtctgccgtcggccgagacgatcgcctccgcatgtagccgcgcaccgcggcagcccggagcagcaaacccgccggcgtcctcactggagcccccaagccgctgacacatgcgcatgcacatgcgcagattgcagctgcagcagccatttggacctatccaatttcaattcactaatgcgtttgcatatgtatcgatacgtatctaaccacgattgatctatcgttttgcatgtacgccatcggtcgattttcctcctgcatcgtgcgaggcaccgccaccaggcgtccacacgtctctcgtgccggcaaccgcgcgccgaacgctcacgcacggagatgttgtgaccaggctgctcgatcgcaaactacacgtgcaagccgcacgaggccgaccagcgtgtacgtactga

SEQ ID NO: 3910 - DNA, 309 bp, Oryza sativa
  Clone ID: uC-osflcyp088c01b1
ctccccccatccatcccccactcctccgctactcgcaccgcaccgcaccgccgattgatttggagaggaaaccccctcctcttcctcctccacctacctctcctccttcccagccagatccgcctcctcctcctcccctgctccctcccagatctcacactccatctcgcgagcgcgccgacgcgggacagctcgccaccccgcccagatccaccgtctcgccggagccggagagaccgagcggcgggcggcggggaggaggatggccgcggggaaagagggcggccgccgcccttgccgccagggggg

SEQ ID NO: 3911 - DNA, 238 bp, Oryza sativa
  Clone ID: uC-osflcyp088c02b1
gtgttctctagctagcccgcttggctcccttgatgtaatagtaaaagtacttgtatgaattctagttttgtgctttcttacatctatctggataggtgctttccaatgaccggtacggttatcagagctgcttcctttcgttactatatctgacatcgtccttcgaaacaatggcacacctgccagatgctgactctacagcgagatatgcgaattggtttgagggatatgagaaacc

SEQ ID NO: 3912 - DNA, 168 bp, Oryza sativa
  Clone ID: uC-osflcyp088c03b1
gttttatccaccaaacgctctcagaaccatagatgcaaatgtcacatgccatgtatgcttccttttctcctgcttaccaacctacaaacaagaatgcgcattctcatcaagtacacagtttccgtagcctattgcctctgatcctatgatacacatggatctacaaaa

SEQ ID NO: 3913 - DNA, 125 bp, Oryza sativa
  Clone ID: uC-osflcyp088c05b1
acaacgcacgctgtcagcaccttagatgggaatgtcaaaggccatggagggttcgatttcgggtgcgtgccaatctataaagacaaatgcgcattctcaccaagtacacagttatggaagcatat

SEQ ID NO: 3914 - DNA, 149 bp, Oryza sativa
  Clone ID: uC-osflcyp088c06b1
ttattttcagcacgccaacccagcaacacggggaggacagttaattgccatggaggccaccaaaccatataactaacgatcgggaacgaagcatacgcaatcacaccaagatcacagttatgcgaacccactgctacagcccctaagat

SEQ ID NO: 3915 - DNA, 240 bp, Oryza sativa
  Clone ID: uC-osflcyp088c08b1
gttctacagaccacgccggttattgactatgtgctcacattcacatctactggtacgattactaaccatgtaggggcaatggttaccaccgctgtactcatgataaagaagaccatatgatcgcctgtacactactgtggtgtgacggaaaggattttgtcatgtattagctgctaatatctagaggaacgatgatgaaatggtggacaaattagactctggcgtacgaagtttacataa

SEQ ID NO: 3916 - DNA, 192 bp, Oryza sativa
  Clone ID: uC-osflcyp088c09b1
tttctattgaccactcaggttatcgacttcgtgttcacctttatttcttctcgagtgattttaaatctttttcggacattgcatcccatccctctgctcagcaccaaggagagcacaaggcggcctgtcacctattgcgctgtaacgatcgccgttgtgtctacactagcagcttcgatccaacaactacat

SEQ ID NO: 3917 - DNA, 135 bp, Oryza sativa
  Clone ID: uC-osflcyp088c10b1
gtcttatagaccactccgggtctggaaggtggggccactcttacctctgggggattgctaacgaacccgttagggacatggggaaccacgactcggcacaaccgcaagtagaggatggggtggtctataccaaat

SEQ ID NO: 3918 - DNA, 549 bp, Oryza sativa
  Clone ID: uC-osflcyp088c11b1
ttgttggttggctgtctaattgtccaggcggcaatggtagtatcttgtacctgaaccggtggctcactttttctaagtaatggggaagaggactgaaacatgccactgaaagactctactgagacaaaaagatgggctgtcaaaaaggtagaggaggtaggatgggcagttggtcagatctagtatggatcgtacatggacgatagttggaatcggcggctctcctaggcttccctcatctgggatccctggggaagaggatcaagttggcccttgcgaatagcttgatgcactatctcccttcaaccctttgagcgaaatgtggcaaaaggaaggaaaatccatggaccgaccccattatctccaccccgtaggaactacgagatcaccccaaggacgccttcggcgtccaggggtcacggaccgaccatagaccctgttcaataagtggaacacattagccgtccgctctccggttgggcagtaagggtcggagaagggcaatcactcgctcttaaaaccagcattcttaagtttaagatcaaagag

SEQ ID NO: 3919 - DNA, 490 bp, Oryza sativa
  Clone ID: uC-osflcyp088d02b1
gttttaggcagctaatcctacggaagctctgcttgttgttgatgctatgactggacaggaagctgcagcattggtcaccaccttcaatattgagattggtatcactggtgctatattgactaaactggatggtgattcgaggggtggagcagcactaagtgttaaagaggtgtctggaaagcccatcaagtttgtcgggcgtggagaacgaatggaggaccttgagcttttttatcctgaccgtatggcacaacgtgttttgggaatgggcgatgtactttcatttgttgaaaaagcacaagaagtcatgcgtcaagaagatgcttgtgaattacagaagaagatcatgagtgcaaatattcgactttaaagaccttctaaagcaatcacaaaatgttgccaaattgggttccatgagccgggtagatggaatgattccaggcatgaacaaggttacttctgcacaaatcgagaagccgagaaaagactt

SEQ ID NO: 3920 - DNA, 169 bp, Oryza sativa
  Clone ID: uC-osflcyp088d03b1
gttaaatccaccgaacgctgtgagggccttagagtggctggtaaaagtccatgttatgatccatgtggggtgcatgctaacctagaaagaaaaggaggaattcaaatcttgcatacagtatttgatacatctgaccattgatccggagatacagcttattctgcgagat

SEQ ID NO: 3921 - DNA, 134 bp, Oryza sativa
  Clone ID: uC-osflcyp088d05b1
gttatatacaacgcacgcagccagcaccttatatgggaatgtcaaaggccatgggggcgtcggttccgggtgcgtgccaatcgacaaagacgaatgcggattcacaccaagcacacagttacggaagcatatgg

SEQ ID NO: 3922 - DNA, 197 bp, Oryza sativa
  Clone ID: uC-osflcyp088d08b1
tcgtttttacctaccacgcggggttacgactttgtgttaactcttccacctcggggggcgatttcgacccgggaacgggcattgatacttacacaactgcgtactccaagcccaaaccgagctctacatgcacgattgtttggatggagaggcaccggcttgttctggatccaatagctctaagccaggatgggaca

SEQ ID NO: 3923 - DNA, 161 bp, Oryza sativa
  Clone ID: uC-osflcyp088d10b1
ttcctaccccccactccgggtccggactgggggggagctcgtcactctggaggattgctaagaaaccctgtagggacatagctacacacctcttggcgcaagagcaaggagaggatagggcgttctaccccctagtacggaaggacgatcgcaggtgtgtc

SEQ ID NO: 3924 - DNA, 544 bp, Oryza sativa
  Clone ID: uC-osflcyp088d12b1
tcggtcgccgcggcgcgtagcctcgtcgacgtcatcggcggggcgttcggtggccggaaggactactacacgcccggtcctactggccagcaccactcttctagtcccagtcattcgcacaaggctccgccctgcgcgccgacgccgccacagggaggtggtggaggctacaacccaccctcgccgtccattggaacctctccgacaacgccgggaggaggtggaggctacacgccgacgccgagcgacacgccaccctctccgtccagtgacacctcgccgagcactccgggtggcggctgctcgtcctcacccacgccgtgcgacgcaccgccctcaccgtccagtgacacgtccccgacaacgccggggggaggtggaggctactcgccgacaccgagtgacactccgccctcgccgtccagtgacacctgttcgacaacgccgggtggaggtggaggctacacgccgacgccgagcgacgcgccgtcctagccttctagtgacacctttacgacaacgctcagtggaggtggaggctaca

SEQ ID NO: 3925 - DNA, 440 bp, Oryza sativa
  Clone ID: uC-osflcyp088e01b1
gtcattgctgccgcggtcgcctcccatcggttcctctccgtcgccgaggcgggcgccgacttccgctggaccccgacccagctcgaccccaagatgttgccattgcaaaacgaaatcttcattacatctggtggagaccgggatttgattaataggattctcagcaaaagcaaaactgaaacggttcctgagaacaaggatgatggtgagtcttctgatgataacgatgaggagggagacgaccaggatgctgaaaatcaaggcgacgatgatgctggagatgaagatgcctacgaagaggaagggaatgatgaggacgaggacagggaccctgaagccaatgccgatggagggagtgatgacgacgatggtggagaagatgacgctgactaggatgaggacggggacgatcatgaaggtgagggctagggccaagatta

SEQ ID NO: 3926 - DNA, 454 bp, Oryza sativa
  Clone ID: uC-osflcyp088e02b1
acctttccaccaagcgcgtcggaagcgatggcgtcggcggcggagatgcagccgctggccccggcgggctaccgccgggcgccggagatgaaggagaaggtggacgcctccgcggtggacctggaggccggcaccggggagacgctgtacccggggatctcgcgcggggagagcgccctccggtgggggttcgtccgcaaggtgtacggcatcctcgccgcgcagctgctcctcaccaccgtcgtcttcgtgctcaccgttctccaccccacccttaacgccacgctcttctcctccccgaccctcgcccttgtgctcgccgtcctacccttcgtcctgatggtcccattgtatcattatcagcacaaacacccacacaactttgtttacctgggtctgttcacgttgtgcttgagttttcagattggtgtggcatgtgctaacactcaaggga

SEQ ID NO: 3927 - DNA, 204 bp, Oryza sativa
  Clone ID: uC-osflcyp088e03b1
gttatatccaacacacgcggcgaggaccatggaggggaaggtcaaactcaaggggttcttacgtgccggatacgtaccaatctaaagacgagaatgcgcattcacaccaagcacaccgctgtggaagcctgcgaccttagagccgggtatacacttgattctataagaggtaataacacctgataagttctatagctagctggg

SEQ ID NO: 3928 - DNA, 157 bp, Oryza sativa
  Clone ID: uC-osflcyp088e08b1
tttctaaataccactccgtgtttggactgtgtcgcaactcttacatctagaggattgatatgaaatcctgtagggacattgctacacacacctctgctcaatatcaactagagcccagggagtcctatccccaattgcgcattaacgatcacaggtc

SEQ ID NO: 3929 - DNA, 146 bp, Oryza sativa
  Clone ID: uC-osflcyp088e09b1
gtcttaacccccactcgcggtccggaccgtgtggcagctcttccctctgcagggttgctatgaaacccggaagggacatggcgacccaccacccggcgcaacagcaccgagagcccagggagatctatacaccaactgtggagtaa

SEQ ID NO: 3930 - DNA, 519 bp, Oryza sativa
  Clone ID: uC-osflcyp088e11b1
ttcacacaccccagcagcagcagcagcagcagctgagcttgaagcagcagagcgaggtagacatggccgccgccaccatggccctctcgtccccggcgctggccggcaaggccgccgcgaaggtgttcggcgaggggcgcatcaccatgcgcaagtcggcggcgaagcccaagcccgccgcgtcggggagcccgtggtacggcgccgaccgcgtgctctacctcgggccgctctccggcgagccgccgagctacctgaccggcgagttccccggcgactacgggtgggacaccgcggggctctccgccgacccggagacgttcgccaagaaccgggagctggaggtgatccactccaggtgggcgatgctcggcgcgctgggctgcgtgttcccggagctcctcgcccgcaacggcgtcaagttcggcgaggcggcgtggttcaaggcggagtcgcagatcttcagcgagggcgggctcgactacctcggcaacccgagcctgatccacgcgcagagca

SEQ ID NO: 3931 - DNA, 544 bp, Oryza sativa
  Clone ID: uC-osflcyp088e12b1
ctcgccccgagaaaaccctaaaccccccaaccctcgccgccggcaaccgccgccgccatgttcggcaccccggcttcgtcgcccctatttgggaccccctccaccaccccggcattcggcgccccttcctccacccctgcattcggcacgccctccaccaaccccgccttcggcaccccttcctccacgccggcgttcggcgcgccgtcgtccaccccgtccttcggcaccccctccaccgcgcccgcgttcgggaccccgtcctcgaccccggcgttcggcgcgccctcctcgacccctgccttcggggcgcccttctcgaccccggcgttcggcgtggcgccgtcgccgtcgccatcgccgtttgggttccagcagcagatgacgccgtccccgtcgccgttcgggttcgccggtgggggcggcgggcagatcaccacccagatggcccccgtcgcgccgctcccgctctcgccctgcgaccgtgacatccaggctatcgtggatgcgtaccaggaggatcctggaaaccctcagtatgctt

SEQ ID NO: 3932 - DNA, 537 bp, Oryza sativa
  Clone ID: uC-osflcyp088f01b1
gttcatgaggtccttcaagtacgcgtgggtgcttgataagctcaaggccgagcgtgagagaggtatcaccatcgatatcgccctgtggaagttcgagaccaccaagtactactgcacggtcattgatgcccctggtcaccgtgacttcatcaagaacatgatcacgggtacctcccaggctgactgtgccgtgctcatcattgactccaccactggtggttttgaggctggtatctccaaggatggccagacccgtgagcacgctcttcttgctttcactcttggagtgaagcagatgatctgctgctgcaacaagatggatgccaccactcccaagtactccaaggcccgttacgatgaaatcgtgaaggaagtctcatcctacctgaagaaggttggctacaaccctgacaagattcccttcgttcccatctttgggtttgagggtgacaacatgattgagaggtccaccaaccttgactggtacacgggccccaccttgcttgaggcttttgaccagatcaacgagcccaagaa

SEQ ID NO: 3933 - DNA, 456 bp, Oryza sativa
  Clone ID: uC-osflcyp088f02b1
caatttttaaagttcatagagatattaagggtggcaatattctgctaactgagcaaggagaggtgaagctgggcgattttggggtagctgcccagctgacgagaaccatgtcaaagcgcaacacgttcattggcactccacattggatggcacctgaggttattcaagaaagtcgctatgatggaaaggtggatgtgtgggcattaggtgtatctgcaattgaaatggcagagggtatgccaccgagatccaccgtgcatccaatgagagtgatctttatgatatctagtgaacccgcaccaatgctcgaggataaggagaagtggtgagtgccatctaatacaccatgaactgttgtgcttctctgagtacctcagtaccaggaacagctgataagagcatggttataaaactttcagaccagagatcatttaaggctccctgttcttttgatct

SEQ ID NO: 3934 - DNA, 461 bp, Oryza sativa
  Clone ID: uC-osflcyp088f03b1
atcatgcgtggtatctgctttgaggtgtgcgatgttgttctccatgctgatgctattcacagaggtggtggccaggtcattcccacggccaggagggtcatctatgcttctcagctcacagcaaagcccaggcttcttgagcccgtctacctggtggagatccaggcccctgagaatgcccttggtggtatctatggtgttctgaaccagaagagaggacatgtgttcgaggagatgcagaggcctggtacccctctgtacaacatcaaggcttacctccctgtcatcgagtcctttgggttctcaagccagcttagggctgcgacatctggccaggccttcccccagtgtgtgttcgaccattgggacatgatgacctctgatcctcttgaagctggctcgcaggcttcaaccctggtgcaggatatccgcaggaggaagggtctcaaggagcagatgac

SEQ ID NO: 3935 - DNA, 213 bp, Oryza sativa
  Clone ID: uC-osflcyp088f04b1
ccaacgaacgaggtcaggaccacaacgtggatgttcatcggcatggtctggttaggtttgggttgcatgccattcggcatacatgaaggcacattatcacctagcacacagctacagatatctaaattctggatgccgagtataaaccaaattctaaaaaatgaattaaagccgcagaagatatatcacgaatttcacatatatcgtagaggt

SEQ ID NO: 3936 - DNA, 233 bp, Oryza sativa
  Clone ID: uC-osflcyp088f05b1
gtcttatccaacacacgctgtcaggaccgtatccgagaccttaaacttcatgggaagcttaggatgctgatacgtgccaatctacagacacgaatgcgcattctcacctagcgcacagttatagaaaccccatatcgacgatcaagttacacacccagttctagaggatgcattaacgagccataagatctaggtctactgtgaactactcgtatagattacttagacacaaa

SEQ ID NO: 3937 - DNA, 164 bp, Oryza sativa
  Clone ID: uC-osflcyp088f08b1
gtcataactaccactccctgtccggaccgtgtcgaagaccttacacctcgagcgttgataaggaacccgaaacggacatggctacagacactaatgcgcaatttcatctaagctcacaggcgacccaacccttattgggcattaacgagcacacgtggtgctat

SEQ ID NO: 3938 - DNA, 157 bp, Oryza sativa
  Clone ID: uC-osflcyp088f09b1
tttttaactaccactcccagtccggactgtgacgcagtaattatctctagaccgttgattaggaaaccggaacgtacatggctaccgaccccaatgcttaatatcacatagagcccagggagtcctatatccacattgtggctaaactatcacacgt

SEQ ID NO: 3939 - DNA, 531 bp, Oryza sativa
  Clone ID: uC-osflcyp088f10b1
tttttcacagtgataccttccgtgcaaggtatccaccacacggacgacggaccgtagtcttggaggacggggtacactgggatagggtcagggcacctacagtagacactcacgcacatgatctccatgcctctgactgcttacacgaactccggccagtcgataacattgagatccaatggagaaggaacaaggaattcccctatggctggtggtatggagttgttggccacttggagtcatgtgatggaagtgagcacttttgtcggtgtcatcttagtgacactgttgctctggagttcaaccaatacacacctggttcaagatggaggcaggcgctggtgaaccggaaggaccacagggaagagggcaatgagggcgacggttactacggtggaatcaggaagctccgcatcaaggatgacatctcagagtggagacagttgtggccaacagacattcttgtgtagcaaggacagagactattattccactgttggtattcatcaagttggcaattgatgctctcca

SEQ ID NO: 3940 - DNA, 556 bp, Oryza sativa
  Clone ID: uC-osflcyp088f11b1
caccttcagcgcgagccgcgagcgagagaggaaaagggaagcgacgatctctgcccttctagaagggtttgggatttcttgactggacgacctcgtgcgatttcgggaggcaggagccatgaacggcaataagcagtccctgatatacagcttcgtggccaagggctccgtcgtgctggccgagcacaccgccttctccggcaacttcagcaccatcgccgtccagtgcctccagaagcttccccccaacacctacaagtccacctactcctgcgatggccacaccttcaacttcctcgtcgaccgcggcttcgtgtttctcgtcgttgcggatgaggccgctggaaggagcgtgccgtttgtgttcctagatagggttaaggaagacttcatgcagcggtatggctccagtatcgacgaggagggtcaacacccgctcgccgatgatgcagatgatgatgacttcctcttggaggaccgatttagcatcgcctacaatcttgacccggaattcggaccgaggctgaaggatcacatgctgcattgtattaatcat

SEQ ID NO: 3941 - DNA, 557 bp, Oryza sativa
  Clone ID: uC-osflcyp088f12b1
gttagcagaaacaaacccctctcactcccactaccatggatccttgcaagttccggccgtcgagctcgttcgacacgaagacgacgacgacgaacgcgggagctccggtgtggaacgacaacgaggcgctgacagtggggcccagggggccgatcctcctcgaggactaccacctgatcgagaaggtggcgcacttcgcccgggagcgcatcccggagcgcgtggtccacgcccgcggcgcctccgccaagggcttcttcgagtgcacccacgacgtcaccgacatcacctgcgccgacttcctccggtccccgggcgcccagacccccgtcatcgtccgcttctccaccgtcatccacgagcgcggcagcccggagacgatccgcgacccgcgcgggttcgccgtcaagttctacacccgcgagggcaactgggacctcctcggcaacaacttccccgtcttcttcatccgcgacggcatcaagttccccgacgtcatccacgccttcagcccaacccgcgctcccatgttcaggagtactggagggtcttcgact

SEQ ID NO: 3942 - DNA, 436 bp, Oryza sativa
  Clone ID: uC-osflcyp088g02b1
gtatttcattttgacaccaaggtcagcaggtcctgaggggtcatttattggtgtccaagggtctaatcaagctggaaacaatttgactctgaaaggatggccactcacgggacttgaacaacttcgctctggacttctgcagcagaagtcatttgtgcagaatcaacagcaattacaacagcagattcattttcttaccccgcaacagcagcagcagcttatgttgcaggctcagcaaaatatggcttccccaacatctagtgatgttgacagcagacgattaaggatgatgcttaacaacaggaatgttgggcagacaaacagtggtggtgatattattccaaatattggttctcctagtctaagtggtggagatgtagatatcctgataaagaagaaaattgctcagcagcaacaattattacagcagcaaagc

SEQ ID NO: 3943 - DNA, 433 bp, Oryza sativa
  unsure (1)..(433): unsure at all n locations
  Clone ID: uC-osflcyp088g03b1
cccaattctctgcacgccctcaaacgcgccgcccgcattccgcgatcccccccccttctccccgcagatctgggatcctcctccgccgccgccggatcccccctccgccgcctcccgtgcctcgccgcgccgcgtgatccgatcccggcctgacctctctacccccccgccgccaagttggcgcctcagcgcaggtcgcagcgcctcgccggcggcggcggcggcggcgcaggggccgccgcgcagccgccgggcgcgcagcagcagcagcagactgcgcccgggggcgcggggatgggggactccggggacgccgtcatggcgcggtggctccagtccgcggggctgcagcacctcgccgcctcctccacctgctcctgctccgtctncaccgacggtggtggagtggacccgcgcggcgggggtggtgtct

SEQ ID NO: 3944 - DNA, 193 bp, Oryza sativa
  Clone ID: uC-osflcyp088g05b1
gtcttttccatcacacgatgcttggaccgtatccgggaatttaatattcaagggcaggataagatgcggctacgtgccaagcgacagacacgaatgggcattttaatctagcgtacagggagaggaattccaaatcggcatatgaggttgacaccaagttctagaggatgcattaaacagccaaaagttatag

SEQ ID NO: 3945 - DNA, 154 bp, Oryza sativa
  Clone ID: uC-osflcyp088g06b1
gtcttttcaaccactagctgataggatcttatcggagaatttcacattcttgggatgcttatgatcctgatacgtaccaagatactgacgctaatgggccgcctcatctcgtgcccaggtagtgctatcccacattgacgtatgagaactacac

SEQ ID NO: 3946 - DNA, 237 bp, Oryza sativa
  Clone ID: uC-osflcyp088g08b1
tcgttataacaaacgctcaatgtttggactgttgcggagcccttcaatgtcgagcactggtaaagatactggtacgtgcatagctacagacacggatgggcatgtctcacgaagtgaacagggcgtgctaacagacatcgtcgaataacactcacacgaggatctatagcacttacatatgcaccataacttctatgccaacctacaaatacacgcacagatgcttcacgcacaaat

SEQ ID NO: 3947 - DNA, 552 bp, Oryza sativa
  Clone ID: uC-osflcyp088g09b1
gttatcccaaaccctaaaccctctccccatggccgccgccgactcgcccaagcgcttgagggtctactcgtccgtctcgggcgacggccgctccgcgaacggcgcggggagcggcaagcgcgtggggacccacaacggcagcttccactgcgacgaggcgctcgggtgctacctcatccgcctcacctcccagttcgccggcgccgacgtcgtccgcacccgcgacccccagatcctcgatactctggatgctgtgcttgatgttggtggtgtctatgatcccagccggcatcgctacgatcatcaccagaagggctttaatgaggtctttggacatggctttaacacacaacttagcagtgccgggcttgattacaagcactctggtaaggagataattgcaacggagcttgaagctagtgaagaccatgaagatgtgcatcggttgtatcttgcaatatataaaagctctgatgaggcgcttgatgcagtcgacaaccggatcaatcaatatgacacagaccaaccctcaagaatgtgaacaacacacac

SEQ ID NO: 3948 - DNA, 511 bp, Oryza sativa
  Clone ID: uC-osflcyp088g10b1
atcatttgtgaagatatgtgaacaagccaaggcatacttagagatgaaaggcgaactagtcagtggtcttaacttaatcaataacaccaatttggaatttttccctgtgaagaacaaagcagaaatatttcgtctgagaggtgacttcctgctaaaaatgaatgactgcgagaatgcaaatgttgcttattcaaatgctataacactttttaagcatttgccaaaagcatggattagctgggggaattactgcgatatggttttcaaggagacaaaagatgagatttggcttgagtatgccgtaagttgtttcttccaaggcatcaaatatggagtttcaaactcaaggagccatcttgcacgaattctctaccttctgagcttcgatacacaaaatgaacctgctggaagggctttggataaatatcttgagcagttgccccattgggtttggctttcgtggatacctcagttattgctatcattacagagaagtgaagcccaacactgc

SEQ ID NO: 3949 - DNA, 564 bp, Oryza sativa
  unsure (1)..(564): unsure at all n locations
  Clone ID: uC-osflcyp088g12b1
gttgccgcgacgagcacggcggcgacgacgacctccgccgcgacgatggccgcgcgcctcctcctcctcgtacttttcgccgtcgtggcagcgcgcgtaggcgcagcggcggcctatcagcccggatctgctgaggggcacacgatcgcgggccgcatcaagatcgatgctgcaagtgcaattgcaaagggctttggtcttccagccaagacatcaaacacaaaagtgatacttaacggtggtcagagggttacatttgccaggccagatggctactttgcattccacaatgtgccagctggtactcatttaattgaggtctcctcattgggctacttattttcaccagttcgggtagacatcagtgccaggaatcctgggcacattcaagcagcattgactgaaaacagaagagttctaaatgagcttgtgttggaacctctcagagaagagcaatactacgagaaaagggagcctttctccattatgtcactctngaagagccctatgggtatgatgcttggctctatggtcataatggtctatcgtatgcccaaaatgatg

SEQ ID NO: 3950 - DNA, 518 bp, Oryza sativa
  Clone ID: uC-osflcyp088h01b1
gaggagttgtcggcaatctctgttggaagacctaaatggttggaatctgtggttgattggtatgatcaagatgaggaggcaaaacagttgctggctcaactgataatcaatctagtaggggtagaacatttcaccttgactaatggagtaatcaggttctagggaaaaatctggctgggtaagtttgttgaagcacaacatgcagtacttcttgctatgcatgccagtgggctaggaggacattctagaataacagccacctataatagaattaaaaatctattctattggccgggaatgaaaaaagatgtttaccagtatgtgtcatcctgtgacatctgtcagcaagccaaacctgaacattgtaagagtcctggtaaactacagcctttaccaattccagagcaagcttggtcaaccattagcatggattttattgaaggtttacccaagtcagaaggctttgatacaattcttgtagtggttgacaagttctcaaaatttgctaagtttatacc

SEQ ID NO: 3951 - DNA, 233 bp, Oryza sativa
  unsure (1)..(233): unsure at all n locations
  Clone ID: uC-osflcyp088h04b1
atcacatcagcatcagcaagcagcagcagcagaagcagatcgatcgatcgatcgccatgagcgtggtgatcctggacgggtcgacggtgcggggcttcgtggcggacgacgacgccttcgcccgcagcgtcgacgcgcgcttcgaggcgctggacgccaacggcgacggcgtgctgtcccgcgccgagctccgncgcgcgctcgagtccttccgcctcctcgacggcgccggg

SEQ ID NO: 3952 - DNA, 455 bp, Oryza sativa
  Clone ID: uC-osflcyp088h05b1
gtgctttgtataaccaggttattgccttctatttcaagatgctggaatgttggtacatgtatttgctgtagcagcagtaaaaaaatgctggaatacaagatgccttgttacatgtgcgtgaagtgtgaacaatcatgacaacaagaaaacacttatttcactataaaaaaggtcacagggaaattgagtcactgttcaggtatgtaggaacaaaagggcacgtgctagatttatattgagaaacaccatttcttgtgaacagagttctacatgatcagactctccagtgccaccctgttatttaggtacaagattattttggaacagagaacaaactatatttacttattagtattatgtgcacttgttgcgtatgaatatatctaagccctcaacgcgaggaatacagtttgaggagactggcgacatacacaaacctttattggtactgatgt

SEQ ID NO: 3953 - DNA, 487 bp, Oryza sativa
  Clone ID: uC-osflcyp088h06b1
caacagcatcaggggaggggtctagaagcttatataagcttcttccgagatgaaggtgatcgagaagatccaggaggcggctgcggatgggcggacggtgttctcgttcgagtacttcccgcccaagacggaggaggggctcgacaacctgttcgagcggatggatcgcatggtggcgcacggtcccaacttctgcgacatcacctggggcgccggaggatccaccgccgacctcacccttgtgatcgccaaccggatgcagaacatggtgtgtgtggaaacaatgatgcacctgacatgcaccaatatgccatttgagaagattgatgatgccttaacaacaataaagtctaatgggattcaaagtgttctggctcttaagggtgatcctccacatggtcaggacaaacttgttcaaatcgctggtggatacccttgcgctcttgatttggtacaacacattaaagccacgtatggtgaatatttt

SEQ ID NO: 3954 - DNA, 413 bp, Oryza sativa
  Clone ID: uC-osflcyp088h07b1
gaaaaccccaccaaactcttcttcttcttcttcccccattttcctcgcgttcccctcgtgccgcccgcctccgccgtcgcgtccccgccgccgccgcccgccttccccgaggggcgcagccgaggagcgccccaccccccctccccatggccgcctctatcgtacacaccgcggtagtcagcgtgttgaagcaccggacgcccgagtggtggccatgcacccactcggcttctgatgacaattcctgagcctggcgtgcgccaacggtaactaaaactctatccgaccgcgccgatgcctagacacaccgctaagagcgctttcgatgctgtcacacctggccgccggacggagcgccccatggacagaccgcgtgataaccacattcttcaccaaggacagagcgggctcag

SEQ ID NO: 3955 - DNA, 529 bp, Oryza sativa
  Clone ID: uC-osflcyp089a02b1
ctgtaaaatttctccccaatctcgcgaggctctcggcgtcgaatcgaatcctctcgcgtcctcaagatgcagatctttgtgaagacattgaccggcaagactatcacccttgaggtggagtcctctgacaccatcgataatgtcaaggctaagatccaagataaggagggcattcccccggaccagcagcgtctcatcttcgctggcaagcagctggaggatggcaggacccttgctgactacaacatccagaaggagtcgacccctcaccttgtcctccgcctccgtggtggcatgcagatctttgtcaagactctgaccggcaagactatcacccttgaggtggagtcttttgacaccttcgacaacgtcaaggccaagaaccaggacatagaggtgattctcccagaccagcatcgtcttatcttcgccggtatgcagcttgaggttggcaggcccttgctgacttcacatccagaaggagtccacctacaccttggtcttcgcttccgggtggctgcatactttg

SEQ ID NO: 3956 - DNA, 466 bp, Oryza sativa
  Clone ID: uC-osflcyp089a03b1
ttttacctcgcagcctgggaggccgtgcgctacctgctccgcgccgacgccgacctcctcgtcgccgcgcgcctcgttgtggcggaccgtggtatgaccaacttctccatcgcctctcccacatcggtcctagccttcgagggcgcactcggtttggccgcgcgcttggccggacaccccgatccccaccgcctcctttgcatttgggtctcactgtctactcgtctccccgaggctgtcaatatgatctctcaagtgcagggctatcgtccccatgacactatcacttaccgtcttagagattggcttgtttaaaagccccggccatcgccattgtcgccagtcgttctggacctgatgcaatcttgggaccttgccgttgcttcttatggtggtaacagcattaccaccgacgacatgttttctgataagcatttttgggccctcgaatgatgctttcttaata

SEQ ID NO: 3957 - DNA, 314 bp, Oryza sativa
  Clone ID: uC-osflcyp089a04b1
atcattgttcgccatggcaagcagcagcaagctctcctcggcgttcgcgctcgccgtcgtcgtcctgctgctcgccggcggggtgatgccggcggcggaggcggcgtcggcgcacctgcacttcttcatgcacgacacgctgacgggggcggcgccgacggcggtgcaggtggtgaacggtccgcggagccacttcggcgacacgatcgcgatcgacgacatgctgtccggggtaaacagccggtagtcggtcgcggtggggttggccaagggggttgataccagctgaattggtagaattcttgtctgggagt

SEQ ID NO: 3958 - DNA, 514 bp, Oryza sativa
  Clone ID: uC-osflcyp089a05b1
tttgttttcatttcgctaaaaaaaaaaataaaacaaaagaaaaaaaaaaacaccacacgagcaaaatctccttggcccgccgccgccgcctccgccgtcgcgcggcgatctccaccaccgcgacgcgagcggcggtgcccggcggcgtccagctgctcccgccgccgcgtaccctcgcctctggctcctcctcgccgcgcccaagccaatctctccccacccgccacctcggcctctcgactcgcgagcgagttcgccgatctccatccatcacccctcgagccagcggcgccggccgacggcgtgcttccggtcctcccctgccaaagtgttggtgttgatttgaagcctcaaggattcgagcgaaatgacttcttccatgagcaaatccgacaagaagaaggtgctagattttgcggcatggagtttcaacatcaccacatccgttggaatcatcatggtcaacaaggctctgatggctacacatggattcagtttcggcacaacattaact

SEQ ID NO: 3959 - DNA, 398 bp, Oryza sativa
  Clone ID: uC-osflcyp089a07b1
ttggcagcagactatcattcagagaagccacatagactggactacagtaaatatccagacactgatgagcagaagcgttttgtgaagacgtacctaagcaattctgtaagtgaagaacctgatgcggaagaggtggagaaccttctccaaagcattgagaaatacacgctcgccagtcatctagtttggggcctctggggaataatatcggatcatgtcaatgatattgacttcgactacaaggagtatgcaaggcagagattcgagcagtattggcagaagaagcaagcacttttaacttcatgaattgcctgaaggcgtcaggtcgtacctgaaggcctgtgctgcacataacttgtgcgatgttactgacacataactccctgtgaaaagaagaa

SEQ ID NO: 3960 - DNA, 79 bp, Oryza sativa
  Clone ID: uC-osflcyp089a08b1
tgttcgtcgcggcaccggaggggggctttccccgcgggggttaaggcggcgcccgaggtcgaggcggccaaggagagcg

SEQ ID NO: 3961 - DNA, 483 bp, Oryza sativa
  Clone ID: uC-osflcyp089a10b1
ttggtagttgagaagatcaaggacggcgagtgggaagtcgggtacaatgcgatgaacgacaagtatgagaacttgattgaggcgggtgttattgacccagctaaggtgacgagatgcgcgctccagaatgccgcctcggtggctggaatggtccttaccacacaggccattgttgtcgagaagccgaagcccaaggctcctgttgctgagccggcagagggaacccttaccgtctaaacagtggtgaatttcttcagggtggctttgtttagatggttcataccaactgaaatggtagaatttttgtctgggagtttttggttcagatcaaccgaaaggtctagtgtaggattggtttccatttttgagattgaaggtgcaacctgcctgatctgaactcatatgtccatcaaagaaataatttgcatcattatcgtcatcttcggtttaaactttataaagtaaatcatatggtgttttttc

SEQ ID NO: 3962 - DNA, 475 bp, Oryza sativa
  Clone ID: uC-osflcyp089a12b1
tgttggtgggttccccaggaaggagggaatggaaaggaaggatgttatgtcaaaaaatgtctccatctacaaatcccaagcttctgctcttgaggctcatgcagcccctaactgcaaggttctggtagttgccaatccagcaaacaccaacgctctcatcttaaaagaattcgctccatccatccctgagaagaacattacttgcctcacccgtcttgaccacaacagggcacttggccagatctctgaaaaacttaatgtccaagttactgatgtgaagaatgcgatcatctggggcaaccactcatccacccagtaccctgatgttaaccacgccactgtgaagactcccagtggagagaagcctgtcagggaactcgttgctgatgatgagtggttaaatacgggattcatctctaccgtccagcagcgtggtgccgccctcatcaaggcgaggaagcaatccagtgcccta

SEQ ID NO: 3963 - DNA, 514 bp, Oryza sativa
  Clone ID: uC-osflcyp089b03b1
cttcgagacaaattgagattacctgatatcttgttgatggtgctattttctctgggtatcaaagcatgggttcttatcgctatgtggttcctttttgcacctattgctcaaatgtacgacgttggacctttatttggtggtggagagcatcagctcagagcctaagagaactgtattgtactgaggacatgtccttgccctacaaaaggcaatggcctatggccaacttgtccatcctatgaagaaaatgagaggatggagatagtcggtacagagagaagctttggacaggacagagtagaaccatttacactttgcatgcacttctttttttcctgtgattatgtccaatcaaggggaaatgaattgagaaggaaacattgcacacaactcaaaacaaaatgagcagtgtgctcatcatgacactgagatacttggtacaggcttcttggtcattctttgtaatcttggaagacgacagcaaggtgatgtcagtgcatactccatatttaat

SEQ ID NO: 3964 - DNA, 124 bp, Oryza sativa
  Clone ID: uC-osflcyp089b04b1
gacttgattcggcctctctctctccgcgcgcgcagcagcagcagccgccgatggacctccccctggtggacctcgcgccgtacctcgaccgcgccgtcgccgggggcggcgcggcgggggagga

SEQ ID NO: 3965 - DNA, 361 bp, Oryza sativa
  Clone ID: uC-osflcyp089b05b1
tgcttcaccacaatgtcaagttgtgtgctctcatgatctattggtaaacggcaagactcttatttatagtcgcgacccttcttcaagttcaacaccaacttttggggataaaaacattcagttggaagggacagatgataggacccttttggttgacataaaattggaacctgcattggaaggggatttcacagagaaaattacatcttctgtacagagaacagatccaaatcatggcactgagggctctaatctagttgggtctataaactctgtttcttcagcgatctccaaaagaatatcagaagcagtaagatctaacccagagaattttcatgttgaaggcctactgccttcatca

SEQ ID NO: 3966 - DNA, 158 bp, Oryza sativa
  Clone ID: uC-osflcyp089b07b1
ttgtcgatccccaaacccccccgccccgccggagtcccccctgctccgacgagcctcgccgcgccgcgccgatggctgtggagggccgccgccgcgtgccgttgccgttgccgccgtcgacgaggcgggggaagcagcagcagtagcaggggggggag

SEQ ID NO: 3967 - DNA, 256 bp, Oryza sativa
  Clone ID: uC-osflcyp089b08b1
ctgagatcaggtagaacagtgagagtgaggtgcagaaaaatttgagctgaagctgaggatggcaacatccatgatcacctcgccgctggtggcgccggcccgggccaagggccttccgtccatctcccgccggggatcctccttcgccatcgtctgcagcggtgggaagaagatcaagaccgacaagccctacgggattggaggtggcatgtcagtcgatattgatgcatctggcaggaagagcacggggaagggt

SEQ ID NO: 3968 - DNA, 222 bp, Oryza sativa
  Clone ID: uC-osflcyp089b09b1
tttcgcctccatcgccctccgggctccgcctccgccgccgccgccatggggagaaggcctgctaggtgctaccgccagatcaagaacaagccgtaccccaagtcaaggtactgccgtggtgtccctgaccccaagatcaggatctatgatgttggcatgaagaagaagggcgtggatgagttcccctactgtgcgcacttggtgagttgggagaaggagaat

SEQ ID NO: 3969 - DNA, 323 bp, Oryza sativa
  Clone ID: uC-osflcyp089b10b1
ttactagccagtaagctagctaactaactacgtggctatggcccccaccgtgatggcctcctcggccacctccgtggctccattccaagggctcaagtccaccgccggcctccccgtcagccgccgctccaccaactcgggcttcggcaacgtcagcaatggcggaaggatcaagtgcatgcaggtgtggccaattgagggcatcaagaagttcgagaccctatcgtacctgccaccactcaccgtggaggatcttttgaagcagatcgagtacctgcttcgatccaagtgggtgccttgtctcgagttcagcaaggttgggt

SEQ ID NO: 3970 - DNA, 63 bp, Oryza sativa
  Clone ID: uC-osflcyp089b11b1
tgaagacggccatcgacgtggcgaaactcaacaaccaggaggattctgaaggtaggagaggtc

SEQ ID NO: 3971 - DNA, 451 bp, Oryza sativa
  Clone ID: uC-osflcyp089c01b1
atcatgtcgagagtattatcatttcttgtctggaagttaatagatcccagctgattgaccatgcccttaatgaatgcaatcttgttggcaaaattcttgctgctgaaagaagttcctccctgtcaacagaatctaacacaccaacattactatctgaagggaaggtgcctccaaaaattgggaatattgggcacataactcgaatagctaataagcttattcaactgggaaatagcaacagcataatccagtctcatttgcaggagaacagcgagtgggttgaatggcagacaactgccctggtcaaacgcaatgaggttgagaacgtttatcattgggcctgtggtcgtccgacttctctacatgatcgtggtagggatagcgatgatgatgactttcgagacagggactatgatgtggcggtacttgctaataacctgagctcaggcat

SEQ ID NO: 3972 - DNA, 442 bp, Oryza sativa
  Clone ID: uC-osflcyp089c02b1
cttattccaatctccagaattctgcttcgatatggccgccaagatctacatagtgtactactccatgtatggccatgttgcaaagctagcagaggagatcgagaaaggtgcttcttcagttgaaggagttgaggtcaagctatggcaggtcccagagactctttctgatgatgtgctcaccaagatgggtgctccttcaaagaaagatgttcccataatcacacccgcagagcttgccgaggctgatggtgtcatctttgggttcccaactagatttggaatgatggctgctcaattcaaagcattcatggatgctaccggtgggctgtggaggacacagcagctcgcaggcaagcccgcgggaattttctactctactggttcccagggtggtggccaagaaactactccgttgacagtaatttctcatctagtgcatcat

SEQ ID NO: 3973 - DNA, 513 bp, Oryza sativa
  unsure (1)..(513): unsure at all n locations
  Clone ID: uC-osflcyp089c04b1
ttctataacaacacacctcctctgcacttgctccttctcttcttctgtccatcgaatcgacaagaagaaatttacaagcaagaatggccgccaaggtgcatcctaacgtcgccgccgcgccacagccaccctgcattagcagcatcgtctcccaacaacaagaagaagaggagcccccggtggtgctcacggtgtggcgcaagtctctcctcttcaactgccacggcttcaccgtcttcgacgccaagggcaacctcgccttccgcctcgactgctacgactccaccagctcaaggcgcgccgacctcgtcctcatggacgccgccggcaagccgctcctcaccatccgccgcaagaggatgagcctctccgacagctggatcatctacgacggcgacggcgccgtcacctncaccgccacgccgttcctctccgtgcgccgccgccgngttggtcttcgcgccttcaagtccaaggccattgcgcacgttacgccgttcttcttctccctgc

SEQ ID NO: 3974 - DNA, 87 bp, Oryza sativa
  Clone ID: uC-osflcyp089c05b1
gtgattccaaaacccccccgacactcggcgatggagcatatgcaccatatagtaagccaccttcacatagagagcctcgacaacgac

SEQ ID NO: 3975 - DNA, 86 bp, Oryza sativa
  Clone ID: uC-osflcyp089c06b1
gtaatataatacagcaacttcaacaaattttaagaggacacttgggaaccatgatcactatatggctttaccattaaggaaacgga

SEQ ID NO: 3976 - DNA, 90 bp, Oryza sativa
  Clone ID: uC-osflcyp089c09b1
tcgtttcgcttgcttcaccagttcatcatcttcttcttcttcttctttgtctccctcgtttggtttgatctttcttggaagaatcatcca

SEQ ID NO: 3977 - DNA, 139 bp, Oryza sativa
  Clone ID: uC-osflcyp089c11b1
tcgttaggagacactcactgatataatcaagctagctagcttaatcacctagctatccgtcagtttagctagatatggctgcagttaactgcaaggtggtggtcgccgtgattgtggtggcgatggtggttgtcttctc

SEQ ID NO: 3978 - DNA, 366 bp, Oryza sativa
  Clone ID: uC-osflcyp089c12b1
ttgagatcgatcaactttccagcgctagaggtcgtctcgatcactcagtgcagcaaactgacgcaactgggcatccggcctcaggggaagttgagggagatcaggggctttgtatgattttcttatctttttgattgtttttgtcttcttttttttttttttggtttttcttttctatatgtgcttgttttttgctatatttttttcttattttactctctcttttctacttttttctttctatttttctttctctctacttttttacttttttttactttctttttttattcatttattttttctcttttttttatcttttctctttcttttttttttttttcctttttttttattttttttttt

SEQ ID NO: 3979 - DNA, 111 bp, Oryza sativa
  Clone ID: uC-osflcyp089d03b1
atataattatcacaagcgtatgaggttctcactgatcctgagaagagagacatatatgaccaatatggggaggatgctcttaaggatggaatgtgaggcgtctctgccttt

SEQ ID NO: 3980 - DNA, 122 bp, Oryza sativa
  Clone ID: uC-osflcyp089d04b1
atattgggtggaccacacgagtccggtctaatagtgttcacgtaggttgtagagagcacagcaacgttcgtacacagcagcaaagactgagactagttagcttagttgacatggttctaagg

SEQ ID NO: 3981 - DNA, 82 bp, Oryza sativa
  Clone ID: uC-osflcyp089d05b1
ttttaattaaccgcgtgtccacacacatttgaatagccacagccaagaagctactcgatggtttctgttgtatatcatttat

SEQ ID NO: 3982 - DNA, 70 bp, Oryza sativa
  Clone ID: uC-osflcyp089d07b1
tcgtaaaaaccaagagtgcgaccaaattaattggaagagcatcatcagcgaatagatttctattttacac

SEQ ID NO: 3983 - DNA, 366 bp, Oryza sativa
  Clone ID: uC-osflcyp089d11b1
gtgaacaacggtctcatcagcggcatctctctggtgaaccccaagttcttccacatgaacgtgttcaagagcaagaacatcaccatcaaggacgtgaccatcaccgcgccgggggacagcccgaacacggatggcatccacatgggagactcctccaagatcagcatcattgacacggtcatcggcaccggcgatgattgcatctccatcggccccggcaccgagggcgtcaacatctccggcgtcacctgcggtcctggccacggcatcagcgtcggtagcctgggcaggtacaaggacgagaaggatgttgacggatgttaccgctatgaactgcgttctcaagaagtctaccaatggcgtccg

SEQ ID NO: 3984 - DNA, 452 bp, Oryza sativa
  Clone ID: uC-osflcyp089e03b1
tcagtccatcagttggttgagaatgctgatgagtgtatggttcttgataatgaggctctctacgacatttgcttcaggactctcaagctgaccacacctagctttggggatttgaaccatttgatttctgccaccatgagtggagtcacatgctgcctaaggttccctggtcagttgaactctgacctccgtaagctggcagtgaaccttatcccctttccccgtctccacttcttcatggtcggattcgccccgctgacatcacgtggctcccagcagtaccgtgcccttactgtttctgagctcacacagcagatgtgggatgccaagaacatgatgtgcgctgctgatcctcgccatggtcgttaccttaccgcctttgccatgttccgtggaaagatgagcaccaaggaagttgatgagcagatgatcaatgttcgaactagaactta

SEQ ID NO: 3985 - DNA, 267 bp, Oryza sativa
  Clone ID: uC-osflcyp089e04b1
attgtattgaatgatgttaagaaaaggatagtcgtggtggaaaatctgccttctgatttctccatggaaagcatacatgcgaaatttgaaacagttgggaaaattgcgaagataaccattcatgatcaacattcagtgggagaatctgcaacaattaagaaccatgacatcatgctaagtaacaaggtgcatgctcttgttgaatatgaaacagcataggcagctgagaatgctgccatcaccttatacgatgggagcaattgtagg

SEQ ID NO: 3986 - DNA, 73 bp, Oryza sativa
  Clone ID: uC-osflcyp089e06b1
gtataacatagcgtgccatggcactacttggtagggcattttcagcgaaaagttggagaggttaacggtgaca

SEQ ID NO: 3987 - DNA, 59 bp, Oryza sativa
  Clone ID: uC-osflcyp089e09b1
tgtccatatgatggtcgcgttggaactccactacattgtataaacattaatttgattga

SEQ ID NO: 3988 - DNA, 581 bp, Oryza sativa
  Clone ID: uC-osflcyp089e11b1
tgtcaccatcacctcctcctcctcctcctcttcctccgcgcgcgcgagatccagggagagggagagggagagatcatggcggtgactgtgactgtgcctgtttctttttttttcttttttccttttttttttgtcttttttttttttctttttttttttttttttgttttttttttttctttttttcttgttttttctttttttttttttttttttttattttcttttattttttttacttcttttttttttttttctttcttttcttttcctttcttttttctttttttcctcttttctttttcttctttttcttctcttttttttcttttcttttatcttttttttttcttcttttttttcttttttcttatttttttctttcttttttttcttttttttatttttttttcatttttctttctatttttatcttctttttcctttcctttctttatttgttttctctatttttttatcctctctatttttttttcttctttctttttttttttttcttttctcttttcctcttccttcttttttttttctttttttctctttttttttttctctttttc

SEQ ID NO: 3989 - DNA, 574 bp, Oryza sativa
  Clone ID: uC-osflcyp089f02b1
ttagtaaggaaggaagctagggttagctagctgtgcatggaggagcctggccctgaggaagagaaggaggaggaggtggttctcttctactttctcctgtgttttcttcctgtcactcttttcgtcgttttcatcttctttgtctcctccttttttcttttcctctcctcctccctcttccttttctgtctctttttccctttttccattttttttttttctgtcctatttctttcctctttttccttcttgctttcttcctttttcttttttattttttacctttcttttttttcttctgctcttttcttctttttttttctttttttcttttttctcttctttctcttttttttcttttttttctctttctctttttcttttcttttcttcttctttttttttttctattcctttctcctctctttccctttttttttctctttctttccctttcttttttcctctctcacttctttttttccttctttttattttttccttcttctttttctttttcttttctttcttctttttttctcttttttctcctttctctttattctctcttttt

SEQ ID NO: 3990 - DNA, 101 bp, Oryza sativa
  Clone ID: uC-osflcyp089f05b1
gtatggttgttaagatccaggaagagcttgacatcgatgtccttgttcacggctagcctgagagaaacgatatggttgagtacttcagtgagcatcttatt

SEQ ID NO: 3991 - DNA, 274 bp, Oryza sativa
  Clone ID: uC-osflcyp089f08b1
tgtcatagactcgacacccgccgcaccacgatctgcagaaccgaacgcgacacgcgccttactatcacttaatccgccatgcttcctactagggttgccccctcctctctggccgccgccgccgccgccgcgcctacctatctcgccgccgcggcctcgacccctgcttccgtctggctgcctgtgccgcgtggagccggagccgtggcagtgtgcagggccgccgggaaagggaaggaggtgctcagcggcgtggtcttacagcccttcgagg

SEQ ID NO: 3992 - DNA, 438 bp, Oryza sativa
  Clone ID: uC-osflcyp089f09b1
tcgttgtaaccgactacgtacacatattcgacacaaactctaacaaactccaccttggcgaatatgccatgccaacctaaatttgttccatgcgcgaaccttcgtgtaccaggacttgagttgatcctttttcgccgctcacgccgagctgccccgacgaaccttcaccaggctcaccgtaacaagagactcccgctatccctgcaagttcttcctcttgactccacctgcaacagtgctccaccttctctcatatcaccacagtcgttttgccaagcgaaattggatttcttcgtagctgtcacattatagactcccgaagaccatgttcaacttcatcttctgtcttaaatttgacttgatctaatccatggccagataactgacgtcatcaccaaatagataaattaaacttatcagacataaagtgaatccttt

SEQ ID NO: 3993 - DNA, 294 bp, Oryza sativa
  Clone ID: uC-osflcyp089f10b1
ttgcagcaacagctcaaacggaggaagatctcatcgccatgacgaccggcaatggcgacgcaccggtgatcaagaacgcccacagcgacatcgacagcaccaacaagacgctgctcaagagcgacgccctgtacaagtatgtcctggacacgacggtgctgccacgggagccggagtgcatgcgcgatctgcgcctcatcacggacaagcaccagtgggggttcatgcagtcgtcggcggatgaggcgcagctgctggggatgctgctgaagatggtcggagcgaagaggacaa

SEQ ID NO: 3994 - DNA, 374 bp, Oryza sativa
  Clone ID: uC-osflcyp089f11b1
gaagaagagaggagaaagtgagagtgcacacacactatagcatagcactactctcttctttaggagagagcacacagttccaagaaaagctctgagcttcttccatcgatctctcggccatggcacggtggctacagctgccgtgcagcctcctgctcgtcatcatgctcgtcgccgccacggccgccgccgccgacgtcgtcgtccgcgacgacgagaagtgcgccgcgtgcggcctgcccagcccctgcggcacgacgtgcacgtacgccagcccgcctgccgctcgacgtgctgctcacttcggtttactacccgtcgtcgtcttccgactacttctccttgccgtcctcttcgactttggttttctcttt

SEQ ID NO: 3995 - DNA, 401 bp, Oryza sativa
  Clone ID: uC-osflcyp089g01b1
tttcttgcagcagccctagccgccacacgcctgcgtgcttgccgccgccgctatctttgcgccgccaccacggccatagccgggggtcgcagccgtcgccatccatcgcaaccggtggttcctttccgttttgcttcttcccggtctgccgttgtgtggtcagggaggagaaggttcaggggcacatgaagaggaggggaatagaagaaaaggggaaagataagcaaaaattggggattttctgggattccgcaaatttacctcaaatttgtttttctcctttgtgtggagggttccaacgttggaggagttgagttggagtatcgaaggacttaagggtttgaggcggggggctctgtacttctggagatgatgctgggaggtgggcggctggctggctt

SEQ ID NO: 3996 - DNA, 294 bp, Oryza sativa
  Clone ID: uC-osflcyp089g03b1
aatgtgcagggggtacttcgccgacatcgcagagatacgcaagaacggcggcaagcttgcgacagcgaataagatcatcattccggaaatcgcagccgtgaagttccctgatctttctgtgaagtcccctgatggcaggacagtgaatttgccgcttgtcgcacctccgcgaaacgatgatccccagactggcaatacagtggacacacaaaatgatgattgtaaggctggtgatatggtggttcctgatgcttcattggtgtgcctttcctttcgcgcaagctcccagaaaat

SEQ ID NO: 3997 - DNA, 188 bp, Oryza sativa
  Clone ID: uC-osflcyp089g05b1
gttttattctcagaggcccatttgttgtggaaaagaagcaaaccacctaagtttcccaccagatacaattttactcgctttgcaatcacattaaatgaacttaccgctggattgaaggaaaaactgccaccaacagactctagattgcgaccagatcagtgatgtctagagaatggtgagtttgaaag

SEQ ID NO: 3998 - DNA, 51 bp, Oryza sativa
  Clone ID: uC-osflcyp089g06b1
gaatatttgagaatgccatgaaataaatgggaatagcactttcagcgaatg

SEQ ID NO: 3999 - DNA, 84 bp, Oryza sativa
  Clone ID: uC-osflcyp089g08b1
ttgtagaaacaaacccctctactcccactaccatggatccttgcaagttccggtcgtcgagctcgttcgacacgaagacgacta

SEQ ID NO: 4000 - DNA, 319 bp, Oryza sativa
  Clone ID: uC-osflcyp089g09b1
tgtttctcgccacgcgaccgttccgtccaacctccgccgccgccgccgccgacgacgggcggccaaccgccccaccgtcgagtatggccttatccccgtcaccggtcttgcccccctcggcgccctccacacagagaaaacgaggctcctccacagactccattggcatgtatgcagttcaatgttgtgagtgttacaaatggcgcaaggtttcgacgaaggatgaatttgagacaattcgtgtgaattccactgaggagctatggcactgtagttgaagacctgactgtttgtgtgaagactctgctgacatataata

SEQ ID NO: 4001 - DNA, 159 bp, Oryza sativa
  Clone ID: uC-osflcyp089h02b1
gttgtggcggcttgacggcaaggtcgggacgcgcgccgtggtgaagcacagactccccgtgtccgccttagagcttgaccagcttaacaagctttttgccaccaacggccttacccagaccgacatgatcgccctcttaggagggcacacgataggggt

SEQ ID NO: 4002 - DNA, 210 bp, Oryza sativa
  Clone ID: uC-osflcyp089h03b1
gttatagcagcagccctagccgccacacgcctgcgttcttgccgccgccgctatctttgcgccgccaccacggccatagccgggggtcgcagccgtcgccatccatcgcaaccggtggttcctttccgttttgcttcttcccggtctgccgttgtgtggtcagggaggagaaggttcaggggcacatgaagaggaggggaatagctgaaa

SEQ ID NO: 4003 - DNA, 118 bp, Oryza sativa
  Clone ID: uC-osflcyp089h05b1
tgctgcaagcaagcgcagcggaggcacacggatactactccacgcataccataccaccacttacctaccgcttcccacatctcttcttcttcttcctttttccttttcttttctctcc

SEQ ID NO: 4004 - DNA, 78 bp, Oryza sativa
  Clone ID: uC-osflcyp089h06b1
gctacacacacaaaccatcgcgcgcgcactctatatcatttttaacgcacgcgctcccatccacaccccgacaagagc

SEQ ID NO: 4005 - DNA, 220 bp, Oryza sativa
  Clone ID: uC-osflcyp089h07b1
tcggtgccctcgttggaaacgcggcaagcggcaagaagatttttcggaccaagtgcgcgcagtgccacacggtggagcgcggtggctcgcctagtctgggtccaacctttattggcttatttcgtcgttatgttttactactcctggtttcctctacttcacctctaataaagaacattgtcttcgtatgagtttaaggttttttcttcgactacctttt

SEQ ID NO: 4006 - DNA, 142 bp, Oryza sativa
  Clone ID: uC-osflcyp089h10b1
ttgtatggcttctcctccccctctttaccttttcctcctcggttcggatccgaggtacatatagggtttaatggattaatataaattattaatatatattaataatatataaaaaatttataaaaaaatattaataataaat

SEQ ID NO: 4007 - DNA, 210 bp, Oryza sativa
  Clone ID: uC-osflcyp089h11b1
ttgtaacaagggggcttcccctcctcgaaacgatattgtcaatgaagaggttgatcagcgtcagaacaagcctaggagatactcagagatgaacttcagtcagtgaagcaccatgtaaggtgaatagcatctgaataagctgcttatggctatatttttaagcccttagtgatctcttgttttgatctggagcactttggttggcttctt

SEQ ID NO: 4008 - DNA, 121 bp, Oryza sativa
  Clone ID: uC-osflcyp090a01b1
gtaaagacgagcttgctcaggcggacgcacatttgttactttctatgtgcgctgcgagtgcaatatcgctaattggttataccatgagcacgtgacggtataatagggatcaattggcctg

SEQ ID NO: 4009 - DNA, 358 bp, Oryza sativa
  Clone ID: uC-osflcyp090a02b1
gtaaggaagtgcttgttctggtcgtcgaagatgttggattctctatgctggttgggttggtacgggagcgaattgcttggacaatgagtacctgatggatttatactgaacatgtggattgactgttgaggagatttgtgtgcacaataaacatgtcgtgaaccgctcacttgacttgttgatgaacaggaactgtatccaagtcatctttatccttggctcagctgatcttcaaggcccaaatggccagcacgatttctacacttgtgaagatgagaagtatctgtcacttcattatgcgtctcaggagaagagcaccagtgaagatattgacctttttgaggattataatattatg

SEQ ID NO: 4010 - DNA, 505 bp, Oryza sativa
  Clone ID: uC-osflcyp090a03b1
ttaaagacttatgtgtaatggtcatcaaataagtgagaatctatatctcagatgggatagcacgcgagtttattactttgaaaatgagtacctgatggatttattcttaacatgtttatttacttttgattttaattattttataaattttttttatttttactttattattctatttttactattttttatcttatttatttcatttcttttttttttttcatttttttttatttttttttttttttttttatatttcatattatattttatattttttaattatttttttatatttacttaatttttacttatttttatattactttatctactttttattcatttttttacttatatattttttctcttttttatacttatttttataattcaattcatatatattttatatattttaatattttacattattttatcttttttttatttttactatttatttcatttttcttatttctatatttttctatttttatctttc

SEQ ID NO: 4011 - DNA, 103 bp, Oryza sativa
  Clone ID: uC-osflcyp090a05b1
gtttttgaagaagaactgaggtgtatgtgatagcagggcatcaataagggactggatcttcaagatgttaatgggcgtttatagtctactagctaggttgtat

SEQ ID NO: 4012 - DNA, 79 bp, Oryza sativa
  Clone ID: uC-osflcyp090a07b1
ttatttcatagcttgcctaggagaaagcaaatctagtttatcaaagacgtacttgggggaaaatgcatctaggagggtt

SEQ ID NO: 4013 - DNA, 257 bp, Oryza sativa
  Clone ID: uC-osflcyp090a08b1
gtaattcacccgccccctgttaggataaacttctcatctaccattcccgtacgccgtcatgccgacggccgggagcctcaccgacgagcagctccgcttattcgacgccaatgggtaccttgtgctggggtcgatctccagcgcggaggaagtgagggcgatgagggaccgcatggtgaagatcgtctacggattcgacggcgcttgtagcgtctttataacaaaggatcacctgatggtgaaagactagtttctat

SEQ ID NO: 4014 - DNA, 256 bp, Oryza sativa
  Clone ID: uC-osflcyp090a10b1
gtggacgaagaagagaggcgcatttcaatcgaagaagacggaggagcgctgctcgtacgcacccgctgcttctcctgctgcaccttctcccacaaatggccagcaaccatgctggtttccccgccctcgatagatttgttgcccgcaagcgcactcgcagttaggaaaaaccacctcctccaccttcttcttcttgttttggttgttcttgttgttgctgttgctgtggttggtgcggggagggttgtgggggggg

SEQ ID NO: 4015 - DNA, 427 bp, Oryza sativa
  Clone ID: uC-osflcyp090a12b1
actctctagttcgggagctatgactaatacgagggtgttcttcgacatgaccgtcggcggagctccggcggggcggatcgtgatggagctgtacgcgaaggacgtgccgcggacggcggagaacttccgcgcgctctgcaccggcgagaagggcgtgggcaagagcggcaagccgctgcactacaaggggagcaccttccaccgcgtgatcccggagttcatgtgccagggcggcgacttcacccgcggcaacggcacgggaggggagtcgatctacggcgagaagttcgccgacgaggtgttcaagttcaagcacgacagccccggcatcctgtccatggcgaacgccgggcccaacactaacgggtcccagttcttcatctgcaccgtgccctgcagctggctggacgggaagcacgtcgtgttc

SEQ ID NO: 4016 - DNA, 109 bp, Oryza sativa
  Clone ID: uC-osflcyp090b06b1
gtatttaatggcaagccgtggagaaagcacattggcgacatttaaaatggactctatgataaatgatgtttatgcctttgactatgttcaaaccatgcagccttctgga

SEQ ID NO: 4017 - DNA, 266 bp, Oryza sativa
  Clone ID: uC-osflcyp090b09b1
atgtaagattttgtcaccacaggcaaaagatgctgcagaaataatatgtcggcggttgcagttgggttctaaacttattaatacaatttagaatatggtatattcttgctcatatatttatatattcatttattgttataatttctttatttagtatccattttaaaaatattatcttatcataattaatattattttattttttattttatcttactttatatatttttttaaatatttttcataatttcttatttttttttttt

SEQ ID NO: 4018 - DNA, 184 bp, Oryza sativa
  Clone ID: uC-osflcyp090b10b1
gtgatcgaaagcttgagcctaatataggaggtcaggaaccgaccgcacagggatcttgaaccggaatcactcatggcggtggaactctgatttgcggcgaggaaggtcaatagtcgcgcccttcaacaggcgacgggtttagtgccggcgagataaatgtttttatgagttacatctttttttt

SEQ ID NO: 4019 - DNA, 97 bp, Oryza sativa
  Clone ID: uC-osflcyp090c01b1
tttaagtctcacaagctgtgcccaatatacacttgatactacatacaagctctcgacaattaacaaccctaagggtcttgaccatgaatcatccatt

SEQ ID NO: 4020 - DNA, 52 bp, Oryza sativa
  Clone ID: uC-osflcyp090c05b1
ggtttggagggtgagttgtggcggaagaagatcgtatacatcatagatgtta

SEQ ID NO: 4021 - DNA, 195 bp, Oryza sativa
  Clone ID: uC-osflcyp090c08b1
gtatattatgctatgctgtggtgaatgcaaatttggtacattattggaggactcgaagtgaaatgtcggtaagggggttgaccatgaatcagctatctctgttttagggatcacctggcctgttgtttgctgcatattcgttacacaccttacaggtctctcagcatacaatcgtcagattcatgaacttgaaaa

SEQ ID NO: 4022 - DNA, 303 bp, Oryza sativa
  Clone ID: uC-osflcyp090c09b1
attcttgccatcctcgccgaggcgctttaggccgtgttctgcgaggtgatgatctgcatgtcggagatacaccgaccacttgacttataaggtcaagcaccttcctggtcagatcgcggtccccatcattatggcgcacacttagcagggaagctactacatgaagcatgccctgaagctaggtgagctctacctactgttgaagacgaagcatgaccggtactcgctctagacatccccacagcggcttgtttctcaatatgaggtctttctcctctttcttctattcctttttgtgtttta

SEQ ID NO: 4023 - DNA, 138 bp, Oryza sativa
  Clone ID: uC-osflcyp090c11b1
ttcccgtaccctcgtcctcgcccgccaccgctcgccgccggcgtctagggtcgcggcgacaagccgcgggcgttcgttctccttcggcccccataccctagccgtatatcccaccaccctcgcccccgacatggccac

SEQ ID NO: 4024 - DNA, 277 bp, Oryza sativa
  Clone ID: uC-osflcyp090c12b1
tcgttaaattcaactactcctagatgagaccctgagtgagagaagaagcaaagaaacaacaacaagatgaaagagagatctccctcttccatcaacaatgccaccaccattaatcaccaccaccaccaccaagctgttcttgctcctcctcctcctccatggaggccactgcctgaagagcttggacatggccatggagatggagatggattcagaggctcacagcaggatgctgtgggagtttcagcatcagcaactgctggaggtacattagcta

SEQ ID NO: 4025 - DNA, 168 bp, Oryza sativa
  Clone ID: uC-osflcyp090d01b1
gtagagtttgatttgctgtggtgtatgtatattgtttagaataaagaaggactagatgtggaatgatgttaaggggattgataatggttaagttattatgttaaaggtataagatgttctgttgtttgagatataatcgttggaaatatttacttgtcgctcatattt

SEQ ID NO: 4026 - DNA, 58 bp, Oryza sativa
  Clone ID: uC-osflcyp090d03b1
tcgttaggatggagaatggtgcgcccaatacatacggtttttttcaaccgatccccct

SEQ ID NO: 4027 - DNA, 249 bp, Oryza sativa
  Clone ID: uC-osflcyp090d11b1
gcgtgttcaacgccggcatggttgaggacagccgtgtcgccatggatatcatcttgaaggagagctgtggcattttccagggcatcagctctcttattgatgttggtggtggccatggcgctgcagctgcagccatagcaacggcattcccaaacatcaagtgcactgtgctggatctgcctcatattgttgctgaggctccagccactcatagcaacatccagtttgtaggtggtgacccttttctag

SEQ ID NO: 4028 - DNA, 218 bp, Oryza sativa
  Clone ID: uC-osflcyp090d12b1
tcgttccaatccaagaagaagcgatggcatctcgtctcgttgcggcggcggcggcgccctcctcgtattcctcgctcgcccgcctcgtctcccgccgtggcctcgccggcgctgcagatcaccatgggcctgcgaaggtcaacatttggcaagaactgatgaacccggctaactggaaggaagagccatttgtgctagccagcttagctatgtgggga

SEQ ID NO: 4029 - DNA, 99 bp, Oryza sativa
  Clone ID: uC-osflcyp090e01b1
ttagattagtgtttgccgaggagaatgcagatttatttcaataacgaaggtttccgtgaggaatgatgttaaggggtttaacaattaatctaactatta

SEQ ID NO: 4030 - DNA, 191 bp, Oryza sativa
  Clone ID: uC-osflcyp090e08b1
gtataatgtcgtttgctgaggtgaatgcaaatttgcttcatcaacgtaggactcgacgtcaaatgacggtaaggggattgaccatgaatgagccattgtgtttaggggatcatttgtcttgctgtttactataaaaatgtgaaacattatacatgtctctcagagctccaatatcagatttattaacttgt

SEQ ID NO: 4031 - DNA, 237 bp, Oryza sativa
  Clone ID: uC-osflcyp090e11b1
ctgcgcgctgggctgcgtgttcccggagctcctcgcccgcaacggcgtcaagttcggcgaggcggtgtggttcaaggcggggtcgcagatcttcagcgagggcgggctcgactaccttggcaacccgagcctgatccacgcgcatagcattctcgccatctgggcggtccatgtggtgctcatggtcgccatctttggttaccgtattgtcttctgtccttttgatctagttttcta

SEQ ID NO: 4032 - DNA, 119 bp, Oryza sativa
  Clone ID: uC-osflcyp090f01b1
ttaaaaaggggcttgttgtggagattgcaaatatctttaaagaaggtgggaccggaaatgaaacgttggtaagggggtcgattatgtaatagctatcatttttaaggtataaattgtca

SEQ ID NO: 4033 - DNA, 86 bp, Oryza sativa
  Clone ID: uC-osflcyp090f02b1
ttagagaatggtaagctgaagtgaaagtaaagttcttctaacaacgaagctctcgatggaaaatgttgaaatgggtattgatattg

SEQ ID NO: 4034 - DNA, 63 bp, Oryza sativa
  Clone ID: uC-osflcyp090f06b1
ggagcatgctcaccacatggcatatcgcggatatctagcaaggaatagatcataattaatcct

SEQ ID NO: 4035 - DNA, 96 bp, Oryza sativa
  Clone ID: uC-osflcyp090f07b1
atcaccagcaaaggcgcatgcaaagtggtttatataaagaaggactcgaagtgcaatgatcacattgggtgttgacaataattcatacacttatat

SEQ ID NO: 4036 - DNA, 67 bp, Oryza sativa
  Clone ID: uC-osflcyp090f09b1
ttttatacaagcatgctgtggataatgcaaagttgttttattaaaggtagacttgacgaggaacaac

SEQ ID NO: 4037 - DNA, 438 bp, Oryza sativa
  Clone ID: uC-osflcyp090f10b1
attccacaagggtgcaaccgaccatgcttacatgagacttgatggggaaccctggaatcagcctcttccgaaggatgacggcaaggtcttggtggagatctcacatgccggccaggtgaagatgcttgctaccaaaaactgcattgctaaaggcatccatgaggcactgtctatgtcaacggttcatccagagtccagctcctccagtgacgatacggatgacgatgacgatttcgcggaggagaggaagaactttggtgctgcattgtcgtttcggtacatggatgatgtgaccaaagagtaaaaaagcttgctttttttactgagccttgtacagcatgtttgcataggacgtagattgctgcactaactctggaagctgtgccccttgaagattctttccattgccaggttctgacatttggttgattttgctgt

SEQ ID NO: 4038 - DNA, 250 bp, Oryza sativa
  Clone ID: uC-osflcyp090g03b1
ttgacgcgcggggccgtattgctttcgttgtgtaggctagatcgccgcatcagcaccggatcaccaccatgtcatcaccaatctccccaagattattcaattcctcacttggattatactactaatctcgcctccccccgcgcgattaatttatcgccatggcgccatcagcgagcgtttacttctgccagatccagcgcagcatctctgctattctccagcctcgcgggaagggagggggaggccctat

SEQ ID NO: 4039 - DNA, 133 bp, Oryza sativa
  Clone ID: uC-osflcyp090g12b1
gttctccacacgcggagtggaggagggattaatcgtgagtatattaatcggcggccttgacgatcggcggcgctgttctctagtgttttagttagtgtcaatctaatttccgtttgatttgttttgtttatat

SEQ ID NO: 4040 - DNA, 59 bp, Oryza sativa
  Clone ID: uC-osflcyp090h02b1
gatgtgaactgacagacatgcacagggcttttgtcaagctacgactgaataattactcc

SEQ ID NO: 4041 - DNA, 57 bp, Oryza sativa
  Clone ID: uC-osflcyp090h07b1
gtataaacgaacaacctcaacataatgcagagatctttaatcatgcttgcatctata

SEQ ID NO: 4042 - DNA, 57 bp, Oryza sativa
  Clone ID: uC-osflcyp090h12b1
tctctgacgcgtggggggatttttatttataatttaacttatattaaattaattaaa

SEQ ID NO: 4043 - DNA, 318 bp, Oryza sativa
  unsure (1)..(318): unsure at all n locations
  Clone ID: uC-osflcyp091a03b1
gngtgntttggttgcaaaaaccaagacatacacacagaattaaataataacaaaggttttctagcctcaaaggatacatatatatagtttccctacaatacaatggagcctgtcaatgatttccaggaaggcatttcaacagagcatgcctttgaggcagagcctgtgccatcattgtcggaaacaataacgccacgatcaatggtggtgagcttcatccttagtgtaactctcagcatcgtcgtcttgaaggtcaatcttgagctttggctttattccttctgttcagtatttccagactgttcttttttgttttat

SEQ ID NO: 4044 - DNA, 455 bp, Oryza sativa
  Clone ID: uC-osflcyp091a05b1
atttgtctctacaacatcgtcttttacttgccactggacatcatcaagttcctgatccgttatgcgttgagtgggagggcatgggatcttgttcttgagcaaaggattgctttcacaaggaagaaggatttcggcacacaagaaaaccagctcaagtgggcgactgctcagaggaccatccatgggctccagccagccgccaccgcggctgtctttcgcgacatgacaagctacaacgatctcaaccagcttgcagaagaggcccgtaggagagccgaaatcgcaaggttgagagagctgaccaccctgaaggggcggatggagtcggtggtgaagcataagggcttttatctttgagaccattccatattcatacacccttttattaaacatataatctcaatatatatcttatatttacttttttataaagtgcttggccattaacaatatta

SEQ ID NO: 4045 - DNA, 125 bp, Oryza sativa
  Clone ID: uC-osflcyp091a06b1
tcgtttccttttcctccggctcttcttcagtatcgaatgctctcttctccttgtgcccaccaccaccaccgtagtaatggcgggcaacgggccgatcaacatggaggacctgctcaattggggcg

SEQ ID NO: 4046 - DNA, 218 bp, Oryza sativa
  Clone ID: uC-osflcyp091a08b1
ttgatactatgtagcagaaatcctcttggcattagagtaccttcacatgctcggcatcatataccgcgatctcaagccagaaaacgttctcgttcgggaggatgggcacatcatgctatctgactttgacctctcactccgttgcgcggtgagtccaacactaataaaatcatctaatccgtacgctgaagcactcatgaagaacagccatggttact

SEQ ID NO: 4047 - DNA, 342 bp, Oryza sativa
  Clone ID: uC-osflcyp091a10b1
tggttggagccaggatactgtctgttaaactagtcgataaaacagatctatgggacacccctgaacctggtaccagaccagatccaccaactgaagatgcagaagatatggtattcaatgttgcgtggttgataggagggacccctttggttaatgttggagagctgctgatggacgtcagccaggatcttgcaatgtttttagaacagtttaagcctgctaaagttaaattacttaatacttccatgatcattgtctatggtccctgtctaatactctattgttctaagaagaccttcttttttcttgtctctatttcttcctgtttttctcttttttttt

SEQ ID NO: 4048 - DNA, 207 bp, Oryza sativa
  Clone ID: uC-osflcyp091a11b1
ttggtacttttggtggatggccctacaaaatagcatatgcacgaactattttgcctgcaatctattatacgcttttatgaagattcttttgagcaagcagggagtcccaagaaagtaaaattgtgtaataaattttgtggcccattttttgtgactgaagtttttgattatcataactggatgagaaaattttggtgccacacatta

SEQ ID NO: 4049 - DNA, 273 bp, Oryza sativa
  Clone ID: uC-osflcyp091b03b1
ttcctagaggctcatcggcgacgccgccaagaaccaggtcgtcatgaaccccatcaacaccgtcttcgatgcgaagcgtctcatcggccggcgtttctctgacacgtcggtgcagagcgacgcgaagctgtggccgttcaaggtgctacccggccccggcgacaagccgatgatcggcgtgcagtacaagggagaggagtagctgttttccttcgtggagatctttgtctttggtgcttcactagattatggtgaccgtcctctgtctttttt

SEQ ID NO: 4050 - DNA, 447 bp, Oryza sativa
  Clone ID: uC-osflcyp091b05b1
gttattgataatctcgtgtgacctaatttgcatggagaaggtaagcatgaggctggtcatggtggccttggtgttagtgggcatcgtgctggcggcgagccaggaggtcgtcgatgcattcacgtgcgtggcaacagattcccctgaacttgctgaagaaaggaaaaaacttgagaagctcacggcaatcttctctcggcctcgcggtgtttgccacgcaagcgagggttgccgcgatgaaccactactaattgatgactgatgccaccaaatgtaccagtccacacaaaatcggtgtgtgtgaggcatttcccatttttcccgacctgtgcaggaggccaaaattaggaaccggccaatatattccttgcaccgatttattttgctgtgaaccgacccttacagatgtttgtctacgtgtcaatttctttaccataaaccacccta

SEQ ID NO: 4051 - DNA, 84 bp, Oryza sativa
  Clone ID: uC-osflcyp091b08b1
tcggtagccatccgtaacggcagactactcctgcgccggcgtccgccgctgacgagatcagctcgccgccgctgtggaagctgg

SEQ ID NO: 4052 - DNA, 152 bp, Oryza sativa
  Clone ID: uC-osflcyp091b12b1
ttggtagagaagaaatcctcgcagaattcgagcaagaaccgagggagatcgatcgcctcttgtcctcgttccgaggcagagatcgacctgaagtgagctgagctgcggcaaggaggaggaggaggaggaggagaaggagattggagatgatg

SEQ ID NO: 4053 - DNA, 294 bp, Oryza sativa
  Clone ID: uC-osflcyp091c03b1
ttgttttgagatgaattgttcgtagcattttagctgtagtatagatcgatcaatcgatcgttcgttcgttcgatcgttcgaggacgagagatttgctaacatggcgttggcagggacctccaaagtagtgctgggatgtgtcgcgtttgggatattctgggtgctggccgtcttccccaccgtcccgttcatgcccgtcggccgtacggtcggttttctccttggcgccatgcttatggtccttttccgtgtaatctcgtcggatgacgtctatgccgttcatttactctttat

SEQ ID NO: 4054 - DNA, 486 bp, Oryza sativa
  Clone ID: uC-osflcyp091c04b1
ttagtttcacaatgtctttaacaagggattgcatatgtcccatggtcttgacaagaggaagtgaccagctacctgtcagtacaaagtttgatatgcgtagcgatcctggcgttgtaaggaattatggtcggctcttgctggagatggcttctgctgtgccagatggcatagtttgtttttttgtcagttactcttatatggatggcattgtcaacagttggaatgagatgggtttttcgcaggacattaagcattatatgttgttctttattgaaactgcttatgtttttgtgaccaacttttgcttttgtttatttcttgaaatgcttgttatttatctaattatgtttttttttactattctcttttcttttttttattttttttcctttctattaattattcttttattattttctctattctttttccctttctctttttgttattcctttatatatttcttttttcttgtttctttatatt

SEQ ID NO: 4055 - DNA, 52 bp, Oryza sativa
  Clone ID: uC-osflcyp091c05b1
gttgtttaaaacaaattcgttataactatcggggaggacgttttcctaaaga

SEQ ID NO: 4056 - DNA, 106 bp, Oryza sativa
  Clone ID: uC-osflcyp091c08b1
ttggtagcataaaacgaataaattataattattggagatggtttttgacaacagtgaggtggtgggctatttttttataaatatactattagtttatttagaatgt

SEQ ID NO: 4057 - DNA, 415 bp, Oryza sativa
  Clone ID: uC-osflcyp091d02b1
gcttaccaccagcagcagaggatgaggcgcaagttcaggaagagcctctcctacgcgggggagctgtcgtcggcggggcgcgcgcgaggggagggcggtgcttatcattcctatttttttcttttttactattttctttttttatttttttttttttaaatttattatttttttattttttctttttttttcttatttttttcttttaactatattatttattcttttttttctacataaattttattttttttttattttttataatttaatattcttttttatttttattcataacattcttattacttttttctatctttcattatttttttatatattattctttctattttatcttttatttttttttatctttattatttcttatcttatttttcattctatttttcaa

SEQ ID NO: 4058 - DNA, 118 bp, Oryza sativa
  Clone ID: uC-osflcyp091d07b1
tcagaaaacaacgaacaatctcaaactcagggagaatatttatgcattcagatctgtagacagctttccataactgaatacactatatactcaaataaagtatcaattttatacaata

SEQ ID NO: 4059 - DNA, 235 bp, Oryza sativa
  Clone ID: uC-osflcyp091d12b1
tcgttgggtgctgcagtgcaaagggtgcggctacaatcaaaccttgatgcagcaccgtgttctagcgttgatggttcatcaagttgcatcataaatgaaggtgaaagtgaacgcactatggagaaacctgagattgaagagaatgcaggaagtaccttggctgaaggtgggacttgccatgaggatgaccagaaggagcatgatgtttcaatagcttatgcttaacctgttcttt

SEQ ID NO: 4060 - DNA, 166 bp, Oryza sativa
  Clone ID: uC-osflcyp091e01b1
gtcttctcctccttcttctccatcgccggcgagagagagagagttagctagctaggatgggttctacagccgccgacatggccgcggcggccgacgaggaggcgtgcatgtacgcgctgcagctggcgtcgtcgttgatcctgccgatgacgctcaagaacgccat

SEQ ID NO: 4061 - DNA, 240 bp, Oryza sativa
  Clone ID: uC-osflcyp091e02b1
atcctttcgctctgcggcttctccccacgccgagcgccgacgcttccctccccttctgttgacgcgtgatcttctactccaccacgagccactttcttcgatccctcccgttgaccgtgcgccgtcttcacctcggtgagaactcagtcacgggcatgcagggagggaatcgctacttcttgccctaccgactttcatgcctccattcatcgcatttttacctttaccggaactcctgtc

SEQ ID NO: 4062 - DNA, 136 bp, Oryza sativa
  Clone ID: uC-osflcyp091e04b1
gaaagacttaacttaaactgaactgagagggcatttgccaaatgaaagattgatagacacctgattcttttatacggatatcttgaacatgctgcaatggaacataaatcatgtcattgactggatctcactttct

SEQ ID NO: 4063 - DNA, 52 bp, Oryza sativa
  Clone ID: uC-osflcyp091e05b1
gtatttttcaacgaagactttagaactcgtggagagaatgtatgaaaaaaga

SEQ ID NO: 4064 - DNA, 56 bp, Oryza sativa
  Clone ID: uC-osflcyp091e06b1
ttttattaaaacgatgaatttattcttatcggaggggatgtttgcctaatgagctg

SEQ ID NO: 4065 - DNA, 134 bp, Oryza sativa
  Clone ID: uC-osflcyp091e07b1
tcggtagaatacagcgatgaatttataactctgggagaatatttatgcctaaagagcagtagagagctgtcctatgctggaatactatattgttgactatgctgaaaccgtaaaaagagctagacgtcacttgt

SEQ ID NO: 4066 - DNA, 63 bp, Oryza sativa
  Clone ID: uC-osflcyp091e09b1
actgcaccgccctcctcttactcgccgtactgtggcacttcttaccgctctttcaacgttacg

SEQ ID NO: 4067 - DNA, 179 bp, Oryza sativa
  Clone ID: uC-osflcyp091e12b1
tcgttcgatcatatcgcagggagtacgtagcaaattaatggcggccgtcgggctgttggtactagttggtctgcaggaggtggtcgggtagatggcggcgcaagaagcatgtgatgccccggtgagcattcacggagccatgctcgcgtacaggagacaagaaggcgtgcgttgagctc

SEQ ID NO: 4068 - DNA, 322 bp, Oryza sativa
  Clone ID: uC-osflcyp091f03b1
gtcatttggtagatcaccttatacttctcaaggccttacacgccatgggagcattccatcacttggtgctggcctgcaaatgggttctccaagcatgtcccttccaagttctccatatcatatagctggactatctcatggactaccgtatggagggagcatgtcctttggcacttcaaatctgcctgtaaacaatccaatgcaaaatgattggccaagccaagtcaatctttatgctggggagcaatttaatctactgcctaacatgttacagaaaccaaattcacttccaaatagccctatgccattacttgtatttttc

SEQ ID NO: 4069 - DNA, 87 bp, Oryza sativa
  Clone ID: uC-osflcyp091f06b1
ctccttcgcagatccgatccaggaagagctcgccgtcgcctttgacatggcgctctccgtggagaagaccttgtaggtgagggagta

SEQ ID NO: 4070 - DNA, 97 bp, Oryza sativa
  Clone ID: uC-osflcyp091f08b1
tcgatccaccacagccatgagcagctcacgcccaccggaggcgagagagaaaagaggaaatcatggcggcgatttgctgtggagattcgggtgtgtg

SEQ ID NO: 4071 - DNA, 308 bp, Oryza sativa
  Clone ID: uC-osflcyp091f09b1
tcttttactcccaaatcccaaccttccattcatcggggtcgtgtcgccgccgacgaacaacacggcgagcggcgccggtggcgagctacctaccctccatctctccagatcccttccagggacagtacaagacaagtcgcacaaaacagaaaatcttgtgatagtttaaatggcttcaaagcttcaagccttttggaaccatcctgctggccccaaaaccattcatttctgggctccgacatttaaatggggtattagtattgccaatgttgcagactttgcttaaccacctgaaaagatatcctatc

SEQ ID NO: 4072 - DNA, 437 bp, Oryza sativa
  Clone ID: uC-osflcyp091f11b1
tttaagggcagagacatttgggatacccatacctgactgggtcaaaaacccagcaaagatggctgaagctgttgacaaggtgattgttcctgatttccaaccaaaacagggggttaagatagttacagatgagaaggctactagtctttcgtctgcatctgttgatgatgctgctgtcattgaagagcttattgcaaagttagaagcaatttccaaaacactgcaaccaggattccagatgaaaccaatccagtttgagaaggatgatgacaccaattaccatatggacgtgatagctggttttgctaacatgcgggcaaggaactatagcattcctgaagtggacaagctgaaggcgaagttcatagctggcaggatcatccctgtcattgccaccttaactgcgatggctactggtcttgtctgcttggaactgt

SEQ ID NO: 4073 - DNA, 133 bp, Oryza sativa
  Clone ID: uC-osflcyp091g01b1
gttgtagcgaaaaggaagatacagcaggaaggggatacatttgtttctgcatctcatttctgaacggcaggtgggcatgaaatccaaacgagaggatgatgatgagggtgttgaatgggaagaagagcttcct

SEQ ID NO: 4074 - DNA, 342 bp, Oryza sativa
  Clone ID: uC-osflcyp091g03b1
gttctatcagaatggtctccaatggtaatgaagatcttaaagcggatgttgaactagtagagtcgacaacagtggacaatgatactggagccccaggtgccagtactcttcctactcaaggtgttccacgacaagggaagcagcggaatgggtttctgaatttctgtaatcgcttttccagtggtgacaggtttaagaagttgggtccttctcctttattcaagtttctacagcttgcacttgagcgagattgatgttttacgtttcatacacttttgacagtcatgataatcatgatcacttccagtttatcatggaattctaatttgtggctcattttgc

SEQ ID NO: 4075 - DNA, 151 bp, Oryza sativa
  Clone ID: uC-osflcyp091g08b1
ttcgaggcacacatgtatcttgttgactttgatttggcagaactggatatcaagaaagcactagaaatagatccagacaacagggatgtgaagatgtggttctttatactttcctattattttttttttcctacctctcattttatttttt

SEQ ID NO: 4076 - DNA, 55 bp, Oryza sativa
  Clone ID: uC-osflcyp091g10b1
tcactccctcctctctacgacgacgccgccgacgtgcgccatggtggcgctcgcc

SEQ ID NO: 4077 - DNA, 65 bp, Oryza sativa
  Clone ID: uC-osflcyp091g11b1
tggacgcgtggggccgccaccgacaccgccgtcatgtaaggaggaggaggactttttactaattt

SEQ ID NO: 4078 - DNA, 406 bp, Oryza sativa
  Clone ID: uC-osflcyp091g12b1
ttgtttttctctctccttttgttgcttccatttctcgttcttgcacggggaagaggagagaaagatgtgtgtttttagatttttaaaattttttactatttatttatttattattacttttttttattttatcttttattatattttttattattttattttttttttttttttaattttatttttttattattatttttatttatttattatttctatattatattttttttttaatattcattatattatttattttttctatatatccttttacattaatatttttattttttttttatatattcttttttatttaacttctttttttttatttctattactttattatatatattttttatttattttatttatatattattaaattaatttatattttttt

SEQ ID NO: 4079 - DNA, 213 bp, Oryza sativa
  Clone ID: uC-osflcyp091h02b1
ttctagattgtgctttcctaaacccggcgcgggcattgttttggcgaccaagagcccttccttcattggttacgcaaagcaaacattgaacatgtcaggcctaaggatctccaacaagttcagggtgtccgcgacagcggtgcacaaggtaaagtttataggcctggacggtgtctagcacgagtttgaagcctttgaagataccttacattc

SEQ ID NO: 4080 - DNA, 215 bp, Oryza sativa
  Clone ID: uC-osflcyp091h04b1
tttttaaacaagcctttggtggttcgataggacccgtcatattactccaaatgcagtagtttcttctcctgataagaatgtgacaattgcaaaaaggtgctcagtttttccagttgaatttgttgtgaggggatatgttactggtagcactgttacatctttgtggactgtctttatcaaacttgctaggaactattgtttatatgttctacttg

SEQ ID NO: 4081 - DNA, 249 bp, Oryza sativa
  Clone ID: uC-osflcyp091h05b1
tcgcatacacagcacagcggataaagagagagagagagagagatttggaaaaatcttgctccacctctaaagggggataaggggggaaggatgtctttctatttttttttttttatttctttctctttttttactttgtacttttcttttttttttttttctttttttctcttcttttctttttttcttctcttatttcttttttttttctttcatctttttttttttctttctttcttttcttttttt

SEQ ID NO: 4082 - DNA, 112 bp, Oryza sativa
  Clone ID: uC-osflcyp091h08b1
ttggtgtcttcatactgctcccatggcggagatggcgtctattgcgattgcagtgatcataaggagctggaggaggaggaagaatttgtttttttcttttttcttttcttcc

SEQ ID NO: 4083 - DNA, 114 bp, Oryza sativa
  Clone ID: uC-osflcyp092a01b1
ttcttacccaacgccaggttcaagtcgctcatttccacctcctgaagcagaggcagccgttgaagcagcaacgggagcagcagctcgccgcggcagcagcggcggcgtggggaa

SEQ ID NO: 4084 - DNA, 82 bp, Oryza sativa
  Clone ID: uC-osflcyp092a03b1
tttaatagccaatcaagcaaatcattaacacttgcatgattgaccagaaggacaagtcgtgttctatgctgcaaaagcttgg

SEQ ID NO: 4085 - DNA, 291 bp, Oryza sativa
  Clone ID: uC-osflcyp092a04b1
ttgtggtttcagtgaaagcagcaaatgtgcacagatttgcaaggtttttgaggatgcatacaaatctcagtttggcatcataattctagatgacatcgaaaggttactggaatatgttgccattggaccacgcttttcaaacataatctcacaaactctactagtccttctcaagagggttcctcctaagggcaagaacttgcttgttattggaacaacaagtgaagtaggctttttagaatccattggtatgtgcgaagtgttctccgtgacataccatgttcccaaact

SEQ ID NO: 4086 - DNA, 84 bp, Oryza sativa
  Clone ID: uC-osflcyp092a07b1
tcggtctgtcgttgaggaggagagcaaccgcaagaggatggatcagtagcagcaacagacaaatgagggacagcaaaaggcgac

SEQ ID NO: 4087 - DNA, 417 bp, Oryza sativa
  Clone ID: uC-osflcyp092a08b1
tctttaacagcacactgagctcaatttgatgaatgaaaaattgagcattgaatcaagaaaagcaaaatcattggagcgagatggagatcaactacgctcacaggtggctttacttgagtcaaagctgggccatggagattactctgcctctagcacaaaagtactgcgtatggtaaatactcttgcagtggacaatgaagcaaagcagactatagaggcattgcaagctgaattgaagaaaacgaaagagaggctacaagcagttgaagaactaaaaggacaagctgatgttggaactgtggttgatgtgaatattgctgaaaagctagcacagcttataaatcaaattgcaaccctagagaaacgtgaagaaagatttaaggcaagatttgcagagaggatcttagtttttccaaa

SEQ ID NO: 4088 - DNA, 150 bp, Oryza sativa
  Clone ID: uC-osflcyp092a09b1
tcggtggtggtcaagtgctccctgctgggctccgtcctcttcaacctcctcctcgtgctcggcacctccctcttctgcggcggcgtcgacaacctcggcgcccgccagccctacgaccgcaaccagcccgacgtcagcaccgcccttctc

SEQ ID NO: 4089 - DNA, 330 bp, Oryza sativa
  Clone ID: uC-osflcyp092a10b1
ttggtatggtcgaacacagctagctagctgggctaggatcgccatggatcggggtgaccaccaccacctccagcagcagcaccagttcttgatgccaccgcctgcgccggtggtgccgccgcagctgtgcatgccggcgatgatggcggacgagcagtacatggacctgggcggtggcggggcggcggcggcgccggggaggggcggggccggggagaggaagcggcggttcacggaggagcagatacggtcgctggagtccatgttccacgcgcaccacgccaagctggagcctcccgagaaggcggagcttgcccgcgagctgggcct

SEQ ID NO: 4090 - DNA, 274 bp, Oryza sativa
  Clone ID: uC-osflcyp092a11b1
tttcattttttccccccaatcccttccgacgcgctctcgagctccccgcattccccgtctcccctccgcctgccccgggagctcctccggcgagatccgcctctgacagccaccctcccacggctgctcgtcgtcctcacctccggcgaccggctcaggaagaaagtaacttgagccatgggaaagaggaagtcagcggctaagccaccacctaagaagaggatggacaagcttgatactgtattttcctgcccattctgcaaatatggcagtt

SEQ ID NO: 4091 - DNA, 283 bp, Oryza sativa
  Clone ID: uC-osflcyp092a12b1
tttgtctttcgtgagagcaaagctaaaggtaagggagctgatgaatactggcttatttggcgttatgaaggtgaggatacactattcgatctcatgcaaagcaaggagttcccttacaatgttgagactaagattctaggagatgttcaagacctgccaaagggaatagcaagagagaataagattattcaaacaggaatgagacaactcttatttgctcttgatggccctcaatcaacagggattgttcacagagaccttaaaccccaaaatgtgaattttt

SEQ ID NO: 4092 - DNA, 112 bp, Oryza sativa
  Clone ID: uC-osflcyp092b02b1
agctgcagcagcagcagctgagcttgaagcagcagagcgaggtagacatggccgccgccaccatggccctctcgtccccggcgctggccggcaaggccgccgcgaaggtgtt

SEQ ID NO: 4093 - DNA, 123 bp, Oryza sativa
  Clone ID: uC-osflcyp092b07b1
tcgtaccaacctagacaaggaagaaaacctgactggtattctttgttacacgcgccatacagatgatgaacagggaaggggcgcccatttgtcgattttgcgagctgagcaggagtaggtaag

SEQ ID NO: 4094 - DNA, 82 bp, Oryza sativa
  Clone ID: uC-osflcyp092b10b1
tggtgagcatggtgagctgcagtgatggtcccctgcgtgactggtgtccccggccaccatctacgcaaccttccaggggcta

SEQ ID NO: 4095 - DNA, 289 bp, Oryza sativa
  Clone ID: uC-osflcyp092b11b1
tggtgagcttggtgagctgcagagatggccccctccgtgatggcgtcgtcggccaccaccgtcgctcccttccaggggctcaagtccaccgccggcatgcccgtcgcccgccgctccggcaactccagcttcggcaacgtcagcaatggcggcaggatcaggtgcatgcaggtgtggccgattgagggcatcaagaagtttgagaccctcttctacctgccaccgcttaccgtggaggaccctctgttgcagaccgagtacctgctccgtttcaagtgggtgcctttcc

SEQ ID NO: 4096 - DNA, 420 bp, Oryza sativa
  Clone ID: uC-osflcyp092b12b1
tcggtaggatgatgcttgaattttgtcagcaaacttcaaatgagaagctgccacaagatatatcagatcaagcacttatggagaatttcatggagagatatgagaaggaatggacccatcctgttaagaatcttttcggtggagagttagcatatgccatgcttatccagcttcagaagcgcacagtggatatcaagcaggcaatgctggaactggatcagattcttaaaggaaatgcgataaacttcgctattcttgcagctttacctgcatttggtgtttcgcttttgctcctcactgtggtgcaagcatggattatgaatgaccaaggcgccgagggaagaggcaggattgcacggcgccaaagaaggctgctgcttcttgatgcagagagaaaacttatggagtttaaaattgcat

SEQ ID NO: 4097 - DNA, 306 bp, Oryza sativa
  Clone ID: uC-osflcyp092c02b1
tttctatgttctctgaaccccacaacctccttggaggttttgccttcatcggagagggcatccctgttgctactggtgctgcctttgctgctaaataccgccatgaggtgctcaagcagtctagccctgatggacttgatgtaaccctggcattctttggtgatggtacctgtaacaatggccaattctttgagtgcctgaacatggctcagctttggaagcttcctattgtgtttgctgcggagaacatcctttgggcatttgttatgttactatcttacggctactttaagacccatagctttt

SEQ ID NO: 4098 - DNA, 76 bp, Oryza sativa
  Clone ID: uC-osflcyp092c04b1
tttatatctggagaaggaatcaaacttggagtgtaggtatgtttattcacgacatacaaattatggatagaaaaag

SEQ ID NO: 4099 - DNA, 78 bp, Oryza sativa
  Clone ID: uC-osflcyp092c07b1
tcgtaacgacctggagaaggtgaagaaccgcgagggtatatatggcgacctacgccgtacatatgccggaaagaaaaa

SEQ ID NO: 4100 - DNA, 185 bp, Oryza sativa
  Clone ID: uC-osflcyp092c10b1
ttgtccagacaccaagagcatcttgtaccacctacgcagagttttgtttgcttgcttgtttgcttgtcagtgtccagaatggcagcgagggtggcgtggatcggcgcggcggcggcggtggtggtggtggcgctgatggccggtggcgcggctgatctcttaccttctattagctacttatagtt

SEQ ID NO: 4101 - DNA, 287 bp, Oryza sativa
  Clone ID: uC-osflcyp092c12b1
ttgtttggttgaaaacgctatcaatgtccagccaaatattctggatggcattaatattgtccttccccaattcctgggcatttttcacacaatgcaggagaggtgcatgaaatcattacaggcgctcacttcatctggaccgaatgatagtggatatacccaactttagaaagatttctcagaggtgttggatcttgtaatcgattccaatattacttttgtaactctttgtctacgcttatcaacctgctgccttattatctcgttctttttttgtgaatagctaa

SEQ ID NO: 4102 - DNA, 396 bp, Oryza sativa
  Clone ID: uC-osflcyp092d02b1
atttgtacatacttggaacttgtttgctatgtggttcttctttcgatgactactcgccccgttgtcgttgcagccattgtagaatgctggtgctagtgtgctccacatgtcaggattccactaaggattatgtttgcgagttgtgccaaaagaacggaaagcaatgctgccaaacgtcaccaaggcaaggttgcaaaacagagtcagagctaatagattcttctgactttggaataccaatgattattaattaaagtgcaacttcaaccattcccaggagtaatggtagtgagcagcttaagaagctaaagatcctctgcttgcatggttttcgtcaaaatgtcttaaattttaagggcagaacatcatctcttgccaagaagtttaagtactttt

SEQ ID NO: 4103 - DNA, 65 bp, Oryza sativa
  Clone ID: uC-osflcyp092d03b1
agtgcaccaagctgagtgagccctagccgacgacggcgtttttgagcgcaatcacttaaaccatg

SEQ ID NO: 4104 - DNA, 59 bp, Oryza sativa
  Clone ID: uC-osflcyp092d04b1
gatcgtcctagagaaggagaagaacctccattgtgggtatctttaaacaagacgcgcat

SEQ ID NO: 4105 - DNA, 84 bp, Oryza sativa
  Clone ID: uC-osflcyp092d05b1
gatcgatctagagaaggtgcagaacttccattgtgggtatttttacacacgccgcaccgatgttgcatatttaaagttctgtca

SEQ ID NO: 4106 - DNA, 63 bp, Oryza sativa
  Clone ID: uC-osflcyp092d06b1
gctaatatagcaaaggagaaaaacctccagtagaggcttctttaaacacgttgcccaattgaa

SEQ ID NO: 4107 - DNA, 70 bp, Oryza sativa
  Clone ID: uC-osflcyp092d09b1
ttcgtatgatattgagaaggagcagaacatgggggggatttttggggggagacgccgaagaaatgaggga

SEQ ID NO: 4108 - DNA, 91 bp, Oryza sativa
  Clone ID: uC-osflcyp092d10b1
tgaccactcaaaagaacggaaaagtcctgcaggttgtttttgtgggtacactatactgtaatggcggatgaacatgatacatgaaaattaa

SEQ ID NO: 4109 - DNA, 150 bp, Oryza sativa
  Clone ID: uC-osflcyp092d11b1
tcgtgcttggctcttcactctccccctgttcctgcaggggtcaggcactgcctgctacaagagtggtgtaggtgattcggctagctcagcgcgaagatgggggagatcaccaatgacacgtgagcaccaggccatcgcgaagcaaaagct

SEQ ID NO: 4110 - DNA, 134 bp, Oryza sativa
  Clone ID: uC-osflcyp092d12b1
tgttgacgcgtgggttcaacaatggagacaaccagaggaggtaggtagccgatgacgtttacttcagaattaggccctagagtttggtttctacaggaggacaaagatgatttgagacatattgcttttgtttt

SEQ ID NO: 4111 - DNA, 402 bp, Oryza sativa
  Clone ID: uC-osflcyp092e01b1
catatccaattcgcaccgatcgatcgatcgatcgatccagcaactagatcaacagtactagctaggaagcatggcccgtgcacagttggtgttggtcgccctggtggcagctctgctcctcgccgccccgcacgccgccgtggccatcacctgcggtcaggtcaacttcgctcgctggctctttctgacctactcttgcggttgattcttttatttatatctctttatatccatatattatttacctctattttatatttattttatttttttttatttttatttctatccttttattctattattatattttcttttccttttttcttctctttctttttttttttctatttttttaattttttcttattttatctttcttcatcttatttttactttttt

SEQ ID NO: 4112 - DNA, 315 bp, Oryza sativa
  Clone ID: uC-osflcyp092e03b1
ataatacaagatgtatcaatgtttcactgatgcaacaacgaggggactccttgctgataatgggatctccatttggcatattatcacctgtccatttcttcaataggtaattttaattctactcctttagttcatttgggtatcttgttaccaatttataggggcccattagactgtttgttgaaactcagtatgtcaccttaactatagagcaagcatatgtaactagcatgtttgtaacatcaacgggtgtttaattaaggtggaagtgcttgagatttctttatgtttaaccggtgactttatataaattta

SEQ ID NO: 4113 - DNA, 104 bp, Oryza sativa
  Clone ID: uC-osflcyp092e05b1
ttctttcttgaaaaggagctaaacttccattatatttatttttaaacacttcacacaaattatggaaagaaaaaggccactcaatcttcgacctaggtagcaga

SEQ ID NO: 4114 - DNA, 157 bp, Oryza sativa
  Clone ID: uC-osflcyp092e06b1
gtcttttctagagaaggagcaaaacttgcagtataggcatttttaaacacgccacacatttgtaggactgaaaaatgccagccatctttcgactttgggagcagagttctcgtaggcaacggaattttcaatcaagaaaaatatgatgtcgcatttg

SEQ ID NO: 4115 - DNA, 446 bp, Oryza sativa
  Clone ID: uC-osflcyp092e11b1
ttgtaagcagccatgtcagatgaagaaattgaggaaccaaaacggaggagagaatctgggggacaatattgtgcggtggagaaccgttaagaatgctaatggcactacatcttgtgaaagtaatgcgcgcattgtaaaatggaaagatggaacgatgcagctgctgattggtaatgaagttcttgatatatctgtacatgaagcacatcatgatcagtcccatctgtttctgaggaatgggaagggtagttctttattacatggtaggcttttacggaaaatgagatttatgccatctttcttgtcttcgaaatcacatcgcttttttacttgcttttgtgaatatcagattaagaaatacttgtatgattcaataattgatcgattctaatgatccttgtatagtgctacatgtataatgttatgtcttttttttcaaaaatttc

SEQ ID NO: 4116 - DNA, 317 bp, Oryza sativa
  Clone ID: uC-osflcyp092e12b1
gatgccattgaggaggacccttcaatgcgacaagcttcagctgcaagacgggtagacagcatgattgacaagatgccaaaaaagcttgctggacaaccaacgtttctgctatgtgttcttgctgagaggaagaattcagatatttatgggccctggatgctggaatgtcttgctgaatttgggattattacacaatgagaggaccctactagggttaatgattcagtatattacaaatgtactgttaaagataaatgcaaagcttggtggcttgaacttcctgattgaaattgaaacatcctcttacattcctcttg

SEQ ID NO: 4117 - DNA, 170 bp, Oryza sativa
  Clone ID: uC-osflcyp092f04b1
ttatatatctctgtaatcatcatatttttattctcatcaacacagatactcataccacaaaaacacagtttgggatggctcaaaatcaggctggatctcaattgggagaataacctgtcagctgtatttgttccagttgacattagaggttgtgtcctgccttttatgtt

SEQ ID NO: 4118 - DNA, 115 bp, Oryza sativa
  Clone ID: uC-osflcyp092f05b1
ttaatatcggagttggaagcgatcgatggcggttactactattggacgagttgttgcactcggcgcggtggccgtggtggtgtttattttatcttctttatttaatttaaaacta

SEQ ID NO: 4119 - DNA, 54 bp, Oryza sativa
  Clone ID: uC-osflcyp092f06b1
gatgacctagaaaaggagaaaaaccgccagtctaggaatctttacacacgacac

SEQ ID NO: 4120 - DNA, 160 bp, Oryza sativa
  Clone ID: uC-osflcyp092f09b1
tcggtctgacatagaaaaggcacagaactgcccgtttatttatgacgacagacgccgcacaattgacggaaagacaaagacaagcaagttgatcaccatggtagcagaggaactacaggcaagggaatagctagatgaaaaaaagttcactgacaccatt

SEQ ID NO: 4121 - DNA, 305 bp, Oryza sativa
  Clone ID: uC-osflcyp092f10b1
tcgttagtctcccccaaatctcctttgcgtcctctcgattcctcagcaaccatgtcggcctactgcggcaagtacaaggacgagctcatcaagaacgctgcctacattggcactcctggcaagggtatccttgctgcagatgagtccactggcaccattggcaagcgctttgccagcatcaatgtcgagaacgttgaggagaaccgccgctctctccgcgagctgctcttcaccacccctggtgcccttcagcacctaagtggtgtgatcctcttcgaggagacctctgttccagaagaccaagg

SEQ ID NO: 4122 - DNA, 166 bp, Oryza sativa
  Clone ID: uC-osflcyp092f12b1
tcgtgaaaaagagaggaaaagcagggagacaaattggaaaagaatcatctcaaggtgacccagctactggaagctctggtgttcagaatggaactgtaaatgctctatacaaagttttaccagccaccctagccaaagcagttaagaatgaagctgaagctgtggg

SEQ ID NO: 4123 - DNA, 227 bp, Oryza sativa
  unsure (1)..(227): unsure at all n locations
  Clone ID: uC-osflcyp092g01b1
ncgtaactttccagtggccgtgcctcagtgaatgcagcaactccagaactgcgcttgcagtgtgacgatgggcatgtgatctctgagattacatttgcaagctatggaactcctttaggtggctgcctgaacttcttcaaagggaattgccatgcatcgagcactctggatttggggacagaggcatgtgttgccaacaccaaatgtgtatcagtgtttcaacgatg

SEQ ID NO: 4124 - DNA, 90 bp, Oryza sativa
  unsure (1)..(90): unsure at all n locations
  Clone ID: uC-osflcyp092g02b1
tcctacntggtcagcaaggcgcgtcactgccgccctggtcgtgatggtggtggcaaaaaacaaacacacaataaaataataaacaaatta

SEQ ID NO: 4125 - DNA, 440 bp, Oryza sativa
  Clone ID: uC-osflcyp092g04b1
ttattatccaccctctcttccttccttccttccttccttccacacagaccagaccaggcatcccgacactacacgcagactctcgactttgtcactagcatcattgcttgatgatcgatgctgagctgcaaccaagcaccagcatatcctttccttcattccttcctggtgctggtagaagaagaacaagctagctagagtgataagaggtaattgtttcctccaactcattccaaccttgccttttgcctgccaaactccttattctctgccactgcataccatacgtgtgcgcgcctgaatgcctgcctgcctgcctgatactgatacatacacacagcacacacgttccgcttttttagctacctttgcgattgatctccggccagcgtttgatcccatacaggataacaatggcgggcattacgcttctacgttca

SEQ ID NO: 4126 - DNA, 258 bp, Oryza sativa
  unsure (1)..(258): unsure at all n locations
  Clone ID: uC-osflcyp092g05b1
tgnctggcaccaaagacagctgacagacagtcttccatagaacagattaagaagctctatgaactgttctgcaagtctgattgcacactgctcgagattaatcctcttgctgagacagctgacaacaagctggtcgctgctgatgcaaagttgaactttgatgacaatgctgcctttaggcagaaagagatatttgccatgcgtgacacaacacaggaagatcccagagaggtggctgctgcctaagctgatcttgtc

SEQ ID NO: 4127 - DNA, 219 bp, Oryza sativa
  Clone ID: uC-osflcyp092g12b1
ttgtaagaaatggatctggctgacaagatgatccccctggtcaactatatgcatgaccaccttctgagggaaacacaactgcttagcatcaatggggtgcccattcctgcagatttttgctgcccgctgtccctagagctgatgtcagatcctgttattgtagcatctggtcagacatatgagcgggtttatatcaagttatggcttgatgagggttct

SEQ ID NO: 4128 - DNA, 329 bp, Oryza sativa
  Clone ID: uC-osflcyp092h04b1
cttagtccaaggctgaccagcttgcaaagatacagaagcaagttggtcttcctactgagtatgcacagaaaataatcaagaatatcacaacaacaaagttgtcttctgcaattgaagcctctatttctcgaggacagattggtatacagcaggtccgaggattgaaagaagcaaattttcaattggacagcttgattgcagaaccacttcgagaaaacatttacaaaaaatccgttgaggagatcttttcgtcaggcacaggtgaatttgatgaagaggaagtgtatgtaaagatcccagctgactttattattaatgctgagaaggcc

SEQ ID NO: 4129 - DNA, 202 bp, Oryza sativa
  Clone ID: uC-osflcyp092h05b1
gctactagtattgtagtatgtaaaacatgacctgaaaaatcctcctttaaaaactggttatcttccatactatcttcttgcatctgttcatgtgatctaccaaaatgcatgtctattcaagtgtttcgcacgtcctttagcatatcttttttaaaaactattttatgtctttagtgcagcttttcttctaataaatttgttt

SEQ ID NO: 4130 - DNA, 187 bp, Oryza sativa
  Clone ID: uC-osflcyp092h06b1
gataatctctccttgtagaaacaagcctagagagtactatggagcagaggaaatttttgttgtgcctaattcttggcttacttgcgacttcaggacctgccaagaccgtcaatgctgactcgccctttgatttttattatctcatcctcatgtggcccggagcatactgtactgacagcgagtatgg

SEQ ID NO: 4131 - DNA, 295 bp, Oryza sativa
  Clone ID: uC-osflcyp092h08b1
tggagagcaccaaggacacgcgactagcagaagccgagctaccgccttctcgatccatatcttccggtcgagttcttggtcgatctcttccctcctccacctcctcctcacaggttcttggtgtagcttgccactttcaccagcaaagtttcatgtctgatctcgacattcagatcccaactgccttcgatccctttgctgaggccaatgctggagactctggtgcggctgcaggatcaaaggactacgttcattgacgcattcagccgcgtaatggccgtaagagccctgacca

SEQ ID NO: 4132 - DNA, 158 bp, Oryza sativa
  Clone ID: uC-osflcyp092h10b1
tcggtcccgtctcctcgcccgccgccctcgactcccgtctcctcgcctgccgctgtcgccgatctccatcctgctagcagaggtggcgccggcgttcttctcctgctaccgccgaatttgctcaccggtgagcatactaaaccatactatacggcctc

SEQ ID NO: 4133 - DNA, 99 bp, Oryza sativa
  Clone ID: uC-osflcyp092h11b1
ccggcggtatctggtggagccggcggcgatgtggtgttcgttcaaccttgtgctggtctccctcttcagggcgctctactagaaggaagcatggcgcaa

SEQ ID NO: 4134 - DNA, 227 bp, Oryza sativa
  Clone ID: uC-osflcyp093a09b1
ttggtaggtgttcgtgcgggccgaccttaacgtgccgctcgacgacgcccagaagatcaccgacgacacccgcatccgcgcgtccgtgcccactgtcaagttcctcctcgagaagggcgccaaggtcatcctcgccagccatctgggccgtccgaagggtgtcacccccaagtacagcttgaagcctcttgttccacgcttgtcttgagctacttggagttcgatgt

SEQ ID NO: 4135 - DNA, 210 bp, Oryza sativa
  Clone ID: uC-osflcyp093a11b1
ttgttagcttgctggacgctcagctcgagctctactggaacaccttcgccgtcatcaagtccatggctctcaagtcggcgctagacctccgcatcgccgacgcagtccacctccacggcggtgccgccaccttggccgagatagccagcgaggtggccctccacccgtccaagaacccctgcctctcgccgcctttatgcgcgcgctcac

SEQ ID NO: 4136 - DNA, 352 bp, Oryza sativa
  Clone ID: uC-osflcyp093b01b1
atgagaaaggcgtcttcgtactcgcctctctccgcgcctccgcgcttttcctcctcctctcccctctctcccttctccgccgccgtcgcagcatcaacccaatccgccgccatgagggagtgcatctcgatccacatcggccaggccggtatccaggtcgggaacgcgtgctgggagctctactgcctcgagcatggcatccaggctgatggtcagatgcccagtgacaggactgttggtggaggcgatgatgcttttaaccccttcttcagcgagactggcgcctgggaagcattgttccccgtgctgaatatgatgacctagagcctctcgcgactgatgtggtgaggtc

SEQ ID NO: 4137 - DNA, 82 bp, Oryza sativa
  Clone ID: uC-osflcyp093b02b1
ttctttttcatactatcgattatgcagttcagtcctcgaataagcaaggacttcgagctctgcccttaggctcgattccgac

SEQ ID NO: 4138 - DNA, 194 bp, Oryza sativa
  Clone ID: uC-osflcyp093b03b1
attaaccaacccaaccgccgccgcatcgccctcgttagaacgatggccgcgtcggcgctgcaccagaccaccagcttcctcggcaccgcccctcgccgggatgagctcgtccgccgcgttggcgactccggtggccgtattaccatgcgccgcacccgttagagcgcgccccagagcatttggtatggatctga

SEQ ID NO: 4139 - DNA, 315 bp, Oryza sativa
  Clone ID: uC-osflcyp093b06b1
gtgactactggcgaccaagccgccgccgtctctcccctcgccatccgcgtcgccgtctcccccgccatccgcgccgccgtcgccatccgccggcgccgtccagacgcgccgacgtctatccccgtcatctcccctcgccattcgcgccgtcgtctttccccgtcattcgcgccgtcgtttcccctcaccatccgtcaccgacggtcagacgcgccgtctgcttttcccgtcatccgtgcagtcgatttctccagagtgtttcggcgcttttctcgtttagcacgcatccgaaggagccgaaggcttcattcgctt

SEQ ID NO: 4140 - DNA, 145 bp, Oryza sativa
  Clone ID: uC-osflcyp093b10b1
tctgttattttgatcacaaccagcaaggctataaacaattgacatgcctagtgcaggaagaagatcattgaatgtcagtggttgctccttgggaattgactcgcactctgatattccctcccaatatttgtatgttgatcttgtg

SEQ ID NO: 4141 - DNA, 363 bp, Oryza sativa
  Clone ID: uC-osflcyp093c03b1
tgtgttggcgtggggagggcagagagaggtgagcggaggaacgtgcgggtgctcaaggcgaactacatccgggagttctccgttgtaggcaaggcctactacccgctcgacccggccggctgcttgcttgacctcgctgtcattcacgcccgggaggaggccgctttcagacttgctgtgattgtagtctcttgaattggtgttgtttttttctttatttattttcatcttcttctgtttcattttttattttccctatcttttttttcgtctctcgtttttatattctttatttttatttatttctctttcttttctatctatcttttttttctttcttttttctctttttttattatttta

SEQ ID NO: 4142 - DNA, 299 bp, Oryza sativa
  Clone ID: uC-osflcyp093c04b1
tttgtatagtgcgagctaagcgcaattgggcgaacgccgtgagccgccaccaagccaaaccagagcactccgccgccgcgccatggcttccccgtccccgtcctactcacctcttcacccgcagcatcaacaccagcacccgctttccccgcacccgcagccccagtaccaatccccaccgcctccgatgccgccgccgccccccgcggcgccactcaaagctatcgatctggaggtgaccgtcgtttcgggcaagcacctgaagaacgtcaactggcgccctggcgacctccgcgcct

SEQ ID NO: 4143 - DNA, 287 bp, Oryza sativa
  Clone ID: uC-osflcyp093c07b1
tcgtaaaacgagcggataaagaaatctaagaaaagaaaagtcttcttcctcttcctcccctccttccgtccccatcgcccaattcacatggctctgcgtctccacggccaattcgatccaacccgcgaagagagcccccgcttctccccatccaattccgccacctgctcgttctcccagttcctcctcgccgccccagttgacgacggccacctctgttcgatccaccgctgactggtcccccccgctcctggtttcgggggcggtcctttctttctatgcgatct

SEQ ID NO: 4144 - DNA, 286 bp, Oryza sativa
  Clone ID: uC-osflcyp093c08b1
tcgtttcattttccccaaataataatagaggaaggggaaaaacacatttgcagccacattatccatggcctctctccgcaccatttcggtgatcttcggcatcctcttctatgtccttgccagcactgccactgtcaccgacgcaccggactacgtcgtccaaggccgtgtctactgtgacacgtgccgcgccgggttcgagaccaatgtcaccgagtatatcaagggtgccaaggtcaggctggagtgcaagcactttggtaccgactaggtcgagcgtgctatc

SEQ ID NO: 4145 - DNA, 60 bp, Oryza sativa
  Clone ID: uC-osflcyp093c09b1
tcgttgttggataatgagaacaggcacgggttggtgctaacttaaactagccaagtctgg

SEQ ID NO: 4146 - DNA, 102 bp, Oryza sativa
  Clone ID: uC-osflcyp093c11b1
tctgtagatatttgtgaagaccctcaccggcaagaccatcaccctcgaggttgtgtcctctgacacaatttatattgtcaaggtcaagattcaggacacggt

SEQ ID NO: 4147 - DNA, 157 bp, Oryza sativa
  Clone ID: uC-osflcyp093d03b1
attaatcatcactcgcgttttaaccatggccccctccaagctctccatagcgtcgttcttcctcgccacggctcttctcctgctggctttcgccagtggccagaccacctatgtcccacccctaccaccgtcttcgaatacgcatagcccctgagga

SEQ ID NO: 4148 - DNA, 336 bp, Oryza sativa
  Clone ID: uC-osflcyp093d04b1
attctgtcttctctgcagatactgagagccaagatgagtagcaaggttcttctgatcagtggtgtcctggtggggctcctttctctgagctcatgcaggagcctgggagagttgtctgaacagaagacctactcttctactactcagtatggtggcttcccaacttcatcatatggatcatatggtggttactaactatcatttaccctttcaccagcttatggtttttcactcacaccatcttattgctctactccaacacctacttacggcacttacacctacaccatcttactgttcgacatcctatctctcccatgtctccttattttcctt

SEQ ID NO: 4149 - DNA, 563 bp, Oryza sativa
  Clone ID: uC-osflcyp093d06b1
ctcttctctagtctagaccaaaggaaggaaaccaacctagaggctaggcgaggctagtagaggagagtatgtggatgattttctttttttttatttttttttcttttttttattattttttttttttttttttttttttttctttttcttctcttcttttttttttttttttatttctcttttttttttttctttcttttcactattttttctcattttctttttttttattattcttttttattctttttttttttcctttttttttttcttcttcttttttcttcttatttttttttcattttttctttatttttttttttttttttattctttttcttttttttttcttttttttttatcttttctcttttatttctcttctttttttttatttttttttccctttttcttttttttttttctctctttttttttttcttttttttcttttttctttttctctctttttttttcttttttttttctcttttccttatctttttctttttttttctttcttttctttttttttctttttttcttttaattttctcattttt

SEQ ID NO: 4150 - DNA, 326 bp, Oryza sativa
  Clone ID: uC-osflcyp093d10b1
ttttcatttacttgttggaactcctggtcggattttagaccttacaaagaaaggtgtctgcttcctgaagaactgttcaatgcttgttatggatgaggtagacaagcttttttttctagagtttcatctttctttattatgtatttgttttgtatttttcatatattttctcactattgtttttttttattactttacttttcttttttctaatattttaatatatttttcttttaactatatttttattttttttttttacttttttttattttttttatatctttttacctttttattttattttactttttctcatttaatat

SEQ ID NO: 4151 - DNA, 189 bp, Oryza sativa
  Clone ID: uC-osflcyp093d11b1
tcggtaagatcgcgagcggaaaaaggcaagtagttaatacaagtgcaggggcgacgactgcgccgacgcgatgaatggcgttcattggggccaaccaattctgttttggaagcccgattaattgttcattctttgtgtcaatttgggccgggttgatcaattgtccatggtcttatatgttgttcttac

SEQ ID NO: 4152 - DNA, 92 bp, Oryza sativa
  Clone ID: uC-osflcyp093e01b1
tttctccctcgttgtcctcaccggcgagcgcggcctctgctgctgcttcaacaacaacgtccttaagaaggtcgagacccgttttgtggagc

SEQ ID NO: 4153 - DNA, 266 bp, Oryza sativa
  Clone ID: uC-osflcyp093e05b1
atggttttcaactttgatgaggatgactgggatgagattgtcgctagagatgcgaccatggatgtcgttcataaccgggggtgtgattttgtggaggatgaattttagtcttaggacttatctatatcttttcattacttatgcttatattttttttatcttttcttattttttgtcatcttttctttctctttatttctttcttcttctcttttttttttattttctttttttttactttttttattttactctttatttttatt

SEQ ID NO: 4154 - DNA, 428 bp, Oryza sativa
  Clone ID: uC-osflcyp093e07b1
tcggtcataccaacatgataagaagattagagctgcacaaggagttcaaatattagcacagggtcttgaacatgcaattgcagggactgctctttatgtgcttaagcctgaagatgatcctgacagacttaaagatgctgtgttggtagatatcactatttttttgaatccctattcttctttctgttctatacatttttttctccttttcattcatattcttttatatctactttttaattttttattttatatttctttttttaattttattcttttattatattttaacattttatttttacttttttttttttttttttttcatttttttttttttaatttatcattatatttttttctcttattttattctatcatatttatctatttctctcttttttacttcttttttatacttttttatt

SEQ ID NO: 4155 - DNA, 157 bp, Oryza sativa
  Clone ID: uC-osflcyp093e08b1
tcgttcataccaacatcataagaagattagagctgcacaaggagttaaaatatcagcacagggtcttgaacatgcaattgcagggactgctctttatgtgttaaagcctgatgatgatctggacagactaaaagatgctgtgatggaagagattact

SEQ ID NO: 4156 - DNA, 63 bp, Oryza sativa
  Clone ID: uC-osflcyp093e09b1
tcgatagaaatcttgggaacgaaagcatggcagttgagggttttgaggaagaatgtcaactcc

SEQ ID NO: 4157 - DNA, 238 bp, Oryza sativa
  Clone ID: uC-osflcyp093e11b1
ttgtttttcctcaggaagccccaccgctaatatccagtgctcttcagaaacttatcttcatatgtttgaatcaagacgatgaacataatccttctaggacaactgtccgtgcatctgcgggagcgattcttgctagacttctggtgatgaacacaaactttacaggaaagctattatcagagcctgcccttctgacatgcattcaacttacagggattttttgtaacaataattttgc

SEQ ID NO: 4158 - DNA, 128 bp, Oryza sativa
  Clone ID: uC-osflcyp093f01b1
gtagctgcagcagcagctgagcttgaagcagcagagcgaggtagacatggccgccgccaccatggccctctcgtccccggcgctggccggcaaggccgacgcgaaggtgttctgcttggggctcatta

SEQ ID NO: 4159 - DNA, 225 bp, Oryza sativa
  Clone ID: uC-osflcyp093f02b1
atgcgtttcttactgcgcctgcaacccaaccacctgctccaccagcacctgttagcgagcctgtgactgcaccagctccaactgcaacaactgcttcagttccagcagatgctgtcaccgctgcatccaccgaagcagataattatggtcaagctgcgtcgaaccttgttgctggaagcaatttagaagggactgttcagtcaattcctgaaatgggtggaggag

SEQ ID NO: 4160 - DNA, 66 bp, Oryza sativa
  Clone ID: uC-osflcyp093f03b1
atttttacgaattaattaatttaaattgtaaaggtggtgaaattttttgatttgctgatttctttc

SEQ ID NO: 4161 - DNA, 69 bp, Oryza sativa
  Clone ID: uC-osflcyp093f04b1
ttagtctccatacggcgtgtttactttcggatgaattgtgtcgttcttgcgtagcagattgaagtaact

SEQ ID NO: 4162 - DNA, 376 bp, Oryza sativa
  Clone ID: uC-osflcyp093f05b1
ctggtatggctatgtttaccagaaggcctatcttgagttcttctgttcaaaagagaagctggatcagctaattgagaagagcaaggcattcccttctcttacatacattgccgtgaacaaggacggagagtcattctcaaacattcccacaaacgctgtgaatgcggtcacatggggtgttttccctggcaaggaaatagtccagccaactgtcgttgactcagccagctttatggtttggaaagacgaagctttcgaaatttggtcaaagggttgggcttgcctgttccctgagggcgacttatctagggagatactagacaaggtccagaagagctactttttggttagtcttgtggacaactacttcatcaac

SEQ ID NO: 4163 - DNA, 83 bp, Oryza sativa
  Clone ID: uC-osflcyp093f08b1
tcggttttcgatcgcaccgcgcattgcattgacatctcctaggaaagctatggtatatattgttgttaaactagcacctgcat

SEQ ID NO: 4164 - DNA, 95 bp, Oryza sativa
  Clone ID: uC-osflcyp093f09b1
tcgtttgaccagtctagagctaccatggtgcttcataatttaggaccacagtttctgtagaattcatccaatagacatggttgaaaaggatgttt

SEQ ID NO: 4165 - DNA, 487 bp, Oryza sativa
  Clone ID: uC-osflcyp093f11b1
tcggttcactgaccagcttcttcaagttgaactcaacaccatttcaacatcatccaacggtcttgcttgcggtgtatgtgaacttcacagaaacctgattaggcagcatgagagggagctcggtttggatccagagagtgttgttgggaacacagcaattgctcagcatgctgaagcattagctggagcatgggctgagttcaacaatcaaagttcagtagttctggtggttgttcaaccagaagaaaggtacatgtatgaccaatattggataactgtcgccttgagagaaatgtatggggtgacgacaattcgtcaaacaatggcttgtatagatgcataaggagagcttccgtcctgacggtacactaacaattgatggattgccagttgctgttgggtacttcagagcaggttattcacccaaatgattacccttcagaagtcgaaatgggaagcaagactcttgtatgagtggttctttgtt

SEQ ID NO: 4166 - DNA, 186 bp, Oryza sativa
  Clone ID: uC-osflcyp093g01b1
cttctcttcgccatctctctcagctctcacagcttactgcatcaatggccgcggccaccatggcgctctcctccccggtgatggcccgcgcggtgccgtcgaccttcttcgtgcttttcggcgaggcgcggatcaccatgggcaagaacgcccctaagcccaaggccggcggcgtctttggggagc

SEQ ID NO: 4167 - DNA, 154 bp, Oryza sativa
  Clone ID: uC-osflcyp093g03b1
attagatctgcagcgagagagagccagcgaagcgcgactccgttttaaccgccttcgccgtcgtcgccgtgatatcgattccctccctctcgccgtagacgtcgttggtattcatggtgccagtgctttataccgtcattggcaagatgaccag

SEQ ID NO: 4168 - DNA, 61 bp, Oryza sativa
  Clone ID: uC-osflcyp093g06b1
atactttagggctatcatatgcagggggggaaatgctatagctgtttcacaagaccacaag

SEQ ID NO: 4169 - DNA, 96 bp, Oryza sativa
  Clone ID: uC-osflcyp093g12b1
tcgtttacatcttccacacggcgcgtaggtgataaggtgcagcacaacccaaagccatatatctacgaaagtggcgaactcaccgacgctgacaat

SEQ ID NO: 4170 - DNA, 151 bp, Oryza sativa
  Clone ID: uC-osflcyp093h02b1
gttgtgtaagcgagtaacacacacgatctagagaagggggttcatgaggcgaccgtacggtcacccattagcgagtccgtcgatgcacgagtagggactgctggcccggttgtatacatgcatgtggttgacacgaacatcatcctagttg

SEQ ID NO: 4171 - DNA, 318 bp, Oryza sativa
  Clone ID: uC-osflcyp093h04b1
ttatatagcagcgtcgcctctcctcctcctccctaacccctacgcttccagaaccttctcgaagctcccgctcccccccccttccgctccaatggcgaaggaaccgatgcgcgtgctcgtcaccggcgccgcaggacaaattggatatgctcttgtccccatgattgctaggggtgtgatgttgggtgctgaccagcctgtcattctacacatgcttgacattccaccagctactgaatctcttaatggccttaagatggagctggttgatgctgcatttcctcttttgaagggaattgtcgcaacatctgatgttgt

SEQ ID NO: 4172 - DNA, 57 bp, Oryza sativa
  Clone ID: uC-osflcyp093h05b1
tttactcgtgggatctgtattttttttattaagagaaagctcttttcgacttctttt

SEQ ID NO: 4173 - DNA, 126 bp, Oryza sativa
  Clone ID: uC-osflcyp093h06b1
ttttattctcctctctctcctgcttctctctctcctgctcttcttcacctccttgtctgtccatagatcgagccgctcagaccaaatcttggatgcgttctttattctttctcgctgcgagggagg

SEQ ID NO: 4174 - DNA, 93 bp, Oryza sativa
  Clone ID: uC-osflcyp093h07b1
tcgatctatagtcttctaccttcagaggttgaggagcgagagatagataacctccttgtctgtacttagatcgagccgcttagacataatctt

SEQ ID NO: 4175 - DNA, 192 bp, Oryza sativa
  Clone ID: uC-osflcyp093h09b1
tcgatcttacttataagagaaacacttgagtagcaaggtgaaatcctacaggaccgggtgctttaatactattgtgcaggatgtaaatgtactggctacaccggtaagatttggaaaaagtgcgaacttagttaaattcaaatatgtaagaactttaatacgaaaaatcattacgtataactcaacttaaaa

SEQ ID NO: 4176 - DNA, 391 bp, Oryza sativa
  Clone ID: uC-osflcyp095a05b1
cagtttactagggcaatgattcctcaagtaatgttagaacaccaaatgctaagtctgcggagaaattgatccctggactggaaaattcagatgaggctaggcgaaaggcggtacaacgggaactgagaaagatgaagactggcaggtgaaactccctagtgttcgagttatttgaccagatgtgcagagaagcaagtttttgtatgctgcctagattgcttttaatcagatgtgcagagaagcaaagattttttttccttcttgttagtggtcgcaaaaaagcctgattgttgtagctgctatgtttgttccctttggctgtccatccagaatttctgataagatgacacttggaagcacatcctgcaggactccagtacaggaatggttc

SEQ ID NO: 4177 - DNA, 398 bp, Oryza sativa
  Clone ID: uC-osflcyp095a07b1
tgtcctggctaccaagcttggcgctcgtcttacggaggttcgcaagaatgggacctgcgcatggctcaggcctgacgggaagacccaagtgactgttgagtaccgcaatgagagcggtgccagggtccctgtccgtgtccacaccgtcctcatctctacccagcatgatgagacagtcaccaacgatgagattgctgctgacctgaaggagcatgtcatcaagcctgtcattcccgagcagtaccttgatgagaagacaatcttccatcttaacccatctggtcgcttcgtcattggcggacctcatggtgatgctggtctcactggccggaagatcatcattgacacttatggtggcttgggagctcacggtggtggagcctactttggcaaggact

SEQ ID NO: 4178 - DNA, 342 bp, Oryza sativa
  Clone ID: uC-osflcyp095a08b1
ttagtgagagagaggggatggaaatggcggatgagctgttgcactagctggtgttcggtttcctcttcaacctgggcggatacatggtggctcctgcgatgaccgacgtgaccatggacgccctttggcccggccaggacgagtgctgcatcggcatctacctaaccggcctatagcaagccgtacaatagcaagctataagccagttataaccatatatcgtgaagaaaaaagacgagagagaagaaaatgggctgcagatttatagccggctgcaacacgacttcaagactttacgtgtgtatgagagattacagggttgtgtgcttatgtggcaacttc

SEQ ID NO: 4179 - DNA, 422 bp, Oryza sativa
  Clone ID: uC-osflcyp095a10b1
ttcttgttccttattggatgcctcggtgcccttgcgcccattccactgtctccaatctcttcccttggagccatcaatccacattactgacatgttgatgcatctgtcccagccatggaagcaattcagaaggtccctccagatccaagtgccgtagctgtaggctagactacaccagatggaactcgcaagatattaggagatatctctgcctacaagctgtggaaatgtgactatgttgcggctgcatgggcactgataaacctatcggcggggcagtttgtcattggtgccgacgataacgaatcaacaccgatctcagccatcccagtgcctcccatcagcttatcactagtggaagagatcggacctgggcgctcacccagggcaaagaagttcagcagcaggagcatcggattcct

SEQ ID NO: 4180 - DNA, 291 bp, Oryza sativa
  Clone ID: uC-osflcyp095a12b1
tttcttccggtctccttcctcctctcttcccggccgcctcgcctcgcctccgccttcccgatcgcaattcgcctcctcctcctctcacccatggcgcggcgatccgcccccctcctccggcgcatcctgtcctccccggcccccgccccggcgcaccatggcggcgccggcgcgcgccgcacggtgacctacatgcccaggccaggggacgggaacccgcgcgccgtgacgctgatcccgggggacgggatcgggccgatcgtgacgggggccgtgcagcatgtgatggag

SEQ ID NO: 4181 - DNA, 205 bp, Oryza sativa
  Clone ID: uC-osflcyp095b01b1
cgctgtgtgaattctctccaaacacaacattagggcagcgccagtgctaaatccggaatgtggagctccggctgattggaaagggaggtaccttggcatcattgattactcggctatcatcctctgggttctagaaaatgctgagattgccgccgttgctttatcagctgggtcagctaccgcagcaggagttggaatgggtgct

SEQ ID NO: 4182 - DNA, 394 bp, Oryza sativa
  unsure (1)..(394): unsure at all n locations
  Clone ID: uC-osflcyp095b02b1
gcaatgttgaggccactggggaggactactatgttgaaccagctgatgaaaggaggcctttccgtgctctcttggatgttggcctcattaggacaaccactggaaaccgtgtctttggtgccctcaangggagcttggatggtggtcttgacattcctcacagtgacaagaggtttgctgggttcaagaaggacgagaagcagcttgattctgatattcaccgcaagtacatctacggtgggcacgtggctgactacatgaggtctatggctgaggaggaacctgagaaattccaagcccactttagtgagtacctcaagaagggaattgacgctgatggcatggaatcactgtacaagaaggtccatgctgtcatccgtgctgatcctaccat

SEQ ID NO: 4183 - DNA, 389 bp, Oryza sativa
  Clone ID: uC-osflcyp095b03b1
gatgtgtgttgtagagaagagagagcagagctaagctagctcatagtgagtagcgtgttgagcttgctgaagggagcggcaatgtcgaaggaggtgagcgaggagccggagcacgtgcggcccaaggactacaccgacccgccgccggcgccgctgttcgacgtcggcgagctccggctgtggtccttctaccgggcgctcattgcggagttcatcgccacgctcctgttcctatacatcaccgtcgccaccgtcattgggtacaaggtgcagtcgtccgccgaccagtgcggcggcgtcggcaccctcggcatcgcctgggccttcggtggcatgatctttatcctcgtgtactgcaccgccggcatatccggagggcacattaaccc

SEQ ID NO: 4184 - DNA, 131 bp, Oryza sativa
  Clone ID: uC-osflcyp095b05b1
gttttatttaatcttgctaagacacagattatggggggttgcataattctcacatggggcataaaaacatccgtggaccggaaaaaacactcgatactaggggattagctggactcatataccagacttca

SEQ ID NO: 4185 - DNA, 91 bp, Oryza sativa
  Clone ID: uC-osflcyp095b07b1
gtcgtttgtacaggggggaggacacggatgatggggtgttgcaaaaaaggaggcgttttcatacccagaggggtgggcggggaatgacatc

SEQ ID NO: 4186 - DNA, 226 bp, Oryza sativa
  Clone ID: uC-osflcyp095b10b1
tctttgtgcagcaccctggatccgaagctaccgagatacacagggtcgatttcctgatactctgcactgggagattcagtggagttgcccacaccccaacatttgcacccaaccgaggccccgaagtgatccacggccaagtgcttcactccatggactactccaacatgggccacgccgccgtcgacgagctgatcagaggcaagcgcgttgcccgtgtcttttt

SEQ ID NO: 4187 - DNA, 142 bp, Oryza sativa
  Clone ID: uC-osflcyp095b11b1
tggtggatcatgatccaatatgggttgagctcgggcattcccacatagcagatgcaagctaaagactgcatgacatgatgagcaattttgtgtccaagaatatagctgctcaactgcagcaagcatgatctgttggagagat

SEQ ID NO: 4188 - DNA, 283 bp, Oryza sativa
  Clone ID: uC-osflcyp095c03b1
gaagtgttttgtcgagaagagagagcagagctgaggtcgctcatagtgagtagcgtgctgagctagctgacgggagcggcgatgtctaaggaggtgagcgaggagcccgagcacgtgctgcccagggactacaccgacccgacgtcggctcctttattcgaactcagagagctccggatgtgggcctttaccgggcactcattgctgagttaatgatcacgctatcagttttatacataaccgtgaacaccgtgagtgggtacaaggtgcactcgaacgtcgt

SEQ ID NO: 4189 - DNA, 191 bp, Oryza sativa
  Clone ID: uC-osflcyp095c12b1
tgattagcagcagatgctcctcaagaaggtgatggcgaagaagcccaagacgaagaggctatccgggtttggccttaaaccctctgctgctttctccaggccccatgtgccgtcggcggcggcctccctgcagctaagccgtcgcgtccgcgttgtgttcgaggaccctgacgcgactgactccgactctg

SEQ ID NO: 4190 - DNA, 501 bp, Oryza sativa
  Clone ID: uC-osflcyp095d02b1
cagttcttctccgcaccgcagaccgcaaaccccaggtgctcaagcatcgaagaatggaaagaggagatggcgctatacccttccgcgccaccaacatcgccggcgccgccggcacgcccacctctgcttctactgcgggccgcccccagcaaggggatagggaaaatgctgtcagtgctgagattgagagggttaacaaactgccagccaatagttcctatgccatacaccgcttgaaggttctaaacaagcttcgccatctattatctatcaagagaacaacatctcaagatgaggagcttgaacttctttttgcaagcctttcaatgtaaacactatcggactatcctgtatcctccatatgtgacatatggtagctgggcgctccgttttggcatttctgctgtccgacgaacatgtttccagtacgggtttctgaagttattggaaaacacccttctattttgcagaactttatgagtggatggtgttgaaactatg

SEQ ID NO: 4191 - DNA, 75 bp, Oryza sativa
  Clone ID: uC-osflcyp095d04b1
aggtgcctaggacacggctgatgaggacttgcataatgggcgccttcgtcagatccagagccgacggcggggcaa

SEQ ID NO: 4192 - DNA, 52 bp, Oryza sativa
  Clone ID: uC-osflcyp095d05b1
gtttttctctagggggcaaggacacggcttacgaggagctgcataattgacg

SEQ ID NO: 4193 - DNA, 359 bp, Oryza sativa
  Clone ID: uC-osflcyp095d12b1
tggatgggaatttttctgagggtgaaatgatggcatttggacctatagcactgaacccatcttctggagtccttaattacggacagggattatttgaaggtctaaaagcatatagaacaacagatgactctatcttattatttcgcccggaggaaaatgcactgagaatgagaataggtgcagaaagaatgtgcatgcctgcgcctagtgttgagcagtttgtggatgcagtaaagcaaactgttttagcaaacaagagatgggtgcctcctaccggtaaaggttctttgtatattagaccgctactcatgggtaggggtgctgttcttggcctgcacctgctcctgagtattcgttca

SEQ ID NO: 4194 - DNA, 102 bp, Oryza sativa
  Clone ID: uC-osflcyp095e02b1
ggctctttttatggggggaggagacggctgacgaagggctgcaaaattgtcggcttccgcagataacgaaccgtcggctgggcaaaagatgccctgagggat

SEQ ID NO: 4195 - DNA, 64 bp, Oryza sativa
  Clone ID: uC-osflcyp095e04b1
gtcttgtttttaccggtgatgagacggctgaccagggggggcataattcacgcattcctcagaa

SEQ ID NO: 4196 - DNA, 65 bp, Oryza sativa
  Clone ID: uC-osflcyp095e11b1
tgtctcttggatatctgctatcagcatgccgggggaggtttgctgaggagttgcgtttgttatac

SEQ ID NO: 4197 - DNA, 641 bp, Oryza sativa
  Clone ID: uC-osflcyp095e12b1
tctacttatgagagctcatctgctgcctctagcttacttggtgataaggaggaggaggcggacgtcctctctccctctctccgcactttttctcttttcctctttcctctttctcttccccccccctctcttcctccctcttcctatttctcccctccttctcttcccctttttctctcctcctctctctccctcccttcccgatccttttctcctccctcctttctctctacctctccctctcttttcccttccccctttctcctcctcctttcccctctttcctcctctttcccttccaccactctccctctatccccatctctcctctcacatattcccccctcccccttttccccttcttatacctctccctcatctctctccctatttttctatcccctttctcccctcctcttcccttctcctctttgtttcctcttattatcttctttcttttccccttccttacctcctcctcctctctcccccctatccctcttatcatcttttcttcctctccctcttccttccctctctctcttttctctctcactcactttatctctctcctccccttcttcttcctcctctttcctttttctctcctccttccttcctctttctccttttcctctctt

SEQ ID NO: 4198 - DNA, 257 bp, Oryza sativa
  Clone ID: uC-osflcyp095f01b1
cttcaatctgttggagatcatgatcaaaataatagagcactacatagtttttgctggatcagatctcttgcaaagccatgccacaagtttagaaagcatcgttgatactattgtgggcaatgctgatgataagggccttctcacaacacttcctatcattgatcttcttgttctgatgtttcctcaggaagttccacctctgatatcaagtgctcttcagaaacttgttttcatatcattgagtggtggtgatgagc

SEQ ID NO: 4199 - DNA, 68 bp, Oryza sativa
  Clone ID: uC-osflcyp095f02b1
gtcttttctatctcgccaaggagccagctaatgaagggggggctaattcaaaccttgctgaggttcat

SEQ ID NO: 4200 - DNA, 57 bp, Oryza sativa
  Clone ID: uC-osflcyp095f04b1
ggtgtgctttcgtttgccaggagggggaagacgggggggggctatatagaacggggc

SEQ ID NO: 4201 - DNA, 86 bp, Oryza sativa
  Clone ID: uC-osflcyp095f05b1
ggcttgctcttatcggtaaggagacggactatgagggggggtaaatttgaaggattgggccgataaagaaccgtttgttggaaaag

SEQ ID NO: 4202 - DNA, 113 bp, Oryza sativa
  Clone ID: uC-osflcyp095f07b1
tttgtgctcaacacgccgagcaaaagaataacgaggggcttaattaaagttggatggggcataaaacaaagagacggcaggaacagagacagcatgagggatgctaatgtggg

SEQ ID NO: 4203 - DNA, 60 bp, Oryza sativa
  Clone ID: uC-osflcyp095f09b1
tttgtgcctaccgcgggaaggacaccgctaggggggggttgctttattgttgccctcgcc

SEQ ID NO: 4204 - DNA, 98 bp, Oryza sativa
  Clone ID: uC-osflcyp095f10b1
ctccgcgggctgggagacggcttagggggggttgcataatggtcgccttccttatatccagaagcgtgtgcggggaaagacattctaggatggatgat

SEQ ID NO: 4205 - DNA, 203 bp, Oryza sativa
  Clone ID: uC-osflcyp095f11b1
tgctttcctcctgctgctctcctccttcctgcggggccttcctgatcagccgcagctcgttgccggccgttgttgcgcggccatggaggcgagcgccgggctggtggccgggtcgcacaaccggaacgagctggtgctgagccgggggcacgaggagcccaagccgttgggggcgctgagcgggcaggtgtgcgagatatgcg

SEQ ID NO: 4206 - DNA, 443 bp, Oryza sativa
  Clone ID: uC-osflcyp095g01b1
ctctactactatctagccagtaagctagctaactaactacgtggctatggcccccaccgtgatggcctcctcggccacctccgtggctccattccaagggctcaagtccaccgccggcctgcccgtgagccgtcgctccaccaactcgggcttcggcaacgtcagcaatggcggaaggatcaagtgcatgcaggtgtggccaattgagggcatcaagaagttcgagaccctatcgtacctgccaccactcaccgtggaggatcttttgaagcagatcgagtacctgcttcgatccaagtgggtgcctttgctcgagttcagcaaggttgggtttcgctaccgtgagaaccacaggtctccccgatactactattgcaggtattggaccatgcggaagctgcccatgttcggctgcaccgattgccaccaggtgctcaaggagc

SEQ ID NO: 4207 - DNA, 95 bp, Oryza sativa
  Clone ID: uC-osflcyp095g03b1
gtcttttttttgtaggcaaggactcagactatctagggggggatcattttcgccgcggcgaggaaccaaacgggcacattgacgtgagaactcct

SEQ ID NO: 4208 - DNA, 116 bp, Oryza sativa
  Clone ID: uC-osflcyp095g07b1
tttgtatctaatcatgtaaggacacaacttacgaggtgtttaatatccctagcgttatgtttatctcgatcactctagatgggaaaatcccaagcttttaagtgcacatgtggagc

SEQ ID NO: 4209 - DNA, 109 bp, Oryza sativa
  Clone ID: uC-osflcyp095g09b1
ttcgtgtcccacggggctaggagacggattagggggggctgcataaatgacggcttgggtatataacaaaccgtctgccggtaaatacaatctatgatggaggccttgg

SEQ ID NO: 4210 - DNA, 221 bp, Oryza sativa
  Clone ID: uC-osflcyp095h01b1
gctgttacgtcgtgccttctcctcctccttcctctgctgcccattccgccggccgccactgcaccccggccgctccttcgttcccccccgcgccgccatggcatcctccgacgcgccgtgccacatggtgccagagccagcgcgacgacacgacttttgatgcctatgttgttggaaaagagaatgctcctggaattgttggtttgcaagagtggtggggg

SEQ ID NO: 4211 - DNA, 394 bp, Oryza sativa
  Clone ID: uC-osflcyp095h03b1
cggtcttcgttgggcctggcctccactccccgcgccgccgccgccgccgccgactcgccggtcgtcaccctcgccccgcagccatggctgagcagactgagaaggctttcctgaagcagccaaaggttttcctcagctcaaagaagtctggcaagggtaagaagccaggcaagggtggcaaccgcttctggaagagcattggccttggcttcaagaacccccaggaagcaattgaagggacatacattgacaagaagggcccattcactggaactgtttctatcagaggcagaatcattgctggaacatgccacagtgccaagatgaacagaactatcatttgtcgcaggaactacctccattttgtcaagaaatatcagaggtatgagaagag

SEQ ID NO: 4212 - DNA, 253 bp, Oryza sativa
  Clone ID: uC-osflcyp095h04b1
atgggataatttaccgcacaagttgaacccattgcatccagtgtgccttacatggttggaagcggcaaccatgaaagagattggcctggatcaggttccttctatgggattttggattcttgttgtttcttcattgttttatttctttatttttttttttcattttttttttccttgtcacttttttatttttttcccttgctattttttttttctttcttttctttatattcctttttctctttgctctttt

SEQ ID NO: 4213 - DNA, 66 bp, Oryza sativa
  Clone ID: uC-osflcyp095h06b1
gcgctcgtcttttcccccatctccgcgcggccacggccatgtgggccctcaacctgaaggcgggcg

SEQ ID NO: 4214 - DNA, 52 bp, Oryza sativa
  Clone ID: uC-osflcyp095h08b1
tttcttttcgcaaggaagacagtcacgggtgaggggggcttgtatttatctc

SEQ ID NO: 4215 - DNA, 116 bp, Oryza sativa
  Clone ID: uC-osflcyp095h09b1
tattattactacccagctaacgatcaaggagatcaagagtggcctacacgccgcgttctccatgtccagatcctgagtccaggccatgctcaccggcatgggcccccttggagaac

SEQ ID NO: 4216 - DNA, 81 bp, Oryza sativa
  Clone ID: uC-osflcyp096a01b1
gcattataccatcttcttcttcttctagctagatctggtgctccattggtggtgtcggcgcatcccgacctaccaaatata

SEQ ID NO: 4217 - DNA, 167 bp, Oryza sativa
  Clone ID: uC-osflcyp096a04b1
gctatttgcctcttttggatctatccattcgggtcaccgtggcagttcggtaattttggcggagaggaggaggaggactacgacgacgactacgtgatgggtcttcttgacaagctgtgggacgacaccgtcgcggtgccccttcccgacaccggacttggtcgtct

SEQ ID NO: 4218 - DNA, 455 bp, Oryza sativa
  Clone ID: uC-osflcyp096a05b1
cttgtttgggctactaagttctaacccagccaagtggtacatttcctcagctaatggggaggcacaccaatcgaacaatgcggcagcctcttccaccgaggaggtggtaacatgggtggtttaacggctctgatatgaggtgaggaatcctacccacccaaactgttctgttcctactgctatgcattgtcttgccactttgttaaaagagcaattttgttagagccttatttggttcatgcggatggttgataaaactgatccattccttttattttcctccaggcttccacaccaacatttttattccattcttactttcctaaacctggccttcttgcatcttggctttttatcccttttatagaattgccaagctcgttgcttttttagatccctttctaatggttatctcctcaagaacttgctttaagtttttttaaaggtattttcct

SEQ ID NO: 4219 - DNA, 143 bp, Oryza sativa
  Clone ID: uC-osflcyp096a06b1
ctggtggtgataaacaggaagcagtacaaggtgacggtgcatgtgttcgtggagccccacaaggtgcccaatccaactctgggaaagccgttttctcccgaggaagaggatgcacggtcggcctcgtcgtccggacaagccgg

SEQ ID NO: 4220 - DNA, 212 bp, Oryza sativa
  Clone ID: uC-osflcyp096a08b1
atcttttcgacgaggaaattgaaggacaaacaggagaaattcaactgcgtgtagcggtgaatgacagaatatacataatttgaatggagtttgagaaagtgatattcgatcaggaattctttgactctataaagataatggaggagaaaagaaaatttaacgaacaatcacctaagaaactgattaaagaaactgaacctacattcaatttg

SEQ ID NO: 4221 - DNA, 416 bp, Oryza sativa
  Clone ID: uC-osflcyp096a10b1
tattgacccatataatatgtgcacgtcccaagatgcactatggcatatctcctaatggagaggctcaaaattcaaatagcaagctaacatctactgaagatgtgtttagagggttggttgattggctctgtcctgacgtgaggaatcctacccacccaaactgttctgttcctactgctatgcattgtcttgccactttgctaagagagcagtatgttagagctttatttgttcaggcggatggtgtaaaactgctcattcctttaatttctccagctttcacacatcagtctatccagtttttttacgaaacttgcctttgcatttggcttttattcctttatgatgcagccgttgattttttgtccactacaagggttattccaagaattgtagaggttgtgaaaggtttaaca

SEQ ID NO: 4222 - DNA, 230 bp, Oryza sativa
  Clone ID: uC-osflcyp096b01b1
gaaaggcgtcttcgcactcgcctctctccgggccttcgcgcttttcctcctcctctcccctctctcccttctccgtcgccgtcgcagtatcaacccaacccgccgccatgagggagcgcatctcgatccacatcggccaggccggtatccaggtcgggaacgcgtgctgggagctctactgcctcgagcttggtcttcaggctgatggtcagatgcccagtgaccggact

SEQ ID NO: 4223 - DNA, 55 bp, Oryza sativa
  Clone ID: uC-osflcyp096b06b1
gcctctccaccgcagacaccgcatcaagaagggggggtttattttgcacaattcc

SEQ ID NO: 4224 - DNA, 199 bp, Oryza sativa
  Clone ID: uC-osflcyp096b07b1
gttatctctacttgcaccacctgaaccagtatggaatcacgagacgtcgtatggttcggattgccacgtgcccacgaatgtgaacgccatttctaagatgatcgataagtccaaccaccagacagggtgatcaagctatgaagatgaaaaatagcagcatcaacatcaggatcaagcgtgatgacaggatgaccagaac

SEQ ID NO: 4225 - DNA, 335 bp, Oryza sativa
  Clone ID: uC-osflcyp096b10b1
tttttcctccgctggtgccccggctatcacgagggtgtgaccacgctgcatttggccatgtctcgcacgaaggtggggctatgcacgacgtacacacaggggcagctgaggcgacctacgcacatgctaagactgccatgcccggtcttggacggggcattcagtccaaccatgcaggggtcctaagggatgcttgatgggctctctaaggtgatgcagacggccatacacagatgctacagcccgtgaacgctgctgatgagtgcatcccctcctcgaggacatgctgaacaccatgtgagcaccccgcggtagaacccgttcttgcaccagct

SEQ ID NO: 4226 - DNA, 442 bp, Oryza sativa
  Clone ID: uC-osflcyp096b12b1
tgttccatcctcatcaacccccactattaatcctcttccccttccccccgctctccgtccatgttcaccccgcccccatgccccgcaatcccatccagcattgagatctacaagcataacaaagaagaaaggattgcacggacatggggaacaactgcacctgggctgccttatgttgatgaggcgattacaaatgctggtgattggttaattggtggtgacttggaggttatagaaccaatcaagtacaatgatggtcttgatcagtatcgcttgcctccagcccagctgcgtgaagagtttgccagacgcaatgctgatgcggtattcgcgattcagcttcgcattcctgtacacaatggacatgctttgctcatgactgatacacgcaaacgcctttttgagatgggttacaaaaaatcctgttctttttgctttattc

SEQ ID NO: 4227 - DNA, 422 bp, Oryza sativa
  Clone ID: uC-osflcyp096c01b1
cttttctttctctctctgtctccagccatggcagctgctgaagaaggtccagagccactcaagtatcagactttggctttgaaggttagcatccactgtgagggctgcaagaagaaggtcaagaaggtgctacatagcatagaaggggtgtacaagacggacatagacgtgcagcatcagaaggtggtggtcatcggcaatgtctccgtcgacacgctcgtcaagaagctcgtcaagacgggtaagcacgccgagccatggccggagcccgctccgccgccgccggcggcagcagcggcggccaactctcccggcggtggcggcggcggcaagaagaagacaaagaataagaacaagaacaagaatcctgcgaacggccagcccggcgagccggcgccgcctggtgcgacggctgatgttgc

SEQ ID NO: 4228 - DNA, 185 bp, Oryza sativa
  Clone ID: uC-osflcyp096c02b1
gttcctgtgacaaatccatatctaggagctgatcatgcgctggcatttccaggagctcagatagatctaagagttatcgtactagcacgcagagagcattcaccactaggtcttactgttggactatatttgaagagacacctgtgaccggcacagaggccagattaggcacatacacctacact

SEQ ID NO: 4229 - DNA, 200 bp, Oryza sativa
  Clone ID: uC-osflcyp096c07b1
gttaattccacttgcaccatgtgaacaagaatgggaaaaggagacgtcgcacagctaggaaggcaacgggcctcatgtatgtgaacgccatttattaaaagctctttaaggccaatcaccacaaaaggtgatcaagcaatgaagatcaagaaaaggagcatcatcatcaggcacaagcgtgattttaatgatgaccagaa

SEQ ID NO: 4230 - DNA, 62 bp, Oryza sativa
  Clone ID: uC-osflcyp096c09b1
gtctaaacgacttccacaacttaaaccaaaatgggattttgatacatctcatagtgaggaat

SEQ ID NO: 4231 - DNA, 424 bp, Oryza sativa
  Clone ID: uC-osflcyp096c11b1
acttgttaaagcattaagaaaaagagggcatgttgttgctgtgactggagatggcacaaatgatgccccagctttgcatgaggcagatacaggcttctccatgggcatccagggaactgaagctgccacggagagctctgatattatcatgttggatgacaattttgcataggtcgtgagggttgtcagatggggtcgctcggtttatgcaaacattcagaaatttatacagtttcagttaaccgtcaacgttgcagccttgattattaacgttgttgctgctgtcagttctgggaatgttcccctgaacgctgttcatctactgcgggttaacctaatcatggatactttgggtgctttagtacttggcacaggtaccacctactgaccattattatgcatattcctccattttgtcttaatg

SEQ ID NO: 4232 - DNA, 313 bp, Oryza sativa
  Clone ID: uC-osflcyp096d02b1
atctttgtggtgggtttgacaagctcatcttggaaagcctatatgaccagggggactacaggcagagacagcaacagcagttatatggttcttcagctcccaacccgttcatgttaaatgatcctttcgtattgtcgaaccaagttgctccttcaccatcggttcaaatggctgccatgtctcatcagcatcaacagataccaactatgatgcaagcgattccctttggaccaccaatgcatccgcagcatgtgggcatgggccctgcaacaaatccattttttggattttggttttggcccatttccaatgg

SEQ ID NO: 4233 - DNA, 55 bp, Oryza sativa
  Clone ID: uC-osflcyp096d05b1
ggctcgtagaggagcagcacgggaaccagtaaggggggaggagacgcggcatagt

SEQ ID NO: 4234 - DNA, 77 bp, Oryza sativa
  Clone ID: uC-osflcyp096d06b1
gcttcttacactagcactagtttaaccaacatggagggatgtttcgccaaaatgcccggtaggcacccttacccctt

SEQ ID NO: 4235 - DNA, 206 bp, Oryza sativa
  Clone ID: uC-osflcyp096d10b1
ctgtgctctcgcgtctctgcgggccctactccggggccggtcgccgtcgttcggctccgccgccaccgacgccgccatgagggagtgcatctggatccacatctggcaggccggtctccaggtcgggaacgcgtgctgggagctctattgcctcgagcatggcatccagcctgatggacagatgcccggcgacaagaccgttgggg

SEQ ID NO: 4236 - DNA, 242 bp, Oryza sativa
  Clone ID: uC-osflcyp096d11b1
tctgggctcgcagggtctggaggtctcagagcgcaggggctgggatgcatgggcatgtccgccttctacggcccgtccaagccagagcccgacataggtggcgctcatccaccacgccgtacccggcgaagcgaccgttgtggacaccttcgacatcgacggtccccacaccaacgagcttctccttggcaaggcgctgcagggccggctgcgtgataaggttgagctggccaccatgttta

SEQ ID NO: 4237 - DNA, 431 bp, Oryza sativa
  Clone ID: uC-osflcyp096d12b1
ttttgaaaagaaaaaaaaaagagataaaaaaaaatgtcctcctcctcctcctcgccgccgccgccatggacgcctccgccggaggcggggggaactcgctgccgacggtgggggccgacggggccaagcggcgggtgtgctacttctacgacgcggaggtggggaactactactacgggcaggggcacccgatgaagccccaccgcatccggatgacccacgcgctgctcgcccactacggcctcctcgaccagatgcaggtgctcaagccccacccggcgcgcgaccgcgacctctgccgcttccacgccgacgactacgtcgccttcctccgctccgtcacgccggagacccagcaggaccagatccgggcgctcaagcgcttcaacgtgggcgaggactgccccgtcttcgacggcctctacagcttc

SEQ ID NO: 4238 - DNA, 239 bp, Oryza sativa
  Clone ID: uC-osflcyp096e02b1
cttgtcagaaaaagaaagaaattaaaaagaaaatcacggcgcgtgagcttgcagagacagcaatggtgagagttgctgccgccgcggcggtgctcgtgctggcggcggcggcggcggcggcggcggccatggccgccgagccgcccaccgatgacggcgcggtccgggtggcggcggggctgactaagtgcgtgtccgggtgcggttgccaggcgaccttctgcttgctcggctgctac

SEQ ID NO: 4239 - DNA, 198 bp, Oryza sativa
  Clone ID: uC-osflcyp096e03b1
tttatcactaattgcaccactggaaccagtctggggtaattgtacgtcacggggccaggatggccacggacccctcaatgtgaatgccagttctaaccagttctttaaggccaatcaccagaacgggtgatcatgccttgaagttcaagaaaaggagcatcaacatgaggcataagggtgatttcgggatgaccagaa

SEQ ID NO: 4240 - DNA, 131 bp, Oryza sativa
  Clone ID: uC-osflcyp096e04b1
ttttgttagactagcacatgtgaaccagaacggaggaacgattcgcagcaaagcaaggatgaccacgtcccccctaatgagaaatccagttctgaccagtactataagaccaacgacgagaatgggtgatc

SEQ ID NO: 4241 - DNA, 140 bp, Oryza sativa
  Clone ID: uC-osflcyp096e05b1
cctagttccaccaccataaccactacggaagaacgacccaccgcactgctggcatgtcaacatgcccccgcatatgaaagccctttataacaagttctgtccgtccactcaccacatcaggtgatcaagcctggaccatt

SEQ ID NO: 4242 - DNA, 170 bp, Oryza sativa
  Clone ID: uC-osflcyp096e07b1
ttcttccctacttgcaccacgtgaaccagtaggggattatggaccgtcgcgtggcatggatggcaacggacctcattatgtgaacgccatttacgacctgaacgttatgaccaaccacgagaacgggtgaccaagcaaggaagatcacgaaaaggagcaccatcatgagg

SEQ ID NO: 4243 - DNA, 89 bp, Oryza sativa
  Clone ID: uC-osflcyp096e08b1
tggtcttgcacacgagagatatgataaccagctggggggctttttacgtcgtatggccaggtaggccacgtgtctcttaatgtgaaggc

SEQ ID NO: 4244 - DNA, 428 bp, Oryza sativa
  Clone ID: uC-osflcyp096e10b1
gttatcgcgacggccgcccttttatcttttgtggagcattgcagactatcaggggtatgtttaaccaggtgtccacatcaccgttgtacagtatttgagttactgaaacaaaaggtagcagatcaatggtttacagaagggggctttcaaattgatgcacagaagtcataaacaagtagattcttagaatgataacaccttgtctaattaatttattcaccctatctttccatttttaattccataacagaacgttttttagagcacttgccgtcttttgtcttgagttgtagatgtcatatgttttcaaaggtactaaatggcggcttataatttcacttggttgcactgttgcggtatacataaaagtctaggccacttcattgattcctgctggcgtatacttagatttgccactctttttaaac

SEQ ID NO: 4245 - DNA, 370 bp, Oryza sativa
  Clone ID: uC-osflcyp096e11b1
ttctccttggcttcagaaaattataactaacgaagagcaaagcagttccaaattgacagttgaagatgaaagcgcaaataaaagtgcaaataaatctcagttgttcaaacagtttgacactgttaaaaatttctctgatcatcattatgcagcaacatcaggggatgtgacaaagagagactgggtgaagaggattcagcatgactggaaacttttggagaaagatctaccagcatctatttatgtccgtgttgctgaagattgaatggacctttttagggctgctattatcggaccttagggaacacctttccactatgggctctctttctttgatattcaatttagtaactcttactttttttaattc

SEQ ID NO: 4246 - DNA, 430 bp, Oryza sativa
  Clone ID: uC-osflcyp096e12b1
tctccgcctcgcctcgcagtgtggaagaaaggaaggaaggctaaaaccctagcgagcgcgcgagcgagcgagggctctctgcttccttgcgatgacggcgccggcggacaaggggaagaaggccaagaccgacgccgacggcggcgccgccgaggagaacgagcagatcgacggcgccctcgtcctctccatcgagaagctccaggagatccaggacgagctcgagaaggtcaatgaggaagctagtgacaaggttttggaggtcgagcagaaatacagtgagattcgcagacctgtctatctccgaaggagtgacattatccaaacaatccccgacttctggctgacagcgtttctgagtcatcctctacttagtgagcttttgaccgaagaggatcaaaagatgttcaagtacctggagtctgtcgat

SEQ ID NO: 4247 - DNA, 441 bp, Oryza sativa
  Clone ID: uC-osflcyp096f01b1
gcgtgttcatcctcctccccaccgacccccacatccggttccccgaggttgcagcctctgcagccttgcgaggatcggatgaacccatcgtcaccagacgaattctccaactgagtactctgctcccataatcctattgatccacacagcgaggggcactgcaagaagcatgcagtgcccaatggacgcagctgcaagtggaacttcgcctgtgatgcagttccatggcattgttgatgagccaccctcccattcatctccgctgcacacggcgctggaacgttcgcagcgccattgctatggtcatgaaaccccaggagaattcccccttgctgtgagcccctccattgtgctacatgtgctctccacctgcgagctagatcctaaagatcttgctgcactggaggctacatgtccattcttcagtaaacctgcaaattt

SEQ ID NO: 4248 - DNA, 394 bp, Oryza sativa
  Clone ID: uC-osflcyp096f02b1
gtctttacttgataccttcctctttacctcggagtctgtgaacgagggccaccctgacaagctctgcgaccaagtctcagatgctgtgcttgatgcctgcctcgccgaggaccctgacagcaaggtcgcttgtgagacctgcaccaagacaaacatggacatggtctttggtgagatcaccaccaaggctaacgttgactatgagaagattgtcagggagacatgccgtaacatcggttttgtgtcagctgatgtcggtctcgatgctgaccactgcaaggtgctttggaacattgagcaacagtcccctgacattgcacagggtgtgcacggccactttaccaagcgccctgaggagattgttgcttggtaccagtgtcatcatgatttttat

SEQ ID NO: 4249 - DNA, 125 bp, Oryza sativa
  Clone ID: uC-osflcyp096f06b1
gctatttctacctgcaccatcggatccagcacggagggacgattcgtagcattgttaggatggccccggtccccacaatatgaacgcccattctgtccagttctaaaagaccaaccaccacaaaa

SEQ ID NO: 4250 - DNA, 86 bp, Oryza sativa
  Clone ID: uC-osflcyp096f08b1
tgtcttctccacttgcacctctttaaccagtatggaagcttgaaacgtcgtacggctagtattgcaccgggcccctcaatgtgaac

SEQ ID NO: 4251 - DNA, 387 bp, Oryza sativa
  Clone ID: uC-osflcyp096f11b1
ttttaagggttttgccattggatcagctgctctggtgtcccttgcactttttggtgccttcgtcagcagagctggagtgaaggttgttgatgtcctgtctccaaaggtcttcatcggtttgattgttggagccatgctcccgtactggttctctgccatgaccatgaagagtgttggaagtgccgccctcaagatggttgaggaggttcggaggcaattcaactccattcctgggctaatggagggaactggcaagcctgactatgccacctgcgtcaagatctccactgatgcttccattaaggagatgattccccctggctgctttggtgattctcacccccctcattgttcgaactctctttggtgtggagaccctgtctggtg

SEQ ID NO: 4252 - DNA, 89 bp, Oryza sativa
  Clone ID: uC-osflcyp096f12b1
tcctagcttagctactcgatcatcagatcatcgatcatcctacgatcaaatcagtaatcttgaatatggcggctttgaacggtaaggtg

SEQ ID NO: 4253 - DNA, 292 bp, Oryza sativa
  Clone ID: uC-osflcyp096g02b1
gctattgttgttgccagctagcgagcctactcgtgagtcactctgtgccattccttcgctaccatacctcacaattatgactttgctaccatacccctcaattattagtaagatcgatgattagtcccagtgagtggctagcatacaaggaaatgaagcaacaggtcgtagcagattgagagagagttgtgacgaattacacaagaaagttagagatatagcactagctagctagcaagaatatagatatataatgtcgatcaagctctgcgagcaacacaaggattgcaag

SEQ ID NO: 4254 - DNA, 223 bp, Oryza sativa
  Clone ID: uC-osflcyp096g03b1
ggtgaggcaaggtcgatgggctcggcggcggacgaggcagaaatcaccgggttgctcgtaggcgccggcggcggcggcaggggagacagtcccgcggaagactgatgtggagaggtgtgccgtatggagggagcaggtgacggttcagggaaacgtggagagcgcggagctggaagcgctgttctgtctcaacacgcacaagctgaacctcacagtgtgggtg

SEQ ID NO: 4255 - DNA, 76 bp, Oryza sativa
  Clone ID: uC-osflcyp096g05b1
ggctcttccagttgcaccacgtgaacaattatggggggaggattcgcgatattgttcggatgacacccctgtcccc

SEQ ID NO: 4256 - DNA, 201 bp, Oryza sativa
  Clone ID: uC-osflcyp096g07b1
tttttctctactttcaccactaaaacaactctggaatattgttactcagcgcagttcggttgggcccgcacctacctcaataaatgccatttctatcatgttcttatttaccaatcactacttcaggtgacaatcccatgaagttgaaaaaatggaccatcaccttgaggcaataacttgatttttatttatgagcagaac

SEQ ID NO: 4257 - DNA, 96 bp, Oryza sativa
  Clone ID: uC-osflcyp096g09b1
atcttctggacttgctctatttgctcatatcttgaaaatggttgagaggctgagctagcttgccacgaagctggtcatagtttagagcaattctat

SEQ ID NO: 4258 - DNA, 479 bp, Oryza sativa
  Clone ID: uC-osflcyp096h01b1
tgtcttgcagcagcagcagcccgctgccaatgccagcggcagcaacagctctgccttcgtgaaggtcagcatggacggggcaccctacctgcgcaaggtggacctgaagatgtacaacagctacaaggacctctcccttgctctgcagaagatgttcggcaccttcaccgcaactgggaacaatatgaatgaggtgaatggctctgatgctgttacaacttatgaagacaaggatggtgactggatgcttgttggagatgtcccgtggcagatgtttgtcgagtcatgcaaacgcttgaggatcatgaagggttccgaagccattggtcttgcaccaagagcaaaggacaagtacaagaacaagagctgaaaatgttgcagtattaagatgctgagcatggtgccataagaatggtgttcttggagtgtgttatggttttcctagaaatataaggttttaccttgttaagctggattaa

SEQ ID NO: 4259 - DNA, 199 bp, Oryza sativa
  Clone ID: uC-osflcyp096h05b1
gcctagcagcttcacggcagacgcaccacgtctgccggccgccaccgccggagagggagggcctccccgaccctccccgccaagaaggatcctatggcggtgggggcgcacgcttcgcgcgcttcggctcctatcattgcaggtctcacaagtgctcttattgcatcttataaagtttttcaactttcatgctttcagt

SEQ ID NO: 4260 - DNA, 111 bp, Oryza sativa
  Clone ID: uC-osflcyp096h06b1
ggtatccaccaaaccctagccgcgagccctgacgttgcgaggaaggggaagaggagagatcgagatcggagagatccatccatggcgctgtgagccctgatcagcgagatc

SEQ ID NO: 4261 - DNA, 411 bp, Oryza sativa
  Clone ID: uC-osflcyp096h08b1
ctaatctggaacttcagcttttgtggaaaagagggagactgtgggtgacctcaatctgattgggcaattcggtgttggtttctattcagtatacttggttgctgactatgttgaagtgatcagcaagcacaatgaccacaaacagcacgtttgggagtccaaagctgatggatcattcgttatctctgaggattcatggaatgaacccctgggccgtggaactgaaatatgactgtaccttcgagatgaagccatggagaacgttggatttatgacaagttataggtatcgtagtagtatgattcttcagtttttcatttttttctttacttggatttatccttcatatttttatttgtattattatgactttattggaatttattatttaattttttaattatttttatt

SEQ ID NO: 4262 - DNA, 54 bp, Oryza sativa
  Clone ID: uC-osflcyp096h09b1
tgtatattggattgcactctgttctaactactttgcaatgattaagaggcagaa

SEQ ID NO: 4263 - DNA, 324 bp, Oryza sativa
  Clone ID: uC-osflcyp096h10b1
tgctgaggtcatgtcagagcttgcaccggtatgttttactgacagagaaactggacacgcatcttttatgtccaactgaagtgtagagcagatgatataagggtctttaaggtattttatctttctgtttcttattatctttgatttttttatattactttttatataatctattatttattccatttttttttatttttctatttatttattattttattattttttatttttttatttctataatatttctttatcttcttcattttctttttttatttctttttctttatttttttattgcttaattttttaattttcttt

SEQ ID NO: 4264 - DNA, 133 bp, Oryza sativa
  Clone ID: uC-osflcyp096h12b1
tcctttgtcattggcaaatcagttccccagattgccgattttggaggaagctaaaaagttccaagaaacctgagctgaaacaaaacccagtacttcctgctgatgtttttagattcatgcaggatctacttgt

SEQ ID NO: 4265 - DNA, 486 bp, Oryza sativa
  Clone ID: uC-osflcyp097a01b1
ctgttcacctcaccttatcctcagctctcagcacctcttcctccctcccccaagcttccctctaatggcgtccgccaacgccatctccaccgcctccctcctccgctctttctcctcccaggggagggtgaggagggccaagaatgggcgggcgcagcggctagtggtgcgggcggacgccaaggacatcgccttcgaccagaaatcccgggcggcgctccaggccggcgtcgagaagctcgccaacgccgttggcgtcaccctcggcccacgagggagaaacgtagtgcttgatgagtacggcagtcccaaagtggtaaatgatggagtcaccattgcccgggctattgagctatatgatccgatggaaaatgctggtgcagcattgatccgtgaggttgctagcaagaccaatgattctgctggtgatgggactacaaccgcctctgtccttgctcgtgaaatcatcaagctgggccttttgag

SEQ ID NO: 4266 - DNA, 364 bp, Oryza sativa
  Clone ID: uC-osflcyp097a03b1
ccttaacaagctgggagatctcagagcttggctatggaagaacaccgggcgctgatcaatcctagcccccctcacttgaaaagtgactagtacaagctctactaatgcctttgcttttgttttcccttgcttcttgtgatcaagtgtcaaattaaactcctcaccatggacatggtctccagttgctgtgttcttgatttccatcgatccggtgacgaaccaaagaagccggtcgtcaccgtctacaaatttatttgaagtttgaactgctgcatgaatgcatgatcatgtagtgggagtaatataatttactagtaatttatgttttaaaaaaaacaaaaaaaaataataaaaataatgggcg

SEQ ID NO: 4267 - DNA, 504 bp, Oryza sativa
  Clone ID: uC-osflcyp097a04b1
ctccgctcctccgctcctcgcctcttttacccgcttttccccccgatctccccggactcccacagccgcagcgaacaaatcccgcgcgggttgggaagagcgagctcgtgaggagagcagagggaaagcgcgagggggaaggaggaggaaaggtgcacaaggtcagactaagtttgcgttgaagaacaaaggagaggaaaaatgtcgcctgctgaggcatcgcgtgaggagaatgtgtacatggcaaagcttgccgagcaggctgagcgttacgaggaaatggtcgaattcatggagaaggtggcaaagaccactgatgttggtgagctcaccgttgaggagcggaacctgctttctgtggcttacaagaacgtgattggtgctcggagggcatcgtggaggatcatctcttctattgagcagaaggaggagagccgtgggaatgaggcatatgttgcatcaattaaggagtaccgtagcaggattgaaactgagctcagcaag

SEQ ID NO: 4268 - DNA, 474 bp, Oryza sativa
  Clone ID: uC-osflcyp097a08b1
ctccccaatctcgcgaggctctcgtcggcgaatcgaatcctctcgcgtcctcaagatgcagatctttgtgaagacattgaccggcaagactatcaccctcgaggtggagtcctctgacaccatcgataatgtcaaggctaagatccaagataaggagggcatccccccggaccagcagcgtctcatcttcgctggcaagcagctggaggatggcaggacccttgctgactacaacatccagaaggagtcgacccttcaccttgtcctccgcctccgtggtggcatgcagatctttgtcaagactctgaccggcaagactatcacccttgaggtggagtcttctgacaccatcgacaacgtcaaggccaagatccaggacaaagagggcatccccccagaccagcagcgtctcatcttcgccggcaagcagctggaggatggcaggacccttgctgactacaacatccagaagga

SEQ ID NO: 4269 - DNA, 375 bp, Oryza sativa
  Clone ID: uC-osflcyp097a09b1
atgtcctggtgctccccaacgtgtcctgaaaacaaccttctatgatcagtggaagaatctcccagaacaagaaacagaggaaaatcaacctatcataggccacactatcatccatggtgtgcacagggatattcgtcggttcgctggtactgttcctaatgcgacaacaacaggtgatattgatagcatggtcatgtatgctggtcagggtgttgggctaatcacagagatcataccagctagtgaagttgtcaaaaggttagtttctgaagcacagcacgtcatcagagaaaagcttttgtgaatttcctgtactgtccaaggagcagtaaatactatctggtttttgttagcaaggaccaatgaaaataaaag

SEQ ID NO: 4270 - DNA, 149 bp, Oryza sativa
  Clone ID: uC-osflcyp097a10b1
gcgtaggcggcgccggtggcggcggaggatttggcggaggcgctggaggtggcatcggaggtggacagtagtacgagcatgtggtgagttcaaataatggcgcgtaccgtttgcaaggtttgaaccagccggcaagctatctagtcagt

SEQ ID NO: 4271 - DNA, 182 bp, Oryza sativa
  Clone ID: uC-osflcyp097a12b1
tgttaccaaataccgctatccaaaccgagccactgttctgatggcagttggggcggcggtgagatgagatggctcacgacaccacaagtgagcaagccacggacgcggccagggacgccgtctgtaatgaagggcagacaagggcgaaatctaaaagcgcgaggaagaagctgatgaaacat

SEQ ID NO: 4272 - DNA, 482 bp, Oryza sativa
  Clone ID: uC-osflcyp097b02b1
cggttccgggcgcagggtgcgagtgcgtgaggcccaatccccaaatcccccccccccctcgccgccgccgccgcccgtctgcacgcaggcctcctcgtcgcttcacttcatcaacaatcaagatgagtcgtggtgggagtgccggtggtggccaaagttctctgggttacctttttggaggcaatgaggcccctaagccagctgctaaaccagcacctgcagctgcacctgcaccagcgccagcaccagcaccagctgcggctgtggctgctcctgctgagaaaccatcacctgcaaaggctgatgccaccaagcagattccagctgggattcagggcagccggagcaataacaactaccatagagctgatggccagaacactggaaactttcttacggatcgcccttcgaccaaggtccatgctgcccctggtggtggatcttccctgggctacctctttggtggaaactgaaggagtgat

SEQ ID NO: 4273 - DNA, 478 bp, Oryza sativa
  Clone ID: uC-osflcyp097b03b1
gtctatatctctcccgccccgagctgaagcaggtctgggcaatcgctgattccaagcgtcagggttatcttggattctcggagtttatgaccgcaatgcagctggtttctcttgcacaagctgggaatgagattagtcaggacacccttgcacatgcagatttggagacgttgctacctccgacaatggaaggtctggacaaaaaactaaaaaataattctatgagcaagagcaactctgatattgtcgtacgtcatccgtcagaattgcctgcatcagccaactggtttaactccaagtcaggaaagaagattcctttaagatcagttacttcgatcatcgatgggttaaagaaatcttacattgagaagttgaggccactagaaaaaacatatcagttcgatgactttgtttcacctttgctgactagcagtgatttcgttgcgaagccaatggtcatgttgctgggtcagtattc

SEQ ID NO: 4274 - DNA, 469 bp, Oryza sativa
  Clone ID: uC-osflcyp097b05b1
gagtgcgcccctgataattgcgtcgttgtgcctgggctgtgagggctctcagccacatggatagttcaatgtgctcatcagcgcctgacccgaagatgtggatcatccaaggcacattagcatggcgtactcctcctgtttgaatcggagtttgaaactaaacaaacttctcctcaggaggatagatggggcgattcaggtgagatcccatgtagatctaactttctattcactcgtgggatccgggcggtccggggggggcactacggctcctctcttctcgagaatccatacatcccttatcagtgtatggagagctatctctcgagcacaggttgaggttcgtcctcaatgggaaaatggagcacctaacaacgcatttttacagaccaagaactacgagatcaccctttcatttggggtgactgagggatcgtaccattcgagcctttttttcatgcttttcccc

SEQ ID NO: 4275 - DNA, 280 bp, Oryza sativa
  Clone ID: uC-osflcyp097b06b1
cttgtatatttagaagaaggtgccttgagaagaggtccttcaagaggtccatctcttggtgatcgtgatatagacccgtcatctcttgattattcaagtaagaaaaggatggattctgatggtgcaagtgggcaaggttcatttggtaggaaggatagtttcggaaaggaagagccaagaggcagccagggtgatggtacaaaaacctcagatcctcgtcctatgtttaaggtgggaggaaatgctaccccacttgctaactccatttgaaattatttca

SEQ ID NO: 4276 - DNA, 213 bp, Oryza sativa
  Clone ID: uC-osflcyp097b08b1
cttatgtagaatggggacggtacaaaaacaaatgaaggaaagaaggatattactctcgacatggggctactagttgttggtaccaaggaccgatgagagatatatgaaagactgaggaagcttatggaggaaaaaaaacaaaatgatgacattattatgttgatagacgaagtgagcatgctaattggagcaagtgctagtgaaagagtaata

SEQ ID NO: 4277 - DNA, 498 bp, Oryza sativa
  Clone ID: uC-osflcyp097b10b1
tttcttgttacagctgtgccgcctcttgcttcctgctcctcatcgtccgccatggcttctctcaccgatctcgtcaacctcaacctctccgacaccacggagaagatcatcgccgagtacatatggatcggtggatctggcatggatctcaggagcaaggctaggactctctccggccctgtgactgatcccagcaagctgcccaagtggaactacgatggctccagcaccggccaggcccccggcgaggacagtgaggacatcctgtacccacaggctatcttcaaggacccattcaggaagggaaacaacatacttgtcatgtgcgattgctacacgccagccggagaaccgatccccaccaacaagaggcacaatgctggcaagatcttcagctccccttgggttgcttctgaggagccctggtacggtattgagcaggagtacacccttcttcagagggcatcaactggccccttggctggcctgttggtggct

SEQ ID NO: 4278 - DNA, 222 bp, Oryza sativa
  Clone ID: uC-osflcyp097b12b1
gtcttctcgctgcaacttcagcgcttgcgcggcagggaaccgtgttgtcctttttggaggggaaggtgttaacatgcagccaatgaatgatacatttgcgcttgatttgaatgccagcaagccagaatggaggcacatcaatgtgagatcggctcctcctgggcgctggggtcataccctttcttgcctaaatggatcacggttggttttgtttggtggttt

SEQ ID NO: 4279 - DNA, 478 bp, Oryza sativa
  Clone ID: uC-osflcyp097c01b1
caaaaagatgcttatgtcggtgatgaggcccaatccaagaggggtatcctaaccttgaaataccccattgagcatggaattgtaagcaactgggatgacatggagaaaatttggcaccacacattctacaatgagcttcgtgtagcaccagaagagcatccaattcttcttacggaggctccacttaaccctaaggccaacagggagaagatgacacaaattatgtttgagacattcagcgttccagccatgtatgtcgctattcaagccgtgctttccctctatgctagtggacgtactactggtattgtcttggattctggagatggtgtcagtcacacagtcccaatctacgaaggttatgcccttccgcatgccattctccgtcttgatcttgctggtagggatctgactgattccctcatgaagatcctgactgagaggggttactcattcaccacctctgccgagcgggaaa

SEQ ID NO: 4280 - DNA, 217 bp, Oryza sativa
  Clone ID: uC-osflcyp097c02b1
gcttttgtggttcctgggtctgctcatcatcggcatcaacatgtacttcctgagcacgagcttcgtcggctggctcatccacaacgacctccccaagtacgccaacgtgctcgtcggcgccgccgtcttcccgttcatgctcgtctacatcgtcgccgtcgtctacctcaccatcaggaaggactccgtcgtcaccttcgtcgccgactcctccctc

SEQ ID NO: 4281 - DNA, 145 bp, Oryza sativa
  Clone ID: uC-osflcyp097c09b1
atcaaggcccccgccgcacctcctcccgtactccggcggcctcgacctcctcacggaggcacttggggccgagagcttcgatccggacgacgacgactacgccaccgccgccttcctcgtcatggaggatttttatatttttttt

SEQ ID NO: 4282 - DNA, 488 bp, Oryza sativa
  Clone ID: uC-osflcyp097c11b1
ttttcgagttcttaatgctcatgacatgcacaactattcgcaacagcagatccttcaagtttacacatgtacctataaatacagtttttggtcattctggcagaaaaagtttggatactggatgatcattgaaatgttgaattcatatccgcgtgagctactggataattttcaggtcatggacagctctgctgcaggagtaacatattcactgttatgctttttcatgactgacagtgtgataagatgcaatggctactgttcacattgttactgtcaaatggaaagtcaaaggatttcaggaatatatggtgatggaaaacaaggagaaggtttgtgacaagggtgttgtttgttccttgttgtctcattttatctagctaatgagaaacaattgtaaatgaactgactgatactgataggctgctggcaagaatctttttaagatgttgcctgcttacaggagatgcagatatcatgttggcagt

SEQ ID NO: 4283 - DNA, 105 bp, Oryza sativa
  Clone ID: uC-osflcyp097c12b1
ggtgcctagtcggggtcgtcatggcagcgcttgggccgctctatcctggacttggctcggggcagagagtactgtacgatgatgactcgcgcattgagaagctaa

SEQ ID NO: 4284 - DNA, 280 bp, Oryza sativa
  Clone ID: uC-osflcyp097d02b1
ctcatatcacactccccttcttgttggtttctcccccaattcgagccgaggttgagctgagctgagctctcgcagagacagggcgatgaacatcttgaaccagccgatcaaccctggcggccacccggcgttcccggcggcaagggagaccggccagctgatgccggcgtcagtccgcttcgacggcctgtcgacgcagcagagcacggccgccgccgtggggcgggcgcacgccgggcagtccccgcggtggcaggcgcatactctgctacggccaagc

SEQ ID NO: 4285 - DNA, 126 bp, Oryza sativa
  Clone ID: uC-osflcyp097d03b1
gtatatttgagagggaccaagcaaaacaacatggggagatgagtggattcgagccatcgagctaaatacaggcatgaaggacggggacgaagtcaggtaggcaccttgtgtacttgagatgtaaag

SEQ ID NO: 4286 - DNA, 160 bp, Oryza sativa
  Clone ID: uC-osflcyp097d05b1
gatcttctgcgagggaccgaccaaaacagcttggggaaatctgtggatacgtgccatcaagctaaccccatgggtgaaggacggtgacgaagacacgtcggcaccgagcagtacttgagatccaaagctacgcaactatctttgtgtctttttgtttagt

SEQ ID NO: 4287 - DNA, 151 bp, Oryza sativa
  Clone ID: uC-osflcyp097d08b1
gatacgtttgagacggatcaagaaaaacatcaggaggaaatctgtggattcgagccatcgagctaatcacaggggtgaaagacggggacgaatacagctaggcgccgtgtgctcttgacatggaatgccactctattttcttcgtttactt

SEQ ID NO: 4288 - DNA, 277 bp, Oryza sativa
  Clone ID: uC-osflcyp097d09b1
gatatttttgcttggaaccccaggaaccctggaagagaaaaaactttttcttgttgaccttggattagctactaggtggaaagacactggttcggtggagcatgttgtgtattatcatgaggccttactttctttattttaatctgttctctattattttgatcttcaattcttactcattgtatttttcattattttctatttcttctatcttttcattttttttttcttttcttttttttttttcatctttactatttattatttttttcatata

SEQ ID NO: 4289 - DNA, 117 bp, Oryza sativa
  Clone ID: uC-osflcyp097e02b1
gtatgtttgagagggatcaaccaaaacatcatcgggagatctgtgtatacgtgccctcgagctaaccacatgggtgagggacggggacgcattcagtttggcgccatgtgtatatga

SEQ ID NO: 4290 - DNA, 83 bp, Oryza sativa
  Clone ID: uC-osflcyp097e03b1
gtttcttttgatacggatcatgcaaaacatcttcaggaaatctgtggatctgagcgatcgagctaagttaaggaatgagagac

SEQ ID NO: 4291 - DNA, 113 bp, Oryza sativa
  Clone ID: uC-osflcyp097e06b1
gaatgggatcatgcaaaccattatgggtagatcattgtatctgtggcatcgagttaagtaaagtcatgagagacagggacgaattcaggtaggcgccatgtgttttggacatg

SEQ ID NO: 4292 - DNA, 116 bp, Oryza sativa
  Clone ID: uC-osflcyp097e07b1
gttacgtttgaaagggatcaagcaaaacatcaggagtaaatcaatggatatgaggcatcgagctaagtaaaggaatgagagacggtaacgcattcatgtaggcaacaagtgtattt

SEQ ID NO: 4293 - DNA, 409 bp, Oryza sativa
  Clone ID: uC-osflcyp097e08b1
gatacgtttgagagggaacaaggaaaacatctgggggaaatctatagatatgagctatcaagctaaccacagacgtgaaagacggtgacgaagatagttaggagcctagaatattttagacgttttgtctctcaattaatcttagtgttactttgtttagtcttcttctattttttttttaatcttatttgtttttcttttattttttattttatttcttttttttttttatttctctattacattattttcacttatatttcataattcctattttttttttcttttctttactacttataaatattattctctttatttaactcttcttttttttattctcattattatttctaaatatttttattttttattatatttttattatattatatatttattcttatat

SEQ ID NO: 4294 - DNA, 373 bp, Oryza sativa
  Clone ID: uC-osflcyp097f02b1
cttattgccgccgccgccgcctgcctcgtactccaactcttcggcgactagatgacgaagcgcaccaagaaggcaggaatcgttggcaaatatggtaccaggtatggtgccagtttgcgtaagcagatcaagaagatggaggtttcccagcactccaagtacttctgcgagttctgtggcaagtttgctgtgaagaggaaagcagttggaatctggggatgcaaggactgtggcaaggtcaaggctggtggtgcctacaccatgaacactgccagtgcggtcacggtcagaagcacaatccgtcgcctgagggagcagacagaagcctgatcaggatctgtttgagaaagtgttcttggagtttttataagac

SEQ ID NO: 4295 - DNA, 89 bp, Oryza sativa
  Clone ID: uC-osflcyp097f03b1
gtgtcttttgaatgggatcatgcaaaacatcttcaggagatctgtgtatatgtggcatcgagctaagtacatgaatgagagacggggac

SEQ ID NO: 4296 - DNA, 395 bp, Oryza sativa
  Clone ID: uC-osflcyp097f05b1
gagagggaccacccaaaacatcaggaggagatttgtcgatctgagccttcgagctaagcccagggatgagagacgggcgcccggctagggaggctacacgctgtcttgacagagatggctgatgccaggatgtctgctagaactggaacaagagctcgtgtgtgcacacttatcaaaggattgcagccgaatgaaccacgggttatttttaagtaagaggctgatgttaaaccaaagttgttagcgggtgctttttgaccagtctgatttatgagccgtccaacctttgttgtactgtattgacaattgaactaaaaatttttggacctaccctgcacagtgtgtagatgaggagtgtagattcataatgtattatttttattatagtttttttc

SEQ ID NO: 4297 - DNA, 122 bp, Oryza sativa
  Clone ID: uC-osflcyp097f06b1
gtctcttttgaaagggatcaagcaaaacatctacaggaaatctttggatttgagccatcgtagtaagcacaggaatgaaggacggggacgcattcaggtaggctacaagtgtatttgacatg

SEQ ID NO: 4298 - DNA, 112 bp, Oryza sativa
  Clone ID: uC-osflcyp097f08b1
gtttcatttgaaacggatcatccaaaacatcagcagcaaatctgtggatatgaggcatcgagctaagtacaggaatgagagacgggaacgaattcaggtaggcaccaagtgt

SEQ ID NO: 4299 - DNA, 346 bp, Oryza sativa
  Clone ID: uC-osflcyp097f11b1
gttaaatctatagttgctcccttgagaaggggaggtggcaagcctacagcaaaagctaggggacaccccatgctcttacctgatcgcccgcctcatgtcactattctctgtcttgtaagagatgctgctgccaggttgcctgcaagaactggaacaagagctgatgtgtgcacacttctcaaagattcacagtatctaaaccacgaagaatctaataaagaggctgctgttaaccaagttgtcagcggtgctcttgatcgtctgcattatgagcgcgatccttgtgtactgtatgacaatgacaaaaaattgtggacctacctgcacaggggtagagaggaggaag

SEQ ID NO: 4300 - DNA, 491 bp, Oryza sativa
  Clone ID: uC-osflcyp097g01b1
gaaatgattgctgaccaaagtaccactcatcgaaaatacagaggatcttgaagattttgaatccgtcttcattaatctttcaacattgcaatcagcaacagccaactttgatgaaagcaacaggcttggggaaggaggattcggtgttgtttttaagggtgttctccctggtggacaagaagtagcagtaaagaggctttccaattgctccatacaagggctaggacaattgaagaatgaactatctctggtagccaagctgcagcacaagaatcttgttaggcttattggcgtctgcttggaagaaggagagaagatccagataaaagcaaacaacttgattggggaaagagatacatgattctgaacggaattgctcgaggcctgcaatacttgcatgaacattctcaattgaagataatccatcgggacctgaaagcgagcaatgttttacttgatgcggatatgaaacccaagattgcggattttgg

SEQ ID NO: 4301 - DNA, 203 bp, Oryza sativa
  Clone ID: uC-osflcyp097g02b1
gtgatacagcaaaaaaaatcaaacaaaaagaaaaagtagttccccatctgtgaaattcgcaaaaccctagcgcggcggcgatgtcgaacacgagggtgttcttcgacatgaccgtcggcggagctccggcggggcggatcgtgatggagctgttcgcgaaggacgtgccgcggacggctgataactttcgtgctgctcttgct

SEQ ID NO: 4302 - DNA, 114 bp, Oryza sativa
  Clone ID: uC-osflcyp097g03b1
ggagaggcattgccgatgggctcggtggcggacgatgcggagatcaccggctcgctcctcgccgccgccggcggcggcggcggtgacagcgccgcggcggcgggggtggagagg

SEQ ID NO: 4303 - DNA, 133 bp, Oryza sativa
  Clone ID: uC-osflcyp097g05b1
ggataatgaatggcggctctgcttgtggtcgtgttggttgccatgtcggccatggtggcgacggccaactttaaccaggagttcgacatcacctggggcgatggccgtggcatgattctcgaggatggccagt

SEQ ID NO: 4304 - DNA, 331 bp, Oryza sativa
  Clone ID: uC-osflcyp097g09b1
cttagtgctacctcctgtcatttctaacatagtgatggtaccccaaagaaggctttggaaatgccagacactgcctatgtatttcattcattaaccccaatggacccatagatatattttattgtcttgggtcggccactcatctagatgtccattgcttccccaatgtcactaccatggttaggtccaggatcactcctttctgctcccttccctccttccccacctctcttccctctctctgtgtgtacagagagaagccttaatgctttttaatgtactattatcggacatggtgattgtaataataaagtagtactgtgacactttt

SEQ ID NO: 4305 - DNA, 188 bp, Oryza sativa
  Clone ID: uC-osflcyp097g10b1
ggtacgcgtacttacccacaagttaggtgcatgccatggcaccattcatggcgtgcgcctcgccaccggtactcacgctggccctgctcgcgtcgtgcggtgcccttctcgccacctccatgctcccggcgcgtgcgacggcgggcagctgcttggacgtctgtgacatggtgatgatttacaggttt

SEQ ID NO: 4306 - DNA, 425 bp, Oryza sativa
  Clone ID: uC-osflcyp097h01b1
gccttatcgagcatcttatcccatcttaaagttggtttattcggcagcagcaaatgctactcattatagggatttcgacaaagcaaatttattcatcactaaagccgaagtcagtaggagtactattatgaataaattcagacctcgggctcgaggacgtagttctcccataaaaaaaaccatgtgtcatataacaattgtactaaatatagtaaagaaatcgaaataatctttagatccatctaagatttgattcccggtaaaaaaaatagaatagaaaaatatgggacaaaaaataaatccacttggtttcagacttggtacaacccaaaatcaccattccttttggttcgcacaaccaaaaaattattctgaaggtctacaggaagataaaaaaatacggaattgtatcaagaactatatac

SEQ ID NO: 4307 - DNA, 492 bp, Oryza sativa
  Clone ID: uC-osflcyp097h02b1
caacttatcgcctccctcgcatcgcccctccccgaccccgccgagatcggagcaggcgccgcctccctcctcccgcctcctcctccgccatggcgccgtctctgctcggggggttcaccaagtcgctggccatgacggtgctctcggagatcggcgacaagaccttcttcgccgccgcgattctggccatgcgctatccccggaagcttgttcttgctggttgtctcacctcattaacagtgatgacggctctatcagtttcacttggttgggttgcgccaaatctgatatcacgcaaatggactcatcatgtgaccactctgctattctttgtgtttggcattttgtcattgtgggaaggcttcaaagaagatggagattcagaagaattggctgaagtggaagctgagctggatgctaattttaaaagcaacaaagcagaatcgaaaagtaaatctaaggcaaatgatgataaaaagaagcagcaaagac

SEQ ID NO: 4308 - DNA, 217 bp, Oryza sativa
  Clone ID: uC-osflcyp097h03b1
gcgccatttaccatccatccgcgcgcggtgcgtagtagcgagaagagaagggggggggggcaaagcgatggctccgatgaagctgtacgggtcgacgctgtcgtggaacgtgactaggtgcgtggcggagctggaggaggtcggttccgagtacgagaattgtgctcttagatttttacaaaggcgagcacttggctcctcttccactcttatcagg

SEQ ID NO: 4309 - DNA, 428 bp, Oryza sativa
  Clone ID: uC-osflcyp097h04b1
gggtatcattaacaataatcgcttcaggaacagatgaagctctgcagtgtactggcagtgttctctcagcactaagtgagaagctttatgtcatcaaaggaggatgtggagctgcaagttctgtaaagatggtaaaccaacttcttgctggggttcatatagcctcagcagctgaagcaatggcatttggtgctcgattaaatttgaggacaaggagactttttgaaattattcaacatgcaagaggttattcatggatgtttggaaatcgtgtgccacacatgcttgataatgattatactccttattctgcagtggacatattttgtcaaggaacttggtatagtattttatgaaagcttcaacccaaggatcccactgcttgtctctagtattgctcaatcaacttttttcttttaatgatcttc

SEQ ID NO: 4310 - DNA, 308 bp, Oryza sativa
  Clone ID: uC-osflcyp097h06b1
cagctaacgagcaccacacaccagcagcagcagcaagtcgatcgatcgtcagcacacacgaccaagatcgagatggcccgtgcacagctggtgttggtcgccctcgtggcagctctgctcctggcgggcccacacaccaccatggccgccatcagctgcggccaggtcaactccgccgtgtcgccctgcctcagctacgcccgcggtggctcctgcccgtttgtttctttcttctacttttttcttttgttttttttttttttttatttttctattttttctttttttttcttctttcttctcttttt

SEQ ID NO: 4311 - DNA, 355 bp, Oryza sativa
  Clone ID: uC-osflcyp097h08b1
gctgtcttcctcccaccttccgacgacgccgccgtcgctcttctcttcgctccgccgcgcaggtaagaaggagaggaggagaaaatggtgaagcacaacaacgttatccccaatggccacttcaagaagcactggcagaactatgccaagacatggttcaaccagtcctcccgcaagcagaggcgccgcattgctcgccagaagaaggctgtgaagatcttccctcgtccaacatctggccctatttgacccattgttcagtgccaaactttgaagtacaacatgaagactagggcttggtgaggctttacccttgaggagcttattgcttccgacattcataacatttatgttt

SEQ ID NO: 4312 - DNA, 296 bp, Oryza sativa
  Clone ID: uC-osflcyp097h10b1
gctgagcggagcagaggaggacgaagaagtagggggcggatttagagcacggtgacctagcccgacctcgcaaccatggtaaggggttttgaagatgcattttaagagtctaaatgttttctagtattgatttgcttttaaagtttgaataatatttttgatttcattaactaatttgtaaatttcttttttattaattttttttttttcaaaaaaaatatattttttatttttcatctttattttttattttttatatttcattatttattttctttctttaattataacttttt

SEQ ID NO: 4313 - DNA, 186 bp, Oryza sativa
  Clone ID: uC-osflcyp097h11b1
gtgaattttcagaagaagaggaagcaaatgctgtattaaagaatactcttgtttttgcagaagcagatctggaaataaaaccaaagaaagaatttgatactgaaagagaggctaagaaagaagcttatgagaagtcacaacctacttagaatggacattgatgagggatatccaaaaggtctaatt

SEQ ID NO: 4314 - DNA, 177 bp, Oryza sativa
  Clone ID: uC-osflcyp097h12b1
gctaattctacagttgctgccaggagtgattcaggaaatgcaacatccctgcaatgagtgcaagggaactggtgagaccatcagcgacaaggatagatgcccaggctgcaagggtgagaaggtggcgcaggagaagaaggttcttgaggtggagtcttatttttaaaattcaaattc

SEQ ID NO: 4315 - DNA, 80 bp, Oryza sativa
  Clone ID: uC-osflcyp098a01b1
acctcccggtagagccggccttcatgaagatgcggaggcggctgtcctaggagctgacgcccccctagcccccccccccc

SEQ ID NO: 4316 - DNA, 509 bp, Oryza sativa
  unsure (1)..(509): unsure at all n locations
  Clone ID: uC-osflcyp098a02b1
tctagctcagctcttactccgccatttcgaagcacatcgtggaggaggaggtggnttttttttcctttttcacccttttttttattttttttttcctctttcttattttctttttcttctttttctattcttttcttttttatttttctttcttcttttccaactttttttttttctattttttttctttttttttttatttttctttctcctattttctttttttctttcttcacttttttcttcttttttcttttttttttcttcttcttttttcttttccctatctcttttttctctttttctctttttttccttctttttttctttttctttcttttatttctctttctttctcctcctatctctttttttcttttcattctcttatatctcccttatctcttctcctttctttcttatctatttttacctttctccttctcttctttttatcttttcttctctttctcctttttcttctctttttctcttcttttttatttttc

SEQ ID NO: 4317 - DNA, 179 bp, Oryza sativa
  Clone ID: uC-osflcyp098a04b1
cctcgatctgtagcttattagcggccatgtgcggcggagcaatcatctccgggttcatcccgccgtaggacgctggggcggggggaggagcggcagccaagaagcagcaggggaggagggtcacggccgcaaggcgaagaccagggacgccttgaaagacaaagcccggaggcatcgac

SEQ ID NO: 4318 - DNA, 75 bp, Oryza sativa
  Clone ID: uC-osflcyp098a08b1
ttctaactcgggcgaaaacagatgcaaggaacgggccatatacgaaacagagacagcttcctgcatccaccaaaa

SEQ ID NO: 4319 - DNA, 243 bp, Oryza sativa
  Clone ID: uC-osflcyp098a12b1
gtgtaaggtgcctgaaaggcaggatccaatgcttgttctgaagcccatatggatggagaagaacagtggcatagccctagaccagttaggtcccggctatggcagcattgcagtaagcccatactacttctggccacggaaagatgcctgggaggagctaagagcatacgctggtggagaacgaggggaacttttataaacagatgaacatacatatggatcaggccactgaggtcagcaacc

SEQ ID NO: 4320 - DNA, 137 bp, Oryza sativa
  Clone ID: uC-osflcyp098b01b1
gtcggacgacacgtaagtgctggcggcgttcatgaagttcccggcgttcaggcgggcgctgaacggtggaccagacaatcagcgacgcgtacttgtcgatgagggcaccaccataagacgatgagaagatccagtcc

SEQ ID NO: 4321 - DNA, 261 bp, Oryza sativa
  Clone ID: uC-osflcyp098b02b1
gctcgaggttccccagactgaaaggtttcttttccaacgtgtttgtacaaggggttatcacatgttccgctgtattgcaaggtacggctacaaagataagaaccaggagagccaaagcacatttgagcgccttctgattgaaggcctcgagaagttcatacagcgggaggcagtagagctatccctacaaagtggagacgacatcgactctgacgaggagcctccatccccatttaggacaatcgtagcgccaaatggtag

SEQ ID NO: 4322 - DNA, 230 bp, Oryza sativa
  Clone ID: uC-osflcyp098b04b1
tcctgcgtgtgcgtgtctgcgaagcgtgagagagaaacgttcgcgacgcgacgagctcctactccgatctccccgatgcgatctcgccaaaccctaatcccacccaccaccgcgccggagtcctagcgccgcccgcagccgtcgccgccgtccggatgctgcggccgtgacctccttctcctccgcctttgacattccagccatgggagccgcccccaagtggcttcctc

SEQ ID NO: 4323 - DNA, 216 bp, Oryza sativa
  Clone ID: uC-osflcyp098b07b1
tcgtctaactagggtgaagaaagaagcaaggaattattctggtacaaaagctagacacaaggatccattgatccaaaaaagaagtgcatcacttattggaccaagcacgccaagtgtaacgtctcctagccaagatgaatatcctatttggaaaatcatatgggtcttgatctagctctcgccacgatccttttcaatttttgtgtcatcctttgt

SEQ ID NO: 4324 - DNA, 104 bp, Oryza sativa
  Clone ID: uC-osflcyp098b09b1
tttgtctttctccagcgaagacaaaagcagggtgtgttacatataaaaaacttggacggtattcacccttcaacagaaagacaagtgcatgtttaattgaaaga

SEQ ID NO: 4325 - DNA, 135 bp, Oryza sativa
  Clone ID: uC-osflcyp098c02b1
gcgttcataccccaattcccaacacctccgcgacgcgagcgagcgaagcacgaggaaaaaaaaaaatccccgaatccgcgacgagcgaggcggcgagctcgctgcttcgatcgatccggagagggaggtagggag

SEQ ID NO: 4326 - DNA, 123 bp, Oryza sativa
  Clone ID: uC-osflcyp098c04b1
ttgatcatacttgatacagatagtctggaagttctaaacctaaatgctttgacccttgattcgtttgagctcattgggaagggcactctaaagcatatcaagattgacgatattagtgtcact

SEQ ID NO: 4327 - DNA, 103 bp, Oryza sativa
  Clone ID: uC-osflcyp098c09b1
gtcttcctccggcgaagccaaaaccatcgaggtctactcttacaaggctaggacgagagttccctctgaaccaaatatttagttcgtctttaatagtacgatt

SEQ ID NO: 4328 - DNA, 345 bp, Oryza sativa
  Clone ID: uC-osflcyp098c10b1
ctcggtaaaaaatcgcatccgatccgaatccggcgagccgaatcaaatcctcccctcgagcaccagcggagcggaggagcaaattcgccggagacgagacccctcgccgtcgtcgattcccccaggcgagccggcgcattcattcctccgcggcgagcagaagcggtgtgcctgcctgcgatggcggcggataagccggctccggtgagggtgctgtactgcggcgtctgctgcctccccgcggatttctgttagttcttcccggtcttttaagcgttctttgcctcattcttccttctccctattttcctttttaattctctctcattatcttcctttatttct

SEQ ID NO: 4329 - DNA, 598 bp, Oryza sativa
  Clone ID: uC-osflcyp098c11b1
tttttcctttttcttccctctcgttttgtgtgtgtggcctcttctctagtcttgtccttttttttttttccttccttttgtcttttcttggcttggtgtggagaggaggtggtggtgttttttttttttttttttttttttttttttttcttttttttttttttttttttttttttttttttttttttttttttttttttctttccttctttttttttttttttttttttttttttttttttttttttttttttttttttctttttttttttttttttttttgtttttttttttttttttttttttttctttcttttttttttttttttttctctttttttttttttatttttttttttttttttttttttctttttttcttttttcttttttttctttttttttctttctttttatctagtttttttctcttttttttttttttttcttctttttttttctttttttctcttttttcttttttttcttttttctctttttttctttattttttttcttcttttttctatcttctcttttttttttttttttttctttttttcattttttcttctttttttttttcttttttttcttt

SEQ ID NO: 4330 - DNA, 371 bp, Oryza sativa
  Clone ID: uC-osflcyp098d02b1
ttcctttccaggaacgcgtgtcctatcctctcttctcttctctctccggcggcggcggcggcggaatccgatccgaaccaagcaaaaatgacggccggatacattgctgggtccttggttggatccttcgccattgcttacctgtgtgacacatttgtttctgacaagaaggcatttggaggttccattccaaagactgtctctgacaaggagttggtggcaagccactgacaccaagttccaggcctggcctcgcaccgctggaccaccagtcatcatgaaccccattaggcggcaaaactttattgttaaggccactttgaccagagaaactggttcatgtgtcggattttacccattaatattaaaat

SEQ ID NO: 4331 - DNA, 132 bp, Oryza sativa
  Clone ID: uC-osflcyp098d08b1
ccgggacggaccgggcggaccgacccacgcgctcgtttgcaggaacgcgacgccaacccccgggggggccttctaaccggcggcggcggcggcccaacccgaaccaaaccaagcaaaaaggacggccgggaa

SEQ ID NO: 4332 - DNA, 124 bp, Oryza sativa
  Clone ID: uC-osflcyp098d12b1
gtcgttatcggagcggacgccttttctaggggttctgtcaaatcaagtgcacctttgacccactccaccaatagatttgtgcatccaacacacatgtcaaaatatcacatagcccattttggaa

SEQ ID NO: 4333 - DNA, 217 bp, Oryza sativa
  Clone ID: uC-osflcyp098e01b1
cgtgattgttagatttaggtctcccccatatgcccattcccatctctctctctcgagtctcgacggcggctgctgctgcggcgtcgcctgcggtgcgatgccgtcgtctccggcgcatgctcagcgcttctactgccaccagtgcgaccgcaccgttcccattccgccgtccacctcccccgacgccgacgtcctctgcccgttctgcggtggaggc

SEQ ID NO: 4334 - DNA, 146 bp, Oryza sativa
  Clone ID: uC-osflcyp098e02b1
cggtccccaaggagacaaaagatgagatttggcttgagtatgccgtaagttgtctcttccaaggcatcaaatatggagttccaaactcaaggagccatcttgcacgaattctcttacttctgagctccgatacacaaattgaacct

SEQ ID NO: 4335 - DNA, 174 bp, Oryza sativa
  Clone ID: uC-osflcyp098e03b1
ttcgtgctgatcctggcgtcgaaggacgacggcgagatcgtggacgcctgagcgaatagaacagggtaaaaaaaaatccgcaagacgtggtggtgacacggaggcgttggggacgagaagaagatgtggactttcccctgtgctttttttatggggatttgcttttatcccctt

SEQ ID NO: 4336 - DNA, 231 bp, Oryza sativa
  Clone ID: uC-osflcyp098e05b1
gttgtccgcgcgggaacaaagaagcagccaaggggagggggttgaagccgggacgccggggacgaccgagacgatcaagaacggcctggctaagcagagaaagaacagggagaggcaccacacccacccgggaggaggacccgatagaaagcggcagcggcgacagaaggatgagtgcttcgatggacaacaacaactagggacacggcgagcacaacaagaccgcagccg

SEQ ID NO: 4337 - DNA, 117 bp, Oryza sativa
  Clone ID: uC-osflcyp098e09b1
ccctgaaaaatttgtacgcaatctagcgaggctctcgtctttgaatcgaatcctctcgcgtccccaagatgcaaatatttgtgaagacattgaccggaaagactatcaccctggagg

SEQ ID NO: 4338 - DNA, 222 bp, Oryza sativa
  Clone ID: uC-osflcyp098e10b1
ttcgtcccttttttgcaataccgttgtttagatggtttctacttcgcaagaccaacaatgacattcaaaggaggaacatggccagagaacagcgagctcaggaacttgcattgccagaatcttctctcagaagaaagttactcagtgcacgcgacatggctcaacgtaaggtaatttctccagaggagatcgtctacactaccgaaaaggatcttttggatc

SEQ ID NO: 4339 - DNA, 333 bp, Oryza sativa
  Clone ID: uC-osflcyp098f02b1
tgtattcacacgccggactctccccttctctctgtctcgctccttcgttcgctcgctttatcccccccgaataaaggcgagaagccgcagcggcggacgaagaagagggcagatagaaatggcggcggagacgttcctcttcacctccgagtccgtgaacgagggtcacccggacaagctgtgcgaccaggtgtcggacgcggtgctcgacgcgtgcctcgcccaggaccccgacagcaaggtggcgtgcgagacgtgcaccaagaccaacatggtgatggtgttcggctagatcaccaccaaggccaccgtcgtctacaagaagatcgtccg

SEQ ID NO: 4340 - DNA, 62 bp, Oryza sativa
  Clone ID: uC-osflcyp098f05b1
gctgataagggaagagaaagaaggaagggggcagttaaaagcgagacggtttttgcactgac

SEQ ID NO: 4341 - DNA, 158 bp, Oryza sativa
  Clone ID: uC-osflcyp098f07b1
gtctaacgcgggggaagcaagaagcagggagggggtcagataagaagccgcgacggtaggcacgaccgagcgaaaaaggaagggcacgactaagcagacaaagcacacgaagaggaaggtcccccagccaagaggagcaacctatacagccatagcat

SEQ ID NO: 4342 - DNA, 252 bp, Oryza sativa
  Clone ID: uC-osflcyp098f10b1
ccctcgaccatgggacatcaagcttccctgtatctgcagtgcacaggattggcatacttgacatcagaatattcaacacggacaggcacgcaggaaatcttctggttaggaagcttggacctgggcctgacaattttggagtgcagactgaactcattcctattgaccatggtctctgtcttcagaaagtctagaagacccttactttgaatggattcactgcccaccgtgcttcattcctttcactgtgga

SEQ ID NO: 4343 - DNA, 175 bp, Oryza sativa
  Clone ID: uC-osflcyp098f12b1
ttcttatcttcctcctcgccttctgcttctgcatccatccatccatccattactcgccgaagacttcgcgcggggagagaggaggcaagctttgtcgcgggaacgcgggaagaaaggtccgagcttggaaggagaagaagaagttgccaagaacgcgagagcttggaaggccagc

SEQ ID NO: 4344 - DNA, 508 bp, Oryza sativa
  Clone ID: uC-osflcyp098g01b1
cttgttttagccggtttcacaacagcatcataaagcagctgctcggccatggcaccaccgcctgcggtgctcagctccggtgagctcggcgcgcgagggcacacacggccgcacgtcgtgttcgtcccgagcgccggcatgggccacctcctccagttcttccgcttcatcggcgcgctgtccgcccacgacgtcgacatctccgtcgtcaccgtcttcccgaccgtgtccgtcgccgaggccgaccacttcgccgccctctttagggactatcccagcgtccgccgcctcgacttcgacctgctgccgttcgacgcgttcgagttccccggcggtgacccgttcctgcttccgtgggaggccctgcgccgctccttgcaccttctggcccggtcatcgccggcgttaccccgcgcgttacggtcaccgtcaccgacgtcacgctggtgtcccacgtcaaccccatcgccaggacctgggcgtccaggccacgtgctgtacgtcttct

SEQ ID NO: 4345 - DNA, 136 bp, Oryza sativa
  Clone ID: uC-osflcyp098g02b1
gtcctaacagtcctcattattggccgtctactgtgtggtatgtgttctgcaagagctgtcaatcgccgatacatcagtgattgtgtccctgcatggatacgcatgcaggcttcagcaggatttgtcagtgcaagct

SEQ ID NO: 4346 - DNA, 161 bp, Oryza sativa
  Clone ID: uC-osflcyp098g03b1
ctactccgctcctcccctcacgggctcacggcggcacccactccaccaacaccatccatccaactccgcggcggcggcggcggggatgacgacccgatccaacggagagcaccaccacgggccgccctcgtaccagcagcggcgcccgcactacgggggcg

SEQ ID NO: 4347 - DNA, 68 bp, Oryza sativa
  Clone ID: uC-osflcyp098g05b1
gcctgcctaagcatgaaggagaaagcaacgaaggggttgtttttttaacaaagacctcttaaagcccc

SEQ ID NO: 4348 - DNA, 105 bp, Oryza sativa
  Clone ID: uC-osflcyp098g07b1
tccgaactagcgggaagcaaggagaaaggagggggtttgttatgaaactgcgtcggtttccaggatacaccaaaataatgaggtctgctcaaataagaacacaca

SEQ ID NO: 4349 - DNA, 111 bp, Oryza sativa
  Clone ID: uC-osflcyp098h02b1
ggatcagtttcggttttggaccaggttgggctggagtggtttttatgccgccaccatgataaactccactattgaagtgagttttgtgttgaaattgcggccttgtggggg

SEQ ID NO: 4350 - DNA, 154 bp, Oryza sativa
  Clone ID: uC-osflcyp098h03b1
gcatagcatcagcagcaatgcagcctcccatgctgctgccgcttctcctcctcctcctgctcctcctcgccgccgtctcgccacggccggttctctcccgccgccacgcctcgccgccgctcgccaccgagacgctcgacgtcgccgcgtcgct

SEQ ID NO: 4351 - DNA, 74 bp, Oryza sativa
  Clone ID: uC-osflcyp098h06b1
ccggttgttcaagaaaaaagacagagataagagggggttttataaaaacgaagccgaaaacccccaacagacac

SEQ ID NO: 4352 - DNA, 137 bp, Oryza sativa
  Clone ID: uC-osflcyp098h08b1
ctctatgcgaaagacatcactgctgatgacaagcaggtgcttgatgaggccctgcagcgggagattcaagcagctctcagaactgatgaaatccgcaggactcctcccactcctcaggatgaaatgcgcgccgggat

SEQ ID NO: 4353 - DNA, 69 bp, Oryza sativa
  Clone ID: uC-osflcyp098h10b1
gcctaaaatatcatgatgaaaaggttgaagatgaagatgtttgttgtacaccagcactcagtacaacaa

SEQ ID NO: 4354 - DNA, 56 bp, Oryza sativa
  Clone ID: uC-osflcyp098h11b1
agcagtcgctccatctcctacgctccttgcgcccaagacgagtcttttttaaacaa

SEQ ID NO: 4355 - DNA, 324 bp, Oryza sativa
  Clone ID: uC-osflcyp099a03b1
ctcatcagcagcatcaggggaagggtctagaagcttctagaagcttcttccgagatgaaggtgatcgagaagatccaggaggcggcggcggatgggcggacggtgttctcgttcgagtacttcccgcccaagacggaggaggggctcgacaacctgttcgagcggttggatcgcatggtggcgcccggccccaacttttgcgacattacctggggcgccgggggatccaccgtcgacctcacccttgagatcgccaaccggatgcagaacatggggtgtgtggaaacattgttgcacctgacttgcaccaatttgccatttgag

SEQ ID NO: 4356 - DNA, 276 bp, Oryza sativa
  Clone ID: uC-osflcyp099a05b1
gtgccatacaacaaagctcatgagaactctgatatctacagttagtgtgaggaatggcagctagccattgatcgaatccccgataaggtagcctcggaagggatcaaaactctcctgacagtgatacacgcagttgtggtacaacaggcggaggagcaaaagcaaaagaagaggtcagagtctgcattcaaggaactggagaagaaggcagaggaactaagatcccttgaattcaaatatgggccatattcgggtgctgaaggctatggagatatg

SEQ ID NO: 4357 - DNA, 287 bp, Oryza sativa
  Clone ID: uC-osflcyp099a08b1
tgtctcgctcactagcgcacagatctcctaccaccaccaccaccgccgcagccatggcgaccgggtactaccgcggcggcggcggcgccagggaccacgccgacgagcccgacgacttcgacgagtacgaccccacgccgtacggcggcggctacgacctcttcatcaccttcggacgcccgctcccgccctccgacgagacctgctacccttgctccgttccctccaccttctacgacgccccgtactactccaacgacgagctctcctcctacgtccaccacttc

SEQ ID NO: 4358 - DNA, 460 bp, Oryza sativa
  Clone ID: uC-osflcyp099a10b1
cctggccttctgctcagctggaaatcttggcaacttgctcctgattgttgtcccagcagtccgtgacgaagatggcaacccgtttcggaaaagacagcagccgctgccactctcttgggctctcctattcatcattgtccatggctcttggtggcttgtacatatggacgcatacgtacagtcttatgaagaagaagagaggtcaaatgtatcaccagcctaacagcattcagggcctggacgacagcaatgaagaacatcatgctaagaaattcaaagcaaatggtgaagctgcttgcgccgatgaggaggcaactcttctggtgtcagctaaactggctgaacacatcgaggagaaccaaatggttggcttaacaaactttatttctttttacttgctcttctttccagacgctcctttgttttttgtatatatttttattcccattatctctcctta

SEQ ID NO: 4359 - DNA, 464 bp, Oryza sativa
  Clone ID: uC-osflcyp099b01b1
ttcccctgtaccacaagaggaggcccccaagaagtcgtatgcttcaattgtcaaagtcatgaaagaaattccaccacaaatatctgcaattccttccaggccggcaccaccaaaacaagagaagcaagttgctcctgcacctgttgctccggttgctgatgctccaactttcagtcctaatcctgaaagcagcaacattcaagaggctgaagttgatgcacatgcgatatatgtacggaatctgcttttaagtgccacgcctgaacaattagaagaagcattcaagaaatttggcgctatcaagccggacggaatccaagttagaagtcacaagattcaagggttctgcttgggtttgtagagtttgaagatcccagttcagttcaaagtgcaattgcgggttctcctgtgacgattagtgaccggcaatgttatgtggaggaaaagagaactgcttgttcacg

SEQ ID NO: 4360 - DNA, 556 bp, Oryza sativa
  Clone ID: uC-osflcyp099b02b1
ttattcccgatgcatgcccttctatagtcctcatcctccccggcgccagccaccaccaccacccgtcagccgacaggtcgctgcccgacaccgccaagcgccgtcggcgccagtcagccaccaccgccaagcgccgccgccacgccaccgaaggagcggcgccgccgccgcatacggccactcctcagccaccgtccaccgaaggaactcaacgccgccaaccccatggccatcggtgccgccgggctacgaatcctcaactatctcaatctgtcccacaacgcgccggaatgcagagcctaacggccgtcgatttctccgacaacaatctctccggcgaggtcccagcgaccggtcagttcgcctacttcaacgccacgtcattcgccggtaacccaggcctctgcagggccttcctctccccatgccgcttccacggcgtcgccacgacgttgaccttcggctccctcttgtcggcgatgaagctgctccttgggcctggcctcctcctttgatattttcatgtaacaatttaacgtactatcattatgcatgc

SEQ ID NO: 4361 - DNA, 101 bp, Oryza sativa
  Clone ID: uC-osflcyp099b05b1
gctcctccgccgtcgacggcgatgtcccgccgtagcattcatacggcgagcaagactgctcgccggcaaggaggcaagctcctgtgcgtccgtatatattc

SEQ ID NO: 4362 - DNA, 149 bp, Oryza sativa
  Clone ID: uC-osflcyp099b06b1
agtgccgccgccgccgccgccgccatgggtaaggttcacggctcgctggctcgcgccgggaaggtgagggggcaaacccctaaggaagccaagcaggacaagaagaagaagccccggagccgagcccacaagcggaagcagaacaaccg

SEQ ID NO: 4363 - DNA, 275 bp, Oryza sativa
  Clone ID: uC-osflcyp099b08b1
tcgttgatctgtagcttattagcggccatgtgcggcggagcaatcatctccgggttcatcccgccgtcggccgctgcggcggcggcggctgcggcggccaagaagcagcagggcaggagggtcacggccgacgtgctgtggccggggatgctgcggaaggggaaggcggcggcggcggaggaggactttgaggccgacttccgcgagttcgagcgtggcatgagcgacgacgaggcggaggggggcggcggcgaggaggaggaggacgacgacga

SEQ ID NO: 4364 - DNA, 411 bp, Oryza sativa
  Clone ID: uC-osflcyp099c02b1
tggtgccagagacatccactcgcgtgcgcgctttgtgcgtccccgctcgcccgccccctgcccgcccgcccggctgcttttggctgctggctcgtgcgcgcgcgctgcccgccccttgcggctccggcccccctcccctcttccttcatcggctctcccctcctcccctcgcgcccctcctcctctccttctctctcccccttcccttctctcccctcccctccctccttcctcctcccctcccccccctcccctccccccctcccccttcccctcctcctccctccctttccctccgttcctctctccccccctcccttgccccccctcctccttctctcctccccccccctcccttccctcccctcccctcccctctccctttcccccccccctctccccccccctccc

SEQ ID NO: 4365 - DNA, 402 bp, Oryza sativa
  Clone ID: uC-osflcyp099c03b1
ttcatttggaaaagtgaagattgcagagcataagcttacaggacacagagttgctataaagatcctgaaccgccgccaaatgagaaatatggaaatggaggagaaagcaaagagagaaatcaagatactgagattgttcattcatccccatatcattcgcctttatgaggttatatacactcctacggatatatatgttgtgatggagtactgcaagtttggagaactgtttgattacattgttgagaaaggcaggttgcaggaagatgaggctcgccgaatcttccagcagattatatctggggttgaatactgccacagaaacatggtggttcatcgtgatctgaagccagaaaacttgcttctggattcatgacaaatgtaaagttttctgactttggt

SEQ ID NO: 4366 - DNA, 76 bp, Oryza sativa
  Clone ID: uC-osflcyp099c05b1
atgggtgccggagacgtcgacgccagcttgtgctaccgtgtggacgatcccgccagtgcccactggagggcccaag

SEQ ID NO: 4367 - DNA, 221 bp, Oryza sativa
  Clone ID: uC-osflcyp099c06b1
cataatcgcagagaaaaaaaaaatctcccctcgaagcgaagcgtcgaatcgccttctcaagatgcagatctttgtgaagaccctcaccggcaagaccatcaccctcgaggttgagtccccggacaccatcgtcattgtcttggccacgatccaggacatggaggtcattctccctgtctagccactttttatctttgctggctagcagcttgtggtcgttc

SEQ ID NO: 4368 - DNA, 245 bp, Oryza sativa
  Clone ID: uC-osflcyp099c07b1
tactcactcctctctcgcttccatggcgctcctcgccgtccacgccatggccgtgtccccggccaccttcccctcctcccaccaccacgccgtcgtctcctcctactgcgcgctccccgccgccgccgcattctcccgctcccgctctcgcgtcgccgacgccgacgccgtcaccctctcggccccgctcactccagttcttgaagttatactgcggcagaggtgcacatgaagactccgagggg

SEQ ID NO: 4369 - DNA, 411 bp, Oryza sativa
  Clone ID: uC-osflcyp099c09b1
tcgtgcgccgccgccctcctcccccccggcgcagcagcctccggagaggcctaggaacagcgatcctgctgagtcgcaggcgcaggctggagcgagccgaacgcagaatgctgctcctgctgatgatagggcaaggaatgatcatttgaatgatcatttcgagcggcgcacggaagcggcggtaagtcatgcgcagaacgtgcctttcactgagcaaaatactaggagcaaccattcttcgcagccgtgctctgcagctggagtataccctgcacagattgtattttcagaggctgccagttaagacctctccttcaccagaagtcaatttgtctaagcttgtgatcactttttgtcaaatactatgtttcttttccatctcattttttatcatttctctctttttctttc

SEQ ID NO: 4370 - DNA, 348 bp, Oryza sativa
  Clone ID: uC-osflcyp099c11b1
acctcacaagccaggtcgtgttgggatagtatctcgctctggtaccttgacatatgaagcggtgtttcaaacaacagccgtaggcttggggcagtcaacgtgtgttggcattggtggtgatcctttttttggtctctcttttgttgcctccttcaatcctgttctcttattttctttcttctctccttctctgtttatctttttactttttctctacttttcttcttctcttttatttcttcttttatctcctcttttcattctcccctctcatttttttcttccattcttcttttctcttcctatttctttcctctcttttcctttccctttctctttctctttttc

SEQ ID NO: 4371 - DNA, 410 bp, Oryza sativa
  Clone ID: uC-osflcyp099c12b1
acctcggacgcgtgggtgagcccaagccacacgctaagtctgtgcctaagtctgagcccaagccagaaccaaagccagagccaaaacctgaaccaaaaccagagccaaaaccagagcctgaaccgaagcctgagccaaagtctgaaccaaaaccagagcccaaaccatatccagagtctaaaccggatcccaaaccagaacccaaaccacacccagaaccaaagtcagagcccaagccacagtcggagccaaaaccagagccgaagcctgaacctacaccagagtctaagcccgaaccaaaaccggagcctaaaccatacctagtgccaatgctttgaaccgaaacttaagcctaagccctgtgctaaaactagaagctccctttaagaaccacatgtttacttctatac

SEQ ID NO: 4372 - DNA, 561 bp, Oryza sativa
  Clone ID: uC-osflcyp099d01b1
aaaaaaagaaaaaacaaaaagaaaaaaagaaaaaaagaaaaaaccaaaataaaagaaaaaaaaaaaaaaaaaaaaaaaaaacaaaaaaggaaaattaaaaaaagaaaacaaggaaaaaaaaaaacacaaaaaaagaaaaaaaaaaaaaaacaagaaaaaaaaaaaaaataataaaaaaaaaaataaaaaaaacgaaaacaaaaagaaaaaaacaaaaaaaaaaaaaaaaacaaaaaaagcaaaaaaaaaaaaaggaaaaaaaaaaactaaacaaaaaaaaacaaaaaaaaaacaacaaaaaaaagacaaaaaaaaaaaaccaataaaaaaaaaaaaaaaaaaacaacaaaaaaaactagaaacaaaacaaaacaaacaaaaaaagaaaacaaacaaacaggagcaaaaaaacaaataaaaacaaaaccagaaaaaaaacaaaaaaaaacataaaaaaaaacgaacacaaagaaccaacaaatagacaagagacaaaaaaccaaaagagtaaacaaaacaaaaaaaaataaaaaaataaagataaagaaaacaaaacaaaac

SEQ ID NO: 4373 - DNA, 193 bp, Oryza sativa
  Clone ID: uC-osflcyp099d07b1
tttcttgaatccagcagcagctcagccgccgtcgatggcgtacacgatcatggccccaacctcccgcgtcctcgccgccaagacccccttcctcggccatccccgaccctccaatgcccccctccgcgacatcgacgccgccgccaccggccgtatcaccatgagcacggagctgtggtactgtcctgtcagg

SEQ ID NO: 4374 - DNA, 162 bp, Oryza sativa
  Clone ID: uC-osflcyp099d09b1
actgaagaaatctccccgtctccttctccttgcctcctccgctccttctcgcgccgccgccgccaagacgagtcgcgtcgcggctgaacaggggagggccgggcggcgatctccatctggcgagcagcggaggggagggatccttctctttctagttttttt

SEQ ID NO: 4375 - DNA, 140 bp, Oryza sativa
  Clone ID: uC-osflcyp099d10b1
actaacatatcgtattttgtagtaatttagcagctagctagtgcagctgcacgctattagcgactgcatgctttgatcgatccatctagctaattgttgaatccatccaagctctaatggctctgcagcagagcatggtc

SEQ ID NO: 4376 - DNA, 162 bp, Oryza sativa
  Clone ID: uC-osflcyp099e03b1
gatgatcgcggggccgtgcaaggcgacgaacccgatctaccggtgctggaggtgccgcgcccactgggtgacggacaggaagcggctggcgcggtgcgcgcaggggttcggccggaacaccaccggagggctggccgttaagctctacctggtgactgactg

SEQ ID NO: 4377 - DNA, 306 bp, Oryza sativa
  Clone ID: uC-osflcyp099e04b1
ttcgccgccgcctcctcctcctctcgccttctcccgtcttctccttcgagttagctacctccttattcaaccatgggtaaggagaagacgcacatcaacatcgtggtcattggccacgtcgactccggcaagtcgaccaccacgggccatctgatttacaagcttggaggtatcgacaagcgtgtgatcgagaggttcgagaaggaagccgctgagatgaacaagaggtccttcaagtacgcgtgggtgctcgacaagctcaaggccgagcgtgagagaggtatcaccatcgatatcgccctgtgg

SEQ ID NO: 4378 - DNA, 364 bp, Oryza sativa
  Clone ID: uC-osflcyp099e05b1
ttcctttgcgcgtggccaacgagggggcaccgagcagcgggcggtaggcggcgtcgagcagcgggcggcgggcggcggcggcggctcggcttcctcggctcagcggccgacaacgacgacggccgcggtgggagcggcgacggcgggcggcgggagcggctacggcagcggcggcggctcggcggccgacaacgacgacggccgcggcgggggcgacggatccgatgccgccgccgacggatccggcaccggtgacgacgatgggtggcggggccgattggatccgccaccggcgacgacgctgggcggcggggggacgggatcccgctgcgtctacgactgttgtggtgggagcagctaccgt

SEQ ID NO: 4379 - DNA, 257 bp, Oryza sativa
  Clone ID: uC-osflcyp099e07b1
tcgtaccgaagggcagctgcatcaaatcttggaaagtttgcagccacagttgaacagaactatctaaagacagaagtcatgtcgatatttgatgatctaacccaagatgatcaagattccgtacgcttgttggcagttgaaggctgtgctgctcttgggaaattgttggaaccacaagattgcgtagcacatatccttccagttattgtcaatttcttccaggacaaatcatggcgagttcgttatatggttgcctc

SEQ ID NO: 4380 - DNA, 231 bp, Oryza sativa
  Clone ID: uC-osflcyp099e09b1
atgattgcagcaatagcgggtcagtaaccgaagccgttgtataagcgaagaacccagtgacaggagcagcactgaagaacccagtgacaggagcagtactgaagaacccagtgacagagtagtggtggtgacagtagctttcaattgttgtttttgtggaggttgttagaggcctctatttttgttcctatgtctttatctttattgattatgttattcattcattttttt

SEQ ID NO: 4381 - DNA, 376 bp, Oryza sativa
  Clone ID: uC-osflcyp099e11b1
tcgtcaatccaaaatccccaacccaacccaacccaacccaaccgcactatcacgccactcttcgcccgcccgcccgccgccggaatcgccatcgcccgaccgccgccgcgttcgtgtccccacaggcggcttctctccctgcatcaccatgggttctgacttcaaggcaatccccttgatcgacattagtccccttgtcggaaagattgattatccgagcatggtcaatgacgaggatttgctgcaagttgtgcaaatgttggacgatgcctgcagggaggctggattcttttatgtgaaaggccatgggattgctgactcgctaatgaagcaagttagggatgtgacacagaagtttttttagcttccttatgag

SEQ ID NO: 4382 - DNA, 491 bp, Oryza sativa
  Clone ID: uC-osflcyp099f01b1
ttccaacgctcagcagcagcagccgcctccctccccagctcagctcagctcccccccgcatggaggcgccgccggggccggagcccatggagctggacgcgccaccgccccccgccgccgtggcggcggcggcggcgaccgccggcatcagcgagaagaagaaggaggagggcgggggcgacgccgtgacgggtcacatcatctccaccaccatcggcggcaagaacggcgagccgaagcggacaattagttatatggcggagcgagttgtaggaactggttctttcgggattgtgttccaggctaagtgcttggagacgggggaaacggtggccatcaagaaggtgttgcaggaccggcgttacaagaaccgtgaactgcagcttatgcgcgcaatgggacaccccaatgtcatctgcctgaagcactgcttctttctaaccacaagcagggatgagctgctcctgaatcttgtatggagtacgttcctg

SEQ ID NO: 4383 - DNA, 177 bp, Oryza sativa
  Clone ID: uC-osflcyp099f03b1
atgatcctccaggctctacgatccccaccgctgcgctgaccaccctcctcgtgccgatgctgcgcagaagatcggtctttggccgcctccccgccagattcggccggtgaagctgccaaggctgctgcgcggtgtggttgaccagtttctgcttgctgactcgctgtagctgatgcc

SEQ ID NO: 4384 - DNA, 135 bp, Oryza sativa
  Clone ID: uC-osflcyp099f04b1
aataataataattttagtttttttttggctttagatatatttccaattcccaaccttccaataatccgatctctcccagttctgttcggatcaaggctgtgtcgaccgcaataaagaaaataaaacatttttcct

SEQ ID NO: 4385 - DNA, 126 bp, Oryza sativa
  unsure (1)..(126): unsure at all n locations
  Clone ID: uC-osflcyp099f05b1
cgtaaagagaagaggagcggcggcgagatccaattccaatcgatccttgtgctgctgctgctgctgcgctcgacgatcccatccggatctcgatggcggncatggctcgccatcttcctgttattc

SEQ ID NO: 4386 - DNA, 102 bp, Oryza sativa
  Clone ID: uC-osflcyp099f09b1
tcacacgacgaggaggagggggacgaggggctgctttcttccttctcgcgccgccgccgccaagacgagtcgcgtcgcggttgaacaggtgaggtccgatcg

SEQ ID NO: 4387 - DNA, 363 bp, Oryza sativa
  unsure (1)..(363): unsure at all n locations
  Clone ID: uC-osflcyp099g01b1
ttcttcttctcggattctcctcctccgcaagcccagccctgacgttgtctcggacacccaaaggctgtgtttgatctccgcccgccacctgtcttcctcctcctgctgcgcgcgcgcctgcttcttcttcccgttgagccagagagcggttcttggtgcaggtgaggcaccaagatctccctcttcttcctcctgcgattcagcgaaatctttagagccggggatggcggctctgatgaacggctttgggagcctccaatgcaaggcgacggtgcatgtcgagaaagggcacatgcaagcatcgngngatggccttcttctctcccgtcaacagatgcgcccaggttcatatctccagtattc

SEQ ID NO: 4388 - DNA, 334 bp, Oryza sativa
  Clone ID: uC-osflcyp099g02b1
caagaagcctgctcaaagctcaggaaacactatatttattaaaggctttgatacttctcttgacatacaccagatccggaattcacttgaagaacattttggctcgtgtggagagattacacgggtttcaattccaaaggattatgaaaccggtgcaagcaaagggatggcgtacatggattttgcggacaacggttccttgtcgaaagcatacgaactgaatggatctgacctcggtggatacagcttgtatgttgatgaagcgaggcctaggcccgataacaacagagagggtggcttcagcggtggaagagactttaacagcagcgggaga

SEQ ID NO: 4389 - DNA, 227 bp, Oryza sativa
  Clone ID: uC-osflcyp099g03b1
gctgagtggaaaagcgaagattgcagagcataagctcacaggacacagagtggctataaagatcctgaaccggcggcaaatgagaaatatggaaatggaggagaaagcaaagagagaaatcaagatactgagattgttcattcatccccatatcatacgccttttatgaggatatatacactctcacggatatataatgtcgagattcatctttcctaactattact

SEQ ID NO: 4390 - DNA, 143 bp, Oryza sativa
  Clone ID: uC-osflcyp099g06b1
ctcggctccaccacgcggctcgcggctcccgctgccttcgtctggatcgcctccgcccgctccgtttgaccctttcgtcctcttcgcggatccggcgccgaggacggcgctcacgcgggaacaggtgaagtactgcaaggagg

SEQ ID NO: 4391 - DNA, 243 bp, Oryza sativa
  Clone ID: uC-osflcyp099g07b1
tggcgttggtagggtagccatggcggaggaggccaccctgagccacccgccgcggtacgtgaagctgagcaggccacacgacgccctcacccccgccgaggacatcctcgcgtggaaggacaaccagccagtccacgtcccgcaactcgtggacaggaggtgcagccagtgcggtcagctcctgacttagtggtacaagcccccttgccacaagccctggaccaccggtattctgacctgggc

SEQ ID NO: 4392 - DNA, 86 bp, Oryza sativa
  Clone ID: uC-osflcyp099g11b1
acctcacggacgctgatgtgatcaccatcgagaactcccggtccgacgagaagctgctctccgccttccgcgagggtgtgaagtat

SEQ ID NO: 4393 - DNA, 190 bp, Oryza sativa
  Clone ID: uC-osflcyp099h01b1
gtacggacaacgtggagccggagttcaacgagatcgtggaggcgagccgcgtggcgcaggaggtgaagcacccgttccgcaacctgctccagcgccggaaccggccgcagctggtgatcgccgtgctgttgcagatatctccagcagtttacgggtatcttcttcatttttgctctactcttcccgtgct

SEQ ID NO: 4394 - DNA, 167 bp, Oryza sativa
  Clone ID: uC-osflcyp099h02b1
ggtggctcgggaggcgaaaccctagccgcccgcgccgccgtatcccggccctctcctccacctcgccaccgccggagcttgctggcgtgctgccggcgagctgggaaggcggcggcgaggccagttgagctcggcggcatcctccttggcacgaggaggttggggca

SEQ ID NO: 4395 - DNA, 72 bp, Oryza sativa
  Clone ID: uC-osflcyp099h05b1
gtggaactattctgtgatagaaccatcggatgcgaacttcgctgatgaagccgagggagagcgctctccttt

SEQ ID NO: 4396 - DNA, 192 bp, Oryza sativa
  Clone ID: uC-osflcyp099h06b1
ctcgcctccacaaataaagctcgtcccgaggaagggcggtgacccaccccccccaatcgccaaaaccctaactccgatccgatcgagctctgcttcccatggcgactgccgcgagccaggcgagcctcctgctccagaagcagctcaaagatctcgcgaagaaccccgtggatgggttctcggcggggcttg

SEQ ID NO: 4397 - DNA, 83 bp, Oryza sativa
  Clone ID: uC-osflcyp099h10b1
gcctcggtattctatttcgtctgtgcgagcattaaaaccatccatttccgacgtcaagatcaataggaagaaaagggagtcat

SEQ ID NO: 4398 - DNA, 189 bp, Oryza sativa
  Clone ID: uC-osflcyp099h11b1
acctgcaaaaatctccatcccccccgcccccagagatccttcaatccactcgattcgatccaatccggcgaggtacaggatgctgccggggccttctctctccttccttctctctccctctctctctctctcctctcctttctcctcttttcctccctcccttatattttctctctccctttctcttct

SEQ ID NO: 4399 - DNA, 497 bp, Oryza sativa
  Clone ID: uC-osflcyp101a01b1
acgcggtctccttttccgtctccggcgatggccaccaaggccgggcgtcgctccccgtcgctctcctcctcctcctcaacatcctactcgcgctcccccgcatcgccctcctcctccccgtcgcgcagccgctcccctccccgccccgcggggggggcccgctcgccttcgccgtcgccgccaccgcctcctcccaggaaagcgtctccgccccctgagtccaccgtcctccatgttgaccatctctccaggaacgtcaatgaggatcatctcaaggagatttttgaaaattatggcgaagtcgtcaatgtggagctctccatggatagggtggtcaatcttccccgtgggtatggatatgttgagttcaagaatagagctgatgcagagaaggctcttccttacttggatggtggccaaattgatggaaatgttgttaaagtcaggattcgcgccttcaccacagcaggcaagagctgctgcttctccaaaagctc

SEQ ID NO: 4400 - DNA, 278 bp, Oryza sativa
  Clone ID: uC-osflcyp101a03b1
gcccggactgacttgctggacccacccacgcgaccttgttcacccagatgacggagccatagactgggaggtctttgttgagcgtcaggggcggaaccatggccgccgcgctcacccgcccgcctccaggcacggtccagtgcttcgggcgcaagaagacggcgggtgccgtttcctactgcaagccggggcgcgggctggtcaaggtgaacggcgttccgatcgagcttatcaggccggagatgctccggcttaagtgcgtcgcggcctatccctgc

SEQ ID NO: 4401 - DNA, 485 bp, Oryza sativa
  Clone ID: uC-osflcyp101a05b1
ccttattgtgttacagttcttgatggacctcaggagggcgcatatgaatgggttaccatcaattatctgctggggaaattgggaaagacttacgcagacacagttggagtggttgatcttggaggtggatctgtgcagatggcatatgcaattgcagagaaggatgcagtgaaggctcctaaaccatcagagggtgaagattcatatgtgaagaaactgtttcttaaaggaacaacatattatctttatgttcacagctatttgcattatgggttgctggctgctagagcagagatcttaaaagccggcaatggcaaaggttacagctactggacattggaggggcatcaagggcaatacaaatatggcaatggcaaatttgaagcgtcggcttcaccatttggtgctagttattcaaaatgcagggatgatgtagtgaaagctcttaaaggtgaccaagcatgcactcacatgaaaagttcttt

SEQ ID NO: 4402 - DNA, 193 bp, Oryza sativa
  Clone ID: uC-osflcyp101a06b1
gtatatgtttggactccttcagcctaactgacaaagtaaggtgataacaaacacagggtgctaaatggcaaggctagtgtgatctatcctgcccgatttatgacatgggcacgacagattgcatggttcattgtcaagaggaatagtcgttggatctttctgaaggtgtcacacagttcaataagtggttatg

SEQ ID NO: 4403 - DNA, 275 bp, Oryza sativa
  Clone ID: uC-osflcyp101a08b1
ttctgaccaagctgcctgagccctagccggcgcggccgtcgtcgagcgccaccaccgcaaccatggccgccgcgctcacccgcccgcctccaggcacggtccagtgcttcgggcgcaagaagacggcggtggccgtctcctactgcaagccggggcgcgggctgatcaaggtgaacggtgtcccgatcgagctgatcaggccggagatgctccgcctcaaggcggtcgagtccatcctgctcgctggggccctcgctcttcaatgtcatcaatat

SEQ ID NO: 4404 - DNA, 365 bp, Oryza sativa
  Clone ID: uC-osflcyp101b02b1
cccttttctagcactcaccaagtttaatttggagcacacatttcagctcaccactgctagcttgggaagaggaggaggagcttgagcttggagagagacaacaatggcggctcaggctcttctctctgggaggcagctgctggggaggccattgcaatcttcagtctccaggtcttcttcctccaggaaggcacccttcatggtcagggcagaggccactccccctgccaagcaaggtgctgacaggcagctgtggttcgcatccaagcagtccctgagctacctggatggcacgccttcgggagacttcgggttcgacccgctggggctatcggacccggaggggaccggtgggttcattgagc

SEQ ID NO: 4405 - DNA, 249 bp, Oryza sativa
  Clone ID: uC-osflcyp101b04b1
cttattgttactcccatctcagtctcctaattggcatcggtagcttctagctagcttaattaattaattagccatggcggaggagaagcaccacccaccacctgtgcgcaccaacaagaaggacgactagccgctcaccggaggagacatactaccgccagggcagatacacctggcagacggttaccaccaacgtggcttacctgagctggccctagttcttgaggcgctcctcggtggcgctttcag

SEQ ID NO: 4406 - DNA, 298 bp, Oryza sativa
  Clone ID: uC-osflcyp101b05b1
gaccggaacggaagtgccgacccacgccgaccacttatgtttagacgcactataacacatggacgaacgcgagatgaccgtgatcctcgttgccgcaataattccgatcatggcgagagcgccgacacgcccatgccgtgggcgaaggaaggccactctttgcagggcgagatggtggaggatactccgacgacgcagagcagcagggcggctaatgacttccttcttggtcttagctgagctgcccgtgattctcgatcgctcgctcgctcgcacttcagttctggcggcgcgcgcg

SEQ ID NO: 4407 - DNA, 166 bp, Oryza sativa
  Clone ID: uC-osflcyp101b08b1
tttatcacatctcccccccctcctctcttcttcctgccctcccacggcgactcgccgccgccgccgacgccgacgccgatccggtctccgctccaactccggcgagattggatttgggggcggagccgatccgatcggggtccatcgcacggaggaggaggaggag

SEQ ID NO: 4408 - DNA, 251 bp, Oryza sativa
  Clone ID: uC-osflcyp101b09b1
tcttgatatcaaactactgccctcactgaggataaacctgctgatgatggctacaactggcggaagtatggtcagaaggcagttaagggtggggagtttcctatagttattttatttttatcctttttattttttctcttttatatattagttcttttttttttttattcatttatattttctaacattttttcctattttattattctttctttttttattttttttacatactctctttcattttcttt

SEQ ID NO: 4409 - DNA, 258 bp, Oryza sativa
  Clone ID: uC-osflcyp101b10b1
acgaggcctccctctcgcaccgcaaccaaccaaacacgacggcgacctcctctcccccaataattcccattccttcgctctcgccgccaccccggcccgcgcgcgcaagcaaccttaccttcccatgctgctgtgatgtgtcatacgccgccgccacagagcaaccggccgtcttcttccttccttcttggtcttagctgagctgcccgtgattctcgatcgctcgctcgctcgcacttcagttctggcggcgcgcgc

SEQ ID NO: 4410 - DNA, 159 bp, Oryza sativa
  Clone ID: uC-osflcyp101c01b1
cttttgtcaacgacttcccagccgacaaggcaaggggcttgatgcagctggctagcaagggcagcccggtggctactcagaatgccgcggcacctgcaccagcagctggtccagacaacaccaaggcccctatggccgtgccggtcctgttcagtatct

SEQ ID NO: 4411 - DNA, 114 bp, Oryza sativa
  Clone ID: uC-osflcyp101c03b1
gggatttcatgaagggagttccggcctacactgcttcacagccagaagaggcaatgattgctctgaaacaaagggcttcagaattgggtgtttcactccaagtcgcccattctt

SEQ ID NO: 4412 - DNA, 395 bp, Oryza sativa
  Clone ID: uC-osflcyp101c05b1
cacccgtctaactttgtcaccaatcttcatcacgcccccaacttttgcgtaatgagcgccaccgccctccatctcaaatactttaaggacaacaatggatagagcatccctcctttcaacacctccatgaacgttcagctccaggggctcgacaaggtcaagcaaaccatctgcttctcctctaaagagtgcagggaggtcttgtccaacgccctgtgcccatttggctaattctatagacagcgactacaccataaggagctacggacccagggccttgtcaatggtggaatcaacgttccaatgatgtcggcctctccaatttttgctaatgctccagctgagaaaggtggcaaaaactccatgattgatttcctcatgggtggaggtgtcag

SEQ ID NO: 4413 - DNA, 429 bp, Oryza sativa
  Clone ID: uC-osflcyp101c06b1
cccacgcgtccgcccacgcgtccgggaggttttgtggtgcgatcttgttggggtttcaggtcagaagggagaaggggagaggtcagccatggcattgcctgtttccctcctccgcatcgcggcggttctgctcgccatcttgccattctgcgccacgcattcaagccccgggttccatgctcctcgcgagtttcacaaggcactcgtcccagatagatatggatttgtggcaagaagatcaattgctgaagctcctgttgacgtaaatgtcactacaaacagttcctttgtcttggccgcaagagcgaacatatagaaaagaccccttgaatggattcaggaaatatactggcggttggaatattatcgaagtgcactatatggctttcagttggatacacccccttttcccctgttcatcattgcctt

SEQ ID NO: 4414 - DNA, 533 bp, Oryza sativa
  Clone ID: uC-osflcyp101c07b1
ttttgcggtctcgccctcctcgcgatcgactcccctcgccccgactcaccgccggtctcctcccctccgccacagattcctccctccctcctctttgcaattccaccatcctctttccagaggggctctcacccttgctccctcccctaaccctaatctcgcccgcgcccccaccagcttctaccgctgaccgtcgcgccgtgccgccccgcctcgccctcttcaaccgccgaccgtcccgtcgccctgcatcttgcccgcgccgccgccgtcgtgttatcccgccaccgcagaattagcatggatcaggcaaaagggttgacgtgctccagtgtaagaattgcttgagactcggttgtcaagagcgctgctttgacgactttctactcggcctttcgctttactgccaccgccgacactgccgcgttgtccgacaatatttggctcatggtagcacatgggtatggtaaatctatcccaacgaaaaatggtgttcattgatcatacctctcctctcctctttatagctttgg

SEQ ID NO: 4415 - DNA, 522 bp, Oryza sativa
  Clone ID: uC-osflcyp101c08b1
ccctgctttaccactgaaccagcaggaagatcttatagtgtggatgcgtacggctgctcttccccaatttcgaaagctctatggtgtcattgaagaggatctacaggctgatgaaatcattacgatgcacatagcaaacaattacaatacctacagttttggcggcaagaaaagcctaattcttacaacatcaacctggctaggtggcaagaatgactttcttggatacgcatatcttatcactggctccttgagccttttcttaaccattctctttgctctgattcacgtgaaaaatccaaggccacacggtgatgccaattacctatcatggaataggccaaacagcaatagctaagctgcctacataactgtacgatatgtaaggtaaacatttgacaaatacagtgatgttgtttccctgtaaaaccaagactattcttctttcatatgataacatagagttcagactgaattttctggcagcgcaaatagaacacccaattttgtcattgccttttc

SEQ ID NO: 4416 - DNA, 90 bp, Oryza sativa
  Clone ID: uC-osflcyp101c11b1
ttttaatagcacaaaccaccgagaaaacgcttctcaggtaaacattatcaccatggcggcgtttcttgcctgcgctttcttcttcgacgc

SEQ ID NO: 4417 - DNA, 435 bp, Oryza sativa
  Clone ID: uC-osflcyp101c12b1
cactgagcttatcattggagcggcctcagctgaggtcccaaccagctgcagcaggagcagcagcaggggcagcctcagttcaccgcccggcgccgccgcatccatctgcattgctcgctcggaggcctcagtaatcattgttggagaaaatggttgcagaggcctttacagtagatttgaatgaacctcttgtatttcaggttggacatttaggtgagcagtatcaggaatgggttcaccaaccaattgttagcaaggaggggccaagactttttgccaacgatgtcttagagttcttaacacgcacggaatggtgggcaattcctcttatctggttgcctggtgattgtgtgggggcctgactaaatccagtcgaaatggggacacacactttcagaagtagctctgatgggttgtgtttggaatatgcctatg

SEQ ID NO: 4418 - DNA, 61 bp, Oryza sativa
  Clone ID: uC-osflcyp101d01b1
caaggattactcttaagcttaaaaaaatgtctgttagatgctggtattgattttttgcttg

SEQ ID NO: 4419 - DNA, 140 bp, Oryza sativa
  Clone ID: uC-osflcyp101d03b1
gtagtgactgcagaaacgagagctagctagccagagggtgcaagaagattctgcacccatagatcgactaccatggccacaaacccaggactcttgacggggtggccattgaagaagcttgtgagctctaaaacctgttg

SEQ ID NO: 4420 - DNA, 332 bp, Oryza sativa
  Clone ID: uC-osflcyp101d04b1
ttttgtctgcgaccaaaaatcccccgctcgcttgggcgctcctgcgatcccctcccccggcagcggaggcgaagctcactgtcgcaatcggcgcagctgaacggagcccccttgcctcgcatgacggagtactgggcgagccaaggaaacaaatggtgtgacttctgtaagatctaccatagctaataacccgctcagcactagaacacatgaaattggttagcgccacaaggacaatgccactaaaagattggcaaccatgcaacatggagggtgctgtcaaagaaataggagcagcagtacgtaccccgggcctctccagcaaatagaag

SEQ ID NO: 4421 - DNA, 336 bp, Oryza sativa
  Clone ID: uC-osflcyp101d05b1
ttgctctactgcgaccaaaaatcccccgctcgctggggcgctccggcgatcccctcccccggcagcggaggcgaagctcactgtcgcaatcggcgcagctgagcggagcccttgcccgccatgacggagtactgggtgagccaaggaaacaaatggtgtgacttctgtaagatttacatagctaataacccgctaagcattagaacacatgaaattggtaagcgccacatggacaatgtcactaaaagattggcaaccatgcaaaaggagggcgctgccatagaaaaggagctgcactaagcagtccggtccctccagcaaatagaagctatagct

SEQ ID NO: 4422 - DNA, 94 bp, Oryza sativa
  Clone ID: uC-osflcyp101d07b1
ggctggcatggcgcgcggcggggtggcggcctagcacggttgtgtgccggcctggcgcgacaacaaaacagacattgcccttctcctcccaaat

SEQ ID NO: 4423 - DNA, 445 bp, Oryza sativa
  Clone ID: uC-osflcyp101d08b1
ttattcgtagacggcgttcatgccaaaggaggaatatttttctgtcagatttggcacgtaggaagagtctctaataacacttttcagcctaatgggcaggctccaatttcgagcaccaataagtcactaaaacctgcagtaagagccaacggcatagatgtggctactttctcaactcctaggcgattagagactgatgagatcccttttgtcgtgaatgattacagggttgctgctagaaatgcaattgaagcaggatttgatggtgttgaaatccatggagctcatggttatttgatcgatcagtttctaaaagaccaagtcaatgatcgttctgacaaatatggtgggagcttagagaatcgctgccggtttgcgctagaagtggtccaagccgtaactgatgaaattggagcttacaaggctgggataaggctgccaccct

SEQ ID NO: 4424 - DNA, 485 bp, Oryza sativa
  Clone ID: uC-osflcyp101d10b1
ccgactgcgaccaaaaatcccccgctcgcttggccgctccggcgatcccctcccccggcagcggaggcgaagctcactgtcgcaatcggcgcagctgagcggagcccttgcccgccatgacggagtactgggtgagccaaggaaacaaatggtgtgacttctgtaagatttacatagctaataacccgctaagcatcagaacacatgaaattggtaagcgccacaaggacaatgtcactaaaagattggcaaccatgcaaaaggaagggtgctgccaaagaaaaggagcagcagcaagcagcccgggccctccagcaaatagaagctaaagctaaaaagagctaccaaaaagatttagagaacagtcaaaggaatgtgggacggtgacacttctgcggcacctggagatggatggggaattccgactctactccaggatactatttctgacacacttactggactttttttttgactcaaatttc

SEQ ID NO: 4425 - DNA, 301 bp, Oryza sativa
  Clone ID: uC-osflcyp101e01b1
tgtgtcgcttgggcgcaaacgcagcagtagaagcaaccccacacgctcacaagtcacaagagcgaagaagatttccccaatttctttcttacccttgccgttgctcgttccgcgagaggcagcatccaaatccgccgaatttaatcgcgccaagaccgaattttggccatttttcattcaatttttggtccaggaaccccgaatgcgccgagttcacctcgccaagacatcaaattcgtgattttttttttttagtttgcgagttcgtgtgtttcgagctcgccggagggatcttggggtt

SEQ ID NO: 4426 - DNA, 192 bp, Oryza sativa
  Clone ID: uC-osflcyp101e02b1
ctcttattttcagtttggcatcgcgtttaatggtggttgtaaccagtcgatcatgtgcggtggtgagccgaggcagatgacgctgcaagagaggggatcagctgatcctcccatataccccatcaggatacgtgtgccgcagtatgccatgaccctagtcttctccttcacaaacggggtggattgggatgg

SEQ ID NO: 4427 - DNA, 502 bp, Oryza sativa
  Clone ID: uC-osflcyp101e08b1
cgttaagctgcattgaacaaattcagacagaaacggaaagtgaggaactttggaaaaaaggtagcctgttttcagttacacgcctatcaaagtcatgagtcctaaaattagtagtattaatcacttgaactctttgagggggctatgaattctactcagtatagcaaaaacgagtggtagtatattctaatgattgggtaaacaaaatgacaattgatacaatttcttcgtacggatgtgaacactacttttgaaaagagtataaaaaagtgttgtttcttccaagggtgggccaaactttaataagtaccaggatcgaaccagtgaattactacattccacaaagtaattcataatgtctaatgaggggagtatgatctttaggcaataatcggttttgacactgttgtttcacttttgaggaaaaagacacttttttcttgctggtgtgccttgactaacgttagcattgaaccggtatttttttgatggctttgtccgc

SEQ ID NO: 4428 - DNA, 497 bp, Oryza sativa
  Clone ID: uC-osflcyp101e09b1
gtggctcttccgacgggagcatctctgtcatgaccatgcgcccggatggaggatgggactccacaacaattgagcaagcacaccctgttggggtgatggcagtctcatgggctccagcaaccgcactcggttccattgttggctcaggggaacttgtccagaagctcgtctctggtggcttcgactgtgttgtcaaggtgtgggcttttgtcaatggcagctggaagctggatagcgttctgccctccgacatgcacacggactgcgttagagatgtatcctgggcacctgttttgggcctcgcaaagtttacaatcgccagtgcctctgaagacggtaaggttgtcatctggaccaaggggaaagagggcgacaaatgggaagggaaggtgatgcatgacttcgaggctccggcatggagggtgtcctggtcactgaccggaaacatactgtccgtggcggcccgctccggcgatattacactgtggaaggaggca

SEQ ID NO: 4429 - DNA, 571 bp, Oryza sativa
  Clone ID: uC-osflcyp101e12b1
ttttctatgaggagaaagaaaccacctgatcgagcccgtatctttgcagccgcaggagaggaggacgagtcgttcgttgtgcagtaggaggcggctgctaatatgttttttgtatactttccttttatcattactctgttgtgtgagtatcttggctttctctttatttttctttttattgtttggtcttatttttttctttttttttacttttttctttctttcttttattttttttctttttttgtcttttttctatctttttttatttcttcttttttttaatttatttttattttttttctttttattttttttttctctatctttctttcttcttttttttttctatctttttctttttatctttttctttttattttctcgtcttttttatttctttctttttcttttcttttttttttctctttttttttctatctttttttttttttttcttttttattttttctttctttttatttttttttttctttttctcttattttttttttttttattctttttcttctttttttttttttttttcttccttttttattttcttttc

SEQ ID NO: 4430 - DNA, 111 bp, Oryza sativa
  Clone ID: uC-osflcyp101f01b1
cgcgccgttactcccccctcgccgagagagctctagggtttccgctgccgaatttttttttaattcggggggagagatttgaagaggcggcaccatgttggtctaccagga

SEQ ID NO: 4431 - DNA, 347 bp, Oryza sativa
  Clone ID: uC-osflcyp101f02b1
tcggtttattttgagagtgcacacacactatagcataggactactctcttctttaggagagagcacacagttccaagaaaagctctgagcttcttccattgatctctcggccatggcacggtggctacagctgccgtgcagccttctgctcgttattatgctcgtcgtcgtcactgccgtcgccgtcgacgtcgttgtccgcgacgaccagaagtgcgccgagtgcggcctgtccagcccctgtggcacgacttgcacgtactgccagcccgccgccgcccgacgtgatgtcgactccggtttactaaccctccgccgcctcccgtatactaccccccgtcgttccc

SEQ ID NO: 4432 - DNA, 328 bp, Oryza sativa
  Clone ID: uC-osflcyp101f03b1
acgcgctctattaccagcagctcaagcagcaacagttcaaacggaggaagatctcatcgccatgaccaccggcaatggcgacgcaccggtgatcaagaacgcccacagcgacattgacagcaccaacaagacgctgttcaagagcgacgccctgtacaagtatgtcctggacacgacggtgctgtccacgggagccggagtgcatgctcgatctgcgcctcatcacggacaagtaccagtgggggttcatgcattcgtcggcggatgaggcgcacctgctggggatgctgctgaagatggccggagcgaagaggacaatcgaggcggg

SEQ ID NO: 4433 - DNA, 192 bp, Oryza sativa
  Clone ID: uC-osflcyp101f05b1
tcttcttagaccactcgtttcctccacaaagagggagggaacaagggaagggtgtcgtccgccccccaccccgatctgcctccgccgctccgctcctccgcgcctgcgaaatctaccaacgctaactcagcaagatgggtgccggcggcaggatgacggagaaggagcgggaggagcagcagaagctgctcg

SEQ ID NO: 4434 - DNA, 140 bp, Oryza sativa
  Clone ID: uC-osflcyp101f06b1
ggttaactagtcaaagccggtctgtcattgctggagaaatggattactgatgccacggatgagtttgcaggaacatctatgcatgagctaaattatatcagacaagctgtcggatttttggtcatacataaaaaaggaag

SEQ ID NO: 4435 - DNA, 100 bp, Oryza sativa
  Clone ID: uC-osflcyp101f08b1
cggacgcgtgggctacagtaaaattcccctttctcgacccctcttcctcctcgattccggcggccttgtcgccggtgacgggagggagagatttattatt

SEQ ID NO: 4436 - DNA, 432 bp, Oryza sativa
  Clone ID: uC-osflcyp101f09b1
aatcagaacaaaatgaactgaggtagatttgccatttttctcaaccgagcaaggtataggaactgaacaagaccggcatatgggaccggcattgaacatgagaaatggtggctactgcaagtaccacagttcctaccagtaaataacacccacgtcctgcaatccgccatcctactacacacgcacacgagcaagaagtaatactatgccactaaccgttacagtgtttgcccgagactcaacaagtacacactataacacacaagctagccaccatttatgcccagaagcttgagtagacgtgcacttattatcttggctagtgctagtagaaacttaagctgaacaggactctgagtctgcgacatgcagaggtaatatattgaacacaggagggaacagcatccacctcatatatgaatttcaaaagct

SEQ ID NO: 4437 - DNA, 189 bp, Oryza sativa
  Clone ID: uC-osflcyp101f10b1
gcatagaccactcgtttcctccacaaagagggagggaacaagggaagggtgtcgcccgccccccaccccgatctgcctccgccgctccgctcctccgcgcctgcgaaatctaccaacgctaactcagcaagatgggtgccggcggcaggatgacggagaaggagcgggaggagcagcagaagctgctcg

SEQ ID NO: 4438 - DNA, 114 bp, Oryza sativa
  Clone ID: uC-osflcyp101f11b1
atgcgttgtaactaatcaaagagcttgtggaattggtggagagatgtattactgatgctacggtttaattttaattaatattttttatattatcttattttttttaattatttt

SEQ ID NO: 4439 - DNA, 214 bp, Oryza sativa
  Clone ID: uC-osflcyp101f12b1
ttatataaaaaaaaaagaaccattaaacctacaaggagcagtattaaaacacacaaggggtcccaatccacgcaaaagagttcagattcccttttgggcattgttcctgggcttcgatggttacccacgctcggtcttcctcgagctcgggacctatccgggatgcttcctggtgataggcgccgatttttcccagggttcttcctttcatgcc

SEQ ID NO: 4440 - DNA, 347 bp, Oryza sativa
  Clone ID: uC-osflcyp101g01b1
gtttctttcaaggaattggcagccacagagaaatgtgcggggaaagattcaatctgtccagtttgcttggaatgcccacataatgctgcccttctactttgttcggctcatgataaaggctgtcgttcatatatatgcgcaaccaattaccaccattcaaactgtcttgatcaactcatagattcgcggagaagctcaaaagattgtgaggacctagactccatagagcttacatgccccctttgccgtggcgaggttaagggatatacattggttgaacctgcttgggaacagttgaaccaaaacaagaggagctgtctgcaagatggctgctcatacatgggtag

SEQ ID NO: 4441 - DNA, 480 bp, Oryza sativa
  Clone ID: uC-osflcyp101g04b1
ttttgttgtcaggcctagctcctgctagaatccacccgggatgattaagtaccatcgtcgccatgactgcaatggaccatactgacacgtgaaaaggaagagctttctaggcggttcttacacacctttgcagcaggtgttcatcatacagatgtgttctttcctcttaagtcgatatttgacccaaaactgtcccatttggatataggacacttggctttctccttccatctctttttctcttctatattcctttctgaatgagatgagagttggtgtttcgcggatgcacaaatgctccttagccgttgcacatatatttggcgttgcctcggttttgttcatcctgtccagccgattgtattgtctccttctggatctcaagctcgaactaccattgcctgaacgaatttacttgttagcgctgagaaggtccaaaatttcgattggtgtccttccgaccacacaacagcttgacta

SEQ ID NO: 4442 - DNA, 114 bp, Oryza sativa
  Clone ID: uC-osflcyp101g05b1
tcgtgttgtcagtcctagctccaggtagaatccgtggttgttgatccaccaccacggagcgcatgtgcggattggtacagattacaggggaattaagctgttcttttatgccga

SEQ ID NO: 4443 - DNA, 290 bp, Oryza sativa
  Clone ID: uC-osflcyp101g06b1
gcgtattagtatataatgttgtgctgccctgtgccttagttgtagcgcctgtctttgtattgctgctgataccgctgattcttagctcttgctggcattccttgttcgagttattgcctgtctccaattggaggtgacaattgcagcttgcagctagctcaaatttccattttttgtttggctgcctctcggcagcaaagcagatatagagcagaggaaagctaagttaaatttagtttgttagaatactagtttctggcagccgggtgatcttaattctatctctcgac

SEQ ID NO: 4444 - DNA, 313 bp, Oryza sativa
  Clone ID: uC-osflcyp101g09b1
atgatctccaactcaaagacaacagagcacttcagaggatctctagcttgcccgtattgcagtctctcaccattgacaactgcccaaagttgaagcatgtttcaggccttgacacactgcagcatctcaggctggcgttccctccatccacagagacattttattttgatgagctgatcatcttctggagtattgcattcccacggtggctggagctggtgatccgtaagcgcgatgggctgtgccatttcgagcttcagtgcagcctctcattgttcatgagctgtctggacggtggcaagaactggcgcat

SEQ ID NO: 4445 - DNA, 395 bp, Oryza sativa
  Clone ID: uC-osflcyp101g12b1
tttttcctctaatctcaagtctctgtctcgtcgggctcgcatctccactcgccatgggcaagattaagatcggaatcaacggtttcggaaggatcgggaggctcgtggccagggtggcccttcagagcgaggatgtcgagctcgtcgccgtcaacgaccccttcatcaccaccgactacatgacctacatgttcaagtacgataccgtgcacggccaatggaagcacagcgacatcaagatcaaggactccaagactctgctcttgggcgagaagccggtcaccgttttcggcattaggaaccctgacgagattcctggggctgaggctggtgctgagtatgtcgtggagtccactcggtgttttcactgacaaggagaaggctgttgctcactt

SEQ ID NO: 4446 - DNA, 415 bp, Oryza sativa
  Clone ID: uC-osflcyp101h03b1
gaataaattgatgaaatcaaacggccagagctgaaaaactggcaacttaagaggctggctcgtgctctcaaaataggtcgccgtaaaactagtataaagaatcttgcaggggaactaggcctggataggactttggtcattgaattgctccgaaatccacctccaaaacttctattcatgtctgattctttgcctgatgaagacccttctaaacctgaaatcaaggaaatagagccctctccagtagttgataacgctgatgtcactgaaaccaagccacagacggaacttcctgttcatgtcatgtgcgcagaatggtcttcacagaaaagattaaaaaaggtgcaactggagacattagaaagagtctactcccgaaccaaacgccctacaaatacaatgatcagcagcatag

SEQ ID NO: 4447 - DNA, 377 bp, Oryza sativa
  Clone ID: uC-osflcyp101h04b1
ttttataaatttttagttccatccaaacagcccgtgagggtgacttttttttacagccatgcaatgatttagattaaacattaaataagatcatgtcacagttgttttattgtttagaaaatgaaaggtggcccaaactgccactaactccccttttttttttgttgatatccttcaggaaaaaccccatgttagtttgaagatttgaacttagacatatgtataattggtgaaaaaaaaaaattctagaagaaacttctataccggggccaaaacttcgtagatattcttactttcatggacgtatgtgtgcaagtcaactaactatttatgtgtgctactatgcacaaatgcagtgtgaaggaaactattgagag

SEQ ID NO: 4448 - DNA, 127 bp, Oryza sativa
  Clone ID: uC-osflcyp101h06b1
ggttattactgacctctgagaaagaagacattgaggggggaataaacacaatgccattggcccgttgaggaagggtgagagtcaattaattgttaacaagaattgaccatatagagaggtttctttt

SEQ ID NO: 4449 - DNA, 381 bp, Oryza sativa
  Clone ID: uC-osflcyp101h07b1
gcattctctttctgtgtgtagtgtgtgcaactaggaggcttgttccatactagtttgctaggtcatggaaaagagcgagattttcgtaggagcacactcatatgcagctatatgtgcttttacactcatcataggatggttagctcactgggtatacagatggataaatcctccatgcaatgggaggcttcctccgggctcaatgggcttccctattgttggtgagaccttccaatttttcagaacaagtccatcaatagacatgccaatttactacaagcgaagactggagaggtatggacctatatttaaaactaacataggagggcagcacgtggtcatatcctttgatccccgagtgaaccagctcatattttcaac

SEQ ID NO: 4450 - DNA, 341 bp, Oryza sativa
  Clone ID: uC-osflcyp101h08b1
ggataataagagcaaacacatgagagacacttgcgggagccttactaccggcggctatgaagaagctgctgaatgaagggcgacgagggaggcgtaggcgccatccttgatgttcatcaagacaaacggtgagcaacgatcacggttgtccggttgaccatcactctgtccagcgcgttttgaaccaccctttcggattcagcatccagcgcactggttgctttatccagcagaaggatcttgggatccctcacaatcgcacgagcgaccgccactccctgctttcggcctccagacaacttagctccccgctctcctactgctgggccatatcccttcca

SEQ ID NO: 4451 - DNA, 415 bp, Oryza sativa
  Clone ID: uC-osflcyp101h09b1
agttttctctcccccctcgctgtcgatgccgccctgtccgttgttgatcccgctcacccggacctcctcgacctccgagatatccgcgtcgttaagaagcttggtggcaccgttgacgacactgagctcattcgcggcctcatcttcgataagaaggctagccatgctgctggaggaccaactcgggtcgagaatgctaagattgctgtcatacagttccaagtttcacctcccaagacagacatcgagcagagtgtcatcgtatcagattacgcgcagatggatcgcatcctccgtgaggagcgcaattacattcttgggatggtgaagaagatcaaggcttctggatgcaatggtctgctcattcagaaaagcattttgcgtgatggcagtactgatttgtcacttcattatc

SEQ ID NO: 4452 - DNA, 481 bp, Oryza sativa
  Clone ID: uC-osflcyp101h11b1
tggtacttgcccaagtgggccttcgagaaggggtgggtctagcgccgcatcgacgagcgtcatcgaccctcgcatcgtccaggccgaggcctacgacgacgaccccgccagcctcgccaccgtcgagcgcatggtcaagacggccatgtggtgccttcaggaccgcgccgacatgaggccctccatgggcaaggtcgccaagatgctcgagggcaccgtcgagatcaccgagcccgtcaagcccaccatcttctgcgtccaggacgactgatctctcctaggagtactccacttcttgccacgagagacacacaaattatctttcttatttattatactagtactaggtcagatcagatcagagcagagcactgcatattctgcgttgtctgatttgcctgctgggctcacgacagcaactgagcaaggcaaatgtacatgatgagcggattacgcttcaaaatggtccgccccatcaaat

SEQ ID NO: 4453 - DNA, 541 bp, Oryza sativa
  Clone ID: uC-osflcyp101h12b1
gacatcacttaggaagcatcgctcattctttggactgggcatgtttcacatcgtgttcttgaaagaagtcgcccattctttgactgttaaagcaagagtttctcgttgatattctaatacctgaacacaggaatacatcatacagatgttgaatgccccttcactccagatttgaccaaatactgtcgcatctggatataggacacttggaagttgcgtgtcgtttctttttcttttttattttctcttgagatgagatgagaagtggtgttcgtggatgcacaaatgctccttagtcgttgtacatatatttggcgttgcctcggttttgttcatcctgtacagtgtatgtatgtcgcctcctggatctcaggctcgaatttgtattgtctgaacgatgttactgctagtgctgagatggtccaaaatttgcatttggtgttcttcggacgacatacagtttgactattaatgctgaatctgcttgcttcagaaaaactaccatatatatctatcatattttccttttttttctcttttt

SEQ ID NO: 4454 - DNA, 267 bp, Oryza sativa
  Clone ID: uC-osflcyp106a01b1
ggcatctatgttatctttgacacaagagacaaaaggctagaagagttcgatagctggctgcacggtttcattgacacgcagcaacctggcttcacgtggtcaagttcactccactgcttgctctatggaataataaaaataaaaagtctagcttccatcagtttgcaggtcatgtgtgcgaatacctggctagcaagttatgggaaacgaatttgtaaacaggcgtatgagtacagaatctcatggcatttctccccgtctccatcg

SEQ ID NO: 4455 - DNA, 225 bp, Oryza sativa
  Clone ID: uC-osflcyp106a02b1
gaccattctatttctgagctcttatagttcgagtgagagagcagcttaagggggtagtgcaagaggccaatccgcactatcggcgctgggagccaccaggaggggtcccacccgggagcactcaaggcagcgccggacgagatcatctgcaccctcatcttcgtgttcgccagccagggctccaccatggcctgcagctaggggaccggcggttgatcgccgact

SEQ ID NO: 4456 - DNA, 456 bp, Oryza sativa
  unsure (1)..(456): unsure at all n locations
  Clone ID: uC-osflcyp106a05b1
ccctctctttcgccgaggtgtccctcccgcacaatccatcaggaaaggtttttagcacagaggaactgcttatcattgctcaagcttgtcagaaaatggactgctttgcaataactgatgaggtttatgagtacattacttacgatgagaacaagcatatctcattggcttcgcttccaggaatgccagaaaggaccatcattaccttcctcactgtcaaaaacctacagcgtaactggttggagacttggatgggcttgtgctccagctaatatctgcctcatcaataagaaacatccctgtcatgctaactgattcaacccctgcaccattccaagaagctgcgttggttgcgttaacaagcccaccagaccncctattcatccttgaaacatgactacacggcgagaagagacttcatccttcaggtgcttactgattttggcttccgcatta

SEQ ID NO: 4457 - DNA, 187 bp, Oryza sativa
  Clone ID: uC-osflcyp106a07b1
gtcgtttcgtttcttctcttcttccatcttcggggtgttgaacctcctcctcctcggtatattagctctcgcatatcagatcggagaagaaggcgatggcgtccaactacgtcgacaccaccggcgacgagggcaggttccacggccaccacagcaccaacaccacgccgacgggcgccgcggcgtc

SEQ ID NO: 4458 - DNA, 109 bp, Oryza sativa
  Clone ID: uC-osflcyp106a08b1
ctttccgtatttcccttgtctaccctcgcgtccgttctctctcgcgctgcttctgcttgcatcgtggtgcgaggagggtagaggaggttctcctcctatctctcccatc

SEQ ID NO: 4459 - DNA, 483 bp, Oryza sativa
  Clone ID: uC-osflcyp106a09b1
gagcgggttcgccagctcgagctgtttgctgggggggttcttgtttttctttgccgggatctctgggtgatggctgctgctgcggcggcggagacgtcggaggcgtccacggtcgggctcgcgctcgcggaggccaacatcaactggcagaggttggacaagaccaggttccatgtcattggagctatcctatttactgctcagcaaggtgttctgcaccctacggccgttgtgaagaccagaatgcaggttgcagaaggagggctttcacacatgtctggcttttctgttttcagaaggatattgagaagtgatggcatccctggtgctttcagaggctttggcacctcagcagttggagcactgcctggccgggtctttgctctgacttcattagaggtgtccaaagaaatggcattcaaatactctgaacattctgatatgtcagaggcatcaaggattgctgtagctaatggtatagca

SEQ ID NO: 4460 - DNA, 180 bp, Oryza sativa
  Clone ID: uC-osflcyp106a10b1
acttgttctgcattcatcttgcagtgttatatatatctgtgtctgtcagctaaactcaccttgagcttacaatgatgggcttgcaggaatccagcatcggtggtcggacggccagcttcttccactaccagaggctggaatgccgggatgacggtggcccgccgcggccatccaggtggc

SEQ ID NO: 4461 - DNA, 102 bp, Oryza sativa
  Clone ID: uC-osflcyp106a11b1
gtatctgctgaataaatcaagcaaagagaaaaaggagtgggcatctgagaaattcgcagggcgcctagcgcggtggcgatgtcgaacacgagggtgttcttc

SEQ ID NO: 4462 - DNA, 142 bp, Oryza sativa
  unsure (1)..(142): unsure at all n locations
  Clone ID: uC-osflcyp106a12b1
gtacctgatcggcgacgtcatgggtggcggcgtgggggtggtcgacagagagagcatagaggacnaccttttcagcggagccggaaactgcgacgacaggcccgtactgacggcgcccgatgccatgaaggaggagggcatc

SEQ ID NO: 4463 - DNA, 96 bp, Oryza sativa
  Clone ID: uC-osflcyp106b04b1
ctcactctctcctaactaacaatggctcactaccaggaggtggactactgctcggaggaggcgagggcgttgacccccaccggcggcttcctcgac

SEQ ID NO: 4464 - DNA, 167 bp, Oryza sativa
  Clone ID: uC-osflcyp106b06b1
gtactatcttgttgcgtgctcctgatcatatcgctgcctctgcaccggcctagccatggggagccgaggacgacgcggcggcggggagagagagaccgagacggaggaggatgagacgtggaagctgcgggtgggcgacgacttcaccgtcccggagcgctttcacc

SEQ ID NO: 4465 - DNA, 416 bp, Oryza sativa
  Clone ID: uC-osflcyp106b07b1
ctcttttccattttgggccgttccacttattgcaattgtgctgccctgggttgtctttggtggaatttacttcaaaaagaaaaatgtctatgatttacaccatggcatactggggattctatattcggtacttataactgctgtgattactgatgcaattaaggatggtgttggtcgtcctcgcccagatttcttttggcgttgtttccctgatggaatacctaagtttgataatgtcactacaaatgtcatatgccatggagaaaagagtgttatcaaggaaggccacaagagctttccaagtgggcattcttcatggtcttttgctggtctaggttttcttgcgtggcacttggctggtaaacttaaggcttttgatcgcaaaggccacattgcaaaggtatgcataggatttt

SEQ ID NO: 4466 - DNA, 228 bp, Oryza sativa
  Clone ID: uC-osflcyp106b09b1
tttgatcttaccttccctccccaaatctcgctcggaggcctgttccttccgacttgagacagaatggcgctcaatgaggagcacacatacgtggagctggagaaggagccttactggccatttgagaagctgcggatcttgattacgggagctggcgggttcatcgcattccacatcgcgaggcgcctcaagagcgagggccactacatcattgcttctgactggaag

SEQ ID NO: 4467 - DNA, 558 bp, Oryza sativa
  Clone ID: uC-osflcyp106b10b1
cggactcgtgggctgggaatgaggaggagaagatgagggctgcaattggtaagtttggcctgtctgggaaggcgcaggtgatgccaatgaggaatctctctgatgggcagaggagccgcgtcatctttgcgtggctggcttacaggcagcctcaactgctgctgcttgacgagccgacgaaccatctggacattgagaccatcgattctctggctgaggcactgaacgagtgggacggtggtttggtcctggtgagtcatgacttcaggcttatcaaccaggttgctcaagagatttgggtgtgcgagaagcaggcggtgaccaggtgggaaggtgatatcatggacttcaaggagcacttgaggagcagggctggtctctctgactagttctatctgcccttcgtttttatcttcctctcttgacagctcctcggaggtttattataatagccaaaccaagttctggcttggatcttggagtctaatttatttgtagtagcctgctatcttaattatcactattgcacttggagagctataagagattatatatttt

SEQ ID NO: 4468 - DNA, 455 bp, Oryza sativa
  Clone ID: uC-osflcyp106c01b1
tgcttttgctgagtgtcaagggcttgttgcgaacacagctgaattatatgatctcagcaggattggtaggttcttagacacttggggaatcatcaattaccttgcgtctgggtcggtgcaccggggtctaaggatggcaacatcgcttctaagggaggagccaaccggggagttgcagctattgactgggccactgtaatcaattgctggcctaattttgtttgatcgaccgaaatgtatcctccaagcagaggacatttcttcattggcatcaaattcggaggtgcgtcattctgacgctgggcttgccgaattggacgtaaagatttgggagcgattattataagagtctcgccgtattgctttcagcccttgaccagtccgcactttctggcactataggagtgctatatcgcttttgccttgatctgctttctctgccccgagttattctc

SEQ ID NO: 4469 - DNA, 92 bp, Oryza sativa
  Clone ID: uC-osflcyp106c02b1
caggcatttttgctcacgtccctctctgctctcgattgattcgttgggggttcggagggttgagtgctcaatcgcttagactgcgtgaatca

SEQ ID NO: 4470 - DNA, 484 bp, Oryza sativa
  Clone ID: uC-osflcyp106c04b1
ccttctcctccggctcttcttcagtatcgaatcctctcttgtgctcgtgcccaccaccaccaccgtagcaatggcgggcaacgggccgatcaacaaggaggacccgctcaactggggcgcggcggcggccgagatggccggcagccacctcgacgaggtgaagcgcatggtggcgcagttccgcgagccgctggtcaagatccagggcgccaccctccgcgtcggccaggtggccgccgtcgcccaggccaaggacgccgccggcgtcgccgtcgagctcgacgaggaggcccgcccccgcgtcaaggccagcagcgagtggatcctcaactgcatcgcccacggcggcgacatctacggcgtcaccaccggcttcggtggcaccttccaccgtcgcaccatggacggtcccgtcctccaagtcgagctcctcaagcatctcaacgccggaatcttcggcactggctccgatggccacacgctg

SEQ ID NO: 4471 - DNA, 529 bp, Oryza sativa
  Clone ID: uC-osflcyp106c06b1
caagatgagtgagagcaccaaggacacgcgactagcagaaggggagcgaccgcctcctcgatccatatcttccggtcgagttcttggtcgatctcttccctcctccacctcctcctcacaggttcttggtgtagcttgccactttcaccagcaaagtttcatgtctgatctcgacattcagatcccaactgccttcgatccctttgctgaggccaatgctggagactctggtgcggctgcaggatcaaaggactacgttcatgtacgcatccagcagcgtaatggccgtaagagcctgaccactgtccagggattgaagaaggaattcagctacaacaagatcctcaaagatctcaagaaagagttttgctgcaatggtactgttgtccaggacccagagcttggccaggtcattcaacttcagggtgatcagaggaagaacgtatcaaactttcttggtcaggccggcactgcgaagaaggaacacatcaagaatcatggtctcctgagcaactgccacaaccattgc

SEQ ID NO: 4472 - DNA, 88 bp, Oryza sativa
  Clone ID: uC-osflcyp106c07b1
ccttgttctccgcgaccgtctccgcgatctcggaggccatcaccgccgggatactccgcggagtctgatcctactccggacccgtctc

SEQ ID NO: 4473 - DNA, 454 bp, Oryza sativa
  Clone ID: uC-osflcyp106c08b1
cttagtctggagtttcttggagacgctgttttggagtatgtgataacttcgtacctctactctacttatccggatataaaacctggtcaaataacagatctaagatcgttagctgctggtaatgattcgcttgcttatgcggcggttgagaaatctatccataagcatcttataaaggattcaaaccatctcacgtcagcaataagtaaatttgagatgtatgtgaagctctccaattcagagaaagacttgcttgaagaaccagcatgtcccaaggctcttggtgatattgttgaatcttgtattggcgcagtgcttttagattcaggcttcaacctgaactatgtttggaaggcaatgcttatgcttctaaagccagtattgaccttcgccaacatgcacactaatccgatgagagaacttcgagagctttggcagtgtcatggatttgagt

SEQ ID NO: 4474 - DNA, 96 bp, Oryza sativa
  Clone ID: uC-osflcyp106c09b1
gttggtatctactccccctcccggttcggttcggttcggttcgggtccggttcgatttcgatttttccttcggttcgggagctggtgggaaagcaa

SEQ ID NO: 4475 - DNA, 323 bp, Oryza sativa
  Clone ID: uC-osflcyp106c11b1
gtgagtagcggcgcaggcagatacaccggcagaggagcggcatggcccttcaggatgttgaggaagaagcgagtgccaacatgttcgccgccaccactgacagcgaaatgggctccagcaccgagcgggtgcccaagaggctgaccgatggagacctcgatgagctgaggggatccatggagctcggctttggattccacgaggagaatggtgggcagaacctctgtgacacgctccccgtcctcgacctctacttcgccgtcaaccggcagctctcggagcccaagatgcgtttgttcactagcttcttgccattacctaca

SEQ ID NO: 4476 - DNA, 368 bp, Oryza sativa
  Clone ID: uC-osflcyp106d01b1
ttcaattcttcatcccctcttcgctctcatcaacaagcaaatcgagaaaaaaaaaaagaaggggagaaaaaataatataataacagaaaaggagatgaaaaaggagttccccggccaagcgccgacgagtcggttacactccgagatggacgcggcggcggccggcgggggcggggcggcaaagcggaagcgcagcttctccgaggacgacgcctacctcatcctgcacaggtaaatccatctcccccatctctctctctctccgttctctcgccccgcggcggaggcggcgggtcgtttctagggtttcgtttcaccggcgcggcgctgcccccccccccccccccccgaaccttgcaggttccagc

SEQ ID NO: 4477 - DNA, 421 bp, Oryza sativa
  Clone ID: uC-osflcyp106d04b1
gcttgttgtggacacttcatgttgcggcatttgcagtatcaggctatgcttcaactgaaggtcggcaatgcaaaccgttcaatcctttactgggtgaaacatatgaagctgattatccagataaaggacttcgattctcttctgaataggacatgtatcatccagagcccacccgcgtttcgagtgcgacttctagccctattcctaaacctatgtacctctataatatctacaactttataactaacctgtataatttttgcccttttttttctttcttcttactaccccctgtatttacgttattctgtcttacgcctaaactgtttgtgacaataatatttatttgcattttaaaaaaaaaaaaattttacttcatttccttcttctccttatatatttccaagttttacccccccct

SEQ ID NO: 4478 - DNA, 278 bp, Oryza sativa
  Clone ID: uC-osflcyp106d06b1
tcaggttgttaccacactgccataggcagattgccacctaggggccacacatttccttgccttgcagcctccaacatggctctaatccctgttgagcggtgcagatatgctaattaggtgcatcacaaactgtcatacttgccagttgcttgacaaaatgattgacttcttaaactttgaaccatttgtgcatgtactctgtccttctgctggataaactgtagtgcttgtgagagtgacgtggtaattccatttaacgtcaaaggtggagtctaggg

SEQ ID NO: 4479 - DNA, 65 bp, Oryza sativa
  Clone ID: uC-osflcyp106d07b1
gttggtccagcacacagagggtccgagggtggacaagtacaaggagatgctggtgaagaacgctc

SEQ ID NO: 4480 - DNA, 66 bp, Oryza sativa
  Clone ID: uC-osflcyp106d09b1
ctgtttatggcagggaaagccggcggcctcaagggcgtcgccctcatcggcggcatcgtcttttac

SEQ ID NO: 4481 - DNA, 337 bp, Oryza sativa
  Clone ID: uC-osflcyp106d10b1
ggctccgtcgtgctccccgccgacgcccccatgcgcaagtacatccgttactaccgcgacttcgtgctcgagctcaacaaggccctcgccgccgaccaccgcgtcgagatctgccagctccccgtcggcgacggcatcaccctctgccgccgcgtcaagtgagcccaccgccgtcgcgagtgcgactccggccgatgcccaagaactagtcatttataaatttataaattataactaaattgtataattttgccctttttttttgtaatttgaaaggtactggaaaacgttatttgatatatgtataaatgttgagacaataatattattgcattat

SEQ ID NO: 4482 - DNA, 408 bp, Oryza sativa
  Clone ID: uC-osflcyp106d11b1
gtcgtttcgtccttgcccgatgggacggcggagaggcgctcctctgcatggtttatttacgcgtttattggtgttggtgtaatactcttcattacatccatctttggttgcgctggagcatcgaggggcgggtgctgcttatccttttattcgttcctcattattctgttcatactggtagagcttgctgcaggaggtttcattttcttcaaccatagctggaaagatgtaattccagttgataaaactggtaactttgacatgatgtacagctttttgaaggagaattggagaatcgcaaagtgggttgcacttggagctgtactatttgaggcagtgctggtcactgtagctctcatagtgcagtcaggcaatcaagcagactatgacagtgatgacgagtacatt

SEQ ID NO: 4483 - DNA, 403 bp, Oryza sativa
  unsure (1)..(403): unsure at all n locations
  Clone ID: uC-osflcyp106d12b1
ggagttgtggcagtgtgcagggccgccgggaaagggagggaggtgctcancggcgtggtggtccagccattcgaggagctcaagggggagctctccctcgtcccccaggccaaggaccagtctcttgctaggcaaaagttcgtcgacgagtgcgaggccgccatcaacgagcagatcaatgtggagttcaatgcatcgtacgcgtaccactcccttttcgcctactttgaccgtgacaacgttgctctcaagggattcgccaaattcttcaaagaatccagcgatgaggagagggatcacgcagagaaactcatgaagtaccataacatgcgtggaggcagggtgcggctccagtccatcgtcacacccttgacagagttcgaccatcctgagaaaggggatg

SEQ ID NO: 4484 - DNA, 478 bp, Oryza sativa
  Clone ID: uC-osflcyp106e02b1
gttctctcgtgacaggaaaagttgtgattgccaaaaacccttgcctccacccaggtgatatacggattctccatgctgttgatgttcctgttttgcaccacatgtttaactgtgtcgtctttccacagcaaggacccaaggccgcattctaatgagtgttcagggagtgatcttgacggggacatatattttgtttcttgggacccatctctcattccgcctcgtatggtgacacctatggactatactccagcaccaacagaaacattagaccatgatgttacaattgaggaagtagaagagtacttcacaaattacatagtcaatgagagttcaggaatgattgccaatgcacatgtagtatttgcggataaggaagaccttatggcagagagttcaccatgcattgagctggccaagctcttctccattgctgtcgacttttccaaatctggagtgccatccctttttcctcctg

SEQ ID NO: 4485 - DNA, 202 bp, Oryza sativa
  Clone ID: uC-osflcyp106e03b1
ctgcttgagaaccggatactatgatgaggcaagacaagttgcccaatcatctcgtgctgcattcaactttgctcccctgcttgtagaatggattactactaatggtgctgaatccccagagactgctctgacagcttctgaggaatgtgacaaaatgctgagaatgggcgatcgacctggccgtcctggttatgataggaag

SEQ ID NO: 4486 - DNA, 253 bp, Oryza sativa
  Clone ID: uC-osflcyp106e09b1
tttatttctcgagcgcccgccgccgtcgagcggggtgcagcgccgtgcgggcagacctgctccttacacctgcctgcatcatcgctgcttgaatcgatccgaagcattgtaaatggctgctgggaggggcatcaattcagctgttgaagaaagcatgtcggccatatagctgatcgccgctgtctcgattctggatacatgacgaagagtcctctggccacactggatcgcgagcattggctattctgggagt

SEQ ID NO: 4487 - DNA, 311 bp, Oryza sativa
  Clone ID: uC-osflcyp106e11b1
ttcctaccgtgtggtggactctccctgctgtctagtgagtggggtgtatggctggactgctaacatggagaggatcatgaaggcccaggctctgagggactccagcatggccggctacatgtcgagcaagaagaccatggagatcaacccggagaattccatcatggacgagctcctgaagcgtgccgatgctgacaagaacgacaagtctgtgaaggacctggtgatgctgctcttcgagactgcccttctgacctccggcttcagccttgaggaccccaacacctttggcaccaggatccaccggatgc

SEQ ID NO: 4488 - DNA, 173 bp, Oryza sativa
  Clone ID: uC-osflcyp106e12b1
atctctgccacccaaaagaccgttgatggaccgtccaggaaggactggaggggtggcagggcggccagttttaacatcattcccagcagcactggtgctgccaaagctgttggcaaggttcttcctgatttgaatggcaagcttacgggaatgtccttccgtgttcccactgg

SEQ ID NO: 4489 - DNA, 589 bp, Oryza sativa
  Clone ID: uC-osflcyp106f01b1
cctcgtttgtctttgcccattgccattaccattgttgccttttggtggtgcttctcgaggtggatgccattacctttgcacaaaggaaaggaggaagatgaagaaaaggaagggtacaaaagcactagctttttccatgctaattgctccattaccattactaggaacacattaaaaatacagacaggatatgtatacatctttaattagtgaccaccccctccctctctctcttgtgttcaaccttctatatagtcttttttttttcattttgagatgtttcaaattttagatgtctttgagcagacttgtagctaatactcctagtggattagcagtgatgataataagtagctggtggtgcttaagttttgtgatggctgctactaactggtggtaccaggattagtgctactttgttcagctcatcttgtaatatggatgctagaagagggcatgaatgatccttgcttattactcccggttataataatttaatttattctctattacactttcttttctcccttcatttttctcatactcaactccataatctacactctctcattaatacccttctacttat

SEQ ID NO: 4490 - DNA, 382 bp, Oryza sativa
  Clone ID: uC-osflcyp106f02b1
aatctttattttagcaaggaggtcatgtcggaatcggccctcgacaaacatatagtggtgaaaattcccgatcattttctgccagatgctttcataggagaaagtgttggtaaaggcaaagaagatggagcaaccgctgataacatggacccgttccgcccttttctagttatcaagaagtctgatttggataaggctggtgagtgggttaaaataaaatatgcttggatggccaagtccttaacaaattgatataatcatcccagaccctacccctcaagtggtgcgggatgccttctttgatatatctccccgcttggactccgccttgagaaaggacagcgcccggtgcttcttccgctttgttgcggaatgtactgcg

SEQ ID NO: 4491 - DNA, 112 bp, Oryza sativa
  Clone ID: uC-osflcyp106f05b1
cccattttctgtagcagcagcagctgagcttgaagcagcagagcgaggtagacatggccgccgccaccatggccctctcgtccccggcgctggccggtaaggccgtcgcgaa

SEQ ID NO: 4492 - DNA, 110 bp, Oryza sativa
  Clone ID: uC-osflcyp106f09b1
gtttcttgagcggatcaacgggcggctggcgaaggtggggctcgtgtcggcgctcgccgtggaggcgcctcgcgagggcgggctcctggagcaggccggcagagggggcg

SEQ ID NO: 4493 - DNA, 498 bp, Oryza sativa
  Clone ID: uC-osflcyp106f10b1
agcatttatgacacagatgtattcatgccaatatttgatgccatccaccaattggctggcaatggaattcaatcatactcgggtaaagtaggtcctgaagatgttgacaaagttgatatggcttacagagtagttgcagatcacataagaaccctttcgtttgctattgctgatggttctcaacctggaaatgagggcagagaatatgttctgaggcgtattcttaggcgcgctgttcactttggtcatcaaaagttgaaagcaaagcaaggattttttagctctcttgtacatgtatttgtccaactgatgggagatgtattccctgagctgaaggacaatgaaaagaagatcaaagatataattaaagatgaagaggaaagctttgagaacactctaacaaagggttttgaaaaatttaaaaagcggcagatgctgttaagagagtggaggaacagtacttactggacaggatgcattttgtctgtgggacaccct

SEQ ID NO: 4494 - DNA, 250 bp, Oryza sativa
  Clone ID: uC-osflcyp106f11b1
ctgtgtctcaaggctgaccagcttgcaaagatacagaagggagttggtcttcctactgaggatgcacagaaaataatcaagaatatcacaacaacaaagttgtcttctgcaattgaagcctctatttcttcgaggacagattggtatacatgcaggtccgaggattgaaagaagcaaattctcaattggacatgcttgattgcagaaccacttcgagaaaacatttacaaaaaatccgtggaggagatct

SEQ ID NO: 4495 - DNA, 383 bp, Oryza sativa
  Clone ID: uC-osflcyp106f12b1
gtcgcttctctaccaatccgcctcggtccgagcgcgcgggcgctttccccccctcgccggcggcgacgagctcgaggcggtggcgcgctcgcctacctcctgagggcggagcggggggatggagcccatgagcgtggacggcggcgggggatgcggcggtctggacacgcagatcgagcagctgatgcagcgtcccccgctcgccgagcaggagggtaaagcactgtgcgagaaggccaaggagatattgacggaggaaatgaatgctcaacccgtcaaaagcccagtaacgatctgtggtgatattcacggacaattccatgaccttggagaaccttcccggatcggtgggaagtgcccagatactaatatttatttatggg

SEQ ID NO: 4496 - DNA, 133 bp, Oryza sativa
  Clone ID: uC-osflcyp106g01b1
gcgccttgtcttggttgatggcaaggtcaggactgacaagacggacccagctggtttcatggatggcatttccatccccaagactggtgtgaactacaagcttctgtacgacaccaagggacgtttccgcctt

SEQ ID NO: 4497 - DNA, 453 bp, Oryza sativa
  Clone ID: uC-osflcyp106g03b1
atcaatttctttaatggaactgtagcgatgcccaaactttgtccagaactagatggtcttagttccatctggaagctcttcacagctgtccctgttcttgtcactgcctacatctgccattacaatgttcacagcattgacaatgagcttgaagacagaacacatattaaacctattgtgcgaacatccctgttcctctgctccagtgtttacattgctacaagtttctttgcatatctcctcttcggcgagggtaccctagatgatgttctcgctaacttcgatgcaaatcttgggattccatttagttccgcctttgatgatatagtgcgagtgagctatgctgctcacgttatgcttgtctttcccatagtcttctttgcccttaggctcaacttggatggactgctcttccccacattaaggcacatttctcgtgacaacaagagattt

SEQ ID NO: 4498 - DNA, 227 bp, Oryza sativa
  Clone ID: uC-osflcyp106g04b1
gcttatcattggtcgcctcacctcacctgctccaattgggaacgccactccccttcttccgcccgagctcaagtcccaatccgagagagtcgatcagcggcagctagagcagagcgatggccgcgctggtgggcatactcctcgcggtcttcctcgccgtcgtcgccgtcctttttgcgctccgcctgctccactccttcctgtgggtcccgcgccgcctggagcgc

SEQ ID NO: 4499 - DNA, 146 bp, Oryza sativa
  Clone ID: uC-osflcyp106g07b1
cttccttcattccccttctccccgaaactctcccaaacgccaagtccccaaccatggcgaccgccgccgaccaaaaccctaacgacgcggagcaccgggaggccgcggcgggagccaatgcggcggcggaggaagacaaggaggag

SEQ ID NO: 4500 - DNA, 305 bp, Oryza sativa
  Clone ID: uC-osflcyp106g08b1
gttgcttcatacaagtaagcagcagctagttgccgacaaggcctgagaaggaagaagaagctctcatcatcatcaccatgtcgtgctgcggtggcaactgcggatgcggctccagctgccagtgccggaaccggctgcggcggatgcaagtactctgaggtggagcccacgaccacgaccaccttccttgccgatgcaaccaacatggggtctggcgctgcttccggaggatcagagatggcggcggagatacgcagctgaggatgcttcaccctgaagtgcggcaccagctgcttgctgcttct

SEQ ID NO: 4501 - DNA, 323 bp, Oryza sativa
  Clone ID: uC-osflcyp106g09b1
ctttcttatggaggcaaacgttgtgcacgagttctacgagccgtctttaacgatggggtaccggtcacctgctcctgctgcgcacttcgcgccaaacttcgcggtgcacgcggcaaggaacagctttggtggcccttgaaggaaaaaccaaaattacacaaaatctacacattaccgtttataccgatatgattcacataggtgccattatattacattcttaaccttacattcatccatcagttatttgcagttttgttcaaagttgttatatcgtttccgatgctatactgtgcaaagattattactacacgccgttctat

SEQ ID NO: 4502 - DNA, 493 bp, Oryza sativa
  Clone ID: uC-osflcyp106g12b1
ttttctttccttctctttcccctgactcctcccctgccgggactccaaatcatccgctccgccatggctcccgcctgggccttgctcgatcgcttcgtcgacatgttccccctcgacggcgaccaatagagcgaagacagcgggggagaagattccataccagctggcatgtggtccgtgaagcccaacccacaagttgccgatccccctggtatatcttcctttcccctgctgatctctcggaaggcgatgaaccaagtgcgccacgccatggtcgtgtgcgctagcaagaaccttgtctgctttctcaccggcgaggcctaccccaacaactaccgggccgggtggtacccgagtctacacgccctccacgactttctcacttccgtgccctacgtcccgggacccgacaggctccttggcatttggagcggaacatcctgccctttcctttggcggctagggaataaccccctctctctttttccagcct

SEQ ID NO: 4503 - DNA, 296 bp, Oryza sativa
  Clone ID: uC-osflcyp106h01b1
gggatttatgtccaccttataaggaagatattagatccaggggggttagattcgtcagaagatgcggatagggatatgcaactcacccttcaaaggcatggaacatgggcttctgcctgggtcagcgaaagcggaggagtcttcaacaatggcggcgaacttgtgtcaaacactttcatcaatagcatctggtatcttgatcagcttggaatggcatctaagtacaatacaaaaatattccgcaggcagactctgattggtggccactatgggctacttgacacccaaaccttttt

SEQ ID NO: 4504 - DNA, 124 bp, Oryza sativa
  Clone ID: uC-osflcyp106h02b1
cacacattgctgctcgaccacccacaacaccacaaaaccgagagagccaataaaaaaaacccgggggcccccacccccccgccatacaagaccaggcccaccccccccccaccaccacaccccc

SEQ ID NO: 4505 - DNA, 390 bp, Oryza sativa
  Clone ID: uC-osflcyp106h03b1
cggacgtctttgatccaccctcgccgccgccgccgccggaagtggccactttagccgccggcgccgtcgtctccggagaaggagaggagcagccatgggtcgcgtgcggaccaagacggtgaagaagacctcgaggcaggtgatcgagatgtactactcgcggatgacgctcgacttgcacaccaacaagaaggtgctcgaggaggtgtccatcctgccgtcgaagcggctgcgcaacaaggtggccgggttcaccacccacctgatgcgccgtatccagcgcgggcccgtgcggggcatcttgctgaagctgcaggaagaggagcgcgagcgccgcatggacttcgtcccggagaagtctgcgcttgaggtggaggatatccgcgtcta

SEQ ID NO: 4506 - DNA, 119 bp, Oryza sativa
  Clone ID: uC-osflcyp106h07b1
ggtcagtatgccttaatgcgctcgatatcatatcgctctgaaagggatttgatttgccggggcgcgtctcacacccgcctgaggcagccctacaacccggcgctcccctcccccatgac

SEQ ID NO: 4507 - DNA, 130 bp, Oryza sativa
  Clone ID: uC-osflcyp106h08b1
ggctactctcctgttggatacacttgacaaggacatcaagtctttctccatgagagtgagggaatggtttggatggcactctcctgagttggtcaaaatcggcaatgacaactacatctatgctaagctt

SEQ ID NO: 4508 - DNA, 357 bp, Oryza sativa
  Clone ID: uC-osflcyp106h09b1
gtttgtttatagatttgcaagtgagggtagtagaagatggctattatgaatagatagagccattttttgcttgtttggctgatgcttgatgtaaaatttgtgtgtaatagattgctcattgttaagagccgcatgtactccatattcttttatggatcttgctgtataatttcttattaaagttcttatttttgagtttattacattgtgggcttatagttattttacggttctatattttagaatattgcttaattatttcaattctctcatggaaatagtaaagtcagagtaactagtgttatactgatgagattgtttgtgtggcagatatctggctgagttgcttgccgagag

SEQ ID NO: 4509 - DNA, 337 bp, Oryza sativa
  Clone ID: uC-osflcyp106h10b1
ctcactctcagcagcagcagcagcagcagctgagcttgaagcagcagagcgaggtagacatggccgccgccaccatggccctctcgtccccggcgctggccggcaaggccgccgcgaaggtgttcggcgaggggcgcatcaccatgcgcaagtcggcggcgaagcccaagcccgccgcgtcggggagcccgtggtacggcgccgaccgcgtgctctacctcggcccgctctccggcgagccgccgagctacctgaccggcgagttccccggcgactacgggtgggacaccgcggggctcttcgccgacccggagacgttcgccaagaaccgggagct

SEQ ID NO: 4510 - DNA, 420 bp, Oryza sativa
  Clone ID: uC-osflcyp106h11b1
ctttttatgggacaactaagaaaccttctgggtaaaggggcatatgatccgcagtcgtgtgcttggatgtctggggtgaatgtgattgatttggagaaatggagggagcataatgtcacagagaattaccttcaactactgaaaaagttccaacacaatgatgatgaagcttcagtgcgagctgcagctttgccaataagcttgcttgcctttgaacatcttatatatcctctcgatgaaagattgactatatctgggcttggatatgactatgccatcaaagaggaacttgtccggaattctgtatcattgcattataacggtaatatgaagccttggcttgagttaggtataccggactacaggaagtactggaagaggtttcttacacgagatgaacgattcatggatgagtgcaat

SEQ ID NO: 4511 - DNA, 64 bp, Oryza sativa
  Clone ID: uC-osflcyp106h12b1
atcattttttgctgagcttcctgcttatttaaatggggggtctgattgcttcctaaatgtcgat

SEQ ID NO: 4512 - DNA, 241 bp, Oryza sativa
  Clone ID: uC-osflcyp107a01b1
gagtgagagagggcagtgcaggtgtcgctggccatggcgaggaggagcagcagcagagcgtgcgcggccatggcgacggccgccgtctttgcgctgctggccgcgacggcgacggcgtcggggctcgtacgggtggagcacccggccaagagcgacgggtcgctgagcctgctcgtcgtcggcgactggggccggatgggcacgtacaacccatccagggtcgtcgagcagttggggaagg

SEQ ID NO: 4513 - DNA, 285 bp, Oryza sativa
  Clone ID: uC-osflcyp107a02b1
gtgtgtttgatgtttttggacatggacagtgagttatttgaggagtgccagcagcagtacatagagaagcaagcaagagcaaaagatatggaggagcaaagattgtcagcatggagacaactggaagctgctgccgccaaggcttcgggagatgacatggttttggtcaactagcatccataaatatgcaagcgacgcttcaaagatcatgcttgctcagatgattggtgctcactttatcttacaagcactcgcgcgcaccagtcgacttggtatcgatgttgc

SEQ ID NO: 4514 - DNA, 243 bp, Oryza sativa
  Clone ID: uC-osflcyp107a03b1
gcgagttatattcatttctacacgatagtctttaaaggaggaaagtagaattgcataaacgccgattagcactcgaaaaagaagtggaaaatttgcgagatcagctacagaaggagagaaattcgagggtttcattgtagtcagggctgatgaatttgcgatgagggcagggcgacttcccatcaacaattgacaacatgggttctgattggccgtggccgtgtaagaggaagtcccaaagga

SEQ ID NO: 4515 - DNA, 268 bp, Oryza sativa
  Clone ID: uC-osflcyp107a05b1
gtaaaatggagaaggaagaagaacacaggggggaaaaaagaagaagaagaagaagagacgaaacggggaaagggaagaattcggggatttctctgtgggtttcgtcagatcctccttcgatttgtggttcttgctgccagggtcgtggtgcgaatcaagaagtggaaacctccacccatcgctcatcttcacgcggttaaggagcgagcgatcaaatcaggggataatggaggaggacagcgtcatcagcaacggcggcagggaggag

SEQ ID NO: 4516 - DNA, 117 bp, Oryza sativa
  Clone ID: uC-osflcyp107a06b1
gcttacttctgcattgcctctgaagctctacaagcctatggtgtttgacgaggtcttcactatcttggttctgtcgattgctctacgagcggtggggatgctgcttacgcggctgct

SEQ ID NO: 4517 - DNA, 386 bp, Oryza sativa
  Clone ID: uC-osflcyp107a07b1
gcctattgtcgagcctgagatccttgtcgatggctctcatgacattgagcgctgtgcctatatcaccgagaaggtcctcgctgcctgctacaaggccctcaacgaacaccatgtcctcctggagggttccctcctgaagcccaacatggtcaccccaggatctgaatccaagaaggtttcccctcagctcatcgccgagtacaccgtctgcgccctccagaggactgtccctgctgccgtgcctgccattgtcttcctctctggtggacaaagcgaggaggaggcgaccgtgaacctcaacgccatgaacaagctcagcaccaagaagccgtgggctctgtccttctcctttggccgtgctctccagcagaacacgctcaaggcct

SEQ ID NO: 4518 - DNA, 278 bp, Oryza sativa
  Clone ID: uC-osflcyp107a08b1
aatccctatcgatcccatcccctttcctcctcacccatggcggccacgctcttctccaccgccctctccccgcacctcctccccctcccctccacctcctccaaccccgcctcctcctccctctccttcctctccaagccgctgctccccgccctcgccgtcgcgggatggccgcggaggaggaccagccccttcgtgccggtggccgtggccgtgtcggaggaggtcgagacggaggaggacgaggaggaggaggaggtctgatgcacaaagctagg

SEQ ID NO: 4519 - DNA, 272 bp, Oryza sativa
  Clone ID: uC-osflcyp107a11b1
gcacctcgtctcgctctcgcgccaagaaagcaccgcgagtacttcttcttcatcctccatggccacaaccgcgtcgctgtccgccgtcgcggcgcggccactgtccgtggcctggctcaagaagcccctgtgcgcctcgttccagcccgtgccgagggcgaggccggcggcggcggcgaggatggccgcgagggcgtcggcgtcgatgaaggagagggcgacggtcgagctgacggtcgcggtcatggcgggggtgatggccctccccgacc

SEQ ID NO: 4520 - DNA, 159 bp, Oryza sativa
  Clone ID: uC-osflcyp107a12b1
ctctctgcgatctccaccaccaccaccacgacgcgggcgcgcgcaccaaccgggggggcttcgatgcgggcgatctcgtcggcagcgggggggatgctgcgggcgcggctgctcggtggggcgcgcgtccgcggcggcgtcaggcacggggaggggggc

SEQ ID NO: 4521 - DNA, 291 bp, Oryza sativa
  Clone ID: uC-osflcyp107b01b1
gatatctcaaccaggtcttgatcctaaattgtctgaaattcatcatcggataactgttcgtaaaaaggggtggagtttccacagaaaagttaatcggggaaacaaagattgtgcaaaagagggaccgccttgttctggatgggttgagggcatggcaccagttttctcgagatctgcttggcgatgtgcttggcatcttatccagaatgatcttatccacggatggggcattgattacaaatttgggtactgtgctcagggtgactgaacaaataacattggagtagatgt

SEQ ID NO: 4522 - DNA, 252 bp, Oryza sativa
  Clone ID: uC-osflcyp107b02b1
gaatgaaaagcatcacaaatctcacgcactgtctctcgttcgcgcaaagcacgctgcttttctccgctttgcgagcaccatagcctagcccaccatgtgcggcggcgccatcctctccgacctcatcccgccgccgcggcgggtcaccgccggcgacctctggctggagaagaccaagaagcagcagcagcagaagaagaagaacaagggcgcgaggaggctgccactgcgccaagaggaggaggatgattc

SEQ ID NO: 4523 - DNA, 74 bp, Oryza sativa
  Clone ID: uC-osflcyp107b04b1
tcgcatttcccaaaatggacgccgtccgatgaggccaccgcggcaaaaaccctagctctcgccctctccctccc

SEQ ID NO: 4524 - DNA, 429 bp, Oryza sativa
  Clone ID: uC-osflcyp107b05b1
gatttgttagaattttctattatcttgttttcgtggatttcccatgtacgccgcagtagtgcgtccatatctagacaccattatagatatcaggggttttagattagtttacacccgaacaaaattatcaatatatctacaattttgtgttctttacttttctgttattttctattttcttttcatgacggaggtccagtaatcctaaaatttggttaatctttgtcgttttgcgctaaaaaagggtcatgctttttcacgaaagtaaggacattatcttttgctagtttgttcggaaactagtcgttcgtcgtcacgtaagtacggtatttatttttgcaaatttgctcttaaattagttcggtggatttacaaaagtgaattaatttaaaattaggtttacttccgggttttatctttggttttgct

SEQ ID NO: 4525 - DNA, 556 bp, Oryza sativa
  unsure (1)..(556): unsure at all n locations
  Clone ID: uC-osflcyp107b06b1
ccctcgcgtccgctcttgatgaggctaagttcgaaagaggaaaactggaggagctacatcgttctgttactgaggaatgtgaagaattgaaggcacagaaggctatgctgacagataaaatgtccaatatgcaggagactttggacaatggtgaagaagaaaaacgaagcagaatagctatgcaggcaaagcttgtaaggctggagagtgatctatctgcagtggaagcatcgcatgtacatgaagcagagctaaagaatgaacttaatagaatcaagagatcagatagtgagtagcagagaaagatacaatctcttgagcaggaaagtgaggaccttacaagtcagctcgagcagatggcccacatcaaagaagaggaccttggaaagcaggatattggtggttctccagttgatgaggaatctggcattcatttgaagatccaagttttggaagctaagctcgcagaggctttagaaggagaataagatgtacagagcttaacagaagagtcccatgcctgangggcagtgtgctgctgggaatgcaatgagag

SEQ ID NO: 4526 - DNA, 510 bp, Oryza sativa
  Clone ID: uC-osflcyp107b08b1
tgttcttgcagagttacttcttggtcagccactgtttcctggagagagtgctgttgaccagctagtagagataatcaaggttcttggtactccaacccgtgaggaaatacgatgcatgaaccccaactatactgagttcaaatttcctcagattaaggctcatccttggcacaagattttccacaagagaatgcctccagaagccatagaccttgcttcccgtcttctccaatattcaccaagtctacgctgcactgctcttgacgcatgtgcacattccttctttgatgagctacgagagcccaatgcacgcctgccaaatggtcgtccattccctcctctgttcaacttcaagcatgaactagccagcgcctctccagaactcatccacaggctcataccggatcatatcagacggcaacatggcctcaactttgcgcatgctgggagctaaagggcaccgcgacgccaccgttttgttcgtttatttttccatgagctggacattgc

SEQ ID NO: 4527 - DNA, 181 bp, Oryza sativa
  Clone ID: uC-osflcyp107b09b1
ttcttgcttactttggaaccattgctttggtcacaatacctgcattatacagtaagaaccaggagcaagttgataggtatgctgggatggtccacaggaacatatcaaggcattacaagattgtcgacgaaaatgtgatgagcaggctaccaagaagctttattagagataaagaggattg

SEQ ID NO: 4528 - DNA, 365 bp, Oryza sativa
  Clone ID: uC-osflcyp107b10b1
tcataggatgcttgtgtatgagtatgtcaacaatgggaatctcgaaagttggttacatggagagttatcccaatatagttctctcacttggctagcgcgcatgaaaattcttttgggtactgcaaaggcccttgcttacttacatgaggcaattgaaccaaaagttgtgcatcgtgatatcaaggccagtaatatattgattgatgatgagtttaacgccaaaatatctgactttggtttggccaagatgctaggtgctggtaaaagtcatattgctactcgagttatgggtacttttggctatgtcgcgcctgagtatgctaacagtggacttttgaatgaaaagagtgatgtctacagttttg

SEQ ID NO: 4529 - DNA, 492 bp, Oryza sativa
  Clone ID: uC-osflcyp107b12b1
gtttgcaacacttggtatttgcaagactttttcttttattttgttaaagaattactcaaaacaaagccaaagagacaaaaatgcattttttttccaatgaaggaaaagtcaattttctgtccaactgaaatatgcatgacggataaatagctaccttgaaagagaccaaatcccactgtttaaactttcactctgtgctgcagttgtcagttgttattgtcaatcaagtagattccagcttacttttttctggtggaccattttttttttctttcatggcaggtaatagcaaaggcccgtgtgccaattgtgaagttcgtggagagaaaaagtgaaatagcttttgacataagttttgacatggatggtggaccacaagcagcagactttatcaaggattatgtgaagaaggttcctgttttagacatctgtgtatgattctgaaagtttttttacaccaaagagagcttaatgtggtctttaccggtggaa

SEQ ID NO: 4530 - DNA, 264 bp, Oryza sativa
  Clone ID: uC-osflcyp107c02b1
gttgttattcattaaagctttggttgatgttgtggaacacaggcgtcttactctcatggtttacctcttgaggacgttaggagagagaaaatgtctgagcaccgtgatcatgtgtctgttgcactcattggttggccgtatttctcattctcccgaacaccagggcgccctatccttgagagccatgccacaagagtgggagtatggtttggcagtttacttaaccaacctatactcatataaactatggattaattgtctttc

SEQ ID NO: 4531 - DNA, 186 bp, Oryza sativa
  Clone ID: uC-osflcyp107c03b1
gagcgagcagaggcggcgctgccgctcgtcctgctgcttccgccgcatccacatccttcgccgccgccgccgccgcctgcgccgatccccccatccatcccgcgagcgagcatcctgctgcttccgccgcatcctgaaatttggcttaaccttgatgtttgtttgttcccaaaaagcctgggggtg

SEQ ID NO: 4532 - DNA, 115 bp, Oryza sativa
  Clone ID: uC-osflcyp107c05b1
acgggcttcatgatgttgtaacgacaaaggggttttctgcacgtgacttggctcagagagagaattttgatgtgttatgtcttcaagagacacatttggaggaaaaggatgttga

SEQ ID NO: 4533 - DNA, 346 bp, Oryza sativa
  Clone ID: uC-osflcyp107c06b1
agttcctatgatggcatatttataattgcctatatggacaatgctgccagccatctaattcatgctggacacatagatgtgctttacaccatccatgaacttcttatttctggttgtaaaggtctgaccatttcatgccattggtcttacctggaggtgataatagaagtggaaaaatagaagtcatctattagtttgtactgaagcaacactaagcatttagtaattaatgatcctgtttgtagccacaccaccgggtacatgtgacttttctagccgcacacttttgctcttggacatctatgtgttgactggtttgcaaagcttggaggtctttctggtgttc

SEQ ID NO: 4534 - DNA, 464 bp, Oryza sativa
  Clone ID: uC-osflcyp107c08b1
ccgatctgggcggccactagctcaaccaatcaagcaaccaagcaagcgagctcggagctcgtcgcctcgcccatggttaccctctggaagcggaaacccaagcccaatccggagccggaggagaaggagaaggaggaggagaaggatcatcggatgtgcaagaccaagagctccgtcgccaccgccttcatggccgtctccgcctccaccgccaccaccccaagaaagcatcagcatcagcatcagcatcagcatcagtggctgcctcgcgccacggtgacccagtactccaccacctcctcttccttcgcgccatttcaccgtctccgtcacctactcctccaccgtcgtcttgcttcaggttttatccgattctttcctagacttcccccttctactcaccttccacgagctcgccgccgctcctcgtccattttctcttctcccaccgcatcgctctcaat

SEQ ID NO: 4535 - DNA, 261 bp, Oryza sativa
  Clone ID: uC-osflcyp107c09b1
cccacgcgtccgcccacgcgtccggtgaaggaaggatacaaagttgcagttgcgttgccgaatcttgatgaacttttggagggcactctaacccatgattttgtatcagtgtggaatgaatggcggaaaacaaaatactaccccttgcattacagtgagctagtacgccttgctgctctttacaaatacggtgggatataccttgactctgatgttgttgtttttaaacctttaaacgcactccggaattctatttgttgt

SEQ ID NO: 4536 - DNA, 474 bp, Oryza sativa
  Clone ID: uC-osflcyp107c10b1
gcttcctccccctctcccacgaaagatggcgtctcacattgttgggtacccccgcatgggccccaagagggagctcaagtttgccctggagtctttctgggatgggaagagcagcgctgaggatttggagaaggttgcgaccgacctcagggccagcatctggaagcaaatggctgacgctgggatcaagtacatccccagcaacaccttctcgtactatgatcaggttcttgacacggctgccatgcttggtgctgtcccagagcgctactcatggactggtggagagattgggttcagcacctacttctcgatggctaggggcaatgccactgtccctgccatggagatgaccaagtggtttgacaccaactaccactttatcgtccctgaacttggtcccaacaccaagttctcctactctttccacaaggctgtgaatgaatacaaggaggctaaggcgcttggcgttga

SEQ ID NO: 4537 - DNA, 116 bp, Oryza sativa
  Clone ID: uC-osflcyp107c11b1
aaggtcgacccctctctgattttactaagcagaagatagttgtggtgggagctggaagtgatcaacattgctagctaggaagcatggcccgttcacagttggtgttggtcgtcctg

SEQ ID NO: 4538 - DNA, 350 bp, Oryza sativa
  Clone ID: uC-osflcyp107c12b1
gctgcaggtcatctcctcactgactgcctccctgaggttcgatggtgctctgaatgtggatgtcaacgagttccagaccaacctggtgccctacccgaggatccacttcatgctttcctcctacgccccggtgatctcggccgagaaggcctaccacgagcagctctccgtggcggagatcaccaacagcgccttcgagccgtcctccatgatggccaagtgcgacccgcgccacggcaagtacatggcgtgctgcctgatgtaccgcggcgacgtggtccccaaggacgtgaacgccgcggtggccaccatcaagacgaagcgcaccatccagttcgcggactggtgcc

SEQ ID NO: 4539 - DNA, 318 bp, Oryza sativa
  Clone ID: uC-osflcyp107d01b1
ggttaaccaagtgatgcacgattcaaacgccccacaggcgttgccgtggatgatacaggaaatgtctatgttgctgatacagcaaacttagcaattcggaagattggggaatcaggagtgaccaccattgctggtggaaaatcaaacatcccaggttatagggatggtccaagtgaagatgcaaagttctctactgattttgatgtggtatatgtgaagaaaatgtgctctttgctggttattgaccgtggaaatgctgcacttaggaaaatcgccctttcgcatgaagattgtacctaccaggatgcaattttttta

SEQ ID NO: 4540 - DNA, 109 bp, Oryza sativa
  Clone ID: uC-osflcyp107d03b1
aaattcagtgcttcctggtgtggaccatgtcgtgttattgcacctatttatgctgagatgtcaaagacttatcctcaactcatgttcttgacaatagatgttgatgacc

SEQ ID NO: 4541 - DNA, 169 bp, Oryza sativa
  Clone ID: uC-osflcyp107d04b1
cattttagcacaggagaagccgcagccactgagatttgaccttctgtttctaccagaaaaacacaaacagtgaagatgtcgcagcctgctgagctttcccgtgaggagaatgtgtacatggctaagcttgcagagcaggccgagaggtatgaggagatggttgtgttct

SEQ ID NO: 4542 - DNA, 64 bp, Oryza sativa
  Clone ID: uC-osflcyp107d05b1
tcgttatttttcgctagggtttttgactatcccttcgacgacgtcgttgacttgaggagaggag

SEQ ID NO: 4543 - DNA, 121 bp, Oryza sativa
  Clone ID: uC-osflcyp107d07b1
ttgtcagtctgcttttctcacagaagagagcagatcactaatcgaataagaacggtggtgcgcatctgcttgtacgcaaaaaatggaacgagacattacctgtctcccgactaatagggtt

SEQ ID NO: 4544 - DNA, 384 bp, Oryza sativa
  Clone ID: uC-osflcyp107d11b1
gttggcttctcctccccctcccggttcggatcgggtcggttcggatccggttcgagttcggattttccttcggttcgggggttggtgggaaagcatggtggagaccgatgatgcaatccgatgctacgaaggggtacccttgtgaggaatgagtgaacactcacctgaagcaagaggcttgacctaagagagattgataacaccaagatcatccgccaggcttaccggaccatgcttgtcaccgaaccggactcggaacagtacatctacggtgccatcctgtacgaggagacatctgaccaattaattgatgatggtaaaaaagattgttgacatctctcacagagcagaaaattgttcaacgtatcaaggccgacaagggtt

SEQ ID NO: 4545 - DNA, 466 bp, Oryza sativa
  Clone ID: uC-osflcyp107d12b1
tctaggagtgtcagttgggcttgtttggacttcatttggtggggaggtacaatttgtcgaggctacagcgatggtgggtaagggtgatttgcatctgacagggcaacttggtgacgtaattaaggagtcagcacagttagctctgacatgggtgagagcaagagctgctgaccttaatctgtcacctacttctgatattaacttattggagagtcgtgatattcacatacattttcctgctggcgcggtgccaaaggatggtccttctgctggagtgacattggtaacatcattagtgtcactatttagccaccgaaaagtcagagctgacactgctatgacgggagagatgactcttaggggccttgtgttgccagttggcggtgttaaggataaggtacttgcagcacatagatatggcattaagagagtaatattgccagaaagaaacatgaaggacttggct

SEQ ID NO: 4546 - DNA, 287 bp, Oryza sativa
  Clone ID: uC-osflcyp107e01b1
cactcctcagcagcagcagcagcagcagctgagcttgaagcagcagagcgaggtagacatggccgccgccaccatggccctctcgtccccggcgctggccggcaaggccgccgcgaaggtgttcggcgaggggcgcatcaccatgcgcaagtcggcggcgaagcccaagcccgccgcgtcggggagcccgtggtacggagccgaccgcgtgctctacctcggcccgctctccggcgagccgccgagctactctgaccggcgagattcctggagtcttcgggtgtgac

SEQ ID NO: 4547 - DNA, 592 bp, Oryza sativa
  Clone ID: uC-osflcyp107e02b1
ggttgattggccggattagccggaggccacggaggggcggtgactagcagagcggccacggcggtcggaatgaagggcggtcgctttttttttttctatttctttttctcttttcttttttttctccctcttttctctttctttttattttccttccttttctcttctctctcttctttttttcctctcctttcttttcttttctcttttctctttttttctcctcttcttctcttttcttttttctttttcttattcttttactttttcttcttcttttttctcttttttcttttttttgtacttttcttcttcttttcttctttcatcttattcttcctattctttctttttctattcctttctttttctctttcctttttttttttcttctatatttctttattttttcttttttcttttcttttatatttatctttatcctctattcttttctatttttcttcttattttatccttctttcttttctcttctttctccttattctttttttttaattttctttatctttttttttatctttcttctctcttctttattttttttttttttctttctctccttttattt

SEQ ID NO: 4548 - DNA, 245 bp, Oryza sativa
  Clone ID: uC-osflcyp107e03b1
acggtggaacgcgtacttacccacaagttaggtgcatgccatggcaccattcatggcgtgcgcctcgccaccggtactcacgctggccctgctcgcgtcgtgcggtgcccttctcgccacctccatgctcccggcgcgtgcgacggcgggcagctgcttggacgtcggcgacatggtgatgatggacaggttccgcgcttgtcagggtgctctcaatcgatcgtacccctgcgcatatgaggcgc

SEQ ID NO: 4549 - DNA, 81 bp, Oryza sativa
  Clone ID: uC-osflcyp107e05b1
gctatttgtacaagaagggaactgagaatgggacggctgactcatagtctcatgtttctgattcttccctggctatgttga

SEQ ID NO: 4550 - DNA, 106 bp, Oryza sativa
  Clone ID: uC-osflcyp107e06b1
ttttcttcgaggaggaagcaaacagcgtcgctccacgaaaccatcgctgcggctgcgtgctcgcgcgaagaagaggagagagaggaccaaaccatcctctcctcct

SEQ ID NO: 4551 - DNA, 346 bp, Oryza sativa
  Clone ID: uC-osflcyp107e08b1
tgacgaccaccacccgcgcgagcaccgggacatcctcacatggctcctagtctgctccgccccgcctccccgtgcctcaacctcgcgccccccaccgccgacggccccggccggagccgctccgctgtgacgatcggtggttcgaggccgctcagcgtttccctgcgtgtgggaggatctagccggagggactttccgtgtaccacaatggcctcaagagatcattctggtttgactcgacagcttttagattttcaacatggtacagtatatgagatagatggggaacttgtcccattcatggagtcgaaagctaggcttatggaccttctagtcaggaattgct

SEQ ID NO: 4552 - DNA, 406 bp, Oryza sativa
  Clone ID: uC-osflcyp107e09b1
atcatgttgcccttcctcctggttctatggggaaaattagttacattgcaccagctggccagtatagcttgcaggatacagttctggaactggaattccagggcatcaaaaagcaatttactatgctccagacatggcctgtccggtcaccaaggcctgtttcatcaaagcttgctgctgacacgcctcttctaacaggacagcgtgtacttgatgcactatttccctcagttcttggaggaacttgtgctattcctggagcattcggttgtggaaaaactgtcattagtcaggcactttcaaagtactccaattctgaagctgcggtttatgtggtctgtggcgcaagaggatacctgattgctgaagtcctatgatctacttctattgatattactttccttta

SEQ ID NO: 4553 - DNA, 57 bp, Oryza sativa
  Clone ID: uC-osflcyp107e10b1
tttgtaccagcgcctgaggatccgacaaacccgaagattagaacttaaatgggctct

SEQ ID NO: 4554 - DNA, 52 bp, Oryza sativa
  Clone ID: uC-osflcyp107e11b1
tttgacgcgagcgctccacgatttctctgcctccggaatcattatatgatat

SEQ ID NO: 4555 - DNA, 400 bp, Oryza sativa
  Clone ID: uC-osflcyp107f01b1
gtcgacggctcctcctcctctcgccttctcccgtcttctccttcgagttagctacctccttattcaaccatgggtaaggagaagacgcacatcaacatcgtggtcattggccacgtcgactccggcaagtcgaccaccacgggccatctgatttacaagcttggaggtatcgacaagcgtgtgatcgagaggttcgagaaggaagccgctgagatgaacaagaggtccttcaagtacgcgtgggtgctcgacaagctcaaggccgagcgtgagagaggtatcaccatcgatattgccctgtggaagttcgagaccaccaagtactactgcactgtcatcgatgcccctggtcaccgcgacttcatcaagaacatgatcacgggtacctcccaggctgact

SEQ ID NO: 4556 - DNA, 113 bp, Oryza sativa
  unsure (1)..(113): unsure at all n locations
  Clone ID: uC-osflcyp107f02b1
ncgctctccctctcccacccccacccccaccccgcctgcaccacggtggctgagtcaccacgcgctcaccgcaatttcccaccggcgtgcccgcccgccatgcctgatagcat

SEQ ID NO: 4557 - DNA, 405 bp, Oryza sativa
  Clone ID: uC-osflcyp107f03b1
atctactccctactatgtttcggcggcacatcaggcggcgtgtagggcggactggtaggctgtgccgggcacgtaggtggttcggcggagcgggtttagttgccggctgcgttttcaggcaactgctaccccatggagaagaagagttcactgcttttcatctaaaatggctaaaggattcgcataaggattacagtataaaacttttggacgaatctggaggatgctggcgggacttgcttgttcctattgttaaagaagcctggaagaattgcaagaaagcaatcgagacatcttcaccacctaaaggatccaagtctgctattttacccctggattcatgttcatttggaggtgattcgtccattgccatcgtagagagaatttatgagatggtgaagggtt

SEQ ID NO: 4558 - DNA, 91 bp, Oryza sativa
  Clone ID: uC-osflcyp107f04b1
tcggtttaattgtctatggatgtcggcaatccctgcagatctgaggtcctttatttctcataggtctcagatgtattacatctgatagtgt

SEQ ID NO: 4559 - DNA, 245 bp, Oryza sativa
  Clone ID: uC-osflcyp107f06b1
ctttattagcaccaaccccgtctccttcctccattcctccgccgctagaaccttctagaagctctcctcctcctcccatggcggcgacgatcgtgtccgtcaaggcgcgccagatcttcgacagcaggggcaaccccaccgtcgaggtcgatgtgtgctgctcagatggaacctttgcaagggctgcagttcccagcggtgcatcatctggtgcctatgaagtcttcgaatctgagggacggcgg

SEQ ID NO: 4560 - DNA, 106 bp, Oryza sativa
  Clone ID: uC-osflcyp107g01b1
ctgtatggggtgaaaatggcgcaggcggtggtgccggcgatgtagtgccaggtcggggccgtgcgggcgaggccggcggaggttgcggcgtcagcggtggggaggt

SEQ ID NO: 4561 - DNA, 152 bp, Oryza sativa
  Clone ID: uC-osflcyp107g02b1
ttctattcggtgcctctgcccggagccgaactccgacgccttatcgactcactcaccaagtgctcgacgcaattccccaccggggagcccgcccgccatgccggagagcaacggcgccgtgtgcggcgcggtggataaggcgaagccacctt

SEQ ID NO: 4562 - DNA, 406 bp, Oryza sativa
  Clone ID: uC-osflcyp107g03b1
atttattgaaatgacctctaaattccacagatatcaggtgctcgatgcattagttgcccttttctgcagatctaatgtatctgcagatgttcgcttagctggtggctggcttttcaggcatctgctaccccatggagaagaagagttcactgcttttcatctaaaatggctaaaggattcgcataaggattacagtataaaacttttggacgaatctggaggacgctggcgggacttgcttgttcctattgttaaagaagcctggaagaattgcaagatagcaatcgagacatcttcaccacctaaaggatccaagtctgctattttacccctggattcatgttcatttggaggtgattcggccattgccatcgcagagagaatctatgagatggtgaagggtttt

SEQ ID NO: 4563 - DNA, 540 bp, Oryza sativa
  Clone ID: uC-osflcyp107g06b1
aaataaaggaaaaaaaaacaaaacacaccaagccaaataaaagcgacaatgggatcgctcaccaccaacatcgtcctcgccgtcgccgtggtggcagcgctggtcggcggcgggtcgtgcggcccgcccaaggtgccacccggcccgaacatcacgaccaactacaacgccccgtggctccccgccagggccacctggtacggccagccctacggctccggctccaccgacaatggtggcgcgtgcgggatcaagaacgtcaacctgcctccctacaacggcatgatctcctgcggcaacgtcccaatcttcaaggacggcaggggatgcggctcatgctacgaggtgaagtgtgagcagccggcggcgtgctcgaagcagccggtgacggtgttcatcacggacatgaactacgagcccatttcggcgtaccacttcgacttctccggctaggtgttcggcgccatggcttgccccgggaaggagaccgagctccgcagggccggcatcatcgacatgcagtttaggagggtgcgctgc

SEQ ID NO: 4564 - DNA, 135 bp, Oryza sativa
  Clone ID: uC-osflcyp107g07b1
tatggaagcaaaagctttgctgatctcagagatagtggcatagacaagcatcaaagttgtgttgcacatgaacggtcacttatcatcatcgaatttattgatgatggcgatgtagatgaggaaaactggagaaga

SEQ ID NO: 4565 - DNA, 338 bp, Oryza sativa
  Clone ID: uC-osflcyp107g08b1
ttctaatcgcagagaaaaaaaaatctcccctcgaagcgaagcgtcgaatcgccttctcaagatgcagatctttgtgaagaccctcaccggcaagaccatcaccctcgaggttgagtcctcggacaccattgacaatgtcaaggccaagatccaggacaaggagggcattcccccggaccagcagcgtctcatctttgctggcaagcagcttgaggatggccgcaccctggccgactacaacatccagaaggagtccaccctccaccttgtgctcaggctcaggggaggcatgctgatcttcgtcaagaccttgactggcaagaccatcacccttgagg

SEQ ID NO: 4566 - DNA, 190 bp, Oryza sativa
  Clone ID: uC-osflcyp107g09b1
tgatgagcaatcaagaaactactggacaagatcaatggtaatgatcccaaaaaggaaggaatactcaaattttttcaatatctagttaggaaatatggaaagactatgaagcctgagggtagtgcaaagaatgaaggtgtggatgttgcaaacgatacttcgagtacaaaccttcttgctagtggttctc

SEQ ID NO: 4567 - DNA, 501 bp, Oryza sativa
  Clone ID: uC-osflcyp107g11b1
tcttacttgatggaagttgctgctttagcttctagaatcaattggacaggtatgcattttatattgatgaaattctggatgagatggaagttgctgctttatcttgtagaattaattggacaggtatgcattttatattgatgaaatctgaactaattataaatttacatttcattattttttttgtttatttagagtatcagttagcttcaattgaagctgctgcgattggtaacataattagggatggaaaggtcattgaaattgctccaaactcgaaaggaggacctctacaggatgtgctgagaagtttgcttgaaaaaaatgaattgatgataaataaactgtgtgatgaggatgctccactggaaagtaccgcttcaaggccgttcttaggcttctttttaacacattatgtaaggagcctgggtatttcgcatttgacccatacgctgcggcaagcttttttaccctgagtcacgctttgctgattaccagagc

SEQ ID NO: 4568 - DNA, 72 bp, Oryza sativa
  Clone ID: uC-osflcyp107g12b1
ttgtcttatatagtcagtaggggagggactgggccggcagccattctgacgtcagaccggagcggccctatg

SEQ ID NO: 4569 - DNA, 394 bp, Oryza sativa
  Clone ID: uC-osflcyp107h01b1
ataggatctttcctttagctctttgtggaggatttagctaagtaaaacatgataaggtcacacaaccttatctgaagcgatgtcaagggagaagctaccttattgtgtgacggcatggttttaccaattgagatactattcacaacctacaccgattgagttctttgggcataagaattgaccggttgaatgtttgagatgccttttgaccttacatgacactggggattttattatgacacaaggaaataatattttccttagaagcatcaaattccagcccctggatgtatagttattaactacatgttctgaaccatggagagaggttaattttgtttttgggttgagctgcagttacaagggtatgagctaatcttaagaaatggttggc

SEQ ID NO: 4570 - DNA, 149 bp, Oryza sativa
  Clone ID: uC-osflcyp107h02b1
tcatagtcgcgtcgcgtctccctcccgcgcgacggatccgagagccctaaaccctagaactccctcggcctcgcgtcggcgccatggaggacgaggagatggagatgacattccacatgaccgtgttggccctgatccttctcacctac

SEQ ID NO: 4571 - DNA, 531 bp, Oryza sativa
  Clone ID: uC-osflcyp107h03b1
aagttgcagtccaagatgatttgaaggctgctactggtgaatttacaaaagatgcagatgacgcaaacagactgaatcgcattcttcaactaacagggttcagtgatcctgtgtatgctgaagcatatgtaactgttcaccactatgatattgtgcttgatgttacagtcataaaccgaacaaaggaaacacttcagaacttgtgcttggagttagcaacaatgggtgatctcaaacttgttgaccgcccccagaattacacgctggctcctgagtcaagcaagcaaattcgggccaacatcaaggtttcatcaacagagacgggagttatattcggtaacattgtttatgagacctcaaatgtaatggagcgatcagtgggggtcctaaacgatattcacattgacatcatggattatatctcacctgctacttgtggcgatgttgctttccggaacatgtgggcagaatttgagtgggaaaacaagggggctgtgaacaccgtctttaagatgagaaggaattttggat

SEQ ID NO: 4572 - DNA, 87 bp, Oryza sativa
  Clone ID: uC-osflcyp107h05b1
ccttactgtcagtgtcgacgatatcaagggcctgaagagggaattggaggaaggcctggacaaggaccaggcggatctccaagggag

SEQ ID NO: 4573 - DNA, 177 bp, Oryza sativa
  Clone ID: uC-osflcyp107h06b1
ataatggatgatattgtcctacttcgataagttcactgaggaatcgaggaacctgacgattgtaaaaatgtatgatccattgggtcaaagcttgcaacgtagtaatgcagatagtcagtaaccagtggaatactgaaacagttcgctcatgctcttgcttttatgggtttgctggat

SEQ ID NO: 4574 - DNA, 324 bp, Oryza sativa
  Clone ID: uC-osflcyp107h07b1
atgtcgactccatagatcccctcttccacgtgctccgcgtgctccccttctccttcctccggccgccgcgcacccgcctgaggctgccctccaacctggcgctcccctcccccatgaccgtcttcgccctcatcctcctcacctacttcgccgtcgtctccggcctcgtctacgacgtcatcgtcgagccccccggcatcggcagcgtccaggaccccgccaccggcgccgtccgccccgtcgtcttcctccccggccgtgtcaacggccagctcatcatccaggggcttcttcttcggtatatgttcgtcatcggcggtatcg

SEQ ID NO: 4575 - DNA, 320 bp, Oryza sativa
  Clone ID: uC-osflcyp107h08b1
gtcgcctctcctcctcctccctaacccctacgcttccagaaccttctcgaagctcccgctcccccccccttccgctccaatggcgaaggaaccgatgcgcgtgctcgtcaccggcgccgcaggacaaattggatatgctcttgtccccatgattgctaggggtgtgatgttgggtgctgaccagcctgctattatacacatgcttgacattccaccagctactgaatcttttaatggccttaagatggagctggctgatgctgcatttcctcttttgaagggaattgtcggaccaactgctgttgtggaggcctgcactg

SEQ ID NO: 4576 - DNA, 474 bp, Oryza sativa
  Clone ID: uC-osflcyp107h11b1
ttgtcgcgtgggcatttttcttctatcttgcatgatcacacgaagtgaactgcgtgatcgtcggagacatcgaatcaaagctctcgcccattctgcttgctgccctgatctccttcaaattctagcccaaagaatggaggaccagatggctaaccttcgcttgactgacttcgagttcttcaggatcatcctgcccggatcctccaaaacgaaactgctgccttacaagttcgcgagggagcttggggaccgagagctccgggaggcgaggctgcgggtcgccggcgaggggcggcgcccgtgggacgtgaaggtgttcgacgacgacgtcagcggcgacgtgtacctgggccgcggctggcaggagttcgcccgcgcccacgacctgcgtgacggccacttccttgtcttccgcttcgacggtgccgtcgcggttaaccgtaccgttcttgacgagaccatgtgccgtcgtga

SEQ ID NO: 4577 - DNA, 228 bp, Oryza sativa
  Clone ID: uC-osflcyp107h12b1
cataactgcacgggggcgccgcacccggaccgggggaagttcacggacaaggggaagacgtacctggcgcggccgtggaaggagtactcgcggaccatctccgtgcagaacgagatcggggcggtggtggatccgggggggtggctggagtggaacggtaacttagccctggacaccctctactacgaggaggttgacaaccatggcccccggggcgagcatgagcaa

SEQ ID NO: 4578 - DNA, 384 bp, Oryza sativa
  Clone ID: uC-osflcyp108a01b1
gcggtcccttgaccttacgctactggactcttacgacctgaatattttcagcgagaggtaagatgacttccagcacgtgcaggtaggtgtgctgaagcttggcgaggatgagcgctctaagggccctaggctgccgaactgcacaacctgtgaactagaacttcgtactctctctgctgctccaggtacaaaagagtgcagctcggaggacactgtggaggagctgccgcaggggaactctgtgactacgagcgaggagctggaggagatcaagcaggaacgcatgcgcattttttggcaggacatcatgtgcgaccgagtccagactacaggacggctcagggtgttgttcaggcctcctgttgaggtgcaggacggtccaga

SEQ ID NO: 4579 - DNA, 404 bp, Oryza sativa
  Clone ID: uC-osflcyp108a04b1
cggttatggacggcggcagcagaggcactacgttgggcatcctacacaacaagcggtggcacaccgtcaccggcacgggactctgctccgccatgtggatatggcctaactacatggatctcagcgactgtccttacgtattggatccgcttttccatgaccaatgatgacgtgcagatggacaacaggagttgctctagctatgctacttacagctgtgagagcacaagaaccacccctgtctgattttactaagcagaatatagttgtggtgggagctggaagtgctgggataggtgtgcttaatatggccaaacaggcgatgctaaggatgccagggataaacatgatctgacaagggcataatcaattctgggtttttgacaaaaattgacttattacca

SEQ ID NO: 4580 - DNA, 339 bp, Oryza sativa
  Clone ID: uC-osflcyp108a05b1
ggcttgtggaccgagaaagagaagaaagagagaggggctgctctcgagcgaccgccggctttcctccacccgcgccatctacgtcgaccgccgcatgaaattggccctgtaatctgtcgatgcgctcgatccattcccccgatctgtcgatcgttccttgcgaaccctcggttcccggggtcccgatccggtctttgccgagtcgccgttgccgccggagtcagagtctgagtcggagggggaggagatgaacggagccagcgggaaccaccagttgcagtaggagcagctagagtggttcaagcagcaactgcagcagctggccctcctgatgcaaca

SEQ ID NO: 4581 - DNA, 366 bp, Oryza sativa
  Clone ID: uC-osflcyp108a10b1
ggtcctcaagccaagtttggaagagcatccctgggttgccaacctcggaacctcggctactgcgggcatctgcttcaatcgcattccattgcattccattccatccgatcctttgctttcttcgccggaatagtccacggatcgaattccaaacccgcgaggaattcgatcatatatctagctagctacccctcgaaccgatcaacctcgcgatcccgaagaaaatccaaacatccgagacgccatggatgcagctcttctctcggcttcgacgacagcgccatgtggtcatcttcgtcttcttcttctcccatcggcgggcgccgccgcgtgccgggacacggagcatcacgagcgcggcggcag

SEQ ID NO: 4582 - DNA, 129 bp, Oryza sativa
  Clone ID: uC-osflcyp108a11b1
attgagagagagaaaaagaagaaagagaaaaaggctgcgccacgccgcccgccggctggccaccacccgcgccgtcgacgtcgtcggccgcagcagcagggcgctctcgacggtggaggtgccgatcga

SEQ ID NO: 4583 - DNA, 282 bp, Oryza sativa
  Clone ID: uC-osflcyp108b04b1
ccctgcgtgagcggcagcaagtgttcactgcgttgttcttctcgatctatcttccttggtttctcagagctgaagcttactagcgaccatgtacgggggagtcaagatgtaccaccacatccctggcgcaagccaaggatagacattgaccccactggaaaaagcacacacaacatggaatggcgcaacgttttattctgaacagattgtctaaggctgattagagaataccatgttcagattcttctgacgggccagatctctatatgacgcactggacca

SEQ ID NO: 4584 - DNA, 116 bp, Oryza sativa
  Clone ID: uC-osflcyp108b05b1
cactagagggagggtgcattatgctctctgacgaggaaactggtatatagtaatgcgaaatgtaaggtaatatgctgaggcttattgtgcccactgatgtggcgcataaaaatgaa

SEQ ID NO: 4585 - DNA, 197 bp, Oryza sativa
  Clone ID: uC-osflcyp108b06b1
tcggtgtatgctacgctgaaaggagaagaatacccgtgggtctttgatgaacatacgggggctactcatgcacgttcgcctaaagcaatagggcacatggaagactgccactggaagtaggacgagagctctctccagaggcatcgtaaccaccattatctgcataatgataccgtacgaggaacaatctgacttac

SEQ ID NO: 4586 - DNA, 152 bp, Oryza sativa
  Clone ID: uC-osflcyp108c02b1
tctgatccgaattccacctatccgtctgattcggcggcgccgagccagaaatgctggcctactactacttcaggggtgggggggagctcgagcgtcagctagctagctaggtgcgacgcgacgacgtgacggctggtattgctaaggtgagg

SEQ ID NO: 4587 - DNA, 453 bp, Oryza sativa
  Clone ID: uC-osflcyp108c09b1
gtttaaacaaacccctctcactcccactaccatggatccttgcaagttccggccggcgagctcgttcgacacgaatacgacgacgacgaacgcgggagctgcggtgtggaacgacaacgaggcgctgacagtggggcccagggggccgatcctccttgaggactaccacctgatcgagaaggtggcgcacttcgcccgggagcgcatcccggagcgcgtggtccacgcccgcggcgcctccgccaagggcttattggagtgcacccacgacgtcaccgacatcacctgcgccgactttctccggtccccgggcgcccagacccccgtcatcgtccgtttctccaccgttatccacgagcgcggcagcccggagacgatccgcgacccgcgcgggttcggcgtcaagttctacacccgcgagggcaactgggacctcctcggcaacaacttgcc

SEQ ID NO: 4588 - DNA, 361 bp, Oryza sativa
  Clone ID: uC-osflcyp108c10b1
gctgggttggcttctcctccccctctttaccttttcctcctcggttcggttccgtggttcgtctagggtttagtgggttgagatggcggcgcccgatgtcgagtaccgctgcttcgtcggcggcctcgcctgtgccaccgacgaccgctcccttgaggacgacttcttcacctacggagagatcctcgactccatgatcatcatccacagggagacggggaggtcacgtgggtttgggttcgtcaccttctcctacgagcagtggatgcgcgacgccatccagggcacgaacggcctggtgctcgagggtcgtgacatcaccgtcaatgatgaccatgcccgccgctccggcagcggaggc

SEQ ID NO: 4589 - DNA, 184 bp, Oryza sativa
  Clone ID: uC-osflcyp108c11b1
cctgttgatcatgagcaaccaattcgcaccgatggatcgatcgatcgatccagcagctagatcaacagtactagctaggaagcatggcccgtgcacagttggtgttggtcgccctggtggcagctctgctcctcgccgccccgtacgccttcgtggtcatcacctgcggtcagtgtaactccgc

SEQ ID NO: 4590 - DNA, 348 bp, Oryza sativa
  Clone ID: uC-osflcyp108c12b1
aatatagctcaaggacagacaatcccaaatgtgggaatctatctccctgaacctggtttctctcatgatcaactctacgttgcactctctaggggtgtctcgagggggacaaccagaattttggccaagccaaggatagacattgaccccactggaaaaagcacaaagaacattgtatatcgagatgttttattctgaacagattgtctaaggttgattagagaataccatgttcagattcttctgaaggcccagttctttatattattcattggactattgagcttggttgtttctggaggaccaggttgcatggatggcagaacgtggctgcatcgacagtaccat

SEQ ID NO: 4591 - DNA, 325 bp, Oryza sativa
  Clone ID: uC-osflcyp108d01b1
atgttcctgcaggtcatccgctagaaccttgcgaagacgtgcgcggagctctttttcgcgagcacatgagaccagggaagcactacaccaagatcgacgggtgtttctgcaggaaggtcaagatcgactgccaagaagagaccaccaacaggaccaacatggcttgactgctgaggtaagactgcaccaagagtggtgatgagttgaccagcctcaatggatgcgaagcccggatgaacgagggacatagcgagagctatagcagcactggtgcgagcaagaaggatgatgagaacttcccattgcctgagaaggtgataaagac

SEQ ID NO: 4592 - DNA, 346 bp, Oryza sativa
  Clone ID: uC-osflcyp108d02b1
ctctcctctgttctccctcctttgcttcgttcccatgccaattaatcaaccactttcacctccacatggcctaagaagccataatcttctattgacgtctgcatttgcacggcggtcgtcagcgattgggcacgacgggcatggcgtttccgccgcatgttctgattgctgcacttactatggttcttcgatttctctttttttattcttcttatctttttcttgtattactctttttctcacttccatatcttttcttccttttttctagtctctttctttactctcctcttcctctattcttttctcttcttttgttcttcttcctagttttctctttgtctct

SEQ ID NO: 4593 - DNA, 94 bp, Oryza sativa
  Clone ID: uC-osflcyp108d05b1
acttcttccaacggcatactaacctaaacaccatgaatcatttaaaacaaaggacgggttctctccactttctattaaattacatatgaaatat

SEQ ID NO: 4594 - DNA, 133 bp, Oryza sativa
  Clone ID: uC-osflcyp108d08b1
attatgtccaacggcacactaacccaactaccttgactcatagtaaccaatggccgaattcccgagaagatctcgcatctcctggtctacaacgaagacctcagccagtagctcctataaggggctgctctcg

SEQ ID NO: 4595 - DNA, 247 bp, Oryza sativa
  Clone ID: uC-osflcyp108d09b1
tttaagcccaacggcatctgaattcatcacctatgactcataggatgcggtggacgaggcactgcacaaaaacctcaatgagctgactggaacgatggttgcggccaagagagcctgtccaaggctgcactcaactggacctgttgcgcgtacacctgcggtagggctgacctatgctatgaggaggctccatagctcgttgaaagcttccaaccaggggtataacccaaaccctatgggaagttat

SEQ ID NO: 4596 - DNA, 506 bp, Oryza sativa
  Clone ID: uC-osflcyp108d11b1
ctttaagtctgaatggggtgccacccgccaggctgccgcccccaagccggtgactgtctccatggctgtccgcgctggtgcctacgacgatgagcttgtcaagaccgcgaaaaccattgcatcaccaggaaggggtatccttgccatggatgagtcgaacgcgacctgcggtaagaggcttgcgtcaattggccttgagaacaccgaggccaaccgccaggcttaccggaccctccttgtcaccgcaccgggcttgggacagtacatctccggtgctatcctcttcgaggagactctgtaccagtcaactgtagatggcaagaagattgtcgacatcctcactgagcagaaaatcgttccaggtatcaaggtcgacaagggtcttgtgccccttgctggctccaacaacgagtcatggcgccaaggtctcgacggccttgcctcgcgcgaggcggcatactaccagcagggcgctcgcttcgccaagtggcgcactgttgtcagca

SEQ ID NO: 4597 - DNA, 423 bp, Oryza sativa
  Clone ID: uC-osflcyp108d12b1
gtttttaagctcaggataaaccgcctcctaatgggagataaatccgttaatccgagtcattaatccacggataatcactgcggcatcgtaggccttttttgagctataaatagagctcctgatcccctcctccactccacaccaaaacctctccaatccccaaatcctcctcatctactcttccagaacctttctttttcgatttcgtgtccgagttctttgtgattgcagcgatggcgtccgtggatctgaccccgaggcaggcgaggaaggcgtacagcggcgatggtgggacctactacgagtggagccccgcagacctgcccatgctggaactcgccaacatcggcggcgccaagctgtcgctcaacgccggtggcctcgccctgcccagcttttccgactccggaaaggttgcgtatg

SEQ ID NO: 4598 - DNA, 127 bp, Oryza sativa
  Clone ID: uC-osflcyp108e06b1
atctcttcgaacggcacactaacccaatcaccatgactcatagtaaacaaaggccgaatgcccgacaacatctcgaatatcgtggactacaacgtccacctttgccattacctatatttaagggatg

SEQ ID NO: 4599 - DNA, 92 bp, Oryza sativa
  Clone ID: uC-osflcyp108e08b1
atcatgcccaacggcacacaaccccaatcaccaggactcatagaaaccaatggcggaatgcccgagagcaactcgtttatcgtggtctacaa

SEQ ID NO: 4600 - DNA, 126 bp, Oryza sativa
  Clone ID: uC-osflcyp108e09b1
actatgtccaacgtcacactaacccaactacctggactcatagaaaccaaaggcggattgcccgacaagatctagtatctcctggtctacaacgaagacctcagccagtagcacctataaggggac

SEQ ID NO: 4601 - DNA, 439 bp, Oryza sativa
  Clone ID: uC-osflcyp108e10b1
tctgaagcttacacgagcgctagctaacgaagggacagcgcgcttcgcgcgaaagatcggaagaaatgtcgaggccggccaggagcgacgcgcacctgtccccggagggggaggcggcgatggaggccgaggtgcgggagtactacgacgaggcggcgcccaagcgccactccaagccctcccgcagcgagccctccgccgtctacaccgacgcgctcgtccccgacgactcccaccccgagctcgacaggttccagcagctcgaagcccacaccgagaaattggtgtgcgagggtggcaaggcaggggatgagttcgtggagacggagttctacaaggatcttggctgcgtcggcaagcagcaccacacgactggaacagggttcatcaagatggacaagccctcggcggacgccttgtttcatctgtctgatgaccc

SEQ ID NO: 4602 - DNA, 371 bp, Oryza sativa
  Clone ID: uC-osflcyp108e12b1
gctctagatcgcggcgcggcgcggccgccgacgggcgaggtttctcgaccgaccggaacatggcttcaatctttggatgcatgcgtgctttagtccatcattgatgtccccaaggtgcatgggatgatatctgaagaaaatatgaggggatgtttctagaagatgcaaaaaatgatatggtcattccttggaggtctacggaagataaacctcatctggaagtagggtcaaagtgtgtttgtcataacgtgcatctgatcctctttcatactgctactacgagatttataggattatgctccctccaaaatgtctgaaatttgttactttatcctgataaaagcaatgctttctatatgctcaagaaccct

SEQ ID NO: 4603 - DNA, 123 bp, Oryza sativa
  Clone ID: uC-osflcyp108f02b1
gctgccaacaactttgcccgtggtcactacaccattggcatggagattgttgatctgtgccttgaccgcatcaggaagcttgccgacaactgcactggtctccagggcttccttgtgttcaac

SEQ ID NO: 4604 - DNA, 540 bp, Oryza sativa
  Clone ID: uC-osflcyp108f03b1
ggagccacacgcgcgcgttttgtctaaccggataaaaccccaatctctaggcgcccccgccgtgatgtctcgccggtacgacagccgcacgacgatcttctcgccggaggggcgtctctaccaggtggagtacgcgatggaggcgatcgggaacgccgggtcggccctcggcgtcctggcggccgacggcgtggccctcgtcggcgagaagaaggtcacctccaagctcctccagacctcgcgctccgccgagaagatgtacaagatcgactcccacctcgcctgcgccgtcgccgggatcatgttcgacgccaacatcctcctcaacacggcgcgcctccacgcccagcgctacgccctctcctaccaggagcccatccccgtcgagcagctcgttcaatccctctgcgacaccaagcaggggtacacccagttcggcggccttcgccccttcggcgtctccttcctcttcgccggctgggacatgcaccatggcttccaactctacatgagcgatccctcccgtaactacagtggctg

SEQ ID NO: 4605 - DNA, 259 bp, Oryza sativa
  Clone ID: uC-osflcyp108f04b1
gtctagtcaatgggcgtactgatccaactgcccgggctacctgtataacatggcagggtacccgtgcttttctcccacgatttagtccagatggaaagcatcttgtgtttatctcagcaaagagtgctatagatagtggaacacacaatgcgacaaattcaatgcataagattgactggcctgcagatgggaaattggagggcctcactgttgctgatgtggtacctattgggaagtgccctcaggatggttggttttc

SEQ ID NO: 4606 - DNA, 52 bp, Oryza sativa
  Clone ID: uC-osflcyp108f05b1
acctcttccaacggcacaataacccaactaccaggggtctttttaaccaatg

SEQ ID NO: 4607 - DNA, 131 bp, Oryza sativa
  Clone ID: uC-osflcyp108f06b1
atctcgtccaacggcacactaccccaactacctggactcattgtaacccatggccggtttcccgacaacatctcgcagatcctggtctacaacgtaaacctcagccactagatcttataaggggctgcact

SEQ ID NO: 4608 - DNA, 323 bp, Oryza sativa
  Clone ID: uC-osflcyp108f09b1
ctctcttgtcggagttgctcctgctccatcgtcataggcggcgccaccagaaatgaaacaggcttagggggtggaagcccaaaccggggaaaccctagatatctctccggttcgtcttgttgcttctccagaccctagatccccgccatgcaccatcccagggcgcgctacccgccgggctacacctgcgggggaggaggaggaggcgtatacggaggtggagacctaccgctcctgcttagaagattttcatagatcgacatacgacctcgtctgctcctgtcgccggagtttatatccatttccctatatcttccttaaca

SEQ ID NO: 4609 - DNA, 469 bp, Oryza sativa
  Clone ID: uC-osflcyp108f10b1
ggtcatgggtggttggcgtttggagatcggtttggtcgtcccgcgggtcgagacgatcttgagttatatggagtcgggggattttgtgcaaaagaacgatttgtttcccttcctttctttctcgtggagcttcggattcggatgcgtacgagcgtaggttcgccagagatggatttcttcagcgaatatggtgatgctaacagatacaaaatacaggaagtcattggcaaaggaagctatggtgtagtttgttcagctattgaccaacatactggcgacaaggttgcaatcaagaaaatacacaatatctttgagcacttatctgatgctgtccgaatcctccgtgagatcaaattactccggctattacggcatcctgatataggtgagatcaagcatataatgctacctccatcaaggagggacttcaaggacatatattgtgtctttgagctgatggataccgatc

SEQ ID NO: 4610 - DNA, 293 bp, Oryza sativa
  Clone ID: uC-osflcyp108g03b1
ctgctgctctctccggagccaaggcgaggaggcggcggcggcggcggcggcggcggcgcgagacgagatcgtcgagtccggcaccccacccccgtccttcgcttcacacgaaaaggaagggaggaagatgagctccgtgtctgaggcggggcaccagaccgggatgctggtgtgcttcacctgcgcgcttcagtacattgcttttcccaattgatatgctgttcctataccattcctacaaaaacttttacactatcttttaaagcttaatattctacatttattcttacatt

SEQ ID NO: 4611 - DNA, 398 bp, Oryza sativa
  Clone ID: uC-osflcyp108g04b1
atttagttgagcggcacttctaatgagaactgtgggcgactttaaaagagctgggggtgacccctccaccatccgcctagagatccgcttgattcaaagccaggatgaaactcgaaggccccagattacatgcaaggctgtgaagtatagctgaaaccatatcacaaccatgggaagcatcatcaaacatcaattagtgaatagtgactggagggagagtaccagtgttaaaaacaattttggtattctgcttgtatgcacaatatttatcaacatgccttctgggcttaacctcttggggataccctttttagttggatcataggtttcaaaaccagaaaagggtgttttttctaaaaaccaaaataattcacattgctggccttttttttttttct

SEQ ID NO: 4612 - DNA, 489 bp, Oryza sativa
  Clone ID: uC-osflcyp108g08b1
aataaaaaactgtatcaaacacgcgtcaattattagaccatatatacgaccaggctagcacaatggagaatttcccatggtgaactttgtattaattccacgatatgcttagcagtattgttacatgatatttttatttttcaagggagggaaaaagttttgcctcgtatattaatagagaaggaggtattattacatgataatcccaaattgaaagcaaagtagaacacagtacaagaaaacatttcgaaattcctctaaagctaaagaatatgaagcatatcgccattgcccattgtgcaccagcaactgcggacaacagtaacagcgtggttaatttgtctcaattctcaaacacgaagagctgaaaatgcttctttgattgtcatgacttcagcgtaaacatcttgcattgctgggcgatcctttgggtgtctccatggagcatgagataccaagcttagcaagttgcatgacacaacccagcat

SEQ ID NO: 4613 - DNA, 219 bp, Oryza sativa
  Clone ID: uC-osflcyp108g10b1
cctgcgccgtcgtgcggccttctctcctgccgggcgtcgcccgccgcgtcgcttcgccacctcaccctcctcctccgatcgtcgccgtcgccgactaggcctcctgcatccatcgtagccgccactctttcctagcaaggtcatcgcatcgcatcagcgtgatggcccccgtcctactcgccggttgatgcgcccacacggagatggtgtatgcaattt

SEQ ID NO: 4614 - DNA, 499 bp, Oryza sativa
  Clone ID: uC-osflcyp108g11b1
cttatctccatcccgcgagcgagcaggggcgccgggcgctggcgccgtcgttcgtcctgttgcttccgcccgcatcctgaataaatgggagatagggaaagacgaactgtgtttgtcacagtagggaccacgtgttttgatgctcttgtcaaggcagtagattccccgcaagtcaaagaagctctactggaaaaaggttatactgatctaataattcaaatgggccgaggtacatatgttccatctaaggtctcaggagatggaactcttcaagttgattatttcactttttcgccaagcattgctgattatataagggatgcttccctggtcatcagtcatgcaggttcaggaagcatattcgagacgttgcgacatggcaaacctctaattgttgttgaaaatgaggatttgatggacaatcatcagagtgagttagcagaagaactggctacaaggaaacaccctttttgtgcaagcccacatacactaggagaga

SEQ ID NO: 4615 - DNA, 82 bp, Oryza sativa
  Clone ID: uC-osflcyp108h01b1
aagtgcggcaagttcgggtacaacctgctcgcgggggggtttataagccccaagagggggagaagacagcttgttatgcacg

SEQ ID NO: 4616 - DNA, 449 bp, Oryza sativa
  Clone ID: uC-osflcyp108h02b1
gttttctcttccgctttttcctctctctctcgcctggcctctgcttcctcctcccgttcgtctcccctacctacctagggtttctcgccgcctcgcatcccctcctcctcctcggctggttcgcctcctactctacgcttgctgctgcaggtacaagcgataagcagtagcttcttcatcaaaggttttgtgcaaaattatgcgatcttcatgggctgattcagttgcgaacgccgaggaatcggcgcccgcgactggtgctgctcccacccctgttgctaatcaccagaactcacgccccactcgcagcgcatacgtgcctcctcacctccgtggccaggcaccaaccacaactgcagctccagctccagctccaggaccagctgctgtccagccctcagcttctgtacagccttctggttacgcagctattgttggtggctctcgct

SEQ ID NO: 4617 - DNA, 183 bp, Oryza sativa
  Clone ID: uC-osflcyp108h05b1
ggatactcttcctactctgcaactgacagtgaaaagatggcattacagcatgagaagggcatgctgctccttgtggacaagaaaatcaacaatgccagagatcttataacaattctggaggatgctattaggggtggactcccaatcctaatacttacgggaggctatatatcaagaacctct

SEQ ID NO: 4618 - DNA, 395 bp, Oryza sativa
  Clone ID: uC-osflcyp108h06b1
gccgtccggtctcaccctcctgtcctcccctcctcgacgtggggctagggttacgccccctgctgctgctcctcctactactactcgagagagggcatggccggaagcgaggcagcaaatgcgcaggaggcagagaacagacccggctgctaaggagaggggaaaccatatcacaaccatgggaagcatcatcaaacatcaattagtgaatagtgactggagggagagtaccagtgttaaaaacaatctcggtattctgcctgtatgcacaatattcatcaacatgcttcctggcttcaactctggggataccattttagttgatcataggttcaaaacaagaaagggtctgatttcaaaaacaaaataatacacatgctgccttttctctctct

SEQ ID NO: 4619 - DNA, 160 bp, Oryza sativa
  Clone ID: uC-osflcyp108h07b1
gtatgcaagaagatacacgatatctttgaacacatgtctgatgctgcacggattctccgtgagatcaagcttctgaggctgctaagacatcctgacatagttgagatcaagcacattatgttgcctccatcgaggagggatttcaaagatatttatgtag

SEQ ID NO: 4620 - DNA, 455 bp, Oryza sativa
  unsure (1)..(455): unsure at all n locations
  Clone ID: uC-osflcyp108h10b1
cctcgttcgctcatcgcgtctcgactccactactgtggttgcatatactactacacttgcagttgcatccagagcccgccccgcgtctctactcgctccgccgcgccgtcgtctctcccgacttcggcgacaagcgagcgacgcaggccaccgcgcgcggttcgttttcgcgagggaggccgccgccgaccagccgccatggtctcgccggacaccatccgcacggccatcggcgtcgtaggcaatggaaccgccctcgtgctcttcctctccccagtgccgacgttcatacggatctggaagaaggggtccggtggaggcagtactcgtgcggnngccgtacgtggccgtacgcttgctcaactgcatgatgtgggttggctgtccgggcctccccgcggtgcaccccgcacagcatgcctggcattaaccatcaacggcaccggcatgggcat

SEQ ID NO: 4621 - DNA, 423 bp, Oryza sativa
  Clone ID: uC-osflcyp108h11b1
attgaaaggcgtcttcgtactcgcctctctacgggcccttctccgacgacgatcggcgccgttcgtctccgacgccaccgccggcgtcatgagggagtgcatctcgatccacattgggcaggccggtatccaggtcgggaacgcgtgctgggagctctattgcctcgagcatgggatgcagcctgatggacagatgcccggtgacaagaccgtcgggggaggtgatgatgcttttaacaccttattgagcgagactggtgctgtgaagcatgtccgcggcgctgtttataccgatcttgaacctagcgtgattgatgaagtgaggactggtgactaccgtcaggtctttcaccctgagcaggtcatcaatgggcaaggaggatgcaaccaacaaactttgcccgggtcactacaccattggca

SEQ ID NO: 4622 - DNA, 387 bp, Oryza sativa
  Clone ID: uC-osflcyp108h12b1
attcagtttgcaggcactcctaaggagaactggggaagactataaaagagctggggttgacccctccaccagcagcctagagatccgcttgattcaaagccaggatgaaattcgaaggccccagattacatgcaaggctgtgaagtatagctgaaaccatatcacaaccatgggaagcatcatcaaacatcaattagtgaatagtgactggagggagagtaccagtgttaaaaacaattttggtattctgcttgtatgcacaatattcatcaacatgcttcctggcttcaactctggggataccattttagttgatcatagtttcaaaacaagaaagggtctgatttcaaaaacaaaataatacacatgctgccttctttctctctc

SEQ ID NO: 4623 - DNA, 471 bp, Oryza sativa
  Clone ID: uC-osflcyp109a07b1
tgtcctccctcctatgcaccatcctctcccttgttcttatccttgaagctttcacaactagccatggcgagttcgtctaccatggcttttctggtgttaacctcacccttgatggaaatgccatggtcacaccagacggcatccttgagctcaccaatgacacaattaatctaggacacgcattttatccaactccacaaaacttccgtaaattttccaacagcacagtgcaatcattctcactcagctttgtgtttgcaatcctctcagtgcatgatgatataagtgcagatggcatggccttctttgttgctccaagcaagaacctttccaatacatgggcacagtatataggtctcctcaatagtaggaacgatggcaacagaagcaatcacatgttcgcggtcgagcttgatactacccaaaatgatgagttcaaagacatcgacaacaaccacgttggaatcaaca

SEQ ID NO: 4624 - DNA, 454 bp, Oryza sativa
  unsure (1)..(454): unsure at all n locations
  Clone ID: uC-osflcyp109a10b1
tgcagaaacaaacccctctcactcccactaccatggatccttgcaagttccggccgtcgagctcgttcgacacgaagacgacgacgacgaacgcgggagctccggtgtggaacgacaacgaggcgctgacagtggggcccagggggccgatcctcctcgaggactaccacctgatcgagaaggtggcgcacttcgcccgggagcgcatcccggagcgcgtggtccacgcccgcggcgcctccgccaagggcttcttcgagtgcacccacgacgtcaccgacatcacctgcgccgacttcctccggtccccgggcgcccagacccccgtcatcgtccgcttctccaccgtcatccacgagcgcggcagcccggagacgatccgcgacccgcgcgggttcgccgtcaagttctacacccgcgagggcaactgggnacctctcggaacaactttccc

SEQ ID NO: 4625 - DNA, 437 bp, Oryza sativa
  Clone ID: uC-osflcyp109a11b1
tgtctcctcttcctactgctgctgctgctttctctctctaggctgcttgctttgcttgcccctctctctctctctatctacaaatgttctcttcttttgagagaagagaggaatagctgcaacacaaaggaaggcactgcttgcactgtgcagtgtgcaggcacagccaagttttcaaaagaacccgccatcttctttctctctctactgtcctagcaattctctctctagctccagtattaatttctttccatcctccattttcttgggcaccgtgcgagcttagctctgcactgtttgcctcagttgggttggtttggttttggttgcttcttctttgcttcaacgggtggtcgccctcaatgcacgaaagccttgcccggaaatgctcctcccgttgagctttttcgtaaacgtttgaaatccaaagcaacagc

SEQ ID NO: 4626 - DNA, 376 bp, Oryza sativa
  Clone ID: uC-osflcyp109b01b1
ttgtgctctgagggactcataacctggctggggctaacaccggggatggctgataaaacacaggaggggcaggcgatgaaacagctgccagtacccatagcagtcagaccataaatccaggaccactttgaggaggtgtgttcggggcatagagagcagaaatagcgactaaaacactacgaagactggtgctcatgagagcacgtcgtgtcggaacaatcgatgatgaaactgtcaaaaagaagctccagaccgtggagatgccaatactgtcagttagaggctggggcttataagcgcaagcggttgctactttggatgacatatccctgctcagataagaatatgcgcgcgtggacacatgttcctggggtat

SEQ ID NO: 4627 - DNA, 522 bp, Oryza sativa
  Clone ID: uC-osflcyp109b02b1
ttgtgatagtaaattaactgcaaaggctggtgatggctctgtgaaaaaggatgtacttggttctcatggaggaagcagttcaagtgcccaagggatgggccaacaagcagcataaaatcaaggaatgggttatatgcaacctcagtaccataatggggatgtctcaaactgaagataggaccttttcatgcaactgttgctaggtggattttatttggtgctgcagtcgttagctaatatatatacctacacctcatggtgagcagtgaaggaagtaacttgctaccacctctaggtcccatgtttgtcaaccaggaactgatgctgcttggaagcgtcgagccaaggctgcttctcagatgtaaattactccccgtgaggatagtttcggttcgtggtctagctctgttgttgtatgtatattcaggataatttaacaattggtctttggctgtcattcggttccatataatctgtattgggaggcataaatattcatgttgtatttcgtcctgaactagc

SEQ ID NO: 4628 - DNA, 549 bp, Oryza sativa
  Clone ID: uC-osflcyp109b03b1
tgcgaacaaccccaccaagtcctccaaggccatgggccgggacttgcgtgtgcacttcaagaacacccgtgagacagcttttgctatcaggaagttgcctctgggcaaggccaagaggtaccttgaggatgtgattgcccacaagcaagctatccccttccgtaggtactgcggtggtgttggccgcactgctcaagctaagtcacgccattcaaacggtcagggacgctggcctgccaagtctgctagattcattctggatcttcttaagaatgcagagagcaatgctgaggtgaaaggtctggatgttgatactctttatgtgtcccacattcaagttaaccaggcccagaagcagaggcgccgtacctaccgtgctcatggacgcatcaacccttacatgtcctccccgtgccacattgagcttatcctgtcagagaaggaagaaccagtgaagaaagagcctgagtctcagatcgcagccaggaaggcctagagaaggaagctttgccccccttctgcctgtttggtagatcagattattatata

SEQ ID NO: 4629 - DNA, 460 bp, Oryza sativa
  Clone ID: uC-osflcyp109b06b1
tccagccacacctctcttcaatctctcgttctctttttggctcctctttctttttcccccaacggagaggagagaaggcaaggagccgggggagatgggatcggactcgccgcccaagaaatggggcctcagggagcagcgcgaagcctacctccggtgtttctccctcgccgacgacgatggagatgggcgcgtgacggggaaagacgcgctcaagttcttcgccatgtcgaatctctcccgccccgagctgaagcaggtctgggcaatcgctgattccaagcgtcagggttatcttggattctcggagtttatgaccgcaatgcagctggtttctcttgcacaagctgggaatgagattagtcaggacacccttgcacatgcagatttggagacgttgctacctccgacaatggaaggtctggacaaaaaacttaaaaataattctatgagcaagagc

SEQ ID NO: 4630 - DNA, 552 bp, Oryza sativa
  unsure (1)..(552): unsure at all n locations
  Clone ID: uC-osflcyp109b09b1
tgcggagcagctcgtgctcgacctctgcgaccccgagctgcgggagaacgccctcctcgacctctccaagaagcgagagatttttcaggatcttgctccactcctgtggcactcttatggaacaattgctgcactactccaggagattgtgtcaatctatccatcactttcacccccaacattatctccaggggcttcaaaccgtgtctgcaatgcacttgcacttcttcagtgtgttgcctcacacagtgacacaaggattcctttcttgaatgctcacatcccactgtatctgtaccctttcttgaatactactagcaagacaaggccttttgagtacttgaggcttaccagcttgggtgtcattggcgcacttgtgaaggttgatgattctgaagtcattgggtttctgctgcaaactgaaataattcctctgtgtctccgtactatggagatgggcagtgaactttcgaaaacgggtgccacctttattgttcaaaagattctgcttgatgatgtngggcttcgctacatatgtgctactggctgacg

SEQ ID NO: 4631 - DNA, 451 bp, Oryza sativa
  Clone ID: uC-osflcyp109b10b1
tcaggggagaaaaccctaatctcaaggccgcggctgtgagcgctcctcccgtctctcccccaacccgccgccagccaccgagctcgccaccgtctccgttgcctcgccgtgctctaggttctcggatggaggccgaggcggcggcgaagagggcgcgggagagcggtgacgcggcggtggccggtgccggcgagcaggcgggtatctctgccgtcatccctggatggttctccgagattagccccatgtggcctggtgaggcacactcattgaaggtcgaaaaggtactattccaaggaaagtcggactaccaaaatgtgatggtgtttcagtcctccacgtacggcaaggtgcttgtgctggatggagtgattcaggtcactgagagggatgagtgtgcttaccaagagatgattacccacctccccctttgctctatcaaagatcccaa

SEQ ID NO: 4632 - DNA, 426 bp, Oryza sativa
  Clone ID: uC-osflcyp109c01b1
tttggcttctcctccccctcccggttcggttcggttcggttcgggtccggttcgatttcggtttttccttcggttcgggggttggtgggaaagcatggcggcgccggatgttgagtaccgctgcttcgtcggcggcctcgcctgggccaccgacgaccgctccctcgaagccgccttctccacctacggcgagatcctcgagtccaagatcatcaacgatcgggagacggggaggtcgcgcgggttcgggttcgtgacgttctcgagcgagcaggccatgcgcgacgccatcgaggggatgaacggcaaggagctcgacggccgcaacatcaccgtcaacgaggcccagtcgcgccgctccggaggcggaggcggcggtggctacggccagcgcggcggacgcggaggctacggtggcggcggcta

SEQ ID NO: 4633 - DNA, 450 bp, Oryza sativa
  Clone ID: uC-osflcyp109c02b1
tccttattggcaatatcttttaatcattaatgggcaggaaaaagggtaggaataggttggcaaaacaggaactggtaaatctagcatgctgaatgctctgttccgtattgtggaactggaacgagggagaatattggttgatgattgtgacacttctaaatttggaatttgggacctacgaaaagtactaggaattataccacaggcacctgtcctattttcaggttctgttcgatttaatctggatccttttaatgagcacaatgatgcggatctctgggaagcgcttgaaagggctcatctaaaagatgtcataaggaggaatgctctgggactagatgctgaggtctctgaggctggtgaaaattttagcgttggacagcggcagctactgagtttagctcgtgcattgctgcggagggcaaagatacttgttcttgatgaggcaac

SEQ ID NO: 4634 - DNA, 446 bp, Oryza sativa
  unsure (1)..(446): unsure at all n locations
  Clone ID: uC-osflcyp109c05b1
cgccgtgcttaattaattaggaacagaaataagggttttttcaagaagaccgttgttcccggtcttcttcttcctggccggggcctggccgggggggctgggcgccttggacgggaaccagaggctcgccgccaagtcccagtacgggtcgttcctgaggttgctgacgcagacgaaggtcgcggaggagacgaaccggctcaagtcggcgtcgctgctggtcctccaagacaaggccatgaagccgatcacgtcgctccccgccgacaagcagcggatggccatggccaaccacgtnctcctcaagtacttcgaccccatccagctgggcgagatgaaggaccgnaccgncatgctccccacgctgctgtccaacaccgacaagaagctcggcgtcgtcaactacaccaagggcagcgacgggcagatgtacctgggcgcccccc

SEQ ID NO: 4635 - DNA, 515 bp, Oryza sativa
  Clone ID: uC-osflcyp109c07b1
tgcggcggcggcgacgctggagaggcggtcctgcgacgatggtccacgtcagcttctaccgcaactatggtaagacattcaagaagccacgtcgcccttacgagaaggagcgtcttgatgcagagctgaagctagtgggtgagtacggactgaggtgcaagcgtgagctgtggcgtgttcagtatgctttgagccgtatccgtaacaatgcaaggcacctgctcacacttgatgagaagaatccacgccgcatcttcgagggtgaggcactgcttcgccgcatgaaccgttatgggctccttgctgatgggcagaacaagcttgattatgtccttgccctcactgttgagaactttctcgcaaggcgtcttcagactcttgtcttcaaggctggcatggccaagtccatccaccatgctcgtgtcctgatcaggcaacgccacatcagggtcggcaggcaaattgtcaacatcccgtcgttcatggtgaagggtgagtctgagaagcacattgac

SEQ ID NO: 4636 - DNA, 435 bp, Oryza sativa
  Clone ID: uC-osflcyp109c08b1
tctcggctcccctccgattcaccgcgatgtcggcggcgatctccggcgccagcctcgtcctctcctcgccccccgcgcccggggcccggccccagccgcgccccgcgcgggtgtcggtcgccgccgccgcgcccgccgcgcgacgcggggtcgttgccgccgcagcggtgtcgagccccgccgtgtcgtcctctgctggtaaagatgccaaacagattcctaaggactttcttcatattgatgatttcgacaaggatacaatcatgaagatccttaatcgggctattgaggtcaaggcaatgataaagtcaggagacaggagcttccaacctttcaaagggaaatcaatggcaatgatatttgccaagccgtcaatgagaacccgtgtttcatttgagacaggattctttttgcttggtggccatgctatctacc

SEQ ID NO: 4637 - DNA, 505 bp, Oryza sativa
  Clone ID: uC-osflcyp109d01b1
ttcttctcctccccctctttaccttttcctcctcggttcggttccgtggttcgtctagggtttagtgggttgagatggcggcgccggatgtcgagtaccgctgcttcgtcggcggcctcgcctgggccaccgacgaccgctccctcgaggccgccttctccacctacggcgagatcctcgactccaagatcatcaacgacagggagacggggaggtcacgtgggtttggcttcgtcaccttctcctccgagcagtcgatgcgcgacgccatcgagggcatgaacggcaaggagctcgacggccgcaacatcaccgtcaatgaggcccagtcccgccgctccggcggcggaggcgggggctacggcggcggcggtggcggctactgcggcggtcgtggaggcggcggctaccgaggaagtggcggcggcggctaccgtggcagccgtgggcggcgctacagcggcgacttccgcgggaactggaggaacttgattgtggggcccat

SEQ ID NO: 4638 - DNA, 508 bp, Oryza sativa
  Clone ID: uC-osflcyp109d02b1
tcgatccaggcaaaactaatattggtttgccaccctctatggacaggtattaagttgtggtgcagtcagatttgtagctaatctggggatgagcgacatttttctgaatcagattcattcattgcaatataagctttaaagggcaatataagcaatttcgtgctagctgatgatcagaggatagtagcaatgtagtttaatttcaaaacgaaaaggaatgatgcatagggaggaaaaccttttgttcaaaacaaaattatatcattagatttctcaagaccttgctgttttgtgttttgctattcattgagcattttagcttaaggcctaatttttataacccaactatgaccgactttgcaattttgcattagttttattgttgcagctatattggatttgggtaagtaatcgccattatgtcacacttttgcttggattgggtctcatgaccggtggcaaagcagcggtgaagatgcggcaattaggagaccaacaggggcgagac

SEQ ID NO: 4639 - DNA, 512 bp, Oryza sativa
  Clone ID: uC-osflcyp109d03b1
ttcgtgccctcctctctgtcgctgtcgccacgtgccctcctctccgtcgctatcgccgcccgccctcctctccgtcgccgccgccgcgcgccctcctctccgtcgccgtcgccgtcatcgcgcgccttcctcttcgtcgccatcgccactcgccttcctctccgtcgccgtcgccgctgcctccctctatttcgccggcgacaccgccgctgccatcctctattccgccggtcatgccgttgccacctccctctatttcgccggtgatgctgccgccctctattccaccttcgttgttgtcctctgctctggtgccgtcaccgccaaactgccctcctagttgcagctagaggtgtttgcctgtgtggccctgctctttccctgccatggatacgtttctttgaatgagcaaacaagcttcatgctctatcactaactgcgaggacagacaattgccccataatgcttgagtcttttgtccaagacgattccaacatcaggattgccatcta

SEQ ID NO: 4640 - DNA, 414 bp, Oryza sativa
  Clone ID: uC-osflcyp109d06b1
ttgagacattttacagttgagcaaattactttaaagggatggcttttccaaatattcagggggggtcccggtaggtggaggggaagttaaagttttaaaggaatttgtcctggacattttgttaatgcacagttggtaagcgcaaaccttcgcctgatttttatctacatgctgtggaccacctaaacgttgatccagcaagctgcatattcattgatgacaggatgacaaacattgaagcagcccttagtgtaggaatggtttggtttgcaatttaaaaatgctgaggtgctcaagaaggatttatgctcgcttggagttgaatttgcacctgtgcatgaaggtgaaatacaagtccaataaggttgcactttgttaactcttttgctcatgtggataaaattcatttatctg

SEQ ID NO: 4641 - DNA, 474 bp, Oryza sativa
  Clone ID: uC-osflcyp109d08b1
taacacacgcagctcgccgaccagagacagagagagatcccatctgctagcttagctgccatggccgcctccaccgtctccggcctcgccggcgccaccctcgcccgccggccggccttctccaccggcttcacgacgggcgcccgggtgtcggcgaggaacccgctgctgacgaggaacctggagaggaacggcaggatcacctgcatgacgtttccgcgggactggcttaggagggacctgaacgtgatcgggttcgggctgatcgggtggatcgcgccgtcgagcgtcccggcgatcaacggcaacagcctcacggggctcttcttctccagcatcggccaggagctctcccacttcccctcgccgccggcgctcgactcgccgttctggctggggttggtgacgtggcaccttgggctgttcctggcgctcaccttcggccagaacgggttcaagggcaggaccgagggc

SEQ ID NO: 4642 - DNA, 547 bp, Oryza sativa
  Clone ID: uC-osflcyp109d10b1
tcttacagataagggagccaatggaagactaggggaaatccaacagccagcagcattagtcagtactcaggacagctagatcagaaggtgactaccaactcccatctctttaaaaaccagagttttgctcatctttacccagagaagggccctagaaaacataaggtcataacaagggtctgaggatcttagctagcacaagatctcaactcggcatttcattggagtttttcacgcctaatggatagcagcagtggtagccagggaaagaattccaaaaccagtgatggttgtgaaacaaaagaagttaataacactgcacagaattttgttcatttcacggaagaagaggaagatctcgttttcagaatgcacaggcttgttgggaacaggtgggaacttatagctggaagaatccctggaagaacagcaaaagaagtagaaatgttctgggcagtaaagcaccagaatacataaggggggaaaaagggtgtatgccctaaaagtagcgtacaattcagaagcaaacttttttagaaaaggattt

SEQ ID NO: 4643 - DNA, 532 bp, Oryza sativa
  Clone ID: uC-osflcyp109d11b1
tttctcatcccagagcaagaagctcatctcctcctcctctcgcatggcagccatggccaccaccgcgtccagcctcctcaagacctccttcgctggcgcgcgcctccccgccgccgcccgcaaccccaccgtctccgtcgcgccgcgcaccggcggcgccatctgcaactccatctcgtcgtcgtcgtccactcccccctacgacctcaacgccatcaggttcagccccatcaaggagtccatcgtgtcccgcgagatgacccggcggtacatgaccgacatgatcacctacgccgacaccgacgtcgtcgtcgtcggcgccggctccgcggggctctcctgcgcgtacgagctctccaaggacccctccgtcagcgtcgccgtcatcgagcagtcggtgtcccccggcggcggcgcgtggctcggcgggcagctgttctccgccctggggttgcgcaagccggcgcacctgtttctcgacgagctcggcgtcgcgtacgacgagcaggaggactacgtcgtcatcaagcac

SEQ ID NO: 4644 - DNA, 475 bp, Oryza sativa
  unsure (1)..(475): unsure at all n locations
  Clone ID: uC-osflcyp109d12b1
ttttgcagtggctgatgttgccgcggccattaaagctgggttctacgacatagggattggtgcaggcctggaatccatgtcagtaaatgctatgggttgggaaggacaagtaaaccctaaagtaaatgaagtccagaaagcacaggattgtcttttgcccatggggataacgtccgaaaatgttgcgcaccgatatggtgtaacaagacaagagcaggatcaggctgctgctgagtctcataggagggctgctgcagccacagctgctgggaaattcaaagatgagattgttccggtgcctacaaagattgttgaccccaagactggagaggaaaagaaagttgtgatatcagttgatgatggaattaggccagggaccacagcatctggattggcaaagcttaaaccagnttttcggaaggatggtaccacaactgcaggcaactctagtcaagtgagcgatgggtgctgagct

SEQ ID NO: 4645 - DNA, 561 bp, Oryza sativa
  unsure (1)..(561): unsure at all n locations
  Clone ID: uC-osflcyp109e01b1
ttaccctctgcgccccgcacgctcccctctcccctcctctctctcgcacacccgccgccgccgctctcccctcctctctctcgcacacccgccgccggcgccgccggcggcgtcgatccgacgtcgattcccatcttcagatcgacgccaccggcgccccctcacgccgcttctactcacgccgcaagaacgctatcgcctcgcctcatcgatctccgacaacaccgccgcgcgccgccgccgatctccgccgcaagaacaacgtcgctccgcctcaccgatctcctccgacgatattccgcgtcaattaatcttcagatcaataaggcagtggaggccgaggaggccgccatccacaaccgacaacgacaacgcgatgctgctgccgcctcaagatccaccgctgcctatccgtactcacgccaccgttcctcctccgccgaaaggttcagggcacccttcgccacccctaccccatccctaatatgtctcctctctcccgataagtatccctgatgtcgatcttatgtaaaagcatganttatgctcaatatatattca

SEQ ID NO: 4646 - DNA, 469 bp, Oryza sativa
  Clone ID: uC-osflcyp109e05b1
tcaaatttgactgcaaatagtatgtgttagaggaccgggaggaatggttttttcatataacctttaatgaggttaacagattttggttggtccttggtgggttgaattgccatgctgagaggggcacacctctgctcttctattcaaaaatattgattttaaacccaacctaacttttgatttttcacaacacttgaaggtctcgaacagtggtatcctaaagtttttgttatgtttgtttttttttaaaaaaaagttttttgttataagaaaattaaatgcacggtaagtcactcctctccccctccccctaaaaagaaaacctaatttggtggcaaataaaaatattttgtaaataaaacaataaccatcaagctaaacaggttctcaaatttgagttatgcttgaagtttaggagataaattcaaaccaaataacacggaaattaagctattggttgtttttacta

SEQ ID NO: 4647 - DNA, 518 bp, Oryza sativa
  Clone ID: uC-osflcyp109e06b1
tttggcttgggatattctgaagaattcatcggttctgtgttctagagacagagtcaagaatatcagtggcatggatgaagcttattatgggtggatagcttttaacccatcaatttggaatatggcttgggcaccctcatctttctaaaaggacatatgggttcacttggatttaggggggatcatcattacaggtgacatttgagactgataattccattcaggatgaaacaagtatgagtctaaggattggttctatcagtcatcaacttagtgcttattctctgtctggttatgggctaaatgatgcatttgacaaatctgttgcacatcttgtgaagaagttgggaggggcagctggtaatgaaaaagttcaggttaagcatccttgtctacaaacgggatacaaagaagattatatttgttcttactgccacccgctcaaactaggtggaagtcccagtgttggagggaagacaacaggcaaagagaagcagggaatgcagttgaactgatcg

SEQ ID NO: 4648 - DNA, 486 bp, Oryza sativa
  unsure (1)..(486): unsure at all n locations
  Clone ID: uC-osflcyp109e07b1
tcttggaaaggttgaaatttgtgatagggaaatttatattcgtgacccatctgaaggagaaagtattctcccttcgattgctaaggattacccagatatgatagttgttgactacactgttcctgatgctgttaatgctaatgctgagctttactgtaaacttggattgccatttgttatgggcacaacaggtggaaataggcaactgttgcacaaaacagttgaggacgcaaacgtgtatgctgtgatatccccacagatggggaagcaggttgtcgcgtttcttgctgccatggaaatcatggcagagcaattccccggtgcattttcaggttacaaactagaggtcatggagtctcatcaagctacaaaattggacatttctggcacggccaaagctgttatctcttgctttcagaagttgggtgtgtcatttaactngaacgaggttaagcaagtccgggatccttaggaacagcttacatt

SEQ ID NO: 4649 - DNA, 514 bp, Oryza sativa
  Clone ID: uC-osflcyp109e10b1
tatttccactgctgttatgactgttggcattgcccttgtcagttggttgggccttccttacaccttcaccatctttaactttggtgcccagaagacagtgcaaagctggcaattattcttgtgtgtggcggttggtctttgggctggtctaatcattggatttgttaccgagtattacaccagcaacgcatatagccctgtacaagatgttgctgattcttgcagaactggagctgccactaatgtcatttttgggcttgctttgggttacaaatcagtcatcatccctatttttgctattgctttcagcattttcctcagcttcagccttgctgccatgtatggtgtttgctgtggctgctcttggaatgctgagcacaattgccacaggtcttgctatcgatgcctatggtcccatcagtgacaatgctggaggaattgctgaaatggccgccttgagccacagaattcgggagagaactgatgctttggatgctgccggaaacacaactgc

SEQ ID NO: 4650 - DNA, 492 bp, Oryza sativa
  unsure (1)..(492): unsure at all n locations
  Clone ID: uC-osflcyp109e11b1
tttctaacacccatcagcaacaatggcatcctcttgtctccttctggcctgtgtcgtggcagcggccatggtgtctgcagtgtcatgtgggccgcccaaggtgccgcctggccccaacatcactgcggcctacggcaaacagtggctggaagctaggggtacctggtacggcaagccaaagggtgccggccccgacgacaacggcggcgcttgtgggtacaaggacattgacaaggctcccttcctcggcatgaactcatgtggcaatgaccctatcttcaaggatggcaagggctgcggctcctgctttgaggtcaagtgttccaagccagaggcctgctccgacaagcccgtcatcatccacatcaccgacatgaacactgagcctatcgccgcctaccacttcgacctctccggccatgcttttggtgccatggctaanggaggcaaggatgaggaactccgcaaggcgggaattatcgatatgcagtt

SEQ ID NO: 4651 - DNA, 516 bp, Oryza sativa
  unsure (1)..(516): unsure at all n locations
  Clone ID: uC-osflcyp109e12b1
tggaactcttaccctcatcatgcactaatgtctttaaaacagtttcaaaatttgtgtttatctaaataatcgttacaaaatctggactggattaggtatggcaatgcaagctatgtagatgaaaggcaccgccaccgatatgaggtgaatcctgaaatggttccagaatttgagaaggcaggtctctcttttgttggcagggatgaaagcgggacacgcatggagataattgagctaccaactcataggttttttgttggcgcacaatttcatcctgaattcaagtcaagacctggaaagccatccccacttttcatgggtaaatcagcctttcacctctacctcatcttgcctgaaacatatatgctatttatttatcttttcaagccaaatgatcaatttcgtttgcaaagccgaatagttaaactaaacaatatgcctgaatttcaagccaaatgatncaatttgctggcaaagctgaatacttaaactaaactaaatgcctgaatgataaca

SEQ ID NO: 4652 - DNA, 441 bp, Oryza sativa
  Clone ID: uC-osflcyp109f05b1
ttccgcgtgggcaggtggggactttttggatggtctttaacaattaccagcaccattcaaggaaaaaggagggaccttcctgcatttcctaacccgactatgggcagttttgggcggaaccttggcaatgacaggaatgcttgaccgatggatgtaccggcttattgagtctgtcacaaaatcaaagaccagaagcgtactacggtaattgcgcatcacatgataagtggaggcaaactgtgacaaccctgtgtgttgtcactggtcatacaaatcagtcagagcatatcgtctcagatacggtcaaccccagtgggttttcatgttttgatatgctctatggctcgattgcttaaaatacttatgttgttagctttgtcattaatcactcatgttagactggcacggactcataacagttttgtaatcaatgattcccac

SEQ ID NO: 4653 - DNA, 508 bp, Oryza sativa
  Clone ID: uC-osflcyp109f08b1
tttctttcccctctcctcctctcctctaccttctctctaaaagactggatacagaacaaaaaaaagggaaaaaacagaaagaaaggaaagaaagaagaacacctaccaagcaagtcttggtctttgagttcatgggctgtggaattgttcccaggaatcccctctggctctgaaaagattcacaccgagcaacagttctttgatttttttccccctttgttttgctgaagaattgcttgtacagaactgcttctttcctgtttccgcttggttttccggtgtttattttgttggaattttcttgggccctttcttcttcgcttgtggaggcgaggggagaagagaggcatgggaaagcaaggaccttgccgtcattgcggagtcaccagtactcctttctggagaaatgggccaccagataagccagtgctctgcaatgcatgtggctcaagatggagaactaagggttcgttgacgaattacacaccaatgcatgctccggatgata

SEQ ID NO: 4654 - DNA, 560 bp, Oryza sativa
  Clone ID: uC-osflcyp109f09b1
tctgccagcccctaccttcgttagagttccttcaaggagctaactctaatgaggctagaggttgtttcttgtaaggtgataggttggtactagtaaaatatagaatcctttgttcattcttgtccttccatcacagtcgtttctacagtttggaccgctttccagcctttgaccgatggcatcgcctgcagcgccaacagcaacggagttcactcaggaagctgctcgtcagtctctcattgagatctctcagtccctcccggagaaaccttcagcccagaacctggaggtgaagtcaccgagcccacgtgcagcaaacgaagatcatgaagatggagcagagaaatacagatcaaagctgatctcaatctcctacctttctccggatgcccaaccgacgccgtgccctcccaagaatgtcctcacttaactgtgacgatgctcctactcgtgcgtgtgtggcacagtatatcagtgttatacctcacttttagctggaaagatggaaatggaatactttttggtgcttatgtttctaaccctaagaaccattcaggggg

SEQ ID NO: 4655 - DNA, 519 bp, Oryza sativa
  unsure (1)..(519): unsure at all n locations
  Clone ID: uC-osflcyp109f10b1
ttcgacgcctaccagcagcgtcggaggaggaatggatacctcagtcaaggaaggaggaggatgaacgagagagcaaggcatgcagacagggaagacagcattcggcgaactgtttatgtttctgatattgaccatactgtgacggaggagagacttgctgatatatttgctaactgtgggcaagtcgttgactgcagaatctgtggtgatccacactcagttctaaggtttgcattcattgagtttgctgatgaagagggcgcaagaactgcacttaaccttggtggcacaatgcttggtttctaccctgttagagtcttaccttcaaagacagctatattgcctgtgaatccaaagttccttcctaggacggaggatgagaaggaaatggtcataagaactgtttattgtacaaacatagataagaaggttactcaattagatgtaaagaatttctttgaagaactttgtnggaggtctctcgtttgagacttctaggggataatgtacattctacaa

SEQ ID NO: 4656 - DNA, 532 bp, Oryza sativa
  Clone ID: uC-osflcyp109f11b1
tttccagcagcaccagctgctcctgctccaatgccagacctccttggtgatttgatgggtatggataactccattgttcctgttgatgaaccaacagcaccttcaggccctccactacctgttttgttgccatcaaccactggccaaggactgcagatcagcgcacaactagtgcggcgtgatggccaaatattctatgatatatcttttgataatggcactcaaactgtgctagatggattcatgattcagtttaacaaaaatacctttggccttgcagccggtggtgcacttcaggtctctccactgcaacctgggacctcggccaggacgctgctacctatggtggcattccagaatctctctcctggagcgccaagctcactgctgcaggttgcggtgaagaataatcagcaacctgtgtggtacttcaatgacaaaatccctatgcatgccttctttggtgaagatggcaaaatggaacgaacaagttttcttgaggcctggaaatctttacctgatgacaacgaat

SEQ ID NO: 4657 - DNA, 486 bp, Oryza sativa
  Clone ID: uC-osflcyp109f12b1
tcttacacagttcacacaaccacaagcttcaaagctccctactacttctcctcctccttcttctccggcgccggcgacgatgacgctgacgatcccggacgacgtgcgggcgaaggcggaggtgtacgtcggcgacgaggccgggcaggagaagacgcggctgctgctggaggagacggggctccccagcggcctcctccctctccgcgacatcatcgagtgcggctacgtggaggagaccgggttcgtgtggctgaagcagcggcggaaggtggaccacttcttcgccaaggccggccgccacgtcagctacgccgccgaggtctccgccgtcgccgagaagggccgcctccgcaagatcaccggcgtcaaggccaaggagctcctcatctgggtcaccctccacgagatcgccgtgcggacccccccaccggcaagctcacctgcaaggccatcggcggcctctcccgcagcttccccgtcgac

SEQ ID NO: 4658 - DNA, 506 bp, Oryza sativa
  Clone ID: uC-osflcyp109g01b1
ttccaaaaccctagctcaccggcgtcggcggcggcgtaaggcggtcgccggcacgccacagcaaaggcaaacccgcagcagcacgaacaaacaggcgagcgatgggaggaggcgaggccaccagcggaggaggaggagggttccgcgcgcgggtggagcactacctgtacagcggcgagaagaagcacgtcgtcgccggcatcggcatcttcgccgccatcttcggcgtcccctggtacctcatgacccgaggggcaaagcattagtcgcaccaagattacatggaaagagctaacaaggcgaggtcggagaggctttcttctggacaggcatcttcgccaaaagagtgaaacagtcatcccctaactcagatttgcaaaacctcaggccgacacagctatgataatctgagaattcgatcctgttgtgaaataagcagaccatctcgattctcatctttcagttgtaggaaacatgggttgaatgtaatacgtcacatgaaattt

SEQ ID NO: 4659 - DNA, 537 bp, Oryza sativa
  Clone ID: uC-osflcyp109g02b1
ttgggggcggcgcggcggcggcggtggatggcgatggcgggcggcggggggctcaaccggtcgtcgtcgagggggcagctgccgccgcaggagcttctcgacgatctctgcagccgcttcgtgctcaacgtgcccaaggaggatttggagtcgttcgagcggatcctgttcttgctggagcaggcgcactggttctacgaggacaactccgtcgagcacaacccctccctcaagtcgctctccttcaaggacttcactacgctcatgttcaatagctgtgctgcgctcaggccataccgcgcgcaccttgatgacatttacaaggatttcactcactataagttccgtgtccctgtctgcggcgccatcatcctcgatgacacctacgagaagtgcttgcttgtgaagggatggaagtctagcgccagctggagttttcctcgtggaaagaggagtaaagatgaagaagatcatacatgtgctgttagagaagttctagaggaaactgggtgtgatgtttcgaagcttttaaaattg

SEQ ID NO: 4660 - DNA, 417 bp, Oryza sativa
  Clone ID: uC-osflcyp109g03b1
ttcgcagcagcagctccagcctctcgagcctccacgtcacatcgccggcgccggctcatgtctctcctcacctcgcccacgccgttcggcggcgcggccgtccgccgccgcgcccctcccgcttccgccgccgcggcgacccggctcgacctcccgctggtgggcagccgggccgcgctgcacgtggcgcgcgcgcgcagaggcggcgtctcgtcccgcacgcagcggcgcctggaggagcgcggcaagaataagcgccggggaggcggtagcgtcacggcgcccgcgccgcccgacatggacgaggacgccgccgccggggaaggggtggactgggaaggggagccgctggggttcgaggtgtcgacgacgccgatgcccgagctgccggacccggagaaagccgacttctgggag

SEQ ID NO: 4661 - DNA, 518 bp, Oryza sativa
  Clone ID: uC-osflcyp109g04b1
tcagatctccctgttcgggttgattcagtgtttgcacttcgttcttttgttgaagcatgcaaagatctcaacgagatacgacctatactccctcaactccttgatgaattttttaaactgatgaatgaagttgagaatgaggatcttgttttcactcttgaaaccatcgttgataaatttggtgaagagatggcaccatatgcactggggttgtgccagaatttggctgctgccttctggagatgcatggctagtcaagaagctgatgatgaagctgatgattctggtgctttggcagctgttggttgtttacgagccataagcacaatccttgagtctgttagcagtctcccacacctttttattcaaattgagccaactctgttgccaataatgcgcaggatgttgacttctgatggtcaagatgtttatgaggagttctagaaattgtctcatatatgacttttttctcaccatcaatttccgtggacatgtggagcctgtggcccgtgatgatg

SEQ ID NO: 4662 - DNA, 276 bp, Oryza sativa
  unsure (1)..(276): unsure at all n locations
  Clone ID: uC-osflcyp109g06b1
tggacgcgtgggtccgacttccgagcaaagccaagttgctcaccgactcacccgtagagctagctagccatggctgtcgccgcaagagccgccgccgtggcgtgcctcctggtcgtaggcctcgcggccgtggcgggggtcgacggcgcgacggcgagctccccgtccctggcgccggcgccggccgtggactgcacggcggaggcgctgaaggtggcggactgcctggactacgtgaccccgnggaagacggcgccgagccggccgtcgaagcag

SEQ ID NO: 4663 - DNA, 172 bp, Oryza sativa
  unsure (1)..(172): unsure at all n locations
  Clone ID: uC-osflcyp109g07b1
tcngactcagccggtgggaggaggagggcggcggcttttgccagcaacaggcgacgcgatggcggtgattgggaggggcggcgcgcgggtggcggtggaaggagcggagcgcaggctcctacgtcggccaccgcccacgaggctcacgaggcataggagcaacgcatgggcg

SEQ ID NO: 4664 - DNA, 423 bp, Oryza sativa
  Clone ID: uC-osflcyp109g08b1
tctctcgtaagattaaggggggaggaattggagggcagaggccgccattttaatcagtggaaataaaatccacgcattttatatatttaatttaacccccaattttaacttagcagcacactagctagctagctgctaagttaactatttgatcaggttacagttgctggcctgacagttaattaatctcttgctggttgattagttgctatcagctacacgctctcgctagctgccactgtactaatacatactcccatctattcgcctgagaaaatatcgaaaagtagcagcaaagaggagcaggcaagatggtgatgaaccctgacgccgtccgcaatgtcgttggaatcatcggtaacttgatatcgttcgggttgttcttgtcgccattgccgacgttcgtgacgatcgtgaagaaga

SEQ ID NO: 4665 - DNA, 430 bp, Oryza sativa
  Clone ID: uC-osflcyp109g10b1
ttcgtggtctgtactttggaatgtatgattctctgaagccagttgtactcactgggtctctccaggacaatttctttgcaagctttgcccttgggtggctgatcaccaacggtgcaggtcttgcctcttaccccattgataccgtccgcagaaggatgatgatgacctctggagaggctgtcaagtacaagagctccatggatgctttctcccagatcctgaagaacgagggtgccaagtcactgttcaagggtgctggtgccaacatcctacgtgccattgctggtgctggtgtgctctcaggctatgaccagctgcagatcctcttctttggaaagaagtacggctcgggcggtgcctaaactggcagaaaatgatgacgaacaagtgtttattcctggtcctgcactaacgggatctggtgaatttt

SEQ ID NO: 4666 - DNA, 556 bp, Oryza sativa
  Clone ID: uC-osflcyp109g11b1
ttgatcgagttgcgtgctcctgatcatatcgctgcctctgcaccggcctagccatggggagccgaggacgacgcggcggcggggagagagagaccgagacggaggaggatgagacgtggaagctgcgggtgggcgacgacttcaccgtcccggagcgcttccaccgcaagccccccttcttctccaggatcttccccgccggctcccatggaaagcatcggaaaattgcaaaatactacaagaagcaggaaaatctcctgaaggatttcagcgagatggaaaccatgaatgagattggttccttagatcagaatgctcctactgaggaagagttgaggcaaatggcaaagggcgaacgattggccatcaacctgtcgaatatcatcaatctgattcttttcattgggaaagttcttgcatcagttgaaagtttatcgatggcagtaatagcatcgacactggactccctactggatcttttgcaggtttcatactctggtttactgcacatgctattgaaaaagcccacaagtatagctatccaattgggaagaga

SEQ ID NO: 4667 - DNA, 506 bp, Oryza sativa
  unsure (1)..(506): unsure at all n locations
  Clone ID: uC-osflcyp109g12b1
tctgccactgagcgtgaagctgaggtaagaaggcgagaggccttctttaggacatggagtaagtacattccagaagatatcatgggttccatgggactttttgattccccaagccagtgcgatgtaacagttgctccatttgattgcaatcttctctcaattgatgttgatgatgtggaaaaacttgcaccccaatctttggtcgggtcttttctgaaatctgagagatcacaactgccaaagtcctccttgagcaattctggtaccagtggaaatttgagtaaatccgagcaatatccgccgaatgctgatgataagatggatttccaagactttctggggggttttgacagtgtggatattgctggaactagtaaattggaagttgaaaatgccagattaaaagcagaacttgcttctgcaattgcagttctctgcagttttggtgccgaatatggatatgaatctattgatgaagggcanattgataatgtactgaaagatgc

SEQ ID NO: 4668 - DNA, 492 bp, Oryza sativa
  Clone ID: uC-osflcyp109h04b1
ttatgcttcaatacaaacaccagagtaccgacctatcaatgtgtttgtgaatttctactcagaaccagaatacaagttcaaagttgagaggacaaattttttccctcaaccgaaggttgatggtgctgttataagctttaagctaaagaattcaggggattatccaccagttggttctcacaaaggtttcttttcaatggtgaactctgctttcaatgggaagcgcaagatgcttcgtaaatcactccagcacctgtgttcttcctctgagattgaggctgctctggccaacattggtcttccaaccttctgatctgttgttggatgattttgtgaggttgcacaatcatttgacaaaagcatgaatatttggtgccttcctaatgctcatggaactatctgttggtttgccggctgccctctaagcatatcgcctaagaaattttgtccccatagtatcactaccgactgcaggttcttgtagctgacact

SEQ ID NO: 4669 - DNA, 534 bp, Oryza sativa
  Clone ID: uC-osflcyp109h05b1
ttcctgtcaaacaccaccctatgacaagtgggtcccactcgaaccaaccgtacggccccccacccaaacccgctcccccctcgctccgaaaatatccacctctctagatctttctcgtcgcaaacgcccttccgcccccgcctcgccgcgcccattccaccacctttccgaaccttccactcccttccagactccacccccacgtcacccctatttaaacccctcctcccaccgagcaatcaagcgacaagatcgagaagccacaaaccccagcgcgatccgaggtagaagaagaagaagaagaagaagaagaagaggcgatcgagagatggagagcgccatgttcgggctggagacgccgctgatgacggcgctgcagcacctgctcgacatccccgacggcgagggcggcgccgccgggaagcagggcgcgaccggtggcccgacgcgtgcgtacgtgcgcgacgcccgcgccatggcggcgacccccgcgacgtgaagatctgcccgggcgacgcgtcgtgtgacatgcct

SEQ ID NO: 4670 - DNA, 501 bp, Oryza sativa
  unsure (1)..(501): unsure at all n locations
  Clone ID: uC-osflcyp109h06b1
tttgaagtccggagttggaagcgatcgatggcggctactacgatgggacgagttgttgcactcggcgcggtggccgtggtggtggcgctgacattcctcgccggcggcgcggacgccgactgctacgacttctgcttcaaggactgcatggccagggagaacaacatggtcgactactgcagctacgcctgcgacaagacgtgccagccggacaagcccacgctgtactcgtcgtcgtcgtcgtcccgcctcgccggcgacatggagtgccaactctcctgcgccttgggctcctgccaccgcctccttccggacggcaagggcgccgtggaggcctgcttcgggcagtgctacgacggctgcaagaccacggcggcggccagactgccgaggcctntccgcgccggccactacgtgctctctagtccccctgatgacgtagaccatgatccggaccaccgctacgtgttctctagcccccatgatgacgtagaccatgat

SEQ ID NO: 4671 - DNA, 521 bp, Oryza sativa
  Clone ID: uC-osflcyp109h07b1
tcccagtttcccccaaagctcctttcccagagaccccaaaccaaagcagcttgcttgcttgcttgattgtttgttgcttcttgagcccctctcctccttgcccaagtctgtgtttttgtggcagacttcagcataagggtgaagcaaagcatagggtctggttttgggttcttgacagaagtcatgtttcatggtggcaggcctttgtccctcaggggctctctcaaggcgcttgaagctgatatccaccatgccaacaccctggcgcatgctatacacagggcctatgggggtgcctgtgtgcagatgaggctgtcttacagctccatggctccaatcatccttaacctcatccagtggatggattgcagctgctccctttcatataccctccctagttacctaggtctccttgaggttcttgtgtacaaggtatatgttgatgaggatgcctctatatccaccaacattgaaaggagagcatgcctcaaggaattctattgctgaatatatccattctt

SEQ ID NO: 4672 - DNA, 458 bp, Oryza sativa
  Clone ID: uC-osflcyp109h08b1
tcttcaaccattgggaaatcaaccaatatactgtggcacaattgcccaattggacaatctgagaggcagaacttgttggggcaaaaaggatgtgtcatttggatcacaggactcagcggctcagggaaaagcactcttgcatgtgcactgaatcgggagttgcattgcagcggccaccttacttatgtccttgatggtgacaacctaaggcatggcctaaatcgagatctaagcttcaaggcagaagaccgtgcagaaaatatacgaagagttggagaagtggcaaagctattcgcagatgctggaatcatatgcattgctagtttgatatctccatataggagagaccgtgatgcgtgccgtgtgctgcttccagagtctagatttattgaagtatttatggatttgccactagaaatttgtgaagctcgtgatcctaaaggtctatacaagcttgc

SEQ ID NO: 4673 - DNA, 491 bp, Oryza sativa
  Clone ID: uC-osflcyp109h09b1
tctatattgggcatattacagggttcatggttaatttgtccttcggctacatgatttgatggtagcttcaacattagccgattgcatggtgtcttctttgtgtttaccgttcttaatcccatcagttttcaagtttttgatcaggtgcatgttttcttccgttctccaatgctgagtttattttctcgatccccaaattggaacatagctattaggtgagttgatgattgtactcatttttttctgcctttttgtaaaatagcatgcatgtgttcttctgattgccccatttttggacatataacttgataatatcgctatgttttatcttttgtaatgtcacttacatgatcgatctgaccctaattgacgaggtaaattttgattagacatttctacctttgtattcaattctgttctgattcctgaagagaattttacgtttccaagaaacgattgctgacgataacttagttttcctctccatgaga

SEQ ID NO: 4674 - DNA, 525 bp, Oryza sativa
  Clone ID: uC-osflcyp109h10b1
ttgtgtcggatctaattaatttacctcctccacctcctcctcctccccccgatcggatcggcccggctcctcctcctccgccgccgccaccgccgccgcagataggagaagatggccgcacttgataccttcctctttacctcggagtctgtgaacgagggccaccctgacaagctctgcgaccaagtctcagatgctgtgcttgatgcctgcctcgccgaggaccctgacagcaaggtcgcttgtgagacctgcaccaagacaaacatggtcatggtctttggtgagatcaccaccaaggctaacgttgactatgagaagattgtcagggagacatgccgtaacatcggttttgtgtcagctgatgtcggtctcgatgctgaccactgcaaggtgcttgtgaacatcgagcagcagtcccctgacattgcacagggtgtgcacggccacttcaccaagcgccctgaggagattggtgcttgtgaccagggacacatgtttggatatgcaactgatgagacccct

SEQ ID NO: 4675 - DNA, 532 bp, Oryza sativa
  unsure (1)..(532): unsure at all n locations
  Clone ID: uC-osflcyp109h12b1
tttaagctccagcaatcggcggcggcggcgacgcgggagaggcggtccggcgacgatggttcacgtcagcttctaccgcaactatggtaagacattcaagaagccacgtcgcccttacgagaaggagcgtcttgatgcagagctgaagctagtgggtgagtacggactgaggtgcaagcgtgagctgtggcgtgttcagtatgctttgagccgtatccgtaacaatgcaaggcacctgctcacacttgatgagaagaatccacgccgcatcttcgagggtgaggcactgcttcgccgcatgaaccgttatgggctccttgctgatgggcagaacaagcttgattatgtccttgccctcactgttgagaactttctcgcaaggcgtcttcagactcttgtcttcaaggctggcatggccaagtccatccaccatgctcgtgtcctgatcaggcaacgccacatcagggtcggcaggcaaatngtcaacatcccatcattcatggtgaggggtgagtctgagaacacattgact

SEQ ID NO: 4676 - DNA, 514 bp, Oryza sativa
  unsure (1)..(514): unsure at all n locations
  Clone ID: uC-osflcyp110a02b1
caattgaactctgacctccgcaagctggccgtgaacttgatccctttccctcgcctgcacttcttcatggtgggctttgcgccactcacctcgcgtggctcgcagcagtatcgcgccctcactgtccctgagctcacccagcaaatgtgggacgccaagaacatgatgtgtgccgctgacccgcgccatggccgctacctcacggcctccgccatgttccgtggcaagatgagcaccaaggaggtggacgagcagatgatcaacgtccagaacaagaactcgtcctacttcgtcgagtggatccccacaacgtgaagccagcgtgtgcgacatcccgccgcgcggcctctccatggcgtccaccttcatcggcaactccacctccatccaggagatgttccgncgcgtgagcgagcagttcaccgccatgttcaggaggaaggccttcttgcattggtacaccggcgagggcatggacgagatggggttcaccgaggccgagagcaacatgaac

SEQ ID NO: 4677 - DNA, 336 bp, Oryza sativa
  Clone ID: uC-osflcyp110a03b1
cccagactccacaccacacagcccccctttcccctcccctccacagccgtcgaaaccctagccccaaggttcccccacgcctcgcgctcgccgtcgccatgggcaagaagcggaagctcgattccaaatcccccgccgccgctaggtccgcagccgccagggccgcagcagccgcagccgccgccgccgccgccgccgccgtcgccgagccctcctcccagcccgaagccctagccgaggacccggccccctcgtcgcagcccctgggcctatccagcgagggcgcgggggagagggatgatgtcccgtgaggctggcggtggcgaggaagaggag

SEQ ID NO: 4678 - DNA, 423 bp, Oryza sativa
  unsure (1)..(423): unsure at all n locations
  Clone ID: uC-osflcyp110a05b1
ttccactcttctccaccccaagagaattgaagccaagcatggagaatggaggggaagaagatgacagagcaagccgatgcaagaggattaccagagaatcagatgcaaccaagaatggtgcagcgaccaagctgcaagctttgaggctcgtcgaggacctctccctcccttccgtgcaggtggtnggtgatgagcgccaacatgggctgttcgcactgccgacagcgggtcacaaanggttgtctccaagatgaacgggttgctagattacatggtggattttgggaagaagggaggtgacagtgagaagggacgatggtgcacaccaagaagaagaggaagcaacacatgaagcagcatgaggaaaacaagaagggaatcgcttgcaactgggagaaganatcgtcttctcagagcaatgac

SEQ ID NO: 4679 - DNA, 536 bp, Oryza sativa
  unsure (1)..(536): unsure at all n locations
  Clone ID: uC-osflcyp110a06b1
tctccattgctttctcgggttctcctccactcctctcgtctcgcgtgagtactcgcgacctcaccgccggcggcgacgagcggcggcggcggcggttgaggaaggaagggggagggagagcaggaaatgcggatgctgtccaaggcgtgctcgctcgtggcctcctccctcccgcggtgctcatcctccgctgcccccacgatcagagggcagccgtcgttgctgccaagcgtgcgcaaggaatggcttggcaagccgctgctgtacggaatcggcacgctgctcgtcatgcctctgaggacgctgcacggggtggacgngatgtttggcgctgggcggttcctctgcaacatgaccagcgtctcgtcgtcgctgcaaattgagctcgtaccctgccttcaagataactatgcttacatcctaatgatgntgatactggaacagttggagtggtggacccttctgaagcaacngccatcataaatgcactagaaaaaagaaaccagaacttgacctacatactngacacccatcat

SEQ ID NO: 4680 - DNA, 515 bp, Oryza sativa
  Clone ID: uC-osflcyp110a07b1
tcccacgcgtccgctagcattaattccgttggaaccctcaacatcatcgttttcaattgctggaggtcctgcattttcaaatggtttttcatctggatttggttccagtttttcccaagataatagctttagtcctttattaagggacgcagaagatggttatagtttctccaatggcacaaaggatgatatccatggactgagtggtttacataacttgggaaatacatgtttcatgaacagtgctatacaatccttggtgcatacacctccattggtggagtactttttacaggattacagtcgggagataaatacagaaaatccacttgggctacagggtgaacttgcaacagcatttggagaattactgagaaaactttggtcagctggtcgaacttctatagctccacgtccattcaagacaaaactttctcgttttgctccacagttcagtggatacaatcaacatgattctcaggagttacttgcatttctattggatggtctgcatg

SEQ ID NO: 4681 - DNA, 384 bp, Oryza sativa
  Clone ID: uC-osflcyp110a08b1
gttcgatcccccctcatctacttctcccttaaaaaccttccgtcttcctaatcctactcccaatgatccaccaaaggacgacgataccgaagggacggggaaaaaaatagagctggaataaaaagcaggaggaacagagagagggggaagggaaaggaaaggaggaggggaagagagacaggacaggagagcaaaggaaggggagggggaaagaaaggaggaaagagagaggagagggaggagaacgaggacacaagcagggggaagaacaagaacaggaactgcggagaggaggggatcgagaggggcgggaagagcaacgagagagaagggctgcagggcggaagcgaatgaggggaaagagacaaggcgaaaggcaacaaa

SEQ ID NO: 4682 - DNA, 487 bp, Oryza sativa
  Clone ID: uC-osflcyp110a09b1
ttctttccgtttcttgctccatccatctatccatccaaggagtgtggaacgccacacgtattttttttttatctatgctaatctgatcattagcagaggagagttttagcagtaggattggattaaattggagtagtttcatagtttgtgtgtagcgatcttaattagctttgattagacagacagtacagtagagtagaggatgttggctgtgttcagcggcgcggtgggtaaggtgccaccggagctggtggccgacggcagtgcggcatcgacgcccaagaccggggcgaggaagatggtcggtcaggttctcggcgccgaggaagaggacgtggacctgcggcttgtcgaccttggtcaccttgtctacttccacgccaaccaatcccttcttcgccccaggtatactagctgctgcttctactctgcttcaacttgaatttgctgaaaaaacatttgccgttttttttaccctgaactcccc

SEQ ID NO: 4683 - DNA, 466 bp, Oryza sativa
  unsure (1)..(466): unsure at all n locations
  Clone ID: uC-osflcyp110a10b1
cctaaaccgtgatcatggatacccacttcgtgttgttgtacctggagtaattggcgcacgctctgtaaaatggcttgacagtatcaacataattgaagaagaatgccagggtttttttgtgcaaaaagattacaagatgtttccaccctccgtagactgggacaatattaattggtcaactaggaggccacaaatggatttccctgtgcagtctgctatttgtaccctggaggatgnggatgttatcaaggaagggaaggctaggattgctggatatgcagtctcaggtggtggccgtggcattgagagagttgatatatctgtcgatggggggaaaacatgggtcgaggctcatagatatcagaaaagcaacgtgccatacatatctgatggacctcngagtgataagtgggcatgggttctattcgaggctacatagacgtttcagcanacgctgagatagtag

SEQ ID NO: 4684 - DNA, 477 bp, Oryza sativa
  Clone ID: uC-osflcyp110a11b1
gcagcatgccatgaccctcgtcttctccttcacaaacggggtggattgggatggaccgtacaccctcaagttcagggtccccaagccatggctcaacaagcccttgagcttcttcaacgagggtctagcagacgaactgaacagagaaggggcatgcgacagagccatcttcccagacgaaaacgttgtcatcacaagctgcgagatgggcagctactacgaagagggggagatcgctgcaagctggacattgtgtcagggtgcatggatccaaactcgcacatgtttgatccactcgccaccgtggatgacggatcatgcccaatggattccgattccgaggaatgaactgaactacagtctcagcgagttttattagcaaggagaagctgtaattagtggccactgttgttcaatgtaaaaagaaagaagcgacacggtatgatgtacaagaaagcacagatgtgtgatagaatg

SEQ ID NO: 4685 - DNA, 524 bp, Oryza sativa
  unsure (1)..(524): unsure at all n locations
  Clone ID: uC-osflcyp110b01b1
gatgacgacggtggggggggcggaccagagcgatcacagttactacacgctgaagagaacactagggcactcattagccgccggcagcgcacaggcgacaaaaaaccgcctctttgtggttgacgccaagcataccaacgtctccggcggcggcctcgacgtcccaggccccgggcatgcgctgccgttcgtggaggcggacctgaagaagagcttcatgctcgatatctagagggccagggagctctgcacccatgcgagctaagctctgatagaagtgctggaaggggacgccaggaaagttctttgtgagtgtgttgataggcatcatgcggatatgttggttcgaagaagccatgggctatggagcaattaaacgagctgtnattggaagcgtgagtgactactgtactcatcatgcgcactgcaccgtgatgatagtaaaaaagccgaagcacaagcactgagtccatgagcggcggccccagcctggactgaacagtatcattcatgtatatatctac

SEQ ID NO: 4686 - DNA, 519 bp, Oryza sativa
  unsure (1)..(519): unsure at all n locations
  Clone ID: uC-osflcyp110b02b1
tctgaaatctctttgagagaagtatccatcacataaggcaagtctcttacgtagaggaggaggaagagaagagaagagaagaaaaggacggatggttagccagtccaagacgccggcgccggagccgtcgacgacgaagatgccatcggcgcctccggcggtaaagggcgtagcgaagacgctggcgcagcaccacaaggccgtgatcgggttcctgcttggcttcttcctggtcctgctgctctacaccttcctttctggccagcttgtttcctcggaggatgccattgtgagggccgtcacacaacagtccacgcctgccgtgcataccgatcaagacggcaggaccacatctccgacttaccaacgtccacgtccagcaatacgacacaagataacttggaagggaaaaatactgagcggtctagccagccagctgtgaacgacgaagcaagtgacaagatggaggaggaatcttatccggcaagacattgatcaagctggaacgaanaatggcac

SEQ ID NO: 4687 - DNA, 514 bp, Oryza sativa
  Clone ID: uC-osflcyp110b03b1
cgaggcgctgcagctgttcgatcgtgattggaaaaagattgaagcatacgttggctcaaaaactgtgatacagataaggagccatgcacaaaaatactttttgaaggttcagaaaaatggtacaggtgaacatctgcctccacccaggccaaagcggaaggcagctcatccatatccacagaaggcctctaaaaatgtttcgccagctgctatatcacaaccccctcctctgggggagcaaggttgtgttatgtccatggatacatctcctgtcatcagaaatacaaatgccagtgctgtagtaccctcctgggacaattctattgctcaacctttaagtgcaagtcgcacgcaaggtacaggtgctgttgctacaaataactgctctagtagcatagagagtccttctactacttggccaacttctaagcagttgaacaagaaaatatgcttcgaccctacgtgctatgccagattttgacaagtatacagctttctgggaagcatatttgat

SEQ ID NO: 4688 - DNA, 406 bp, Oryza sativa
  Clone ID: uC-osflcyp110b04b1
cgcagatggaggcgccggcgatggagcccggcgagatggaagcgatgctccgggcggcagcggagttcgcgtcctacccaggagcgcatggtgatgacaccgtgaggcagttcctggagcaataccctctgcccaagctgttaggtgcattgcagagtgaggctgatgtacctgggatggatgaaactattgccgcatgcttggacaaagtattttcttcgagatatggagcatcatttctgccaagctatggtgcatttattcaagctggattgcttgcaaactcgaagaataccagacaactagcctgcaaagctgtgatacatcttcttgataaggctggagatagtgctggtgttgtggacacatttgttcagcacaatctatatcctcttctgatgaactg

SEQ ID NO: 4689 - DNA, 523 bp, Oryza sativa
  Clone ID: uC-osflcyp110b07b1
tttatgccaatattacgcaagttcacgaaggcttggagttttcgaatgatgatgatgggttctcctttgccatattttctgttaagttttcaaaagatggccgagaacttgttgttggaaacaacaatgaatcaatatgtatttacgatattggatcaaacaaagtaacagaacgcattcacgctcattcggctgatgtcaatgcagtcacctttgctgatgaaggtagtgatgttttatactctggaagtgatgatagcctctgtaaggtctgggataggcgctgcaacaagagaggaaaacaagttggtgttttgacaggtcatttagatgggattacatttattgatagccgtggagatgggcattattttatttcaaattgcaaggatcaaactattaaactatgggacatcaggaaaatgtcgtccactgtgaaagactgcacaccaaaagcatatgaatgggattacagatggatgacatatccctcagaagcccgatattttaagcatccatatga

SEQ ID NO: 4690 - DNA, 513 bp, Oryza sativa
  Clone ID: uC-osflcyp110b08b1
ggcttcctttctcctgttcagtgcatatatggatgaagtagctgctttcgcacaattgccattcaaagaggttgacatagcaatcccagaggtttttgttggtggtttacttggttcaatgcttatattcctgtttagtgcatgggcttgttctgctgttggcagaactgcacaagaagttgttaacgaggtcaggagacagtttattgagaggcctggcattatggactacaacgagaagcctgattacggtcgttgtgttgcaattgtggcatctgcttccttgagggaaatgataaggccgggggctttagccattatatcaccatggctgttggtattatcttccgtatgttgggtcacgctactggccggcctcttcttggagccaaagttgtagccgctatgcttatgtttgcaactggttctggtattctcatggcactcttcttgaacactgctggtggtgcctgggataatgctaagaagtacatcgagactggcgctcttggt

SEQ ID NO: 4691 - DNA, 515 bp, Oryza sativa
  unsure (1)..(515): unsure at all n locations
  Clone ID: uC-osflcyp110b09b1
gcgttgcgttggcggttgggcgtctcgtcccgtctcgtctcgtctccccacgacaagaagagaggcggtgcgcttctcctcctctcctgtcctctcctcctctcgtcgagcggcgacgcagaagagtagtatggtgcccgtggagatggaggtggacgacccccgcggctgggacttcgtcgactgggtcggccccgacgcctccgcctccatcttccgctccctcgacgaccccgccgacatcgtccgcgccgccgccgtctcccgctcctggcgccgattcgttgttgagaacgaattcagcaagagcatatgcttgcggatatgcccggagatcgccaatttcaccagcgcggaggaggtgagcagatcgccgccgcagccgccgcacgccgagtccagccatggcgtccagcgcaaggccctcgagagggactacaggatctactcctacctcagcggcgccctcgtctccaacagcccctccatggactgcatnnctgcatgcatcggcg

SEQ ID NO: 4692 - DNA, 397 bp, Oryza sativa
  unsure (1)..(397): unsure at all n locations
  Clone ID: uC-osflcyp110b10b1
ctttggtgtcgagagaagtcaaatcacaaccacttcaagagaaaaaggccccaggaaagaagccacctgctggtgctcctgctcctgcacctgttccagctgttgatgcttatcagaagattctctcgtccattcctgagttctccgggtttggaaggctcttcaagtcctcagaacctgtggagctgacagaggcggagactgaatatgcgattaatgtggttaagcacatatacagtagccatgttgtgttgcagtacaactgtacaaacactatacccgaacaactgctagaaaatgtgactgtttatgttgatgccactgatgctgaggaattttcagaagtttgttcaaagccacttagaagtttgccttatgattcacctgggcanatttt

SEQ ID NO: 4693 - DNA, 515 bp, Oryza sativa
  unsure (1)..(515): unsure at all n locations
  Clone ID: uC-osflcyp110b11b1
ctcttctcttcttcttcttcttctttcccttctcttctccgccgccgacgaccgaataaggagagtagaggagagagagagagagagagatggctgcggcggcgcgtctcctcgcgcgtatctcgaggcagggcgtggcctcggccgcggcggcgaggtggcaggcggaagcggcggcgctgctcggcgcttcggcggggcggcacttggccccgccctgctcttcgatcaaggccttgcctctgctgaatcagccgaggctgtactcaacttcaacctttcaaaggtttgggttttcatcttctgctccccagcaagatgataaggcagcaaataaacagacagaggatggagttaataaaagcactcaatctgaagcttcaaatgaaaccaatagttctcctggaaccgagaatgcatctcaagcagatacagaagaccttgacctgtcaaggaggacctgacaagctagttctggagaaagaagaattgntgaaatctaatgatgaagagtt

SEQ ID NO: 4694 - DNA, 525 bp, Oryza sativa
  unsure (1)..(525): unsure at all n locations
  Clone ID: uC-osflcyp110b12b1
gccaaatggtggcgctgcttcgctcgtgccgccgcctgatcccgcacctgtccgcctgcgccgccgccgcgccgtcgtcgtcatcgtcgtgcgctcctcgggctaggccgatctcgcggggactgcggctgctgccggtggtgctcgcaatggcggggtacagcagcggctccgccgcggaggggaggaggctgctgttcaggcagctgttcgagaaggagagctccacctacacctacctcctcgccgacgtcggggaccccgagaaacccgccgtgttgattgaccctgtggacagaacagttgatagagatctcaatcttatcaaggagttgggcttgaagctagtctatgctatgaatacccatgtgcatgctgatcatgtcactggaacaggattaataaagactaagttacctggagtaaagtccgtgattgaaaagtaagcaaagcaaaagcagaccattttattgagcatggngacanaatatacttcggtaacctcttccttgaggtacgatctac

SEQ ID NO: 4695 - DNA, 523 bp, Oryza sativa
  Clone ID: uC-osflcyp110c01b1
ggttacgtcacttgaccctgtatcaaagcaaatgtcttccacgtctaattcagaagcccgagaagctattcttcccaaaaaggctgcagtcctgtctgtttcccaaactcctgcaatatcgaggccttcaagtgctcctctgttccaggtaccaagatcaactttaccacctacgccagcagttcaagttcccccaatgctttcccgctcaatgaccctggctgggcgatcgaggaatgaaccatccccttctgttccaagttatacagcacagacctaccgaaatgccatcattggtaagagtaatcttgatacagcatcagcaagtcttgatcattcaacttcttttggccaaaacgtcgcactttcacagccactatcatcgtatgcatcagcagcatctgccatggtacctccggtcggaaggaatggccaattaccaggtaaacagggcttcatgtttgggcaaggaaagtccgaagcaattgataactggaacccatggaaaggtgatagtaatgct

SEQ ID NO: 4696 - DNA, 376 bp, Oryza sativa
  unsure (1)..(376): unsure at all n locations
  Clone ID: uC-osflcyp110c02b1
tgtgccgtgccgtgctccggaagatcggaatcgccctcctcccccgatcgatcgtgtccccccaattatagccccccccctntncccccccttcctccttttttccactttctcatcttcatatatcttctttccttcttcctacacttataaatctttatcaatgtttctacttacattactaccattcattccccaggcgattgacctcttatacgaccatgatccatcttattatgaatcctttttaatcgtactatgaacgtgattctatgaatgcatatcttaaatgccttttttacaaatactaatctttagacttcctcatggattaaattcactactatttaaggcattccaaacttctaacttttaa

SEQ ID NO: 4697 - DNA, 500 bp, Oryza sativa
  Clone ID: uC-osflcyp110c03b1
gccaagaagagggagagcaccaaggacacgcgactagcagaagccgagcgaccgcctcctcgatccatatcttccggtcgagttcttggtcgatctcttccctcctccacctcctcctcacaggttcttggtgtagcttgccactttcaccagcaaagtttcatgtctgatctcgacattcagatcccaactgccttcgatccctttgctgaggccaatgctggagactctggtgcggctgcaggatcaaaggactacgttcatgtacgcatccagcagcgtaatggccgtaagagcctgaccactgtccagggattgaagaaggaattcagctacaacaagatcctcaaagatctcaagaaagagttttgctgaatggactgttgtccggaccagagcttgccaggtcattcaactagggtgatcagaggagaacgtatcaattttcttgtcaggccgcattgtgaagaggaacacataagattatggttctgacaact

SEQ ID NO: 4698 - DNA, 486 bp, Oryza sativa
  unsure (1)..(486): unsure at all n locations
  Clone ID: uC-osflcyp110c04b1
ccgccaccgccaccatcgccgccgccgccgcgaagctcgccgccacccccgcccccgccccctcccggcgccgcctcacgctccgcgggaaccccaccgcgcgccgctgcgtcgccgcgatggccgtgtccacccccaggtcggccgccgccgccgcgttcctcgagcgccgcgagtcggagcgcgccctccacttcgtcaagtaccagggccttgggaacgacttcatcatggtggacaatagggattcggccgtgccgaaggtgacgccggaggaggcggcgaagctgtgcgacaggaacttcggcgtcggcgcgacggtngtgatcttcgtcatgccgggggtcaatggcgcggactacaccatgaggatcttcaactcggacggcagtgagccgaggatgtgtggaatggagtccggtgctttgccggattatagctgagcttggaaacctacagggaacacatagctttaaaattcacact

SEQ ID NO: 4699 - DNA, 510 bp, Oryza sativa
  unsure (1)..(510): unsure at all n locations
  Clone ID: uC-osflcyp110c05b1
gcgccgccatccccgagcaccaccaaccccaccccccgagcgagcggagcggagaacgcgaggcgaggcgaagcaaacatggcggcggctgcggtgtacggcgccggcggcgcgatgaagggcgggaagctcggcatggaggaggcgcgggagctgcagctcaaccgcatccgcatcaccctctcctccaagaacgtcaagaacctcgagaaggtttgcgctgatctggtgaagggcgccaaggacaagcagctgcgcgtcaagggccccgtcaggatccccaccaaggtgctccacatcaccacccgcaagtcgccgtgcggtgaaggaacaaacactgnngatcgtttcgagttccgcatccacaagcgggtgatcgatctcatcagctcccagatgttgtgaagcagatcacctccatcaccatcgagctggtgtcgagtccgagtgacgatcgtgatgtgtatgctgccaactagcactacctagacctacctgctggttctctgt

SEQ ID NO: 4700 - DNA, 157 bp, Oryza sativa
  Clone ID: uC-osflcyp110c06b1
tgagagagcacccatccatctcctcggaggcgaaaccttaacccacccaacccatcgtcgccggcgaaaaccctaatccatccgccgccgaaccgaagtacacgatggggagacctcgaggccgcggcggaggaggaggaggagggagggggtggtt

SEQ ID NO: 4701 - DNA, 490 bp, Oryza sativa
  Clone ID: uC-osflcyp110c08b1
gtttttcccttgctcgtctgcgccgccacctcctccaccttctgttgccctcccaaccatgacggtggccgagatcgggaagcaggaggaggagctccgcgcccagatcgaggagcagaagctcaacgagggagatgagccagtcgttgttgaagatgacgatgacgatgaagatgatgacgacgaggatgacaaagatgacgatgatgcggagggaggtgatgcacgtggaagatctaagcagagtcgtagtgagaaaaaaagcaggaaggccatggtgaagcttggcatgaagtctatcactggcgtgagccgtgttactgtcacgatgagcaagaatatcctttttgtcatcttcaaaccggatgtcttcaagagccctacatccgacacctatgtcatttttggcgaggccaagatcgaggacctgagcttgcagctgcagacccaggctgatgagcaggccaaggcgccggatctgagcagaatg

SEQ ID NO: 4702 - DNA, 498 bp, Oryza sativa
  Clone ID: uC-osflcyp110c10b1
gcatgcaggaacttggtttgtacagatctttttacaaggggaatagatatccaagctgttaatgttgttatcaattttgatttccccaagagcgcagaaacatatctccatagggttggtagatctggcagattcggccaccttggtttggctgtgaatttgatcacctatgaggaccgttttaacttgtatcgcattgaacaagagcttggaaccgagataaaaccaataccacctcagatagaccgagcaatatattgccaatagttatctgacagaacgatcttgtatgccaatctctggaagtaataagataacctgtgtaaatatcagctcatcaggtgtcatttcatgatctcacatggtgtatcttaatcaaagttgtgtaggggcactcagtagcaagtgactttgtaacaagctcatctaaatgctgtggcttagccgtgaagctcttgatcagacaatattgaatgttgctgataaggtctgacccca

SEQ ID NO: 4703 - DNA, 523 bp, Oryza sativa
  unsure (1)..(523): unsure at all n locations
  Clone ID: uC-osflcyp110d01b1
gcaccaaccccgtctccttcctccattcctccgccgctagaaccttctagaagctctcctcctcctcccatggcggcgacgatcgtgtccgtcaaggcgcgccagatcttcgacagcaggggcaaccccaccgtcgaggtcgatgtgtgctgctcagatggaacctttgcaagggctgcagttcccagtggtgcatcaactggtgtctatgaagctctcgaattgagggacggtggatctgattacttggngaaagggtgtttccaaggctgtcgacaatgtgaactcggttattgccccagctctgattggcaaggaccctacgtcacaggctgagcttgataacttcatggttcagcagcttgatggaaccaaaaatgagtgggggtggtgcaagaagaagcttggtgctaatgcaatcctggctgtgtcactggccatttgcaaagctggagctatcatcaagaagattcctctgtaccagcacattgccaaccttgctggaaacaagcaactggttttg

SEQ ID NO: 4704 - DNA, 462 bp, Oryza sativa
  Clone ID: uC-osflcyp110d03b1
cttctcctccccctctttaccttttcctcctcggttcggttccgtggttcgtctagggtttagcgggttgagatggcggcgccggatgtcgagtaccgttgcttcgtcggcggcctcgcctgggccaccgacgaccgctccctcgaggccgccttctccacctacggcgagatcctcgactccaagatcatcaacgacagggagacggggaggtcacgtgggtttggcttcgtcaccttctcctccgagcagtcgatgcgcgacgccatcgagggcatgaacggcaaggagctcgacggccgcaacatcaccgtcaatgaggcccagtcccgccgctccggcggcggaggcgggggctactgcggcggcggtggcggctacggcggcggtcgtggaggcggcggctacagaggaggtggcggcggcagctacgggcgccgtgagggcggctaccgtggcggc

SEQ ID NO: 4705 - DNA, 529 bp, Oryza sativa
  unsure (1)..(529): unsure at all n locations
  Clone ID: uC-osflcyp110d04b1
acatgctcagacagcactcaagaagggtgagtttgtggagtacattccaacaagagagtactaccaccgtcacacccggtgtctgtactgggaggggaagctgatcttgccattcggcgaccaattctggttcaggttcctcttgggctggctgatgccaccaaaggtgtctctgctcaaggccacacagggtgaatctatcaggaattactaccatgacaaccatgtgattcaagacatgctggttcccttgtacaaagttggagatgctcttgagtttgtttcacaaggaaattggaggtttatccactggtggctgtgcccgcaccggctctacaagctccctgtgaaaaccatggtgtacccagagcctggctttgagcaccaccacaggcaaggtgacactagctatgccaagatgttaccgatgttggtgtgtactatgctcctggtgctgtcctgaggggcgaggagttcaatggcgctctagctgtccacaggnctgagcagtggctgattgagaaccaca

SEQ ID NO: 4706 - DNA, 518 bp, Oryza sativa
  unsure (1)..(518): unsure at all n locations
  Clone ID: uC-osflcyp110d05b1
ctcctccctctcctcgcgccaccaccaccacgccccgtcgccgtccaagccggcgccggcctcctacgcggcgccactcgccgtcctcctcgcttgcaacgccacgcggttccagcccgcctgcgtctccacgctctccaacgcctccgccgacgcgtccactccggacctcctcgccgccacgctctccgcgctcagggcccgcatcccgccggccgtctcccgcngcggtccgtcctcgccgcctcctccaacgtcaacctcaccaacgccgccaccaactgcctcacgttcctctccctctccacccaccgcctctcgccgccgcctcgngtcggnngggccgtcgctcctctccgcctccaccgcgctcctccacctctacgactgctggtccgcctacaagtacgtcaacttctcccgcaccatctccgacgccatggcctacctcgacgacaccatcgccgtcaacagtaactacatctncatgctcgccgcgctgcagcgctacggcgacg

SEQ ID NO: 4707 - DNA, 378 bp, Oryza sativa
  Clone ID: uC-osflcyp110d06b1
ttttaagtcatcggcatcccagctgccgagtatccctcctattctaccaccgcctgcgatgtcggttcctcgtccccgccgtggccaaagcgaggccgacgctccatacaggccgtaccgcgttcctcgtgagattcaagcacccagcactgagctcgatcgggggcaagtcaccgtatggttaggaatcggtggcatccaaaccataccgacgatgaagatggatggccgatcggatgaggtaccacacgcatcctctgtatatgcgctgagtatttactcaattttcctgtgggagcaacagagcgggatgatgcgacgccgtcatcttgcacttcttcctgcctatccctgcactcttgcctgctgccacgcatc

SEQ ID NO: 4708 - DNA, 357 bp, Oryza sativa
  Clone ID: uC-osflcyp110d07b1
ttttcgcgttcggctcgtgggtcggcatcaagagcggcggcgtggtcgccgccctggtcgccggcgggatcaccatgtcgatcctgggcaacgcggccgacgtcccgcaggacctcaagacggcctacctgacgctgacgtcgccgcgcgccgtgttcatcagcgaggcgatcggcacggcgctgggatgcgtcctcaaccccaccgtgtgctggctgttttacaggcggtacaagatgggcagtggcgacatgggcgagatgccctacctcaagctttaccgcggttacgacatgcttagcgtcggtcacggggagcaaggtgctgccggcacagcatgctttttttcaaggtttt

SEQ ID NO: 4709 - DNA, 458 bp, Oryza sativa
  Clone ID: uC-osflcyp110d09b1
ccatcatctctcccacaaactcatcatcgtgtagttttaggccatctgagggcctttgaatggctctcggcctccttcatttttcatagcatttgtgtagtgtgtgcaaatccatcatcgcatcttcatatctgaagaaatgaaggtgaccactcagctcaagcccatggcctcctcgtcgacgtcgccgtcgccgtcgcggctgccgcggagcgcgagcggcaaggcgcccacctcgccgccgtccagctccaacgcctcgtgccgccaccaccagcagccgccgcgggcctcggcgtcgacgcccgccaccccggcgccgtcgcgccaccacctcaggtccgctgtccatcagctgcatgacgatcaggaccgacgacgactcgccgtcgccggccgacacccacaaggacaaggtggcgacggccaagccgctgtcctactacttgttgatgctg

SEQ ID NO: 4710 - DNA, 521 bp, Oryza sativa
  Clone ID: uC-osflcyp110d10b1
tttctttcctctcgccgccgccccctgatccaaagcctccgccgcgccgccgtcgagaggaggaggaggaggaggaggaggaggaggtggcttgtgcccctttgggtaccctcctccgtccgtgttctctcttccactcctcctgcgcctgttacgcctctccttctaccgctctcgctgtgtcggtgttctgctttcgcgtcctttttcgtgttgtgccttcctcatcgtttgctcctcctcccggttccttaagttgttgtcccgacttctttctctttgtctcttttttttacctttctgtgatcttatttcgcccttgtctgttccttttccattttgcattcgccgcatgctctctcattcttcgatttctttttctttgttcatatccgtttgcttcttcttgctgacttcagtttccttaatcttttttttgtctccatgtttttttttctttcacttttcctcttttttacctttctctattattttttccctttcatttttatctttttttc

SEQ ID NO: 4711 - DNA, 486 bp, Oryza sativa
  Clone ID: uC-osflcyp110d11b1
ctccttttggttgctcctcctcatagtaacctgtttactatacagtcacccgtactatacatatactcaattactaaattttactggccattctatttttctcacggttattccccgttttttccggatcgcaggtcggcgacgggcggtcgagcggcgggcggcctccggcttttgcttcctcggcgtgccgggtggtaggcggtggcgatggtgcgccagatccgatctcaacgcctccgaatggcagtggctggataacccctgattttttactccaatcgagggggtgtgttgcggccctagcaatttgcggcgttgtcaaggctcccctccatgaacggcagctccatctccgcgtaggcccatgtcaagaggcgctggaggcagatcgacggcctgatgatagcgcatgtctccaatgcagagatccctcactcattcgctgcctggagtactggaggcctggtcaatgcagctgagggc

SEQ ID NO: 4712 - DNA, 501 bp, Oryza sativa
  unsure (1)..(501): unsure at all n locations
  Clone ID: uC-osflcyp110d12b1
ggcttatcccccctcctccccggcctccctccgccaaggccgccggagcccgtcgccggaggcagctgcagggaaggacgccgtcgccggacacatgcggggttgggcttcccagatagcttgtctcttgctgcactaagctcttccaatttttaaaaatggcagctcccaagcccattgctcggcttatttcccatgtcattcttgatttagatggtaccctcttaaacacagactgtgttgtaagtcaagtgctgaaaccatttctagtcaaaaatgggaaaaagtgggacagcaagaaagctcataaattagttggaaagacaccttatgaggcagcagctgttgttttagaagattatggactcccttactcaacagaagaatttctctcaatgcttactccaatgttcaatgagcaatggtgcaacataaaagctcttcctggagctaatcggntgataaaacatttgaagagtaatggagtaccagctgctttgg

SEQ ID NO: 4713 - DNA, 522 bp, Oryza sativa
  Clone ID: uC-osflcyp110e01b1
ccaagatcaagagatcgatcatatcgtattttgtagtaatttagcagctagctagtgcagctgcaagctattagcgactgcatgctttgatcgatccatctagctaattgttgaatccatctaagcttaatggctctgcagcagagcatggcgatgccgatgatggtagtgtctgaccttggcaccgctcctcggtcatcgccgatggttcagctgcagaggatgaagaagcatctggtggtggtggcggcgttcaagagcagaaccaaggcttcccccaaggtggacaagtcgaacaagaacaagtcgatcgtggaggacggcatcttcggcacctccggcggcatcgggttcaccaaggagaacgagctgttcgtgggaggggtggccatgctggggttcgcggcgtccctcctcggcgaggcggtcaccggcaagggcatcctggcgcagctcaacctggagacgggcatccccatctacgaggccgagccgctgctcctcttctcatcctctcacgct

SEQ ID NO: 4714 - DNA, 519 bp, Oryza sativa
  Clone ID: uC-osflcyp110e02b1
gcctcgcctctctccatcatggtaagacagtacacaccacacaaatgatctagaatgacttacattgtgaaacggagggagcaataactaacaaaattaaccataatctgattcgctgatcaattgactccggtgtgcagaggctggtgatcaagacgaagagcgtggagttcatgccgttcctgctctccctgtccgtgttcctgtgcggcacctcctggttcatctacggcctgctcggccgcgaccctttcatcgcggtaatttactcatcgtctttcttttcgctgtcaattgctgcaagcctacaagcaacctgtcgacgttgattacagaaagctacgtaacctgacgacgagacatatgatccaatccgatcgatgctttttggttttttgtttggatctcgattgatcgtactgtctgatgggcacatgcaaaccgctgcaaaagcacagcactgcaccgcacaagcaacgctgtttgcaactcaatgccgcgaaatggccggcggcgtcg

SEQ ID NO: 4715 - DNA, 489 bp, Oryza sativa
  unsure (1)..(489): unsure at all n locations
  Clone ID: uC-osflcyp110e03b1
gtcacttccatctcattctcctaattgtcatcactagcttctagctagcttaattaattaattagccatggcggaggagaagcaccaccaccacctgttccaccacaagaaggacgacgagccggccaccggagtagactcctacggcgagggcgtctacacgtcggagacggtgaccaccgaggtggtcgccggcggccaggacgagtacgagaggtacaagaaggaggagaagcagcacaagcacaagcagcacctcggcgaggccggcgccctcgccgccggcgccttcgccctgtatgagaagcacgaggcgaagaaggacccggagaacgcgcacaggcacaagatcancgagngagatcgcggccacggcggcggtcggcgccggcggctacgccttccacgagcaccacgagaagaagaaggaccacaagagcgccgaggagtccaccggcgagaagaagcaccacctcttcggctgatcga

SEQ ID NO: 4716 - DNA, 495 bp, Oryza sativa
  Clone ID: uC-osflcyp110e04b1
tgcgagggccgccctttttttttttttttcagcatctgaattccgaagtggagtgggactggcaagcttagatcccacaggccagaacacatctccatttgctaatacattaacacggatacgtgcttaaagttgctaagaacgtcggtactagtgttactacaactgccagaggcaccctaccattgtctccagagaaataggtaaacctacgaggctacgaagtcgagctaactcaggccaacaaaaccaatctacgaacccccttcaagatcactaaaaaccatctaagctaactcaactccactgatgagggcagtcacttcacaaaatgcgggttcagaagcttggcgacctccaggaatcccacgcgctcttggccagcaaacaggaccttcagcttctcatcacacacgatcaccttcttgtccgcaggatctggagggttgtgctgcttgatgtaggcccagaggcgcttgagcgcctcggtgcggg

SEQ ID NO: 4717 - DNA, 529 bp, Oryza sativa
  Clone ID: uC-osflcyp110e05b1
cttcgatggtaaagaaatatgcaatgcaacaagcattcatgtcaatgatgacccaggcaccgtcaaacacttttggctcaaactcgcctttcccatttgccatgccaccacaggcagctcctgcagctcctagcagttacccatactcacaaccaaggaaagatacctctcctcaatctgcaactgtcgatgtttcagctactaaagtggaagcaactggaactttggaagaggctgatgtggctgaacagccaaagaagaaatttgcctttgttgacgtttctcctgaagagttgcagcaaaaggaacttcaatcttcactggagacagtggatgtaaaaagtgagagtaaacagagtgaaactatggaggatactgagcaaaaagctccaacaaatggaactgcttttaagatgaatgaaggttctgctagcgggacaactgaatctagcaattcagggcctatgttggccgttgatacaattgagaaaatgatggaagatccagccgtgcagaagatggtttaccc

SEQ ID NO: 4718 - DNA, 484 bp, Oryza sativa
  Clone ID: uC-osflcyp110e07b1
gggcatggtagatggagcctactatgaaatacttagttgtttcaggaggcgttgcatcaaaccagtatgtcagagcgcatttgaataacaacgctgagaagaatggcctacagctggtatgccctcccccaaagctttgcactgacaatggtgtcaagagcgcttggactgggattgagcatctcattgcaggcagatttgtggaccctactgctgaggatgagcctgatgatatgcagtatgacctgcgtccaaggtggcctattggtgaggaatattcagaaggaagaagtgcttctcggtcaatgaaaactgctcgagtccatccatcactcacatcgatgatacagggttctgttcattagcagtttagtggaaattgcaggagcatcaggccattgaagctagcgctttcatgtgccatgtggcttatcagtttcaggtttagtgaatactgacggtcccttagttcaagtgaataact

SEQ ID NO: 4719 - DNA, 354 bp, Oryza sativa
  Clone ID: uC-osflcyp110e08b1
gaagaaatggaggcttcacgcacggggttctaggccatgcttttcatggtgctgctgcttgcagccactggtgagatgggcggcccggtgatggtggcggaggctcggacgtgcgagtcgcacagccaccggttcaagggcccgtgcgcccgcaaggcgaactgcgccagcgtatgcaacacggagggcttccccgacggctactgccacggtgtccgccgccgttgcatgtgcaccaagccctgcccctgatcgatgaaccagcagctagcgcagcagcttgtgccgacacctcgtgcatgtgtcatcgtgtcaaacgatcggagcctagctgccctatgaatgaataaaagt

SEQ ID NO: 4720 - DNA, 505 bp, Oryza sativa
  Clone ID: uC-osflcyp110e09b1
cccatatctcgcctttcacatagttgcatcttctcctatccacagggataccttagcgttccattcagagatttggcatgttctcttccatgcactgctgcctcccttgatgtgcagcaggagctgctcatctttactcctttaggagttcttcagattgatcagaggcagtagccagcccattagacaaggttacgcattcaggcgccatggccacctcctcctcgccgatcacagccctatactcctcgttcctctcatatactccttccacgccatccatggcggcgctgccccggcggcgaagggccggctgccgctaccctcgtatccaggccgtcgatctcgaccagaacacgatcgcggcgatatcggtcggcgtcgtcagcgttgccatcggcatcggtatcccggtgttctacgagacacagatcgacaatgccgcgaagagggataacacacagccgtgcttcccctgcagtggctctggggcacaggtgtgcag

SEQ ID NO: 4721 - DNA, 527 bp, Oryza sativa
  Clone ID: uC-osflcyp110e11b1
actgactagggtagacagtactaggacgaggcaacagcgactgcgttgtcccacccacacatcttgcggttgcgcggcggagagagagattgatgatgtcttcttggttgttccggcggagtgggccctcgggcttctcgtgggcctccaccgccgaccaagtcaccgccgggctctccgccgccggcctcaccgccatcgtcaccggcgcctccagcggcatcggcgccgagacggctcgcgtcctcgccatccgcggggcacacgtcgtcatggccgtccgcaacctcgccgccgcgcagcccgtgcgcgacgccatcctcgccgacgcccctgccgcctccctcgacctcatggagctcgacctcgcctccatggactccgtccgcgccttcgcctccgacttcgccgccaagggcctccccctcaatatcctcatcaacaatgcaggggtgatggcaactcctttctctctctcaaaggatggtatcgagttgcaatttgccacttaccatgttggtcatttt

SEQ ID NO: 4722 - DNA, 450 bp, Oryza sativa
  Clone ID: uC-osflcyp110f01b1
taggttctctctaacgataacttcaagtttggttacaatgctgcaactggacagtacgaggatttgatggctgctggtatcattgaccccactaaggtggtgagatgttgtcttgagcatgctgcgtcggtggccaagacattcctcacatcggatgtcgtcgtcgtcgagatcaaggagcctgagcctgcgcccgtcaccaacccgatggacaactccggctacgggtacttgatgactaagttacagttacttgttctccgggaaggtcactggccgtcaatttttgggtagtaggcttgaatctgaattttggtgagatttgagtagtttcgagacaatttgatttgttcccatgggaagtgaaataaacagggtcactatagcaaaatttgtggtgtaactggaacgggtgtcaattacgaaggaagatatttgaaagatttcatg

SEQ ID NO: 4723 - DNA, 458 bp, Oryza sativa
  unsure (1)..(458): unsure at all n locations
  Clone ID: uC-osflcyp110f04b1
cactcacccgccgccgccgactcctccgagctccctcctccctcgtcgcgccttcccctcgacccgcgccgcccacgaccgccgcccagccgtcgtcgcatcccgcctcctccacaccatcgccgacgctccacgccgcctccgccgcatccccgatctaggccgctctgggcgcgctcctcctccgcgaatcgcttttctccccacaggcagatcgcgctcgcgatccaaccgccgacgccgctcccctcatccttcgccgcgcccctaccacgcctccaccgccggcgctcccatcgccgcgcccccaccacgtttccgccgtcgcgctcccgtcatccactccgcctccaccgncggcgcccccaccacgcctttgccgaccgccgctcctgctcgcccgaatcacgccnccgncgcgcgggcgaccgtcgtggttctccgcgggaccccaccgc

SEQ ID NO: 4724 - DNA, 515 bp, Oryza sativa
  Clone ID: uC-osflcyp110f05b1
gagagagaggaagagattgcagtgagtgagtgagtgagtgaagcagccatggcggcggcggcgagggcaacggcgcgggtcgggcttgcgctgctgctcgcggtggtgggcgtcggcgcgcaggactacgacttcttcttcctggtgctgcagtggcccgggtcgtactgcgacacgaagcagagctgctgctacccgcgctccggcaagccggcggccgacttcggcatccacggcctctggcccaaccgcgacgacggcagctacccgcagaactgcgaccctgacagcgagttcgacccctccaaggtgagcgacctgctggggagcatgcgctcggagtggccgacgctggcgtgcccgagcaacgacggcatccggttctgggcgcacgagtgggagaagcacggcacctgcgccgcggcggcgctcggcgacgagcacggctacttcgaggcggcgctccgctccggtcgcggctgcccgtgctcgccgcgctgcgcgacggcggcgtg

SEQ ID NO: 4725 - DNA, 266 bp, Oryza sativa
  Clone ID: uC-osflcyp110f06b1
cattaggaacaccctacagtcgaagctcaaggggtgacatgaaggatccccgcggattatcgcatcagcgcttcagtgcttgtgaccggataaggtttgggagtaggccaagtgatgttgacaccactactgagatatggtggttccatctgatgatgagaatgtcgaccaggaaccacctagtgcatatagacgatcaaccaatgccatacggctatcgggcgtccactcggatccgaggataacagacgacagctgatgaacac

SEQ ID NO: 4726 - DNA, 290 bp, Oryza sativa
  Clone ID: uC-osflcyp110f07b1
tttctgtgccatcattcattggggagttgactaatatgcagaacatgacatttcgcatcaattcattatctggacctattccaaaggagagcggtaaccttacgaatcttgtatcactgggtttaggcaagaacaggcttaatggctcccttccttcagaactggggaacctgtacaagcttcaggaattgtacattgacagtgctggcttaagtggtccactaccatcatcattttccaagcttacaagaatgcaaacattgttagactacaaaaggatgtgttccttg

SEQ ID NO: 4727 - DNA, 507 bp, Oryza sativa
  Clone ID: uC-osflcyp110f09b1
gtgggttggcttctcctccccctctttaccttttcctcctcggttcggttccgtggttcgtctagggtttagtgggttgagatggcggcgccggatgtcgagtaccgctgcttcgtcggcggcctcgcctgggccaccgacgaccgctccctcgaggccgccttctccacctacggcgagatcctcgactccaagatcatcaacgacagggagacggggaggtcacgtgggtttggcttcgtcaccttctcctccgagcagtcgatgcgcgacgccatcgagggcatgaacggcaaggagctcgacggccgcaacatcaccgtcaatgaggcccagtcccgccgctccggcggcggaggcgggggctacggcggcggcggtggcggctacggcggcggtcgtggaggcggcggctacggaagaggtggcggcggcggctacaggcgccgtgagggcggctaccgtggcggcggcggctacggcggctgccgtggcggctgcggcggc

SEQ ID NO: 4728 - DNA, 521 bp, Oryza sativa
  unsure (1)..(521): unsure at all n locations
  Clone ID: uC-osflcyp110f10b1
cccgtcgccacctcgccccatcaccctctccctccaccacactacaccccgctccactctcaggcaggcaatcagcggcgaggcaccagcccaccggccggcaatggcgtccacctcctgcttcctccaccagtccacggcccgcgtcgccgcgcgcgtcgcctccccgtccccggcgacacggacccacctcctcgtctgccgcgcccagaagcaggacgacgccgacgtctcccgccgcgcggcgctcgcgccgctggccggagcgacggcggcggggggggaaagggtggcgcccgccgncgcggcctacggcgaggcggcgaacgtgttcgggaagcccaagacgaacacggagttcatcgcctacagcggcgaggggttcaagctgctgatcccgtccaagtggaaccccagcaaggagcgcgagttccccggacaggtcctccgctacgaggacaacttcgacgccaacagcaacgtctccgtcataatcaaccccaccaccaagaagaccatca

SEQ ID NO: 4729 - DNA, 518 bp, Oryza sativa
  Clone ID: uC-osflcyp110f11b1
gcagagaaaggcgtcttcgtactcgcctctctccgcgcctccgcgcttttcctcctcctctcccctctctcccttctccgccgccgtcgcagcatcaacccaatccgccgccatgagggagtgcatctcgatccacatcggccaggccggtatccaggtcgggaacgcgtgctgggagctctactgcctcgagcatggcatccaggctgatggtcagatgcccagtgacaggactgttggggaggtgatgatgctttcaacaccttcttcagtgagactggtgctgggaagcatgttccccgtgctgtatttgttgatcttgagcctactgtgattgatgagggtgaggactggttgctaccgccagctcttccaccctgagcagctcatcaatggcaaggaggatgcagctaacaaccttgcccgtggtcactacaccattggcaaggagattgttgatctgtgccttgaccgcatcaggaagctggctgacaactgcactggtctccaaggtttcc

SEQ ID NO: 4730 - DNA, 525 bp, Oryza sativa
  unsure (1)..(525): unsure at all n locations
  Clone ID: uC-osflcyp110f12b1
tgctttagcaaaattccttgagagaaagcttcagcagcctgatgggctggaatctctgaacccagaccttgtcaaattggctgtgagaaatgcaaaagaaacaataaaggctagcaagggtgaaccgtcaacttcaggaagaatagtacggcacgtttcatcattcggagattcttctgaggattctgatgattcaaaagatggagaagaaaccaagggggtcaaaagaaaaaggaagaataagaaggataagagttttcaaaacggaggagaacagagcaagaaaaagaagaaaaataaaaagaaaaatctaaaggctgctaaagattccaagtcccaaaaagcatcgaagaagaaaaagttgaaatccctatgattctttaacttctctggtattagggagctgaaggcgttgctgttgtcatttttcttgatttcacttttttgtgagtcccatttcttgtaagcattgtaagcacttgctcttcctggcattntgacactggaaatcccatttgcgggctg

SEQ ID NO: 4731 - DNA, 397 bp, Oryza sativa
  Clone ID: uC-osflcyp110g02b1
ttcttatggcccaatttttagaggaacatccaaagattgcacgtgtctattatcctggtctgccaagtcacccagaacatcacattgccaagagtcagatgaccggctttggtggtgtcgctagttttgaggttgctggagactttgatgctactaggagatttattgattctgttaagataccctatcatgccccatcatttgggggctgtgagagcattattgatcagcctgccatcatgtcttactgggattcaatggagcagagagaaatctatggaatcaaggacaacttgatcaggttcagcattggagtggaggattttgaggatttgaagaagcctgactggtaggcgcttgacaagatcttagcagctgactgcattctagtatgaga

SEQ ID NO: 4732 - DNA, 471 bp, Oryza sativa
  Clone ID: uC-osflcyp110g03b1
taaaaaaactcgttttcttttcttctcttctcttctcttgttgcggcgaagggggagaggaaggtcgaggtcgacgagatgggcggcggcaatgggcagaagtcgaagatggcgagggagaggaacatggagaagaacaagggcgccaaggggagccagcttgaggccaacaagaaggccatgaacatccagtgcaagatatgcatgcagactttcatctgcaccacctctgagaccaagtgcaaagagcatgctgaggcgaagcatccgaagagcgacctcaccgcgtgcttccctcacctcaagaaataatggcggtggcatctctctgctcaatcagaagagaaaaagagaagctgccataatccactagtatcatcttgtatgcaatgactggttgccctatgtatgggtctaaactttggtcagctgctgctgcttcttggttgtgtgcctcatctaaatatgaat

SEQ ID NO: 4733 - DNA, 508 bp, Oryza sativa
  Clone ID: uC-osflcyp110g05b1
ttgagaagctccatacaagtaagcagcagctagttgccgacaaggccagagaaggaagaagaagctctcatcatcatcaccatgtcgtgctgcggtggcaactgcggatgcggctccagctgccagtgcggcaacggctgcggcggatgcaagtactctgaggtggagcccacgaccacgaccaccttccttgccgatgcaaccaacaaggggtctggtgctgcttccggaggatcagagatgggggcggagaacggcagctgcggctgcaacacctgcaagtgcggcaccagctgcggctgctcctgctgcaactgcaactagaagaaacttatctccatccaattcatcacctgatcaacgagctaccagtaccactacatatgccatgtactagctacctagcttgcatgcaagtccttaatttgctgctagctagctagctagctaccttagcgtctcatgtatgtcatgttgccgcctggcccctaaataaaattccttacat

SEQ ID NO: 4734 - DNA, 522 bp, Oryza sativa
  Clone ID: uC-osflcyp110g06b1
gaaaagaaaggctttcgtctcggtgggcaaaagcgcgagggcaaagcgaaggtatagcatctagtaggcgatggcgagctccggtttctcatggacgctgcccgaccaccccaagctccccaaggggaagacggtagccctcgtcgtgcttgacggatggggcgaggccaacgccgacaagtacaactgcatccatgtcgcccagacgcccgtcatggattcgctcaagaatggtgctcccgagaggtggagattagtgaaggctcatggaacagctgttggtcttcctagcgaagatgacatgggcaacagcgaagtgggtcacaatgctcttggtgctggtcgcatttttgctcagggtgctaagcttgtggaccttgctcttgcctctgggaaaatttatgatgagagggggttcaattacatcaaagaatgttttgacaagggtaccctgcaccttattggtttgttgagtgattgagggcgttcactcccgtcttgatcaagtgcagctgcttctga

SEQ ID NO: 4735 - DNA, 420 bp, Oryza sativa
  Clone ID: uC-osflcyp110g07b1
ttccaagaagtctgaatggggtgccacccgccaggctgccgcccccaagccggtgactgtctccatggttgtccgcgctggtgcctacgacgatgagcttgtcaagaccgcgaaaaccattgcatcaccaggaaggggtatccttgccatggatgagtcgaacgcgacctgcggtaagaggcttgcgttaattggccttgagaacaccgaggccaaccgccaggcttaccggaccctccttgtcaccgcaccgggcttgggacagtacatctccggtgctatcctcttcgaggagactctgtaccagtcaactgtagatggcaagaagattgtcgacatcctcactgagcagaaaatcgttccaggtatcaaggtcgacaagggtcttgtgccccttgctggctccaacaacgagtcatg

SEQ ID NO: 4736 - DNA, 484 bp, Oryza sativa
  unsure (1)..(484): unsure at all n locations
  Clone ID: uC-osflcyp110g08b1
taaaaattccccccagcccctcttttaaaagcctaccttgaagattcaaagaagataccctcaaattcagataacctgagtactagcactggccaatctgggagcaatgccaataagaaggagcagtctgcactgcgggctgttataaagtgtgttgaggaccacaaactcgaagctgagtttccattggaggatctccgtgagcggctggaagaactggagaaggccaagaccgagaagaaaaaggcggcatcaagcagttccagcggtggtagctctggtccagccaacaagcgcatccgggcaagcaccggaggaccgatgccccctgccaaggcaggccgtctcaccgactacaccggtacaccgtcttcgnctgccaccaccacgaccaatgccacattcattcgcttcccgtccatgccttctacggtacagcatctccttactcttatgataggccagctgcacaccccctctactg

SEQ ID NO: 4737 - DNA, 462 bp, Oryza sativa
  unsure (1)..(462): unsure at all n locations
  Clone ID: uC-osflcyp110g09b1
tgcttccgggattacgactgtaactggaataacccgatactgcgggagtttgccagtgatgttgcacatgcccgttggtggaaggtacatgacaagatgccaaagaaacttcagcactattgtcttttgagatcaaggcaaaaggctgggttggagtgggatcggaggcaggctgagaaagcaaacttcaccgatggacattggcggaggaacataactgatcctaggctgaaaacttgctttgagaagttctgcttctgggagagcatgttatggcactggggtgaatccaagaactcaacgaaggaaaaccctgtgccggccacacctaccgcgagcctcacaagttcatgagatgtgtagatagccctataccagatacaaacttctaagctccatacatacatagcaacagcttgtaaaggtagctatgcttaaggtttctcgacanaactatacttt

SEQ ID NO: 4738 - DNA, 400 bp, Oryza sativa
  unsure (1)..(400): unsure at all n locations
  Clone ID: uC-osflcyp110g10b1
tccgctgcgaacagcttgtacatgtactatgcataaacaaggaggggataagaagagcgacagtatttttggtagctgctcccggtgagaagtgttttaacccctggtgcagcagagcagggagttgctggtagtggtgttttttttgggccggtcacatgctgttcttttgagtgccatatagagctgtccagagtccaagaggaagtgactcgatcattcccgggaagcagcttgattctgattattttttttcgaggggaaaggcctgtctttcccttataggttcatttagatttaaaagataagatttctagttcgacatttggaaggaacaagaactgttgggaatctgtggttagatgataaggggatgatcttccgttgtattcatgttgna

SEQ ID NO: 4739 - DNA, 516 bp, Oryza sativa
  Clone ID: uC-osflcyp110g11b1
caagtattacataggacaggatggaaatggaagtgatcctcaggcttctggagcatacatatttcgccctaatggcacagttcctatcaagactgatggacaggttcctctgacagttctccgtgggtccatattggacgaagtgcatcagcagattaatccatggatatatcagatcaacagagtttacaaaggaaaggactatgtggagactgaatttatagttggaccaataccagtggatgatggaaatggaaaagaactatccactgaaagtcgttacaaacatggcaacaaacaaaacattttacactgattccaggggacgtgacttcatcaaaaggatacgggattaccggtcagagtggaagatcgaagtgcaccagcctatcgctggaaactattatcctgttaatcttggcatttatgtggaagatggaagcagagagttatctatacttgtagacaggtctgttggaggtgccagcataaaggatggacagatagagctaatgc

SEQ ID NO: 4740 - DNA, 524 bp, Oryza sativa
  unsure (1)..(524): unsure at all n locations
  Clone ID: uC-osflcyp110h01b1
tattcgccatcggtgtcccagagccactgtccgtattcgtcgacacatacggcactggcaggatccctgacaaggagatcctcaagattgtgaaggagaacttcgacttcaggcctggcatgatcatcatcaaccttgacctcaagaaaggcggcaacggacgctacctcaagacggcggcttacggtcacttcggaagggacgacccagacttcacctgggaggtggtgaagcccctcaagtgggagaagccttctgcctaaaagctccctttcggaggcttttgctctgtcccattatggtgttttgtttcctcgctgctcagcattgtgattcttaacctgccccccgctgccatttatgcccatgcacgctactttcctaataataagtacttataagggtattgtgtttgaatattttacctagaggaggaggaggatttgntatctgttattgcttaagcttatgtaatggtgaaagaaggaaagatgctacactactttgagaagaagaaatgaaaa

SEQ ID NO: 4741 - DNA, 420 bp, Oryza sativa
  Clone ID: uC-osflcyp110h02b1
tgttcccagcttatatgtaggcaggccttgccttttgctctgacgcctaaataaaaccgtcgtcgtcgttgtcagtgtgtgcgtgtgtcgatcaatgttggatggatccctagctagcttggatggatcatctatcatcatggtgatctcatcatgtactcctgctccatctcctcatgcgtgccaggcttcttaatataatctacctctgctttcatcccaaaaaaaaaaaaaaaaaaaaaaaaaaaaaaaaaaaaaaaaaaaaaaaaaaaaaaaaaaaaaaaaaaggaagaaaagaataaagagaaacaaaaccagaaaaagcaaaaaaaaaaaaaaaaaagggggcgcccgttttaaaggtaccaagtttacttccccgggcttgcaaaatattagtttttttattgggccccctaa

SEQ ID NO: 4742 - DNA, 516 bp, Oryza sativa
  Clone ID: uC-osflcyp110h05b1
ctggattctaccccaggtgttagatgggatgatgtcgcaggtcttagtgaggccaaaagacttcttgaagaagcagttgtacttcctctctggatgcctgaatatttccagggtattcgccgaccttggaaaggggttctaatgtttggtccacctggtactggaaagactcttttagcgaaggcagtagctacagaatgtggcacaacatttttcaatgtttcttcagcaactctggcttctaaatggcggggagagagtgagcgcatggtccgctgtttatttgatcttgcaaggttctatgctccaagtacaatcttcattgatgaaattgactccctctgcacatctcgtggagcttctggtgagcatgagtcatcaaggaggttgaagtctgaacttctagttcaaatagacggtgtaaataatagttctaccactgaagatggtcaaccaaaatagttatggttctggcagctaccaactttccatgggatattgatgaagcactgagac

SEQ ID NO: 4743 - DNA, 238 bp, Oryza sativa
  Clone ID: uC-osflcyp110h06b1
gcggcgctcacctctcgccgtctccgcctctccggagacggcggccaccgcgcgcccgcctctcgtcggcgccgtgcctccctcaacggccaccacctttgcgggcgctcccatcgtactgcgtggctgctgccagatccaggccgtcaggatctaccccccgcccttctcgtcggagggttaggggtttgtgcgacccggcgacggcgagcgaggtctctcacccgcgaaagggggg

SEQ ID NO: 4744 - DNA, 404 bp, Oryza sativa
  Clone ID: uC-osflcyp110h07b1
tgcaccttccaccgcgtgatcccggagttcatgtgccagggcggcgacttcacccgcggcaacggcacgggaggggagtcgatctacggcgagaagttcgccgacgaggtgttcaagttcaagcacgacagccccggcatcctgtccatggcgaacgccgggcccaacactaacgggtcccagttcttcatctgcaccgtgccctgcagctggctggacgggaagcacgtcgtgttcggccgcgtcgtcgagggattggacgtcgtcaaggccatcgagaaggtgggatcccgcggcgggagcaccgccaagccggtcgtcatcgccgactgcggccagctctcctagatctgtgctgttccccttcgcctttcgccagtatcagtcgtcttgagtcgtcgagt

SEQ ID NO: 4745 - DNA, 495 bp, Oryza sativa
  Clone ID: uC-osflcyp110h08b1
tctcgatctcgtcttctctctctcgcaggactcgatcgcgatggcggcggaggtggcgaaggcggcggtggtgccggagtcggtgctgaagaagcggaagcgggaggagcagtgggcggcggacaggaaggagaaggcgctcaccgagaagaagaaggccgtcgagagccgcaagctcatcttcgcccgcgccaagaagtacgcccaggagtacgacgcgcaggagaaggagcttgtgcagctcaagcgtgaggctcggatgaagggtgggttctacgtcagccctgaggccaaacttctgtttgtggtccgcatccgtggtatcaatgccatgcaccccaagaccaggaagatcttgcagcttctgcggttgaggcagatcttaattggtgtcttctcaaggttaacaaggcaaccattaacatgctgcgcagggttgagccatatgttgcatatgggtacccaaaccttgagagtgtcagggaattgatctac

SEQ ID NO: 4746 - DNA, 498 bp, Oryza sativa
  Clone ID: uC-osflcyp110h09b1
gtttcttccaagtagacttgttacgcctgttggtgttcgagtggtaggagcccttgggcttttccaggttcagatcgacgcctccttcctctggacattgttgctagttggtgatggctgagcaggctaatcaaccgactgtccttcagaagttcggtggccagttccaccttggctccagcttttctgaaggtgtacgggctcgcaacatctgcccatctgtctcatcctatgacaggcgctttaccacaaggagctacatgacccagggccttgtcaatggtggcatcaacgtcccaatgatgtcgtcctctccaatttttgctaatgctccagctgagaaaggtggcaaaaacttcatgattgatttcctcatgggtggagtgtcagccgcagtttcaaagactgctgctgctccgattgagcgtgtgaagctgcttatccagaaccaggatgaaatgatcaaggcttgtaggctctcagagccataccagggta

SEQ ID NO: 4747 - DNA, 439 bp, Oryza sativa
  Clone ID: uC-osflcyp110h10b1
atccccaattccatcgtcgtcgatgtcggggcgcggcaagggagggaagggtctcggcaagggcggggcgaagcggcaccggaaggtgctccgcgacaacatccaggggatcacgaagccggcgatccggaggctggcgaggaggggcggggtgaagcgcatctcggggctcatctacgaggagacccgcggggtgctcaagatcttcctcgagaacgtcatccgcgacgccgtcacctacaccgagcacgcccgccgcaagaccgtcaccgccatggacgtcgtctacgccctcaagcgccagggccgcaccctctacggcttcggcggctaggagccttttgcattgtgtttgtcttgttaggaatctgcttgtttcggatgtagccctgtatcctgtaatgaagaaaatgctagcagtaaaacttgtttgaattca

SEQ ID NO: 4748 - DNA, 515 bp, Oryza sativa
  unsure (1)..(515): unsure at all n locations
  Clone ID: uC-osflcyp110h11b1
ggacgggtggctgcacaccggagacatcggcttcgtcgacgacgacgacgagatcttcatcgtggacaggctcaaggagatcatcaagtacaaggggttccaggtgccaccggccgagctggaggcgctgctcatcactcacccggagatcaaggacgccgccgtcgtctcgatgaaggatgatcttgccggtgaagtgccagtcgccttcattgtccggacagaaggctcagaaatcaccgaggatgagatcaagaaattcgttgcaaaagaggtggtgttctacaagaggatcaacaaggtgttcttcaccgattccatccccaagaacccttccggcaagatcttcaggaaggacttgagagccaggctcgccgccggcattcccgacgccgtcgccgccgccgacgncgatgcgcccaaaagcagctaaggccaacgccgacgttttctctattttcagtcacacaaccggtgaaaaaaaaatgcagagatatgatgttgctgtccatgaa

SEQ ID NO: 4749 - DNA, 521 bp, Oryza sativa
  Clone ID: uC-osflcyp110h12b1
ttcttgtgggtattgaggaggtgaatgaatctgatagttcaccacgaacatatgaacaatccacaaagaacaatggcgcttctggaaatgctgggactgcaaagctagcacccagtggatctactgtgcctatgcgcgttttcgtcgatcgcaacagcagcgtaaagaacggtttcataagtagggccaatctttcatcacctcggccatcacaaataatctctgccaaggacagcaattcaaccactcagcaagaagtgaaggcattcctttcacagatgtctactgtaaggggcattgacagttcttggagtgatggagctcctagccccggaatcaatgcgcaaaccgatgaaagcaatgccaatggcaggaggccatccctcgagaggaactattctgtgatagaaccatcggatgcgaacctcgctgatgaagttgagggagagagctctcctgagaacctgaagcggcttcttgagctcaacaagaagtcgatgagtgctctctacaaagagctt

SEQ ID NO: 4750 - DNA, 444 bp, Oryza sativa
  Clone ID: uC-osflcyp111a02b1
ttctgtggctgtgcctgtggctgcattgccagatgaggcggcttctgtggcggttagcgtggttgatgtggagaggccagttgccgcgcctgcgaattggaggcgtgctccgaatggcgcggcggagcaagagcctaggagtggtggtacaaggagtgaggcgaaaccgaggattacagatgttgtgcccaatggagtgcagggggggcatgcggcagctggctggccaaggtggctcacagaggtcgcagcagaggcagtccgtgggtggcaacctcggaaggcagagtctttcgagaagttggacaagatagggcaaggtacatacagttagtgtttacaaagcaccgtgatcttgagagtggaaaaattgtggcacttaagaagtttcggtttgccaacatggaccctgagagcgtgcggttcatggcagggaaattcaca

SEQ ID NO: 4751 - DNA, 411 bp, Oryza sativa
  Clone ID: uC-osflcyp111a04b1
tttatatagtgcacaggaggcatcattctgttcatacatatctctcccttgcttgctttgctcctggatatatagctagcttctttctttcttcctctctccctgtgtggcacgcgcctccaatcgatctcttcggtgagtagacgcatcgagatcggggggaaatgtcggtccagtttacatcggagcatgtttgctatgtcaactgcaactattgcaacactatccttgtggtgaatgtgccaaacaattgttcctacaacattgtgactgttagatgtgggcattgcacaatggtgctctccatggatcttgctccttttcaccaagcacgcactgttcaagatcaccaggtacagaacagaggatttcaaggtaataactttggaagctatgacatagcttccagaa

SEQ ID NO: 4752 - DNA, 415 bp, Oryza sativa
  Clone ID: uC-osflcyp111a05b1
ttattgagaattatgcacaagcagttgtgagaaacaacattgacagtcatctacaacatggatccggaatacttttggagcaaattactgaatatgtcaggtcaaatttggagagtcaagggaaagagagtgaattccttcaacatactacatgtaaagtacctagggctcttggtgacattatggaaagcatcgctggtgcagtatttatagacaccgattctaatgttgacatgggttgggagataatagagccattgctgtctccactgattacacctgataagcttgcattgacaccttaccgtgagttgctggagctatgcaacaacattgcttgcttcttaaattcagaatgcaccagtgaaggagaagaagtcattatagcgatgtcactgcatctacgagatgagct

SEQ ID NO: 4753 - DNA, 393 bp, Oryza sativa
  Clone ID: uC-osflcyp111a07b1
tttttacatggcaaagcttgccgagcaggctgagcgttacgaggaaatggtcgaattcatggagaaggtggcaaagaccactgatgttgctgagctcaccgttgaggagcggaacctgctttctgtggcttacaagaacgtgattggtgctcggagggcatcgtggaggatcatctcttctattgagcacaaggaggagagccgtgggaatgaggcatatgttgcatcaattaaggagtaccgtagcaggattgaaactgagctcagcaagatctgcgatggtatccttaagcttctggattcccaccttgtcccatctgccactgtgcagagtcaaggtgttctacctgaaaatgaaaggggactaccacaggtaccttgctgagtttaagt

SEQ ID NO: 4754 - DNA, 456 bp, Oryza sativa
  Clone ID: uC-osflcyp111a08b1
ttttagcagattgttaagcacaggaactgtgcttgtttcgaccagtaataaagcacctgaagatctgaatcaggatgggatgcagcgggaaattttccttgacttattgtctaagttggacgagaactgcaacaaaattcttgttggaaccgaaacagattatcgccgcctaattccaactgacggcttaactcagattcactacttttggcctctcacttctgacattcggagtatgtatgaggctatgtggcacgatataactagacaaacaggaggaaacattatttctgtcaccattccagtaatgtttgggaggtatcttgagattcctaaaagttgcaatggagtggcaaggtttgacttcgagtatctgtgtggcccgccagttggagctgcagactatataagcatagccaggaactaccatacaatttttatatcggatatttcagc

SEQ ID NO: 4755 - DNA, 399 bp, Oryza sativa
  Clone ID: uC-osflcyp111a09b1
tcttaaccccaagccctccaaccccaagagaggccgcgccgcgagagagagagagagatccaatccaatccggcccccgtctccccccctcctccacgccgcggcgccgctccggttgcttgctcaggggggcgggctgctgatcgaaatgggcgggcgcgtgtccaaggcggtggcctgctgctgctgccgctcgcagcaccatggagtcgtcgtcgagagctcggagaaagacggcggaggaggaccatggggagtcgtatgagctgccggcctttcaggaattctccttcgagcagctgaggctggccacctcaggctttgcggtggagaacatcgtgtctgagcatggtgagaaggcgcccaatgtggtgtacaaggggaagctcgacgccgcag

SEQ ID NO: 4756 - DNA, 456 bp, Oryza sativa
  Clone ID: uC-osflcyp111a11b1
tctagctggtgcagctggaccagccccattatcgaagacattgtcagacctcaaggattcctgctggagatttttacggccacatacaattcgaggaactgccttgggatccatagcattagttgctagagctttgatagagaacccccaactgataaattggtggttggtattcaaagcgttctatgggctcgtggcgttaatctgtggcaatggttacatcgttgggatcaatcagatctatgacattagaatcgataaggtaaacaagccatatttaccaattgctgccggtgatctctcagttcagacagcatggttattggtggtattatttgcagctgcgggattttcaattgttgtgacaaactttggacctttcattacctctctatattgccttggtctatttcttggcaccatatactctgttcctccattcagacttaagagata

SEQ ID NO: 4757 - DNA, 505 bp, Oryza sativa
  Clone ID: uC-osflcyp111a12b1
tcggtgtgatccaaagagcttgccgaagtatgaggcgtctcatgagttccaaactaagaaaaaacgccagcagcagaggcaagcagaggaagccgcaaagcgccagaaattgcagcatcctccaccacattcccgtttgcctccaatccagaacccaggccaaccacaccaaatcaggcctggccagcctatgcataatgcaccacctgtggcagctggcccaagtcatcactatgcaaagccgcgaggacctggaggccctaataggtacccacaaggcgggaaccaaggaggctacaatccgaaccgcggtggacagggaggaggctatggggagtggcccatatccacagcaaggacgaggtcctcccccttatcctggtggtggcatgggcggagccggtggtccgaggggggtggtggcagtggtatggtgttggcggaccaaattataacagggtggaccttatgtgcatctggtccaggtcgaggccccgactataat

SEQ ID NO: 4758 - DNA, 514 bp, Oryza sativa
  Clone ID: uC-osflcyp111b02b1
tgtgaaacagcaaaaaaaatcaaacaaaaagaaaaaatattccccatctgtgaaattcgcaaaaccctagcgcggcggcgatgtcgaacacgagggtgttcttcgacatgaccgtcggcggagctccggcggggcggatcgtgatggagctgtacgcgaaggacgtgccgcggacggcggagaacttccgcgcgctctgcaccggcgagaagggcgtgggcaagagcggcaagccgctgcactacaaggggagcaccttccaccgcgtgatcccggagttcatgtgccagggcggcgacttcacccgcggcaacggcacgggaggggaggtcgatctacggcgagaagttcgccgacgaggtgttcaagttcaagcacgacagccccggcatcctgtccatggcgaacgccgggcccaacactaacgggtcccagttcttcatctgcaccgtgccctgcagctggctggacgggaagcacgtcgtgttccgccgcgtcgtcgagggcatggacg

SEQ ID NO: 4759 - DNA, 498 bp, Oryza sativa
  Clone ID: uC-osflcyp111b03b1
gtcaaaatggccaacgagtccatcctcgtcctcctccacctccgcctacagaaccctgaccggggtcttccccaaaaccctcgccgagtcgccgggctccgccgccgtccccatcgcgaactactcgcaggctactcctccggccatgaggggctcggatccggaccggggcggaggcgagccggacatctccaagctcttctgccactacaacgccctctacttccacgactccctcggcacctgcgccgtctcctgggccaccgacgaggatccactccccaatcgtgaagtaggtggctgtgaatattatctggtggtggtggctgtattatacttctttccagatccttgtatgaacaccacacagatttggatttaaagaatgcgctgctttatgaaatgattcatgcttatatgtgcatcaaagatagtaatgataaccatagtgaccatgggccaaaattccagaaactgatgaatacaatcaatttaaac

SEQ ID NO: 4760 - DNA, 500 bp, Oryza sativa
  unsure (1)..(500): unsure at all n locations
  Clone ID: uC-osflcyp111b04b1
tttaatgagaattttgcacaagcagttgtaagaaacaacattcacagtcatctacaacatggatccggaatacttttggagcaaattactgaatatgtcaggtcaaatttggagtgtcaagggaaagagagtgaattccttcaacatactacatgtaaagtacctaaggttcttggtgacattatggaaagcatcgctggtgcagtatttatagacaccgattttaatgttgacatggtttgggagattttcgagccattgctttctccactgattacacctgataagcttgcattgccaccttaccgtgagttgctggagctatgcagtcacattggttgcttcttaaattcaaaatgcaccagtaaaggagaagaagtaattatagagatgtcactgcaactacgagatgagctgctggtagcacaagggcatgacagaaacaaaaagagggcanaggcaaaagcagcatctcgtattttgcagatcttaagcaacag

SEQ ID NO: 4761 - DNA, 505 bp, Oryza sativa
  Clone ID: uC-osflcyp111b05b1
tctgaactcttgaagccagaagtattcgaatttattgagaagcacaacttgcatgatgccattcatgacaaggttgtcaatcttatgatattggatagtaaaagaactgtaaacctattgatccagcatcgtgatacgatccccccgaatgaagttgtaggacagttgttgcatgctagtaaaagttgtgacaaaagacatttgttgcatctgtatttacatgctctgtttgagacagacatgaatgctggaaaagactatcatgacatgcaggtggagctttatgcagagtatgagccaaggatgctaatacccttcctccgtaccagtcagcattacaggcttgacaaggcatatgaaatctttgcacaaaaagagcttgtacgggagcaagtttttgtgcttggtcgtatgggaaatgcaaaggaagctctctctacaattataaacaaaatggaagatattcaggaggcccgtgaatttgtgatggagcaacacgatgatg

SEQ ID NO: 4762 - DNA, 395 bp, Oryza sativa
  Clone ID: uC-osflcyp111b07b1
tctatctccagccgcgctttctctctctctctagctcccagcctcgacttcacccaaaccctagccctattgcgcgcgggagacccgccggcgaggcgcgcgcacggagcgagccggggggcgggagggccagccgccgccgccgccgcctgcagcagcgaggatgccgtcggggtcggcgacgcagttccggtacacgcagacgccgtccaaggtgctccacctccggaacatgccgtgggagtgcaccgaggaggagctcgtcgagctctgcaagcccttcggcaggggtcgtcaacaccatgtgcaacgtcggcgccaaccgcaaccaggccttcgtcgagttcgcagatcaaaaccaggcaatttcaatgggttcatattatgcttcttct

SEQ ID NO: 4763 - DNA, 335 bp, Oryza sativa
  Clone ID: uC-osflcyp111b08b1
tcttcttgctaggctctgctcatatcccgcaaattgagggttcagacttcataagttcgagctctgtccacaagaaaggaacaagagattgttcttggcagttggaagaagctaagaacttggcgagttggtggccaaggtgctcttggagggttcttggagcagtacaatgttggccaaaagattgaaaagatgcagcattcttctgttcgcctttctcctcgcagacgcatccgggagtcttcttgagagcagcggcggccaggccgaggcgatcggtccacagatctccccggggacagagggcgagggcaagagggcggtcgctggcgacg

SEQ ID NO: 4764 - DNA, 502 bp, Oryza sativa
  Clone ID: uC-osflcyp111b10b1
tcgctcttctctggtggtgtgggtgtgtccctgtctcccctctccttcctgctctacttacccctgctctgttccgccctctcacaagagagagagcgccagactctccccaggattcagccatgaagggggccaaatccaagggcgccggcaagcccgacgccaagttggctgtgaagagtaagggcgcggagaagcccgccgccaagggcaggaaggggaaggccggcaaggaccccaacaagcccaagagggctccctccgctttcttcggttttatggaggagttccgtaaggagttcaaggagaagaaccccaagaataaatctgtcgctgctgtaggaaaagcaacccgtgataggtgggaatccctgaccgaagcggacaagggctccctatgtagccaaggccaacaagctcaaggccgagtacaacaggccattgctgcctacaacaagggcgagagcactgtcaagaaggcacccgcccaggaggaagagga

SEQ ID NO: 4765 - DNA, 284 bp, Oryza sativa
  Clone ID: uC-osflcyp111b12b1
tcttgcacgcagagaagagaaaaaaaaaagggaaaaagaaaatgtaccaggcgatcccgtacaacgcgaaccgggcttggccggcggcgagccggccggcgacggcgccgccgccgctgccatcgatctgttgagaggatgaggaggtgaggagggcggtggcagagtgccccgtggtggaggtgggcatgtttgctatgtgcctgagccacgttgtgaagctgttgttgcaggggatgggcgaaacaattgttgtgcacgaggtcgccggtgaggccgagctc

SEQ ID NO: 4766 - DNA, 500 bp, Oryza sativa
  Clone ID: uC-osflcyp111c02b1
gaatttttcctcgagaggaggcggcggcgcaacgaagacgcgacggcgggggcggcgcgcggcgcgacccggaggcgacggcgacggcacggcgctcacctccggccgccatcttctctccggctttgggaggaaggaagtctgagaggatgctggttcaaatactgagtggctgagcaaacatgtacatgatgctggttttgtaaaggagcaataaatgtggttctctgaacattgtatattgctgatgtaaccatttggcataggagagtactggtgtggcagcccatgtttattttttatagcttgaaaggtcacataaatgcaaattctaagtagaaatgtcaagtgaatcatgccatatttcacttttttttaggcttcatcaatgtgtatttgatgcatcagtagcaaatgatgcatgacgttcatgggcccatgctttattatctcctggctaattatctcaagtgaatcatgatatagtttcatctttttct

SEQ ID NO: 4767 - DNA, 425 bp, Oryza sativa
  Clone ID: uC-osflcyp111c07b1
tcgcccagctcgcgctcccctcgccgccgcagccgccgccgcctcgcctcctcggagatcttcgctgcccttccgtcaacatggggaagacacgtggtatgggagctgggcgcaagctcaagacccaccgcaggaaccagagatgggcagacaaggcctacaagaagagccacttgggtaatgagtggaagaaaccctttgctgggtcatctcatgccaagggcatcgttctggagaagattggtattgaggccaagcagcccaactctgccatccgtaagtgtgctcgtgtgcagcttgtgaagaatgggaagaagattgctgcctttgtgcccaatgacggttgcctgaacttcattgaggaaaatgacgaggtgttgattgctggatttggtcgtaagggccatgctgtgggaagaattcct

SEQ ID NO: 4768 - DNA, 413 bp, Oryza sativa
  Clone ID: uC-osflcyp111c08b1
gcaattcttgagctcaatcagcaacaacatctatctccttcttgcttagttaagtccttcgccctcccaagaagaagaagatgtcttgctgcggcggcaactgcggctgcggcagcggctgccagtgcggcggcggctgcggcggatgcaagatgttccctgatgtggaggccacagccaccaccaagaccttcgtcctcgctgctccatccaacaaggcgagctctggaggaatggagatggcggtggagagcggcgagaacggcggctgcggctgcaacacctgcaagtgtggcaccagctgcagcggctgctcctgctgctcctgcaactgaatctatccgtcgtcgtcgcccggctgcatgaggatttatcgtatggatgctgctactgtcgatcagagctttgatcga

SEQ ID NO: 4769 - DNA, 205 bp, Oryza sativa
  Clone ID: uC-osflcyp111c09b1
tctaaaaaaaaaaaaaaaaaaaaaaaaaaaaaaaaaaaaaaaaaatgacttcctgtaataattaacaataataacctaactaggggctgctcgttaagagagctccagttgacttccccggggtggctggcgtaaaggccttttttaacggcctttaatgtgaatacactggcctgccttttccaacaccgaacatggaaaaacc

SEQ ID NO: 4770 - DNA, 519 bp, Oryza sativa
  Clone ID: uC-osflcyp111c11b1
tcggtacaacaaagagatacatttgaaagttgaaatgtttctcaagacatatggcacatccaagcccatgaggtacactttctccgatgttaagaaaataacaagacggttcaagaataaattaggccatggtggatttggaagtgtctacaaaggtgagctaccaaatggagttcctgtggcagtcaagatgctagagaactccttaggagagggagaagagttcatcaatgaagttgcgaccattgggagaattcaccatgcaaacatcgtccgtctcctaggattttgctctgaaggaacacgacgggctttaatatatgaattcatgcccaatgaatcgttggagaaatatatattctcaaatggttctaatatttcaagagaattcctagtaccaaagaaaatgctagatattgctttaggcatcgcccgaggaatggagtacttgcaccaagggtgcaatcagcgcattctccattttgacatcaagcctcacaacatatttgtggactacag

SEQ ID NO: 4771 - DNA, 475 bp, Oryza sativa
  Clone ID: uC-osflcyp111c12b1
tctaacatttggtgaaagctctgctgatccatgggtagatgagttccagaaccaattatcagcttccaaacagaattctggtgcatctcgaggggtttatgttttttcagacatgaacccatacgttggtcaccctaattcaatgcaggaaggccaggaactgttccgcaaaggcctactaagtgaagctgttcttgctttagaggctgaagttttgaagaatcctgataatgctgaaggttggagactacttggagtaacacatgctgaaaatgatgatgaccaacaggcaatcgcagcaatgatgcgtgcacaagaagctgatccaacaaacctggaagttcttcttgcacttggtgtcagtcacacgaatgagttggagcagggagaagcattaagatatcttcataggtggcttcagaatcaccccaaatatggcggtatcgcccctccacagccaactgattcaccttat

SEQ ID NO: 4772 - DNA, 473 bp, Oryza sativa
  unsure (1)..(473): unsure at all n locations
  Clone ID: uC-osflcyp111d03b1
tatgctcagttcatgggatcaaggaacttctcaccggatgaccgcccacctgtccgtttcatggatacagatgagcttgcgtatgttgcgacccgcgcccgtgaagtccatgacttttggcatgtgctgttcggccttcctacgaacctgattggagagactgcccttaaggtcattgagtttgaacagatgttccttccaatgtgcatgctttcagtcgttgggggctctgcgaggttcaatgagaaacaaaggacactgttttttcagcattatttcccatgggcttcaaaagcaggtcttaagtgcacagatcttatgtctgtgtactatgagaagcattttcatgaagatttggatgaagtgaggaggaactgnnngaattataccatgccctgatcccaaaaggagcagtgtttagacttttagatcggtacattttgcatgaaagatgtctgaacttggttttcact

SEQ ID NO: 4773 - DNA, 489 bp, Oryza sativa
  Clone ID: uC-osflcyp111d04b1
tgagcatctgtgctaagggtgcacaaatccaaatttgcacagtttatcatgttttatgcctgctcactggatcctgaaatctgtggccttgaattcgctctcttcctctctgatatctttattaaaaaggaagaggattcaatttctagaatgtctgcagtttcatatgttggaagctatttgtctcgggcaaggttcatttctgctgatacggtggttggtatactcaaaaggttagtggactggtgtgttgactattgtgacctccagaacaacataaggataacaaccaagcctataaatcatcaaatattttacgcaagctgtcaggcagtcatgtacatcctgtgctttcgcttaagatctattatggactacccaaatcttaaggcacagctttttaacatgccatttggatatatcttgacacacccactggaacctttaaaggtttgcttgccatcgatagttgatgagttcctgaggcag

SEQ ID NO: 4774 - DNA, 395 bp, Oryza sativa
  unsure (1)..(395): unsure at all n locations
  Clone ID: uC-osflcyp111d05b1
ttatgagagagagtggctaggcacttgcagcttgcataacctgatgcgcatggggatcgtggatgatgcccctttggagaacaacatgcgagatattggttgtacctgatacaatttggctgacttagttgagcgatcgcttggcgatttgggtgagttcatgattttgtactggtgtagccaaacattggaagaaggcctgacagcatagcgcatgcttgggcgctgcgttcttgtttttttagaggagctcagcagtgtgtgtgcttttacctcctgagttttacccattacttccatggttgatatatgaactcagaaactcttgtagattgtgaactggatgacatccagaattttttttttatcttggtctgnacagtatcatttactta

SEQ ID NO: 4775 - DNA, 449 bp, Oryza sativa
  Clone ID: uC-osflcyp111d06b1
tcacacacacgcgaagcagcagaatcgcagacagatcgaccgcgcgcctagcttctctgttccgagaaagccggccatggcgtcgccgccggcgccggcgaaccgagaagagctgacccgcgcggctctcgccttcctgaggaaggtgagaagccgcttctggttgaagccgtgcgtctacaaggggctcgagaccatcctcaccgagtacggcaagtacgcgaacgcgtccacctccctggtggtggacggcgcgggcggtgctcctcggcgaccaccccgacctcatcgcggagttcaacaccttcgtccgtccggagtacaagatcgagctccccgccgatcacctttccgctgcggcaacggcaaagtcccaaggcaagggagacgtgtcgccgctcgaggccaagcgattcttggagcgggtgaaggcggaggaccagaagctt

SEQ ID NO: 4776 - DNA, 438 bp, Oryza sativa
  Clone ID: uC-osflcyp111d09b1
tcggggatgagtaccgcacggactacgatcctggaagaggtggctatggtaagatggttcagaaagagctagaagcacaacgtgagttagttgactatggaggtgcttttcaacctaatgcaccacctcaatatgacagaggtgacaggaagagagggtatggagattcttaccggaacgacagagattaccaacggaaacgttaccggaacgatgagcgatcgtcgcaaagagcacctgactctgagttcaagagagatgcgattgattccgagaagaatcctaggtttcgtgagaaaggtgattctgatgaaagaagacgatgattatgataagagacgccggcgctgaactgaaagaaacaattgctgataaatgcaaatgggcagttgcagtgactacactagtaaagcccgtcgagcttatgttttttaccct

SEQ ID NO: 4777 - DNA, 501 bp, Oryza sativa
  Clone ID: uC-osflcyp111d12b1
aaccaacccaaccgccgccgcatcgccctcgttagaacgatggccgcgtcggcgctgcaccagaccaccagcttcctcggcaccgcccctcgccgggatgagctcgtccgccgcgtcggcgactccggtggccgcatcaccatgcgccgcaccgtcaagagcgcgccccagagcatctggtatggacctgaccgtcccaagtacctgggcccgttctcggagcagacgccatcgtacctgaccggagagttcccgggagactacgggtgggacacggcggggctatcggccgacccggagacgttcgcgaggaacagggagctggagggtgatccactcgcggtgggcgatgctgggggcgctgggctgcgtcttccggagatcctgtccaaaacggggtgaagttcggggaggcgtggtggttcaaggccggcgcgcagatcttctccgagggggggctcgactacctggggaacccccaccttgtgcacgcgcagagca

SEQ ID NO: 4778 - DNA, 485 bp, Oryza sativa
  Clone ID: uC-osflcyp111e03b1
tgtaaggctgccaagattgctccagaagctcaaagcgttattggcagccagaaaaaacagctgaagacgctgcccacagttggcaaaagcaaccctgtatttgctggacctccagcaactgcgaaaaagaccaaagctccagttccacagggtgggatgtctagcggcatagttggcgtgctgaatagatcattaggagggaaggcacctgctcctgctaccacaggcacccaaagtactgtccagaagcagcaaagcatgagctcaaagggcaacttgttagtgcccaagaatgtggcgcctggcaccgtaacaccagccaacaaccgggccaacacagcggtgaacggggctagcaaggtgaatccaccagccagccagaagccagcctaacatggtaaattccttgctataataacgccctaggacttttgtgcgcttagtttacttttgaaatgtaaatagggccacgtagataccatcta

SEQ ID NO: 4779 - DNA, 516 bp, Oryza sativa
  Clone ID: uC-osflcyp111e04b1
tcttcgacaagcattgcaaagacatgaaaagatatttgatcggcgtaggcgtctcctgattgcaatggatgttgcgtttggtatggagtatttgcatgagaagaacattgtacactttgacctaaagagtgataatctgcttgtcaatctaagagatcctcagcaccctatatgcaaggttggtgatttgggcttgtcgaaagttaaatgccagacgctaatatctggtggggtgcgaggaacacttccttggatggccccggagctgttgaatggaagcagcagccttgtttctgaaaaggtcgatgttttctccttcggaattgtaatgtgggagctgctcactggtgaagagccttatgccgaattgcattatggcgccatcataggcgggattgtaaacaacaccctgcgccctccggtgcccgagtcatgcgaccctcggtggaggtcactgatggagcaatgctggtcgtcggaaccgtcagaaagaccgagcttcacgaggttgcaaga

SEQ ID NO: 4780 - DNA, 483 bp, Oryza sativa
  Clone ID: uC-osflcyp111e09b1
ttttcccctgagaaaagacagcgtgtcccatctgcatacaacagattcatcaaggaggagatacagaggattaaaaccagcaatcctgagattagccacagggaggcattcagtgctgctgcaaagaactgggctcatcttccccggctccattttggcctcagcgtcgccgacggcggcggcggcggcggcagcaactaatcgcggcggcgcggcctgccggccggccaccgatcgccggcgtgcacgccggcgcgcggcggcggccggtcgagaatgcgcgcgcaggagggacgacgacgatatattattatcgcgtgtgcccctctctcttcgccgcgtaattaattaatcagttaattaattacgtacgacctactgtgttatgctatcgatccgtgtaaataattacctacgtatcttgaataattagtctcgtattatacgtactattatacgtacgtgctgggttatgacgtagac

SEQ ID NO: 4781 - DNA, 483 bp, Oryza sativa
  Clone ID: uC-osflcyp111e11b1
tcgacaccccagcagcagcagcagcagcagctgagcttgaagcagcagagcgaggtagacatggccgccgccaccatggccctctcgtccccggcgctggccggcaaggccgccgcgaaggtgttcggcgaggggcgcatcaccatgcgcaagtcggcggcgaagcccaagcccgccgcgtcggggagcccgtggtacggcgccgaccgcgtgctctacctcggcccgctctccggcgagccgccgagctacctgaccggcgagttccccggcgactacgggtgggacaccgcggggctctccgccgacccggagacgttcgccaagaaccgggagctggagggtgatccactccaggtgggcgatgctcggcgcgctgggctgcgtgttcccggagctcctcgcccgcaacggcgtcaagttcggcgaggcggtgtggttcaaggcggggtcgcagatcttcagcgagggcgggctcgacta

SEQ ID NO: 4782 - DNA, 484 bp, Oryza sativa
  unsure (1)..(484): unsure at all n locations
  Clone ID: uC-osflcyp111e12b1
gcgatattgagctacctatgattttttaaaccatttttgcacctgttttctttatattatttgaaataccgggatataacacttgactagcaattctagttttgcttgaaatccggcaaaaagttgattggtttctagatgagtttattctacatttaaggctttacgggtcaaaacatatgttttctgtttccagttttgttcctgctatgataatctgtatttccctctgttccagcttcgctacaacctaccacggacatacaagtttcacaaacaaaacgaggttgatatcgccgtcgatttttggcggttcgtgccacgagcccgagacgaaggtagcactgcatgctctgttaccaaccttaaacagagaagaatgcacagatgatcctaaaacattttcgaggcggttttttagcggttcagccgtgttgtgtcatctctcgcgcagntggccatgtgatgaacttggatcttttga

SEQ ID NO: 4783 - DNA, 419 bp, Oryza sativa
  unsure (1)..(419): unsure at all n locations
  Clone ID: uC-osflcyp111f01b1
gcaatatgccgatcaaatgatggaactgtttttgagagtttttgcctgtcgaaacgccactgtgcatgaggaggctatgcttgctattggtgcattggcatatgcggcaggtccaaacttttcgaagtacatgcctcagttttatcagtatttggagatgggactacagaactttgaggagtatcaggtctgtgccattaccgtgggtgttgggtggaattttgtggcagggcactgggaggacaanaattctgccttactggtgatggaatcatgaacccaactcctgaaaggacttgtcgaggcaatcagttgcatagaatctgtaaagccacctatattctcatgctttggcgatattgcactggcaattggggaagaactntgaagaagtaatttgatatatgccatgcccatgc

SEQ ID NO: 4784 - DNA, 454 bp, Oryza sativa
  unsure (1)..(454): unsure at all n locations
  Clone ID: uC-osflcyp111f02b1
ctcacgcgtccggtatctgacagcaatacatgaaatcctagaaaagacgggctacaaggaggatgagggaacagcaaatgagctctcatttcagacgtggaccaattaaatgcaatgatacattgaactcaaagaagaagggtgacaatgcttttcgacaaaaggacttctcttgtgcaattgactgttattctcagttcattgaagttggtacgatggtttctccgaccatttatgcgctgagttgcctgtcatatctgatgaatgacaaggcagaacaagctctcagtgatgcgatgcaagcgctagtaatatctccaacatggacaactgcattttatcttcaggctgctgctctgctccttttaggcatggagaatgaagcttaagaagcaatcgagatggttgtgcccatgagacangtagcagcagtggacattggatatgactgaac

SEQ ID NO: 4785 - DNA, 475 bp, Oryza sativa
  Clone ID: uC-osflcyp111f04b1
ctcctcccctcctccggtgagctcagctccgggaagcgcttgcggttgcgcgggaagcgcgcgggcgagggaggccatggcgttcggcggcaggaggggctcgtcgcggtggggcctcccggtggtgaggtcggaggcgctcggcaagctgggcccctcgttcgccatcggcgccggctgcggcgtcggtgtctgcttaggcctcatcggcggtaggcaagcgattcgccatccatagccatcacccgcgctactgcttcctcctcctctggggcaccttcggtagggttcaacacggtgttcgagagggttctagcaggcttcgaactgcctaggcgcgcgagattgtttcgtcccgcttccctctccaatcggagtgaggcgagcatgggaagtgcaagtgcttcttattaggtgcaggaatcgccgctggattcctgggttgcagatgggattgggagctggtgctggatgt

SEQ ID NO: 4786 - DNA, 519 bp, Oryza sativa
  unsure (1)..(519): unsure at all n locations
  Clone ID: uC-osflcyp111f05b1
gatggtttctacagaccctaaaggaagacctgggcattgacaatacctacccatggacaataatgactgataagcaaaagggtcttataccagctgtccaacagattttccctgattcagaacacagattctgtgttagacatctgtactccaattttcaggtacatttcaaaggtgaatgggccagaagtgaagcctccaatatatgagaaaaaggttggcagaccacctaagtctaggaggaaagcaccacatgaggtacagggaaaaaatgggcctaaaatgtccaagcatggtgtggagatgcactgctctttctgcaaagagcctagacataacaagaaagggtgcccactgaaaaaggctagactcagacccaaactgaagacaagtaggatcctagctgccagttctacaaagagtggcatgaatctaagcaagaaccagcagaggtgctgacccaatctcagtctgcatatgaccaattactatcacaagttcctaatcctatggntacac

SEQ ID NO: 4787 - DNA, 503 bp, Oryza sativa
  Clone ID: uC-osflcyp111f06b1
gtcgtgtgaagcggtgaactttagccgactcctgactagcgactaccctcccactctctcagctcgcttcccttcctcgcctcgccggccaagaaccaccgcaagattcgccatggccagatcgccggagccgccgcgctactacgccgccgcgggctaccaccgcccctcgcccttctcctccgtggcggcgtcctgcgtcgtggcggcgctgttcatcctgctcgccgcgggcggcgccgcggctgcgctgttcctgctctaccggccgcaggcgccggccatcgccgtgacggccgtgcagctcccctccttcgcctcccgcaacggcaccgtcgccttcacgttccagcagctcgcctccgtccgcaaccccaaccgctccccgctcgcgcactacgacagctcgctccgcgtcgcctacgccggcggcgaggtcggctcgatgtacatccccgccggccagatcgacggggggcgcacgcagtacatggccaccagct

SEQ ID NO: 4788 - DNA, 251 bp, Oryza sativa
  Clone ID: uC-osflcyp111f08b1
gcggaaccttagccctcgaaggcctcgagccctcccctaccttgttctacctcctcccatggaggtagaacacgttctatctatcacctccaactccaaggtagacaatatcaccaatggcgacaatgtgatcatcatccctagtgtgagcacggaggagaaggagcacatcaatggagctgcagagacaaatcatgttgtgatgatcaccgctgcttccatggacagaaccgacggtgacgacaagacga

SEQ ID NO: 4789 - DNA, 308 bp, Oryza sativa
  unsure (1)..(308): unsure at all n locations
  Clone ID: uC-osflcyp111f09b1
tcgcgccctctcgctttcaacccccacacggaagcaagaattgttcatcaaaacccgatctttggcgtggccccgtggatttcttgcgatctgtttggtgctatggatttctgatccggggtttcttggatcttggggagtaggaggttgggggnncgnnncttaggccgggagatgatgcgggagcagggagctcttcggagacaagattgggggtctttcatcagtacccacattagcaccgatcgtggacgaacccatcaccagcctgtatgcgcttacggagttgatcctggctttaagcccct

SEQ ID NO: 4790 - DNA, 487 bp, Oryza sativa
  Clone ID: uC-osflcyp111f11b1
cgcaggggtgcatctcgtgggcgctgcggcagcgtgggcttggtggtggtggtgcgcgggctgtcccggtgcttccccgccggagattctgcgtctccgcggcggcgggtgcggggttcgacaacgagaatcgcgagtatgtgatcgtgggtggaggcaacgcggccggttacgcggcgaggacgttcgtcgagcacggcatggctgatggccgcctttgcatcgtctccaaggaggcgtatccgccatatgagcgaccagcactgacaaagggctatcttttccctccagacaagaagcctgctcgtctacctggctttcatacctgtgttggatcaggtgggcagaggcagactgctgaatggtacaaggagaacggcatagaggtattgtatgaggatccagttgtagcgtttgatggcaaaacacataccttaaaaacttcatcagggaaaattcttgagtatgggtcacttattatttctac

SEQ ID NO: 4791 - DNA, 518 bp, Oryza sativa
  Clone ID: uC-osflcyp111f12b1
tcggaccaatccctcttccagtcaagaaaaaaggaagattacaccaacaaacaaactagctagccaatggcctctttgtcctctttccggctcgccgtggcggtggcggcactgttggttgttggctcctgtgccactgagctcaccttcaaggtcgctgagggctctagcgccaaaagtctagagcttgtcactaatgttgccatctctgaggtggaggtcaaggagaagggcggcaaggactgggtggcgctcaaggagtcgtcgtctaacacctggacgctcaaaagtgagtcgccgctcaagggccccttctctgtccgcttccttgtcaagaatggcggctaccgtgtcgtcgacgatgtcatccctgaaagctttacagctggctctgagtacaagagtggaatccaactctaagtaacagacatgtgtactcttgttgggtcacatgcgaaatatgaacatctaaataatcctctcttaaaagagatcgtgtcatggttgagtgagcaaat

SEQ ID NO: 4792 - DNA, 395 bp, Oryza sativa
  Clone ID: uC-osflcyp111g01b1
aaggatcttgataaattgatgtgctccactattgatcttggaagagggtttgcaggagaaggcaaaatctatttttcaattgctgttgactcaattagttctatgttaaggcgtgcttcagtgtcatcaatttcaagcttcctcagtaatcttcggagccatgatcaaatatcatcaatattttggctaatacattctgatctccatgaacccaaattttcccgagcctttgaatgtctctctaccatggttgcttcattagagccagctgtggttgattctgtttatgaggaagaaattccagggaatatttctttcctggaggaaaattattctaaagcaaagttttatttacgcctaaaacggcggaatggacgggtcaagcacctttacga

SEQ ID NO: 4793 - DNA, 103 bp, Oryza sativa
  Clone ID: uC-osflcyp111g02b1
tgttcccttcatttttcgttgattcgtgagcgcggcgacgtacgtacggtggtaagcatcgtcgtggattcgtctccggcgacgggggggagtgggtagggta

SEQ ID NO: 4794 - DNA, 395 bp, Oryza sativa
  Clone ID: uC-osflcyp111g03b1
tgttatttggaccaccatttttctgacgggaagaaatctgccacatgattatgacaaagcaaagtgactttgagaattttaccatgcgactttctgctacaattctgaaagctcagctgcaagccaggcagccagcaatatataccgcttggccgaaggatccaaatatctaatcagcaaggatgaaaagtagtactagtacaatagtgcaaaagtatagctttgtatcagggaccaaggctggcatacaccctgtgccgtttttcacatagcatttgtctaatctgaacccatcacactcatacgtttttgcttttctcgcacgcttaagatgagaaaaacagactggattaaagctggattaactattttatctttttgggggcaacctgaga

SEQ ID NO: 4795 - DNA, 482 bp, Oryza sativa
  Clone ID: uC-osflcyp111g04b1
gtaagatccagaccccgaccgacgaggtggtggttccctacgacacgctctcggctgctcccgaagatctcaacgagacgaagaagctgctcgacaaactcgtcgtgctcaagctcaatggaggcctcgggacgaccatgggctgcactggtcccaagtctgtcattgaagtccgcaatggctttacgtttctagaccttattgtgattcaaattgagtccctgaacaagaagtatggatgcaatgtccctttgcttctaatgaactcattcaacactcatgatgacacacagaagattgttgagaagtactccaactccaacattgaaattcacactttcaaccagagccaatatcctcgcattgttactgaagacttcttgccacttccaagcaaggggaagactggcaaggatggctggtatcccccaagccatggtgaggtgttcccctccttggataacagtggaaaacttgatacc

SEQ ID NO: 4796 - DNA, 293 bp, Oryza sativa
  Clone ID: uC-osflcyp111g05b1
cagtgacgcccttatcggtggtggattcgccttccagaacccaaatgcaacaaagacatgtgggtgtggcaaatctttcgccaccggaaaagaaacagagagcacagcaacagcctgcaacaactaagctagaaacatataggtggaaatgccatatatatagctcacccttggcaaaatgttctatggatataccacagatgaatactcgaaactcagaagtgtaacgattttcattacagtttgtgtgtatcactgtatccaattggacaaattactgctcgatagaattc

SEQ ID NO: 4797 - DNA, 333 bp, Oryza sativa
  Clone ID: uC-osflcyp111g06b1
tttcggagagaagaagggattacagcggagcacgccatttgccatatgctcgatccgcttcttatcgtaaggcattctgttcttacaagcgtctcaccttgatgatgccgacggtggttggtgcgatggctctcactgagtctcaacggaccgctctcactggatctgtctatgaccttctatccttcttacttggcgtcatcgcagaaaacaagaaggtgcatcactacactgactaaaatactcgatcctgttaatgatcgcactgtctggaacacattttatgaaggttactactaataccgatgaagaaatagtagtaattattatgga

SEQ ID NO: 4798 - DNA, 366 bp, Oryza sativa
  Clone ID: uC-osflcyp111g08b1
tcggttttgcgaagcaacaagcataatggcttccctgttgttgatcgtgggcagaatggcgagtcacttgtcataggtctgatacttcgtagtcacttacttgtacttctgcaatctaaagtagatttccagaatagtcctttcccttgtggacctggtatactcaacaggcacaatacaagtgactttgttaaaccagcatcgagtaaaggaaagtcaattgatgatattcatttgacagaagatgagctagggctgtatttggatctcgccccatttctaaatccttctccttatatagtgccagaggacatgtccttagcaaaggtgtacaatctcttccgccaactaggattgcgacatata

SEQ ID NO: 4799 - DNA, 419 bp, Oryza sativa
  Clone ID: uC-osflcyp111g09b1
tcggcgacgacaagacgacgatggaggaggagtcggacgtcggcatcgccatcgccaggagcgcctcctccaacggaagccggcagcaagacaagaagcggggcgcgttcggcctcttccgggcgatgttcatgtccttcaacggcagcgccagcatcaagaagagggccgccgccaccatgggcaatcagaagaaggccgaggcggccggcggcggcgccgcggctgccgtgcgaggtcgtccagcgacgtcgcgtcgtggaagaacctcgtcgacggcatgcgcccgctccgcctccacggccacctggagtactacccgccgccgtcgccgacaggagcgagggcatgagcatgaccagcagctactcgtccgcccaggacctgcaggagcttgtcaacgtcaatggccatggaaa

SEQ ID NO: 4800 - DNA, 514 bp, Oryza sativa
  Clone ID: uC-osflcyp111g11b1
tcggacgacgagacccagcgagcgatcccgagggaagaaagagatcgagagggaagggaagggagaggatcggagagctttccgccggccatggggttctgggtgaccacgctcatcttcctcctcgccggcttcgtcgcctccctcttctcgctgctctgctgcaaccgcgggccgtcgaccaacctattccatttgaccttggttattacagcaacggtttgctgttggatgatgtgggcaatcgtctatcttgcgcagctgaagccactgatcaaccctatcctaagcggcgagtgagctgtgttacaatttgaagtctgctcatgctgtatcactatttagttgaggatttctattcattttggcacgactgaaataaagaattgttgtgagattttggaacacttcctctagacactagaggatgcccactgtgattagtgtatgccattatattatatacacaataatcggatcaatgaccttgtccattaaacttccaaagttaccc

SEQ ID NO: 4801 - DNA, 309 bp, Oryza sativa
  unsure (1)..(309): unsure at all n locations
  Clone ID: uC-osflcyp111h01b1
gtaacagcgagttgattttatggactggggtccaggtgctcactgtggtgaataatcatggtttttcaagggatgattttaacatcgagcataaaatccatcaaaggacgttaattcgggaatgctacaatgagttttttatcttctaaaatttgttttaaagttcttcgaaatggtctagaaaagccttccattgattttgcagattntcttacatacgcagagccagaaactgtcgtccttcttctcaagttttccaattctggtgctgtcttgaatgttacaattgagaagatccaaggaggcaat

SEQ ID NO: 4802 - DNA, 293 bp, Oryza sativa
  Clone ID: uC-osflcyp111h02b1
gcaaaaacatcatcttcttcttcatcttcttagtgtacacaacaccaactcgatcatcatctcgtcgcactaaacccatcttccccaacccaaagacaacgaactcgctggccacaaatccatccaaccacaattaaccactgctaagctacggtcccccacttcacttgccggggacgaagttggtggcgtacgcccaggcgttgttgttgacggggtcggcgaggtggtcggcgaggttctcgagggggcccttgccggtgacgatggcctggacgaagaagccgaacatg

SEQ ID NO: 4803 - DNA, 470 bp, Oryza sativa
  Clone ID: uC-osflcyp111h04b1
cttctccctgtgtactgcactgcacactctaggcggctgaagcgaacgacaccggcgtcaagagtatcaagcacggccatggcggcggcgaacggcgatgccagccatggcgccaacggcggcattcagattcagtccaaggagatgaagacggccatccacagcaacgatagccccaagaccctcctcaagagtgaatccctccacgagtacatgctgaacacgatggtgtacccgcgggagaacgagttcatgcgcgagctccgcctcatcaccagcgagcacacctatgggttcatgtcgtcgccgccggaggaagggcagctgctgtcgctgctgctgaacctgacaggcgccaagaacaccatcgaggtgggccgtgttcaccggctgctccgtgctcgccaccgcgctcgccattccggacgacggcaaggtcgtcgccatcgacgtcagccgggagtacttcg

SEQ ID NO: 4804 - DNA, 504 bp, Oryza sativa
  unsure (1)..(504): unsure at all n locations
  Clone ID: uC-osflcyp111h05b1
gtcaccgcttccacctcccctaggaggctagcacacagcacacagtagcactagctcgtcgtcgctggcgcccgtggcaggcggcggcggcggcggttcctcctcgtccgctgctgttgctgctggcgcgtcttctagctcctcctcctcctcggtggccgcggcggcgaggaggggcgcgggccgtgccggcggtggcgccccgtcgggcggcggcggcgggccgaggtgccaggtggagaggtgcggcgtcgacctcagcgaggcttgggcggtacaaccggaggcacaaggtgtgccagacgcactccaagngagcccgtcgtcttcgttcgctggcctccgccagcgcttctgccagcaatgcagccggttccatgagctgacggagttcgacgacgcgaagaggagctgccggcggcggctggccggcacaacgagcggcgccggagagcgcggtggacacggtgcacggcgaggactgccggcacgccgaccagacgc

SEQ ID NO: 4805 - DNA, 433 bp, Oryza sativa
  unsure (1)..(433): unsure at all n locations
  Clone ID: uC-osflcyp111h06b1
ttcgccggcgcggtgccgaaggaggcgcgcgcgacgcacgactgcctgtaccgcgccgtcgacatctacctgaaggcgcacccggcgctggaggagatggagagggagaaggtgtgcagcgtgatggacccgctgaagctgtcgtaccagggtcgcctccacgcgtcacagaacaatcggctcccgctgcaggccgtgctgagcgcgctctactacgaccggctcaagctccgcagcggagaacgagggcggcggcgggtgggacgcgtatgggaatggcgtgatgagggtcgtcggcggcggggtcggcgaggaagcaggcgaaggaggaaggcgtcgctggcgagggagaacgaggcgctgcggtcggagctggcgcggatgcgggcgtacgtgtcggngatgcagcagcagagcaaggggtcgtcgtcgt

SEQ ID NO: 4806 - DNA, 443 bp, Oryza sativa
  Clone ID: uC-osflcyp111h08b1
tcgcttgcataagaactcccccccctcctcgctccccgccgccgccgccgttttcttggagaggagaaatccgtaggctcagaggatttttggtagtcttgtttcgtgatattcgtgaagagggggggagctaaggggggattcgtaagatcagaattggatcacgcgggggcgcgctcgggatcgggggttccaaacacagcttcttcgttgaatttaagtggatgtactaatggagtcaaagggtggcaaaaagaagtctagcagtagtcgttccttgatgtatgaagctccccttggctacagcattgaggacgttcgacctgccggaggcgtgaagaagttccagtctgctgcttactccaactgcgcgaagaagccatcctgatagccctttcggcttctcctcctagtagtttaggatttcttgcattccattttgc

SEQ ID NO: 4807 - DNA, 413 bp, Oryza sativa
  Clone ID: uC-osflcyp111h10b1
tcggttgatccagcccttgtgcaagaggtcttctttggtaatgtgttgagtgctaatttggggcaagctcctgcaagacaagctgctttaggtgcagggataccaaacacagttgtttgcagcgcagttaacaaagtttgcgcatctggcatgaaagcgacaatgtttgcagcacagtcaattctattgggcatcaatgatattgttgtagccggtggcatggaaagcatgtctaatgctccaaaatacattgctgaagctagaaaaggatctcgttttggacatgacactcttgttgatggcatgcttaaagatggcctttgggatgtatacgggtgattttgccatgggaaattgtgctgagctttgtgctgacaatcatgctctgacagggaagaccaggatgcctatgc

SEQ ID NO: 4808 - DNA, 289 bp, Oryza sativa
  Clone ID: uC-osflcyp111h11b1
tcgtgaacctatcgctgcgagctgttaagccatcaatcaactagctggttgacgctacatggacacatgacacagggtcccaaccggttgcaactattcgtgctagatgtgcagatgatttctggcatgccatgcgcgtagataaataaatggctatccctcaatttaattacttgcaataagtgtgaatatatagcagaaaacatcacaatcgattcttttgcgttgtcattctgctaatgttgaatgtgaggatggaagtagagataataaggccgagtttagttcc

SEQ ID NO: 4809 - DNA, 468 bp, Oryza sativa
  Clone ID: uC-osflcyp111h12b1
tcggcttcgtctccgtggtggtatgcagatcttcgtgaagaccttgactgggaagaccatcactttggaggttgagagctccgacaccattgataatgtgaaggccaagatccaggacaaggaggggattcccccagaccagcagcgtctgatcttcgctggcaagcagctggaggatggacgcaccctcgccgactacaacatccagaaggagtccaccctccacctggtgctccgcctccgtggtggtcagtaatcagccagtttggtggagctgccgatgtgcctggtcatcccgagcctctgttcgtcaagtatttgtggtgctgatgtctacttgtgtctggtttaatggaccatcgagtccgtatgatatgttagttttatgaaacagtttcctgtgggacagcagtatgctttatgaataagttggatttgaacctaaaaaaaaaaaaaaaaagggcgggc

SEQ ID NO: 4810 - DNA, 462 bp, Oryza sativa
  Clone ID: uC-osflcyp112a02b1
ttggatctgtagttcttggaactccaggtgccccttctgtcaacggtgacatgtacactgatatcagccctgagaatgctgtgcttcagggacagaggagattaagcaaaggtgtcgattacttagttgaagcatcagcagcagaggcagaggctattagtgcaactttagctgcagtgaaggctaggcaggttaacggtgagatggagcaattgcctgacaaggagcaatctccagattccgcatcgaccagcaagcattcaagcctcatcaaaccagacagtattctctctaacaacatgacgcctccacctggggttcggttgcatcatagagctgttgtagtggctgcagaaactggaggtgccttaagtggcatggtcaggcagctgtcaattgaccaatttgaaaatgagggaagaagagtcagctatggcacccctgagaatgcaactgctgaag

SEQ ID NO: 4811 - DNA, 157 bp, Oryza sativa
  Clone ID: uC-osflcyp112a03b1
tgcgccgccggcgccggcgccggtgagggtggcgatgaggagcggtggggcggcggcgtgcggcggcgagaggggtgaggtgcagggcgagcctgatcgagcccgacggggggaggctggtggagctggtggcgccggaggagggaggttccccttt

SEQ ID NO: 4812 - DNA, 342 bp, Oryza sativa
  Clone ID: uC-osflcyp112a04b1
tgaaatctccccccgtctggccgactcctccggtccttgtgcctccccaagacgagttgcggctgaacagaagagggggagtaggcggcgatctccatctggcgactcgcgagcagagcaggggaggggatcctgatctggaagaagctctcctcttaatttcagcgccttaaccttaatacaagtaccagtttgagtttgtttgttcccaagttggatccggccctgggtaatttctttcttgctgaaggtggagagactgagctgagctatggacaacttgtggcatctcagggatgagttccgtgggcagtcgaaggttgcggaggacccgcagtggtc

SEQ ID NO: 4813 - DNA, 351 bp, Oryza sativa
  Clone ID: uC-osflcyp112a07b1
tgatacatatcaccggtcgccgagcagggtgcgcattatgagaaagcgggcgcattgttgcggaatgcgctagaaaccactgaggatcgctagactattaaccgggaagggtatccgagtattagggccaacatgagcaagatatgcgcaactgggggaatgcgggggatcaatgctggcctcgggccaacagtaaatgggacgctgacttatagccacatgctattactttatggacgacacaatcaagacttgtaactgccccatacataagaagagcgggatgacttggcctgagcgaccagacattggagcattggcacgtgtgaccgaaagcacaatgagctaccc

SEQ ID NO: 4814 - DNA, 286 bp, Oryza sativa
  Clone ID: uC-osflcyp112a10b1
tggttaaattctacactctctttactgttggcgactcttttaccttttattatagtgtccacggtaagaaatcatagtgaccatatatttttgacgcaaatagtgaccatatatcgttggaacaactgtaggtgtgtgtctgatcgccgcgtaaactagtcgtttttggacctgatgaccttctggacatacgctctcctgatgaagtaacgatgcttacttgatcggtcccgttgtgatttgctccctgtaggctggcccagccttattcatggtcggatgacgt

SEQ ID NO: 4815 - DNA, 405 bp, Oryza sativa
  unsure (1)..(405): unsure at all n locations
  Clone ID: uC-osflcyp112a12b1
tcttacggagacgccgactgcctaatctcctgggctcgatctttacttcccaggaggcggacgacgcaggaggaagaggagctattcgctatctcgctgacgcccgcaccaggacacggcgatagagacagaggtgggagatcggtgatgaggaaactggacccctagccgatcatgccgacggagactgtgctcgcggctacacctgagatggctgccgtagcgctggctctggcactgccgagttgccgggaggaggtgaacaggntccccgacggggcaagacagggactttttattcctatccgcgactacacgctcgatgctacggcacgctggcatatttgaacagaagtcaagggccagtgcctgaatttggtggtactacccaaaaagtcttccatc

SEQ ID NO: 4816 - DNA, 378 bp, Oryza sativa
  Clone ID: uC-osflcyp112b01b1
tcatcatcgacgccgccaactccttcccggcgttcggtacctccggcggcagcgccgagctcatccggcgggagctcgccgccttcttcggccagacctcccacgagaccaccggtggaacgaggggtagttctgaccagttccagtggggttactgcttcaaagaggagataaacaaggcgacttctccaccctactatggacgtggcccaattcaattgacagggcaatcgaactaccaagcagccgggaacgcgctggggctggacctggtgggcaacccagacctggtgtccaccgacgccgtggtctccttcaagacggccatctggttctggatgacggcgcaggggaacaagccggcgggccacgacgtca

SEQ ID NO: 4817 - DNA, 335 bp, Oryza sativa
  Clone ID: uC-osflcyp112b02b1
tggtaatcgtcataactaacccttctatgggatgttattttacccatctgtgaaatacacagaaccatacggaggaaagtaggacatacacgaggtagtcattcgacgtgacgggggacagaactcaggcatactagagcgggatggagcagcactcaaaggacgagctactataggaggagaactttagtgcactctgcaattgacaaaagggtgtgcgaacgagcgggaggccttggaacatcatggggagctcatgttaccgtaagagcccagagaacatgctcaagggcaaacactacacctggggtgaacgaaccggaggggaccatatc

SEQ ID NO: 4818 - DNA, 297 bp, Oryza sativa
  Clone ID: uC-osflcyp112b05b1
tcggacgcgtgggcgactccaccactcacattcattgcctagtatatcctgcctgactccaccgacgatatggtccgcacgccgacgagcccaaaggcggagagcgccgtagacttagcctggcagggcctcaccgccagctccaccgaggaccaggtcggcacacgtggcacctgtctcctacacgagaccgaatgaacctctccggactcccctccactccgctttgagcgcgacagacactacggcaagtacaggatccagaggaagagcagtaccgcttcataccagaataga

SEQ ID NO: 4819 - DNA, 305 bp, Oryza sativa
  Clone ID: uC-osflcyp112b06b1
ttgtaccgtctcccacggctgagcatcctccaaccttgttgtggaacgttacgattttttgatcacggctacactctatctgtttctgcactgatcaactactacaaccagaagcaccggttcaaccagagcctgcttgtcgtcttcaccgtacggcatcagctacgccgatggtatgacagggaccttcgccagagagtaaggttattctggtgagagtaaatattacaacacgtgatgtgtgaagccagactgcctacacatactgggttggaaagagggacaaagactgagactgagacggt

SEQ ID NO: 4820 - DNA, 434 bp, Oryza sativa
  Clone ID: uC-osflcyp112b07b1
tgcacgcagctcgccgaccagagacagagagagatcccatctgctagcttagctgccatggccgcctacaccgtgtccggcctcgccggcgccaccctcgcccgccggccggccttctccaccggcttcacgacgggcgcccgggtgtcggcgaggaacccgctgctgacgaggaacctggcgaggaacggcaggatcacctgcatgacgtttccgcgggactggcttaggagggacctgaacgtgatcgggttcgggctgatcgggtggatcgcgccgtcgagcgtcccggcgatcaacggcaacagcctcacggggctcttcttctgcgcatcgggcaggagctttcccacttcccctcgccgccggcgctcgactcgacgttctggctgcggatggtgaccgagcaccctgggcctgtccctggcgctcac

SEQ ID NO: 4821 - DNA, 340 bp, Oryza sativa
  Clone ID: uC-osflcyp112b09b1
actgtagtaatgggcctagggaggacaattggcctaagatggctgattactcaaagaatgaacaaactgaaacgggaaaacatggattgcctactggagcgctttgaaagaggagatctatggggaggaggggaactgcatcaactggtggatattgagaagctgacgcagcactgaatagcaaactctcgcgagttggattattactcgcttatgcttagcgagaggtaagagagcctttcactggtatgttatcatagtcagatgtgtcttgagagatggaatgcgaggcagacagatctttagcataattttatgctaggaaggaccacacaacgat

SEQ ID NO: 4822 - DNA, 551 bp, Oryza sativa
  Clone ID: uC-osflcyp112b10b1
tgctgtgacgtggtgcagtgaaagattctgtgaatgaggacaagttgagagataaacctgcgtatgagcacctgaatgaaccgatgaatgagcttgcggaagcatagttaccggcagatattattgatacccgtctaaaccaagctgtgactatcctagaggatcttgtcaaaccaattgatgagtcaatggactactacaagaagcaacaactgagggaattggccattctaaatggcaccgtgagagaggaaagcctaagtcctcacctgagccctagtgtatcccccttcaacttcaccgggatgaagcgcgcgaaaacagggcggtgatctcggttccgaaagcattattattctccaaatctggccatggtatctatgcctgatcacatgctgctgcgctttgctggagatgattggcgatgcatatgctgggatcatcagtgctgctgggctatgcctgccatgatctgccttgctttatattccttgggggtgaatgatcctctttgagggtctgatgtctagcgggattaatatttatccttt

SEQ ID NO: 4823 - DNA, 434 bp, Oryza sativa
  Clone ID: uC-osflcyp112c02b1
tcttttcttcctcctcctcctccgccgcccgcctcgccgcctcccgagagctccaccctcgcctccggcgaaatggcaccgaagcgaggcggcagggcgccggtgccggcgaagaagaagacggagaaggtgaccaacccgctgttcgagaagaggccgaagcagttcggcatcggcggcgcgctgccacccaagaaggatctgcacaggttcgtgaagtggcccaaggtggtgcgcatccagcgccagcgccgcatcctcaagcagcgcctcaaggctgccccggcgctcaaccagttcacccgcaccctcgacaagaacctcgcaaccaacctgtttaagatgctgctcaagtaccgccctgaggacaaggctgtcaagaaggagaggcttttgaagagggcccaggctgaggctgaagggaaaaccggtga

SEQ ID NO: 4824 - DNA, 348 bp, Oryza sativa
  Clone ID: uC-osflcyp112c03b1
tcatatactattaagcaatttttgaagttattatcaggtattctcttctgccctataggctgataggtcaatgtttccagctgtcagaacaaacaaatcagttgttcttgatgtatttcaattagaaccttaatttttcattttaccatgaggatcccatgtgtttcttttccttgatttgtaccattatttccagaattgcgcaaaagaaaaaaaaaactataagaaataattgaaaagaccagaactgaatgttgtactggattggtctttatttaaacttaatccaataataaccagtttttgtacaagctggtattattttcattgggttgctaggttccctat

SEQ ID NO: 4825 - DNA, 399 bp, Oryza sativa
  Clone ID: uC-osflcyp112c04b1
ttcttaattagctagctagccgctcaagtcatatatatatatatatatatgctagctagagggacgaccaaggagctagctagctaggagagggcgagagatgagcagcagctagaagcagctgatctatcgatctatctatctatctatctatctatctatctatggagagctcactcatgtatgcatatatacttggatctcctctcctctccggacatgtcatatatacgtatctatatcgatatagatcgcctgccggtttataggtagatatgcatgtatcgatcgggatactattactaatatatagctagttaaaccaaactaagaccgatcaaatacaatatatcgatcgatcatgaggggaagtagcaataatcacaagtcgaagtctga

SEQ ID NO: 4826 - DNA, 422 bp, Oryza sativa
  Clone ID: uC-osflcyp112c06b1
tgaagaacttgaacacgccaagcaaagaggtgcaaaaatatatgctgaatttctaggtggaagcttcacgtgtgatgcataccacatgactgagccacatcctgaaggaagagggattattctttgtatagaaaaggcactggctgattcaggagtagcaagggaagaaatcaactatgtcaatgctcacgcaacgtctacacagtcaggtgatttgaaggagtatgaagctattgtccgctgctttggccagaaccctcagctaagggtgaactcaacaaaatcaatgactggacatctaataggtgcagctggcggaatagaagctgttgctgctattcaagctttaagaactggctgggtccatccgaatctgaatttggagaacccagagaaaatagtggatgtgggcgtgctggtcg

SEQ ID NO: 4827 - DNA, 465 bp, Oryza sativa
  Clone ID: uC-osflcyp112c08b1
tggttgcgagtgtgcgacccatctacatctgcatccatcctcttcccccttccgatgccaacatcttatcggggattcgattcgggtcaattagggtttactcgagacttgagagaggagagctcgcccgctagggtttcgcgggagatggcgcaggcggtggaggagtggtaccggaagatgcccatcatcacgcgctcctacctcaccgtcgacgatggcacgaccggcgggtgcgccctcgagatcatttagccctaccacctgtatctgaaccccaagctggtggcgcgagactacgagatctggcgccttgtcaccaacttactgtacttgcgtatgatggatttgggactttctgtgccacatgtttttttttgcacgatactgctagtgttttgaggagatcttattcagaggaagaactgcttgcctttttctccagctttttggttggcgctcctg

SEQ ID NO: 4828 - DNA, 406 bp, Oryza sativa
  Clone ID: uC-osflcyp112c09b1
tttggacactccgcgactgggacgcagggaagctgacatcaagaacaggttcgttctgccaccatacttgacactgaagaatttcgaaggcctggacctcgcagagatggacaagagcaacgattccgggctggcctcctacgtcgccgggcagatcgatcgcacgctcagctggaaggatgtgaagtggctgcagagcatcacgtcgctgccgatcctcgtcaagggcgtcatcaccgcggaggatgcgaggctggccgtgcactccggcgcggcggggatcatcgtgtcgaaccacggcgcgcggcagctggactacgtcccggcgaccatcagcgccctggaggaggtggtcacggcggcggcggtgcgcatcccggtgtacctcgacggcggcgtccgccgc

SEQ ID NO: 4829 - DNA, 444 bp, Oryza sativa
  Clone ID: uC-osflcyp112c10b1
tgttgctgacaggggtgtgatgattggtgatggcaaatcacgcttttccatcaacgggaagcccatttaccatttggtcgggacttcgaccttcagcgagtacactgttatgcatgttggttgcgttgcgaagatcaacccggcagctccacttgataaagtttgcgttcttagctgaggaatttgtactggtctcggtgctacaatcaatgtggcaaagccaccaaagggatcgacggtggcgatattggctctaggagctgtacgccttgctggcgataaggtgcacggattgcacgagcgtcaaggatcattggcattgacctgaacgccaacagatttggagaagctaggaaatttggtcgcactgaatttgcgaacccaaaggaccatgacatgccaggtcagcaggtacttgctgagatgaccaatgaccgagttgac

SEQ ID NO: 4830 - DNA, 390 bp, Oryza sativa
  Clone ID: uC-osflcyp112c11b1
tgttgtcacaataccaccaccgaattgagcgttggagaattgtgagtgacatatgcaacatttggagctagggtgcgctgtggttgcaggcgatagaggctcacaggaagggggcgaaggtgtaccaccatgcgggactgtgcgcggtgaacgcgggggagctactagcggagattcacatgccggtgagcctgctgccgatgtcggtgatggaggaggacgagttcatccgtgccacggcgaccatggggataattcaccatacggacatcgcccacactcttaaggctgatgctctggaggagcatggcacgcctttaatagatgaattcttgcccaaggacccgctgatgaaatacttattctgaaacggttctaatgtgttacgag

SEQ ID NO: 4831 - DNA, 288 bp, Oryza sativa
  Clone ID: uC-osflcyp112d01b1
ttgttttctcctcctcctcctccccctcccggtgaggcggacgaccgagctgaggctgagctagggctagggcacccacctcctccccttccgtatcctggatggctgctggtcggggcattaaccagctcctacggagaacactccatagtcagtcctgatgctcatctctgctatcctcgttccggataaagcatgaagaatcctccgctggactgagagcattggctcttcttggagatggcgcttctggtcttttaagctttgctacgatggcttctgcagatg

SEQ ID NO: 4832 - DNA, 376 bp, Oryza sativa
  Clone ID: uC-osflcyp112d02b1
tcggttgagtgctctttactgaggcggatgctgaagaagttcagtcacgcattgttgatgctgaaaatttgcgtgaagagcaccgctatccaaatcttatgaagattttctcagcttttgggagtgtgaaatcaattcgtacttgctatccacaaggtgggattgatggtgctggaacttctactggcaaagcatcaaagattgagatgttgtttgctaataaggtgcatgcttttgtggagtatgaaactgttgaagatgctgaaaaggcagattctgaattcagtagtgcgagaagctggagagatgggattagagtccgctcactgcttggttgcctgaaacaagccatgggtcaaggaagaagaggtggaga

SEQ ID NO: 4833 - DNA, 330 bp, Oryza sativa
  Clone ID: uC-osflcyp112d03b1
tcgtcctagccgctttccccatctgctactcccagaactagaatttcgccaccccgaattccttccatggtaggacttccgtttgattccgggtcgaatccgtcgactccgatgccggaacggtgaggttttccctccctttatatggacaacacgcgtttgttttttctgttgcgcaggtttcagatcttggatggacttgctcatccttgggcggccatggatctatcggcggaagctgctgctgctgctcgacctcacgttcggtgagttataactggagccgatctgacctcttagaggtccagttggggaatgctacgtacgagc

SEQ ID NO: 4834 - DNA, 193 bp, Oryza sativa
  Clone ID: uC-osflcyp112d04b1
tgatactttgttaagaggtgctgtttgtgaacttgagatagatttctgactttgtgccattagagtttcagtttgtgtacctgctgctgttgatgtacagtcatcatggtccagaagaattgttgcattgtcattactcatcaaaataaaaagaatgaagattaatatgaagaaagaaaaaagaaataaacag

SEQ ID NO: 4835 - DNA, 542 bp, Oryza sativa
  Clone ID: uC-osflcyp112d05b1
gagattaacgagcttgaagaatactattttcatagacggaggaccggagcacaatcacgtaagctggaggaaagagacatagtgacagtaaataaagaaggttatcatgcaggacttgaggatttccagtctgtgctaacaacattcacacgatatagtcgcttgcgcgtaattgcggagctaagacatggagatctgtttcactttgcaaatatcggatcaaggatcgaatgtgaccgtgatgatgagctatttgctactgctggagacttaaagcgcatcaaagactacgagtattgtacagatgttaatgaaccatcagatgtgcattgtgcagttgttgaaatggatactagatctaaactcaggtgccttagctggaacaagtcctcaaaaaatgttatagcaagcagcgactatgagggtatagtaactgaatgggatgtacaaacccgtcagagtgtgaaggtgtatgaagaacatgaaaagagagcatggagtgttgattttttcgaacagaacccttgatgctagtatttggg

SEQ ID NO: 4836 - DNA, 410 bp, Oryza sativa
  Clone ID: uC-osflcyp112d06b1
taagccatggcgtcctccatactctccgactggtcctactgcgccacctgccgccttctccccctacggcgcgccctgctcgcgccgccgtgccgcttccgcccggacaccgtcgccgcgccgccgtggaggcccctcgccatcgccggcccccagctcccgcttctcccccgcgcgcgcggcacggcttcggactaagccgacgccgtcggcgacgcctgctataccgactcagatgcttgtgccaagatcattgatgggaagttggtggcaaagcagataagagaggaaatcgctgttgagatcgccaagatgaaggatgcaattggggatgtgcctgggctggcagtcatcctagttggggcaaggaaggattctcaaacgtatgtgcgcaacaagaagaaggcatg

SEQ ID NO: 4837 - DNA, 503 bp, Oryza sativa
  Clone ID: uC-osflcyp112d09b1
tggatacacctactgttgcaacaccattccgggaacctgggtatccggtgggtggtgaaactccaatgcacccatctcgaacaccgcttcatccttaccagacaccaatgcgggaccctggagcaaccccaatacacgatggcatgcggactcctatgcgtcgtggctgggctcctatgagtcctccgagggataactgggaagaaggaaatcctgctacttggggaagcaggccagcttaccagccaggaactccaccagctcggccatatgaagcacccacacctggatcagggtgggcaaatacgccaggagttagctataatgacgctccaactcccagggagagcaactacggaaatgctccaagcccatatgtgccttccactcctgtaggctaaccaatgacaccgaattctgcctcggaccttactggtacacctgggcggtcaacccgatgacatccaggcaatgttggaatggacataatgtcgcctataata

SEQ ID NO: 4838 - DNA, 551 bp, Oryza sativa
  Clone ID: uC-osflcyp112d10b1
tgctcgatcttataagaacttggattcctttcgtagggcattactcaataataaagcaaaagatattgcatactacactgatgaactgcggtggatcaagtcaaaatcagaaattgggttgatgcgagaatcagcatctattgtttctcagtctcttttacaaacgatgttgctatctaggacccatagggaggaaagccaactggcagctaagatcgagtatgagtgcaaaatgaggggtgcccaaagaatggcgttccatcctgtagttggtggtggagcaaatggcagtgtaatacactactcaagaaatgacggaagggtcaaagcaggtgaactactgctcatggatgttggctgtgagtatcatggctaccttagcgacctgacttgaacatggccaccctgtggcaggttttcacctgcttaggaagaactatacagcctgatattggagacaaataaggaatgcataaagctttgtaaaccaggccgcagcattaacgagatacataatcattcggtcaagatgttgataaagggtttccaag

SEQ ID NO: 4839 - DNA, 355 bp, Oryza sativa
  Clone ID: uC-osflcyp112d12b1
tgttgtacaaacccagccaccttcgaatagaagtggtttgattaatgcccgagggggctctgcaccagaccaccatatagctagacacaggggataatcctactgaggcagtcggacgtgttggggaatacgttgtccgcatgaccttgcgcccactcggaaagagggcggccaaaagcatctggtatgaacatgaccgacacaagaacctgggcccgttgtaagaatatacgcccttgtacctgaccggagagctgctgcaagactaccgatgggacaccgtagggctatgggacaaggatgccacgattgttaggaacagggagctgaacgtgatccactactttttgatgag

SEQ ID NO: 4840 - DNA, 308 bp, Oryza sativa
  Clone ID: uC-osflcyp112e01b1
tttcttcggttaataatagcaaaatcccctcccacccccgccttctctctggaagcttcctcctgctcttcgccatggccggcggcgggaacctgttcgggagggtgctcagctacgtcgtcaacgagttcatcgtcgaggggctcgccaacaaccgtaccttccagagatttgctgtgaggaccaacaagtctcttgagaatctatcgtccaaagctaaagaagtgagggaggagctatcggagcaatggaggaattctcgtggcaatgatgatcatttcaggcagggaagctgggtcattttatga

SEQ ID NO: 4841 - DNA, 284 bp, Oryza sativa
  Clone ID: uC-osflcyp112e02b1
tctgtagaggaagcgccgaaagatgaggcagagatctaagtaggcgaaggagatgggcgatcatggtgatggcgtgtcgcagtgatccatgtcttcggctgccaagctcgttgatatgtcaagctgcttggcgtggtgccaccattcgactgttgaatggcttatttacctgtgctgttatcatcttatatccctagttttaccaagagttttgcaccaagacatgtcggttcagttatgtgaacttgttatggagcccgatttgctgctaatgtttacctacc

SEQ ID NO: 4842 - DNA, 286 bp, Oryza sativa
  Clone ID: uC-osflcyp112e03b1
tcttttgccttcttcagcttcctagtgacaaagccctgctgagtgaccctgccttccgcccactcgtcgagaaatatgctgcagatgagaaggctttctttgaagactacaaggaggcccacctcaagctctccgaactggggttcgctgatgcttaagaggtttctagtctactactgctagtacattgcccgtggtactcttgttttgcatctaggctagggccagggtgaaccagcagactaccactgtgagtcgcctttggaataaaaattggtcggcctat

SEQ ID NO: 4843 - DNA, 530 bp, Oryza sativa
  unsure (1)..(530): unsure at all n locations
  Clone ID: uC-osflcyp112e06b1
tcntgtgaagcgtgatgaattgactctagagggcattaaacaattctttgttgctgttgagaaagaagaatggaagtttgacacgctttgtgatctttatgatacactgacaatcacccaagctgtcattttctgcaacacaaagagaaaggttgattggcttacggaaagaatgcgcagcaataacttcacagtatcagctatgcatggcgacatgcctcaaaaggaaagggatgccattatgggtgaattcaggtctggtgcaacccgtgttctaatcacgacagatgtgtgggctcgaggcctcgatgttcagcaggtctctcttgtcataaattatgatctcccaaataatcgtgaactttacatccatcgcattggtcgctctggacgttttggtcgcaagggtgtggtcatcaattttgtcaaaaaggaagacatccgtatcctgagagatattgagcagtactacagcacgcagattgatgaaatgccaatgaatgttgctgatctaattgagcgctggagtg

SEQ ID NO: 4844 - DNA, 116 bp, Oryza sativa
  Clone ID: uC-osflcyp112e07b1
atcgagaaggttgtggttgaggtcgaggaggggaggggggggagacctcctccggtcggttccgcggatcgactagggcttatagggtagagacggcggcacccgatgtagagtac

SEQ ID NO: 4845 - DNA, 407 bp, Oryza sativa
  Clone ID: uC-osflcyp112e08b1
ttctacgctgaaaaattgcctaacgaggctgacagtgttcaaagccctccttgcacagaacaagaagagtccattgaatcttcctatgtcgaagtgagaagcactactgagggtcaagtggagagtgaagtaatagaaacgaatgaggaggaccaggatacgaccgcaggtggacatactgacgaacagatcgaaaattgacatgatgatcagtcgaaacgatcatgctgctgaagaaatatgtgatgagcaggcacctgaaataactgaaccagttagccacacttgatcgaaagtttgcttatgaaaaggaaattcctggcagttcgacatgcatggaccaagaaagagagtatgatctcaaacaatgaagtcagcaactttgaaaaagcccttgagacacactt

SEQ ID NO: 4846 - DNA, 354 bp, Oryza sativa
  Clone ID: uC-osflcyp112e09b1
tcgtctctctcgcgccgccgccgccgccgagcgcctggagcagcgtcagccatggccgtaggtaagaacaagcgcatctccaaggggaagaagggatccaagaagaagaccgtcgatccctttgctaagaaggactggtatgatatcaaggccccgtcggtgttcaatgtgcggaacatcggcaagaccctcgtgtccaggacacagggtacaaagattgcttctgagggcctaaagcatagagtgtttgaggtctccttagctgatctccagaacgatgaggatcaggcgtacaggaagatcagacttcgtgctgaggatgggcagggaagaacgtgctcaccactttttggg

SEQ ID NO: 4847 - DNA, 542 bp, Oryza sativa
  Clone ID: uC-osflcyp112e10b1
tgttgcggacgcgtggggccgaattgctcttcagattctttatccgatgttatcatgtttttgtcaagtgaataaactaaaactgtatgacaacagttacgtgttgaatcaactaaatttctgacagtagatgttcttaagtgcacaacctaaaatttctttaattcataagaacatgtaaccacattaggtataaagtttgcaagatatcaatcttgatggcctgttgctgctaggtgtatgcattaattctggtgcgctggatgtagtttgcttgcctctaggattatatgataagttagatgtattttgttggcctgctggatgtatgcattcagctcctgacttattcttgatttatttgtgcatgccggatccatggaagtatcaacccactaaagtctgaactttgaaataaggcttttggtatactgaggcctatatattctgcacgtcatagagctatcatgtaacaatatttgtgcaggttagcactggatggaaattaataccttatttgttttctatcttttgaacaactt

SEQ ID NO: 4848 - DNA, 542 bp, Oryza sativa
  Clone ID: uC-osflcyp112e11b1
tctctcgacagaagcaaacaaagtgtctgaggagctattgacgtgcctactgaatatcttctcacagatgaggtcctccagtgaccaagatgaggaccgatcatcgtctccgtcggtttcaggctcctgcgagagctccgacggcgccgcctgcgccggcgacccctacggcgtcctggaattgggtagcagggacattggtccatacaagcaattcagagcagttgatgccacttcattcgatcagaatgtttttgacaacagcaactcccttcttgacaggagattgaaggccttgctccagaagctctcttcagttgacctagtgggcctttcccatcagcagaagttagcattctggatcaacacctacaattcctgcatgatgaatgcatttcttgagcatggagcacctaccaccccacaaacgctggtggcaatgatgcccaaggcgacaatcaacgtgggtgggcgcgtgctgagcgccatgacgatcgagcacttcatcctaaggctgccctacaatgcaaagcatgtgaacc

SEQ ID NO: 4849 - DNA, 219 bp, Oryza sativa
  Clone ID: uC-osflcyp112f01b1
tttttagttagttggttgagtggaagcagatcaggaagatgctggagaagctgtgggacgacgtggtggccggtcctcgaccggagaccggcctcgagaagctccgcaaggccgctacaacccgcccccttgtcatcaacaaagatggcgacggcgaggcgagcggagtggcgtacaagcggacgcagtcgatgccgacgaccccgacgacgccggtga

SEQ ID NO: 4850 - DNA, 248 bp, Oryza sativa
  Clone ID: uC-osflcyp112f02b1
tttgtctcctcgggccgcgtcgctcttccaatccaacccactccgagccagattaagggagaagagatttcctgcgaattcttcgaggaattctgttccaaatcgagtatgaaattcgggaaggatttcaggagccacctggaggagacgctgccggcgtggagggacaagtatctggcgtacaagtcccttaagaagctaatcaagaacctgccccccgatggagatccccctcccgtcgccgcggc

SEQ ID NO: 4851 - DNA, 458 bp, Oryza sativa
  Clone ID: uC-osflcyp112f04b1
ttgtcaaacgtagcagcgtcattcacacacattatcaaaagtgcagagcctgcattcagtgttttggtatcaaggttccttcttggggagacgtttccggttcctgtatatctttctcttcttccaatcattggtggatgtgctcttgctgctgtcacagagctgaactttaacatggttggattcatgggtgccatgatatcaaaccttgcatttgttttccgcaacatcttctcaaagaggggcatgaaggggaagtctgtcagtggcatgaattactatgcctgcctgtcgataatgtcccttgtcatactcacaccattcgctatcgctatggagggccctcaaatgtgggctgctggttggtaaaaggcttttgcggaagttggtcccaatgttgtctggtgggttgctgcaccaagcgctttctaccacttatacaaccaggttgtctttac

SEQ ID NO: 4852 - DNA, 527 bp, Oryza sativa
  Clone ID: uC-osflcyp112f06b1
tgacacgagcagcgaggaggagctcccacgtgagccgtggacggtggagaaggactttcacctcctgaacaacttagccgcgcatggcggcgagatccaacgcgagccgtgggtggagaaggacgacgccgcgtcgtggacggtggagaaagacgacgtaccgctcgtcaacaacatcgtcgcgcacggcgatcccgagggcagttcgaactcgctcgcccgatcaggaggacatttggccaatgtccacgagggagccggcatgttttatcagcccaacttcaagtacattttctgtgatatggatggcacactgctggatagtagcggtctagttccagaaaccaacgctgaggccattatggtggccaggtcaagaggggtacaaacaatcattgcgacaggaaagttccgccctgctgatattgaagttcttggcaaggttaatttagctggcacaggtggtattcgttcagaatcgtctccaggagtattccttaaggttttgtagcttacggcgagggggg

SEQ ID NO: 4853 - DNA, 66 bp, Oryza sativa
  Clone ID: uC-osflcyp112f07b1
tggtaaacctctgagagcaaagaccaaggggggagatctagattcgccgccatgacggaccaggga

SEQ ID NO: 4854 - DNA, 344 bp, Oryza sativa
  Clone ID: uC-osflcyp112f08b1
ttctggaactgcgtcacccaggtggccaaggcgaagctctccatggacccaaccggtgacctctccagcgcgcgcgttagcgagatgaacctcctcaccgccatcgaccgtgaggccgtgttcagctacgccgacgacccgtgcagtgccagctacccggtcatgcagaagctccgcgccgtgcttgttgagcacgcccttacccagcggcgacgccgagcccgaggcctgcgggttctgccagatcaccaagttcgagggggagctccgctctgcgctgacccgggagatcgagggcgcccgcgtcgccgttggcaccgtcccgcccccgttgccaaccggtt

SEQ ID NO: 4855 - DNA, 339 bp, Oryza sativa
  Clone ID: uC-osflcyp112f09b1
tgcacatgatggttcagagaaggcacttcttactgaactgcaggcactcgaggagcatctgaaagctcatggcccctttatcaacgggcagaacatttcagctgctgaccttagcctggcaccaaagctttaccatctccaggttgctctggagcatttcaaaggctggaagatcccggaagacctaaccaatgttcatgcttacacagaggctctggatagccgggaatttttcatcaagacgaaggcagcttaggagcacctgattgctggatgggcaccaaaagtgaatgcgtaagagcctgcccttatgctctggtgctgcttggacaccatgct

SEQ ID NO: 4856 - DNA, 548 bp, Oryza sativa
  Clone ID: uC-osflcyp112f11b1
ttgtctaaacctggccggaatccaacccctgcgacgccgtcatgagggagatcctgcacatccagggggggcaatgcgggaaccagatcggggccaagttctgggaggtgatctgcgacgagcacgggatcgaccacaccggcaagtactcgggcgactccgacctccagctcgagcggatcaacgtctactacaacgaggccagcggcggcaggttcgttccgcgcgccgtgctcatggacctcgagccgggcaccatggactcggtgcgctccggtcccttcggccagattttccgccccgacaacttcgtcttcggccagtccggcgccggcaacaactgggccaaggggcactacaccgagggcgccgagctcatcgactccgtcctcgacgtcgtccgcaaggaggccgagaactgcgactgcctccaaggatttcaagtctgccactctttaagaggaggaactggttctggtatgggtaccctgctcatcttaaagatcatggtggagtacccggacaggatgatgttggcattctcagtt

SEQ ID NO: 4857 - DNA, 545 bp, Oryza sativa
  Clone ID: uC-osflcyp112f12b1
tgttgcaaaaatacaagaagcttttggcatgaggagatgcagcaaatcgctgctgcaacttggtacacttccatgttgcactatggcatggttaagttttgcacaaacagcacaggctagtgaaggaacaaatataaacatggtttatgaggttggggagctatttgagcttggaattcagttgacttatcttctcatactacttggtcttcttggagctggtacattttttgtcattcgtcaagttcttgtccgtagagagcttgatctttctgccaaagagttgcaggaacaagtgagaagtggtgatgcaagtgctactgagtattttgagcttggagcagtcatgctacagagaaaattataccctgctgctatcaaatatctacagcaagcaatccaaaaatgggatagagatgagcaagatcttgcacagatgcaattttttagaagggagttaagatttggggtgcaccctttacacggaaactttgtggctttagtgcatgtttttgcccagaatgatcttgctaccaagtgcatgg

SEQ ID NO: 4858 - DNA, 226 bp, Oryza sativa
  Clone ID: uC-osflcyp112g02b1
tcgttataatcactaatagcagaagcagagaatgacaagcatattgtggtggttcatggaggcatgggaatagatcgatcaatccaattatttcagtccagatttccggacagatttttcgatttgggtatcgccgagcaacatgctgttacgttttctgctggtttggcatgcggaggctttaagcctttctgcataattccatccaacctttttccaacgagca

SEQ ID NO: 4859 - DNA, 235 bp, Oryza sativa
  Clone ID: uC-osflcyp112g03b1
ttgtggtggtgtgttcatccaggagcaaatgctggtgaatggtcatgcctggcacttcaagaactatgacaaacggccacaatttgcaaaggtaagaaactatggagtatatttcaatatattctttaattgcgatattcatatatatattctgttatgtaaatattctcgtttgaactctgaaaatgataaatattattagcaacataagactaataaattgtagtcatacttg

SEQ ID NO: 4860 - DNA, 452 bp, Oryza sativa
  Clone ID: uC-osflcyp112g06b1
ctctagctagctgtcgatgatggctaacgctgaagggggcaaaatggtatgtgtgacaggagcaggaggcttcattgggtcgtgggtggagaaggagctcctgatccgtggttatgccgtgagaggaactgcaagagatccatctagttaaaagaactcccatttgcaaaaacttgaaggagccaaagagaggctcagtctgaactatgcagatgtgatggactttgatagtctttctgttgcatttaatggatgtgatggtgtattccatgttgcctcacctgtatccgttgatccgcgacttgtgcccgttgctgttgaaggaactaagaccgtgatcaacgctgcagcagacatgggcgtacgacgcgtggtgttcaacataaaccttcggtgctgcacacatggacccaaataggagccatgatacaagtcgtggatgagagcttgct

SEQ ID NO: 4861 - DNA, 336 bp, Oryza sativa
  Clone ID: uC-osflcyp112g07b1
tggaagaacatattactattgatgtactcatgcctccttcagaatgttactacacagatctgttttttcagatctatgtgaaagaaggaaaccctggatcaagttcccatgaaaagttacttgccattggggggcgatatgattggttgatagagcaagcttgggataggacatataaatccaaacccccgggtgctgttggtgtcagcattgcacttgagaaatttcttcctaatagtccttcgtctgacattgggttcccaaggattgaaccgagcatcagtggtcttgtttgttcaaagggaggtggcggtcttttgaatgagcggatggaac

SEQ ID NO: 4862 - DNA, 351 bp, Oryza sativa
  Clone ID: uC-osflcyp112g09b1
ttttcctccggctcttcttcagtatcgaatgctctcttctcctcgtgcccaccaccaccaccgtagcaatggcgggcaacgggccgatcaacaaggaggacccgctcaactggggcgcggcggcggccgagatggccggcagccacctcgacgaggtgaagcgcatggtggcgcagttccgcgagccgctggtcaagatccagggcgccaccctccgcgtcggccaggtggccgccgtcgcccaggccaaggacgccgccggcgtcgccgtcgagctcgacgaggaggcccgcccccgcgtcaaggccagcagcgagtggatccttaactgcatcgcccacgggggcgaca

SEQ ID NO: 4863 - DNA, 325 bp, Oryza sativa
  Clone ID: uC-osflcyp112g10b1
tgttgatgatccttgacagtgcagtgccaagactggggggggcaattttgctccctcttcccgctcgtgcccaggccggggccttgcttgctagctagctttgaagccagctcagcaacgccgtcgtcgtatgcatgaaggggagcggcgcatcgatgccgtcctccatgttctacgtgcacgaggagcacgtcgcccaaatccaccactttctctaggagtgctccctctgcggtaagttcctctccggtcgacatcttcatgtacaggggagatacgccgttctgcaacgaggagcgcaggcatgaacagatcgtggtggaca

SEQ ID NO: 4864 - DNA, 418 bp, Oryza sativa
  Clone ID: uC-osflcyp112g12b1
tgttttttttttgtgaatggtagttagagtgctagattaagttaggcattgctatgacaagaatcctgtacaaacttaaacaagaatcgatgagaaaaacacaagaatttgcatattggcacatcgatcggcaacatcgcagtgtgccttcagtgacgcaaaaacatatacttcagactactgaccgcctgatggcacgcagcgacgcgaaaacccgagtgcttgacaacatctcgagatgtcaaatgtatggctcttgagatgctagacatgatcttgccaacccggtcgcgcaccctcacccgcaccgcccgcttcttgaccggcccgtcgtcggcgccggcgccggccaacgcagggcgccccgccgaccgggcgaagacggcggcggagcgctcctcgttgttctctatccatg

SEQ ID NO: 4865 - DNA, 210 bp, Oryza sativa
  Clone ID: uC-osflcyp112h03b1
ttatgcgcagagagacatatctgtcggacagggaattccatactgtattcggtataacgaaggaagagtactaccagcagccagggaggaaacaagaactacagaaaaggaagcatgatcttttctgaagcatgaaccactttcgcactacaaaggctgcatgtttactagtacagctagattggcgacatggcacgtgagaggccatgt

SEQ ID NO: 4866 - DNA, 478 bp, Oryza sativa
  Clone ID: uC-osflcyp112h04b1
tcttccccctcaaaaccctaacgagcggcgagccgcctctctcgagcgcttgcctccctcttcctcctcccctcccctcgccggcccccccccttgccccaacctccgcgcgcgccatcgcggcgccgccccgaggaggacgacccccctagccttccagaaccttctagaacgcccggatcgccctatcgactaccaccgacgcatcgggccctgccgccgccgccgtggggtatccatggagaagctccgcgtccaccgatgcggcgggggcgcggtctcctggaccccgtcacccatcgtcgcgctcgtcggctgcccctgcaaggcccaggtcgccgccgaacgcgccgacggctccctcgagcattggctcggctcccccggctgcgtggggcggcaccaccagctcaccattcagggggatgccgagtcgaggggcacctcgctggtgtaggcgcggagcggtgccaatggg

SEQ ID NO: 4867 - DNA, 280 bp, Oryza sativa
  Clone ID: uC-osflcyp112h06b1
tcttttccctacgaaagcggcaggacagccgacgagatcttcgacttcattaagaagaacaaggaaaccgccggtcaggcgaaggagaaggcagagtcggcgccagccgagcctctcaaggatgagctctaaacaagtgagtaggagagggcatggatgcttgtggctgtagacatggaggagacgggacctgacggctaacatgtttgacagctccaacgccagattttgccaaggttctgaaagacggtgagatggagagtagtgagagtgaggggga

SEQ ID NO: 4868 - DNA, 169 bp, Oryza sativa
  Clone ID: uC-osflcyp112h08b1
gtccgagctgaaatccagagctggggggatctttgcggcgcaggaggcgcaccggagcgctgtgctactgaggagatcccaacattcgcaaggatgcacttgagtaccttcattctatacgagagacaggctactcgtctataacagggctggtctttatgatgtggaa

SEQ ID NO: 4869 - DNA, 257 bp, Oryza sativa
  unsure (1)..(257): unsure at all n locations
  Clone ID: uC-osflcyp112h10b1
tgttgttccacccagccaaccagacangcttcgggtttttttatgcttgggcccgcctttccccccggctgcctatcgtatgagcagatatggaccgctgtatgctcgaaagacccccggcctcgcgcggccgactggcggatcccgggccccgacaattcacggacggtcacgcctcgtgacgctcccaggcttaaagagatgcttgcgcgcttgctacccgttccaagggcagaggtgttaccacaagtacgacg

SEQ ID NO: 4870 - DNA, 500 bp, Oryza sativa
  Clone ID: uC-osflcyp112h12b1
tgcccaaatccaccaaccgtcctccggtctgtcctgttcttcgctcgatcctccaatttcctctcccaaatcatctcgagtagtaatcagtgtattttgttgcttatttcgatcgatctcatcccaacctgttcgatcgtcgcctccgccgagttttgctgctcgatcggatcggtcaaagcagcacaccggcccggcaagccatggagctgacgctgctggtgttcgtcctcgtcgcggccttctccttcgtgatcggcacggccgtcaccacggcgccggcgccgccatggccagcggcggccttcgccgcctacctcttctgggtcgtcgcctccgccgccgtcgacctgttcgttcgccgccccgccgtgtgaacacacacaccctcaccaacttcggccggccaaactcaactcggatcgagatccagtcaaggattctaacccttcacttactacctactgcttcgtccaaaaaaaaagataaaaaactttaat

SEQ ID NO: 4871 - DNA, 309 bp, Oryza sativa
  Clone ID: uC-osflcyp120a02b1
ttttattataacacatccttcaacaactcaaggggggtcttcactaacattgagagggactaaatacgacatcagatcaacaattttcacataactaaacacgtcatcactgttattagctcacgataagttctttatctcagacctttggtttctatagataggcccatctaagcaattctcacatggtatacacttattttcttcttctccactatcctggttcaacaataacacaaaggtgccttcatgaactgcttattcttagttctttggataccccttaccatgcaatcataaatgcactta

SEQ ID NO: 4872 - DNA, 293 bp, Oryza sativa
  Clone ID: uC-osflcyp120a05b1
cactccttatcctagagcaagaagctcatctcgggggggtctcacatggaaagcgtgggcaccaccacatccagcctgctgaagacctacttagctggcgcgcgcctccccgtcgtcgactcgaaccccaccgaattcgtcgagccgcgcaccggcagagccatctgcaactccatctcttaggatgacctcactcccccctacgacctcaacagccatcaggttcagccccatcaacgagttcatcgtgtcccgcgagaggacccggcggttcatgaccgacatgatcacct

SEQ ID NO: 4873 - DNA, 390 bp, Oryza sativa
  Clone ID: uC-osflcyp120a07b1
gtttgcataccagtatgagggggctaccggtgaagatggtaggagcccaagcgggtgggacactttcactcatgcagggaagatgccggacaagagcaccgccgacatgggctgccggtggctaccacatatacaaggaggacgttaagttaatgagtgatactagcctggaggcataccggctctccatttattggtctacgcttattccaagaggaagaggacccgtcaatcctaagggactcgagtactacaatagcctgatagatgagctagtcgaacgggggatcgagatacatgtgactgtctaccacctggattgccctcaaattcttgaagatgagtaccatggctggctcaaccaagggtcattgacgatttcacggtgta

SEQ ID NO: 4874 - DNA, 461 bp, Oryza sativa
  Clone ID: uC-osflcyp120a08b1
cttttgcagcaatcattgagtttgtcaaggcgggggatctctatcagtgggagggactcaatatgccagcagttgcacagctggaaaaagacgaaaagtatcagctggtttatgagctcttgaagatattccttactcagaggcttgattcctatttagagtttcagtcagctaattctgccttgctgaaaggttatggactggttcatgaggattgcataacacagatgagactgatgtccctgcttgacctcagcagccgatgtgctggggagatcccttaccatgcaatcatagatgcacttaagatcaatgatgatgaagtggagtattggattgtgaaagctatttcatgcatgatattggattgcaaagttgaccagcttaaccaggttatcattgtcagtcagcatactgagaggatatttgggatgccacagtggcagagtttacgtgcaaag

SEQ ID NO: 4875 - DNA, 440 bp, Oryza sativa
  Clone ID: uC-osflcyp120a09b1
gtttcattacccgcaccgactaattaagggcgggcattttaagccatttcgagggacgtcatggcccggagtgccttcttcttccactgcgtcaccgccgtcacggcgtgcatcgtctctacagccgcggcgctcagaggcacggccacattctacggtgggagcgacgcctcccgcacaatgggcggcgcgtgcgggtactgcaacctgtacttgacggggtacgggacgaacacggtggcgctgagctccgcgctggtcaacgacagcgcggggtgcggcgagtgctaccagatcacgtgcgaccagtccaactcgaagaggtgcaaggcgggcacgttagtgaccatcaccgcgaccaacctcttgccaccggactactccaagccgagcaacgactgcggatggtgcaacccgacacgccagcactaggacatggc

SEQ ID NO: 4876 - DNA, 406 bp, Oryza sativa
  Clone ID: uC-osflcyp120a12b1
ttgtttgccacgccgtccgctcaggccgaggggcagctttcatggggagaagggggggagaacatgtcaagcgacggagggccggtgcttggcggcgtccagccggtggggaacgagaacgaccttcacctaatcgacctcgcccgcttcgccgtcaccgatcacagcaagaaggccaatgatctgctggagttcgagaagcttgtgagtgtgaagcaacaagttgtcactggcactttgtactatttcacaattgaggtgaaggaaggggatgccaagaagctctatgaagctaatgtctgggagaaaccatggatggacttcaaggagctccaggagttcaagcctgtcgattccagcgcaaatgcctaaggcccatctcggatcctatgggtatcaagttatc

SEQ ID NO: 4877 - DNA, 399 bp, Oryza sativa
  unsure (1)..(399): unsure at all n locations
  Clone ID: uC-osflcyp120b05b1
cattgggttcatggcgttcgacatacctccaccgcgcggtcctctttggattctgggagatgtcttcatgggtgcttatcatacggttttcgacttcggcaaagacaggatcgggttcgctaaatctgcatgaagagtgtatgtagatcactcttcagatcacggagattagcctgtatatttcataagctgaaaccaaacatgtatggttttatgatatatagtagctagtacacggacaaacctctttggttgcttctttctgaagaaaaaagaagaacagacatggatgtatgatctacctgatgtgtataaattgaatgatgcagtctgagaaactccnaaaaaaaaaaaaaagaggccgacttcaaaaaaaaaacaaaacggttcctttggtcc

SEQ ID NO: 4878 - DNA, 58 bp, Oryza sativa
  Clone ID: uC-osflcyp120b06b1
cccggcctgccctccccgacccacccacccgtcctgatatcctctccttcaccacccc

SEQ ID NO: 4879 - DNA, 419 bp, Oryza sativa
  Clone ID: uC-osflcyp120b10b1
gtttgttgttgatgtcctgtctcaaagggggtcatcggattgattgttggagccatactcccgtactggttctctgccatgaccatgaatagtgttggaagtgccgccctcaagatggttgaggaggttcggaggcaattcaactccattcctgggctaatggagggaactggcaagcctgactatgccacctgcgtcaagatctccactgatgcttccatcaaggcgatgattctccctggtgctttggtgatgctcacccccatgatcatcggaactctctttggtgtggagaccctgtctggtgttctggctggtgctcttgtttccggagttcagatcgccatctcggcctccaacactggtggcgcatgggataacgcaaagaagtacattgaggcttgtgccagtgagcatgc

SEQ ID NO: 4880 - DNA, 479 bp, Oryza sativa
  Clone ID: uC-osflcyp120b11b1
tggttctcttcttcttctactttgtacgcgcggctcactctccgagcttgacggcggcggcggcggcggaggtcgtcgagtggtggtcggggagatgggtcaagatgaggtggaggtaggtgcggagaagaaggatcaagaactaccggaggtggaggtggtcgaggaggaggaggaggagggatccaagaaggcggcggcgggctgcgactactgcggcgacgcggcggcggtggtgtattgcagggccgacgcggcgaggctctgcctgccatgcgaccgccacgtgcacggcgccaacggggtgtgctcccgccacgcgcgcgcgccgctctgcgccgcgtgcgccgccgcggtggccgtcttccgccggggcgcgggcggcttcctctgctccaactgcgacttctccaggcaccgtcacggcggggagcgcgacccggcggcgccgttccacgaccggtccacggtgcacccgt

SEQ ID NO: 4881 - DNA, 385 bp, Oryza sativa
  Clone ID: uC-osflcyp120b12b1
agtgatacttaacggcggtcatagggttgcgtttgccaggccagatgggggctttgcattccacaatgtgccagctggtactcatttaattgaggtctcctcattgggctacttattttcaccagttcgggtagacatcagtgccaggaatcctgggcacattcaagcagcattgactgaaaacagaagagttctaaatgagcttgtgttggaacctctcagagaagagcaatactacgagaaaagggagcctttctccattatgtcacttttgaagagccctatgggtatgatgcttggttttatggtcataatggtcttcgttatgcccaaaatgatggagcacatagatcccgaggagataaagcaagctcaagaacaaatg

SEQ ID NO: 4882 - DNA, 512 bp, Oryza sativa
  Clone ID: uC-osflcyp120c01b1
gttatcttgatcaatggcttcatggtgatgtaggggaggtgagcccactaacgggggaagtcaggatgaacataattcttggaactgctaaagggctggcctatcttcatgaggggctggaaccgaaggttgtccatcgtgacatcaaatctagcaatatccttcttgaccagcaatggaatgctaaagtgtcagattttggtcttgcgaagctattgtgctcagagagaagttatgttactacccgtgttatgggaacctttggttacgtggcacctgaatacgccagcacggggatgttaaatgagaggagcgatgtttatagctttggagtacttataatggagattataacgggtagatcaccagtagattacaccagggcacctggagaggtgaacttggttgaatggctgaagaccatggttgctgacaggaaagcagaggaggtagtagaccccaagctgcccgagaagccttctcccaagcactgaaacgggcacttctggtcg

SEQ ID NO: 4883 - DNA, 470 bp, Oryza sativa
  Clone ID: uC-osflcyp120c03b1
atcctccttcctccccatccccaagcgcccgcatcccgctccccctgccgacggctgctccacatcggcgcccaaaccctaacctcgccaccagccgatctgccacatacgccgccacaaatcgccactgccaccgattcctccagatcaggcaccgccgctatcatcgccctaccgccgtcgtcgccgtcccgctggccgctgctcgcgcccctccgctcatcctttcccctccccccaccaccggcgaaaccctagaaccacgccagtcaggacggaatcgaatccgatccccatctcgcgagtcgtgagcagagcaagggaggtgaggggcatcgtcgttccatcgcgtcgcatcgccccattcgacgccgccgagatcgccgtcacccgaatcctgcgacgccgccgagatcgccgtcacccgaatcctgcgacgccgccggacccttctcacgtcatcgtcccct

SEQ ID NO: 4884 - DNA, 508 bp, Oryza sativa
  Clone ID: uC-osflcyp120c04b1
aataaaccttcgctcccatcccataactcccggactgcgctagcctaccgccgcctgccggagccgctcaccgcctcctcgcacgcgcccgccggacagccaggcgccgccgccagctccgagcgcgtgcccgccggagccgcgccccctaccccgccgcctcctcgcgcgcgcccgacgctcgccctaccccgccgggttcgccatcggccggcgccttctccaccgccgctgccgcctcctcgggcacgtactctggagagctggggttgccgtcggccggttcctcctcctcgcgtgcgcccgccggggagccgtgatgggttacggccctacgcagcacatactccagaggatggaggaaatatgatgtgcccaatcaaggaccaagaaaccatgctattgatctagtctacgatcgaatgccacaatatatgtcaggcatataacacaggggagtgcagaaatcctgttattttcactcaatctgggttatagggatgaaatc

SEQ ID NO: 4885 - DNA, 503 bp, Oryza sativa
  Clone ID: uC-osflcyp120c05b1
ggtggttcgagcgtggccgctaggggacgcggaggggcggcggtggcggcgattgttcgcgggatgagcagcttcggcggcaccagctccgtcgcctccggtggtgggaagaggctcgagtacgggcggacgcatgtcgtgaggcccaagggcgcctacaaggccagtggcagtttttggtgggttcccatcaactgcatggtttgatgttgctgatctttcagaagacgctcctgatgatgttgaggggttggatgcctcagctgcacatgttgcaaacttattatcaactgagccagctgacatcaaacttggtgttggtggctttagcatgggcgcagctaccgccctttactctgcaacctgctatgctcatggaaaatacggaaatggcaatccatatcctgtgaacttaagtgtgtctgttggtctcagtggctggcttccttgtgccaggtctttgaagacaaaattgaagctcacggaggctgcacaaaggcttc

SEQ ID NO: 4886 - DNA, 501 bp, Oryza sativa
  Clone ID: uC-osflcyp120c06b1
tttaactctaacaatctatgggtgaacttgaaggctggcattctcttagttgtggcgggggcactaaagatggagatcattccaaaccctaaggaagtggatggagttaaagttcttcagttggaaacagcagctggtgcagcaatcaggttctttgatcacgcaattggtatcaatgttccaaggtcccggttcctaccagtgaaggcaacatcagatttgcagctagtacagtctgatctatataccttggttgatggctttgttacacgcaacccggccagaacaaacccatcgaatccctcaattgaactgggtccagagttcaagaaggtcgggtgtttccttggtcgcttcaagtcaatccccaacattgttgagcttgacaccttgaaggtttccggtgatgtttggtttggctctagcatcacatcgaagggcaaggtgaccatcacagcccaacctggtgtcaaactggaaatcccaatggagcagtgatcg

SEQ ID NO: 4887 - DNA, 527 bp, Oryza sativa
  Clone ID: uC-osflcyp120c07b1
ctctgccaaggccattggatgtacagttggaaacattggtacacaagatttggtggagggaaggcctcatttaattcttggattgatatctcaaatcataaagattcaacttttggctgatctgaatctcaagaagacaccccagctggtggaattgtttgatgacagcaaggatatagatgaagtgttgagcttgtcaccagaaaagatgctacttcggtggatgaaccatcatctgaaaaaagctggctacaagaaaaccgtcagcaatttctctacagatgtgaaggatggtgaagcatatgcttaccttctaaaagctcttgctccagagcattcccctgaaaccacattagagacaaaggatcctagtgagagggctaaattggtacttgaacaagcagagaagttggattgcaaaagatacttgactcctaaggatatcactgaaggttctgccaatttgaatcttgcatttgtggcacaaatattccagcatcggaatggtctaactagtgacaccagac

SEQ ID NO: 4888 - DNA, 445 bp, Oryza sativa
  Clone ID: uC-osflcyp120c08b1
tggagcactcattggtgtgcaaaatattactgtcggctcctctaaacatgtctagggctgtggagcctcttgttgtatggcgcgtgattggggaagttcttgatacctttaacccatgcatgaagatgatagtgacctataactccaacaagcttgtatttaatggtcatgagctctacccatcagcagttgtgtctaaaccaagagttgaggtccaagggggtgacctgcgatctttcttcacattggttatgacagacccagatgtgccaggaccaagtgatccttatctaagggagcaccttcattggattgttactgatatacctgggacaacggatgcttcttttggacgcgaggtcataagctatgagagtccaaagccgaacattggcatccataggttcattattgtgctcttcaagcagatagcgcaggcaactgt

SEQ ID NO: 4889 - DNA, 322 bp, Oryza sativa
  unsure (1)..(322): unsure at all n locations
  Clone ID: uC-osflcyp120c09b1
atcgtttttannggctacagggaggcatctgggggagatctgcatgagtgaggacgccaagcacgtcaagacaaacctaaggctgctgacaaacctggccganananacgcagacacacaacaggacagacggacagcccttgatatcaacatacggcgnnntnatccgccgacggccggcgtcctcatcaccggggccagcgctcgagcgcttccgggcatccaaaaataccgcgtgaggaagctggaaaccctgaaaccacaccagggaggacgggaaggagtccgacccccaccgggagaggacgaagcagaagccggc

SEQ ID NO: 4890 - DNA, 534 bp, Oryza sativa
  Clone ID: uC-osflcyp120c10b1
ggatttggtattctattccgtttggatgagagctccttggcatctcatctaaatgaaaggagggtcaggggtgaagacgaggaggcccttcctgatgttgagtctcagaagctggaaagtaatgctgaattggatggtgaacttgacagtgatagtgagactggcaaggagaaacatgatgatgaatcaagcttggataatatcaatgttaaaaaaattgacaatcccatcccttctaatgcaccttatgttaaggataatgctgattcatctgagcagctttctgaaatccgaactgtggtaaacagcactacttccacttccaagggacaaacaagtgatcgcactgtttcatcacaacttgaggatctgcttgataagaatcttggtcttgggccaactaaggtgttaggcagaagctctttgctcagcagtaattctgcaagcgtggcagatgacattgatgatcttgatacgaagaaaacatcagtaagagataaaccatacatatctaaagcagatagaagaaaactg

SEQ ID NO: 4891 - DNA, 465 bp, Oryza sativa
  Clone ID: uC-osflcyp120c12b1
ctctaatcgcatcgacttcgattcgcttggttgggttctctctgttgattggggggtgagatttgaattctagcaatggctcctctcggtgacggagcggcggcggcggcggcggcggagcccaacctggtggtgtcgttcggggagatgctgatcgacttcgtccccgacgtcgccggcgtctcgctggccgagtccggcggcttcgtcaaggctcccggcggcgcccccgccaacgtcgcctgcgccatctccaagctcggtggctcctccgccttcgtcggcaagtttggtgatgatgagttcgggcacatgctggtggacatcctgaagaagaacggggtgaacgcggaggggtgcctgttcgacgagcacgcgcgcacggcgctggcgttcgtgaccttgaaaagcaacggcgagcgcgagttcatgttctaccggaacccgagcgccgacatgctcctg

SEQ ID NO: 4892 - DNA, 493 bp, Oryza sativa
  Clone ID: uC-osflcyp120d01b1
cttccactcttctcccttctcctcgctcttcccgggccgccgtcgacgcagcggagcagcaacagcaggcgagcgacatgggagggtttgtcaagacccagaagacccatgcctacttcaagcgtttccaagtcaagttcaagagacggaggcagggcaagactgactacagggccaggattaggctcaccaaccaagataagaacaagtacaacacaccgaagtaccgctttgttgtgagatttacaaacaaagatatcacagctcaaattgtctatgctaccattgcgggtgatatcgtgatggctgctgcctactcccatgagctgcctcgttatggtcttgaagttggtctcaccaactatgcggcagcttactgcactggcttgcttctggctcgccgtgtgctcacgctccgtggtttggaccaggagtacgagggcaatgttgaggccactggggaggactactatgttgaaccagctgatgaaag

SEQ ID NO: 4893 - DNA, 533 bp, Oryza sativa
  Clone ID: uC-osflcyp120d02b1
agttggttatggatcagacattagagaaaaatggaacgattgatgatctgaaaagctcttttagaaatactggaggttctggtggggcaccactcatgacttctatgccatcaaacagtggtactgcaattttttctaaaagttatctgtccaaaattagtgtgtcacgggatcttgttgagtcggagctgtacaaaaggtgcatatccttgctggcagactttggtattgcaaatactcctgaggttgttgggactggacttgtgcagaacaatggaagctttgggaagataaatagaaaacttggaacccccaatctgttgggttcacataaccttaaaaacaagagtgatatctttcagagagctttggcccttcacaagaatcagacagcaaagattgtttctcctacccactcgattctcgagactgacaggaagacatacttaccagaagataatcatgatgacacagaaatgactgaccatactgtgtcgaagaattgcttgtcgataactctgaaccacatcatg

SEQ ID NO: 4894 - DNA, 494 bp, Oryza sativa
  Clone ID: uC-osflcyp120d03b1
gtttatttatttttaataattttagtttttttgggggggtttagatatattcccaggccccaacctcccaataatccgatctctcccagttctgttcggatcaaggctgtgtcgatcgcaaaaaagaaaaaaaaacaatttccttttggggtggttcatctgttgatcacttctttgtttcccgcgttttgttggggattcgattttcgggttaagattttctacacgatggccttgaacttggctcagagcgccgcggcggcaccgtgcttcgcgaccgccggtgatgcgcggcgagctgcttcggtggtcgccatgccgtcgtcgtcgtcgtcggccacgactagactgaggatgaagaggcaggcggcgtgcgagccggtggcgtgccgggcggtggccaggcacgtggcggcggcggcggctagcaacatgaggaacggcgtgccggtgttcgtgatgatgccgctggacacggtgagcaagtgcgggag

SEQ ID NO: 4895 - DNA, 536 bp, Oryza sativa
  Clone ID: uC-osflcyp120d04b1
gttatttcttccagttagctgctacgattctctggggggagcttttgcagaagctggcgcctcagacatggaaagattttattgtccctttccaaactgttcagttctactagaccttagtcagcacttctctagggcaagtacatcaagtcagtcagacctcaattgtgttgagtgcccagaatgccatagagatatctgtatcaactgtggagtgccatggcatgtcatgatgggctgtgatgagtaccagagcttgcctgttgatgaaagagatgcaggagacctgtctttgcatcggctagcacaaaacaataggtggaggcgttgtcagagatgccgacgaatgattgaactcacacaaggctgcttccatatgaattgctggtgcggacacgagttctgctactcctgtggcgccgagtacacaaatggtatacagacatgccaatgtgtgttctgggacgaagagagcatcgaggccttcttcgcagcgcattccacccaagcatctgagatatgggcatgggacacat

SEQ ID NO: 4896 - DNA, 422 bp, Oryza sativa
  Clone ID: uC-osflcyp120d05b1
catcttttttgttaggttttcttccagtgagctcttggggctcatattcagatcttcgcttatttcctagttgttactactgcctttgagtattgacagcttcatcctgccaactcagctcaatcttcctctgaagtttcagtctttgtttctgaatctcttcagtgttcagaggggaagttctgccaaaaaatttctctggccatccattttccaaggggagattctgccaaaattttcatctctgtccatcaatattcctggggaggttctgccaaaattttctctgaaatcggttaatttataaggggaggttctgccgaaattttcgctggtcatcaatcttccctttgttgacataccctgcataagtatatacaacaaacatataactttttgcaaggtaagaaagagtttttatc

SEQ ID NO: 4897 - DNA, 531 bp, Oryza sativa
  Clone ID: uC-osflcyp120d06b1
ggtaattactgttgctaaattagctgaagaaggcagggttgctataaggaacataggaggagatgccatcaaagcttacgataagcttgagaaggaaaaaaaactttctgaagataacgtgaaggatttgtccgctgatctacaaaaagttactgacgagtacatgaaaaagatcgaagctatccaaaagcagaaggaacaggaactcatgaaaatttagacaccaggttttaatcttgaaactggtgagttcatcttcctgcgaagtagatgaagccgaagaaaacaatgtcctcagctaacacggtgaattatgcggtcacagatttcttgagccttttccatcgttctgatggccggcattttgccggatgcatctttttgggctggagtgcaatttcagacaatgttgccgtgtccttcattttcatttttgtaattattgtgtgtactccgtgtaaaagtaggtcttgaccttatccttgttctaccgctacattgtcaatattcctcacgtgaattaaaatgcta

SEQ ID NO: 4898 - DNA, 403 bp, Oryza sativa
  Clone ID: uC-osflcyp120d07b1
tcgttttaaaaaataaaagaaaagaaagaagggatagttaagagagatccggggaaatgacagagccgtcaccgccggcgctggagccggagatcggccccgacggcctcgccagggagaaccccgtcatcgcctacaccgagaaggtgattttggaggagcagctgcagctgaagaaatacattcaggagaactattccaaaattcgtgatgttgaaaaggagctagagaatctgagtttagaaatgaaactaacagctgggccaaagaaagcagcacttgtgcatttaaggaaaaagattgaaatatcaacagacagaatacggttggctagggtgaaagaggaacaggcaaagaaggcctgggaagctgctgcacaaattgttaaacacgaagagaatgc

SEQ ID NO: 4899 - DNA, 516 bp, Oryza sativa
  Clone ID: uC-osflcyp120d08b1
gtctccccctccggcgacgtagctcgagctcgcaaccatggcgaggggattgaagaagcatctcaagaggctcaatgcgcccaagcactggatgctcgacaagctcggcggagcttttgcccccaagccatcgtctggacctcacaagtccagggaatgcctgcccctgatcctcatcatcaggaacaggttgaagtatgcgctgacataccgtgaggttatctctatcctgatgcagcggcatgtcttggttgatgggaaggtcaggactgacaagacctaccctgctggtttcatggatgtgatttccattccaaagactggtgagaactacaggcttctctatgacaccaagggtcgcttccgccttcagtccgtcaaggatgaggatgccaagttcaagctttgcaaagttcggtctgtccagtttggacagaagggcattccctatctgaacacctatgatggacgcaccatccgctacccggaccctttgattaggctaacgacacaatc

SEQ ID NO: 4900 - DNA, 508 bp, Oryza sativa
  Clone ID: uC-osflcyp120d09b1
ttggtccggcaagctgcagccaagacaaatggggtggctggtgatgggacaacgacttctgttgtccttgctcaagggatgatcacagagggtgttaaggttgtggctgctggtgctaatccagtacagattacccgtggtatagagaaaacggccaaagcacttgtgagtgaactccaaaaaatgtccaaggaggttgaagacagcgaacttgctgatgttgctgcggtaagtgctggaaataactacgaaattggcaacatgatagctgaagctatgaacaaggttggacgacagggggtggtcacacttgaagaaggaaagagtgctgaaaataatctctatgttgttgagggaatgcaatttgatcgcggctatatttctccctactttgtaactgacagtgaaaaaatgtcagtggagtatgagaattgcaagttgctccttgtggacaagaaaatcaacaatgccagagatcttataacaattctggaggatgctattaggg

SEQ ID NO: 4901 - DNA, 491 bp, Oryza sativa
  Clone ID: uC-osflcyp120d11b1
attctcccccaaaaaattatcatcccgccgcggggccatggccgctaccgtccggctcctctcgccgcgcctcgccgtcgcgcctctacggccgcaccccaggctggggctgacccccaccgcagtcggacggcctcttcccctcgcctacctcggccgccgcgccgccgccgcgaggcagctcgccgccgtcgccgaccggaacgtctacaacggcgtctacggcccatggaccgtcgaggactccgacgtgcgcgaggtcttgctgtatcggtccgggctggtcaccgccgccgcgtccttcgtggccgccgcctcggccgcgttcctccccgaggggaacgccgccggcgacgccatcaggcaaggcgccgacctcctctacgccaccggagcggcggggctggggctttcgctcgtgctgattcacatctacgtcactccgatcaagcggttcctccaggcgctgtgggtggtcggagtcgtcgggt

SEQ ID NO: 4902 - DNA, 300 bp, Oryza sativa
  Clone ID: uC-osflcyp120d12b1
tttgttcggcagcaagtgttcactgcgttcttgttggggatttatctttcttggggggttgatctgtaacttattagcggccatgtgcggcggagcaatcatctccgggttcatcccgccgtcggccgctgcggcggcggcggctgcggcggccaagaagcagcagggcaggagggtcacggccgacgtgctgtggccggggatgctgcggaaggggaaggcggcggcggcggaggaggactttgaggccgacttccgcgagttcgagcgtggcatgagcgaccactaggcggagggggg

SEQ ID NO: 4903 - DNA, 523 bp, Oryza sativa
  Clone ID: uC-osflcyp120e01b1
gttttttgtttgcatattacggccactttccttggatattaccaagcaagattcagaaatcgaggcagctcagtggatgcctgtggaggaatttgctgctcaaccatttgtccagaaacatgagctagtgaagtacattcttgaagtgggtttggcgaaggttgacaaggactatgcaggattttcgccaatcctcataaaatccgcattcacggacaaaaaatcgttcttttacatgaacaggagggacctggacaaggcctcagaatccagtagtacacagaaaaagactgaaaaacctttgttcatggaaaaactgtagctttcatactggatctttttttccatcactggtagcttctacacctgattttgaccgaatgttgccgctccaccagtcctgtaattcagaaaaaggagcagcagttcagaaatacagctgaatttgttgtacctatgaatttgtattgaatatttataggcttaccaaataatgaaaacatttgttggacacttggacttc

SEQ ID NO: 4904 - DNA, 464 bp, Oryza sativa
  Clone ID: uC-osflcyp120e02b1
ggttaattggagcaggaattgaagcatttgagatccgcatccacccggtgtttcagagccgctgtttcttcgttcgacgagttgatggatcctctgatgatttcagcttccgtaagtgcgttgacagcatacttcctctcccggaggacatgaagattggcaataagtccaatggcaagaagggtggtggccacttcaagggcggtggaggtaggggaggaggacgaggtggtggccgaggtggcgggcgtggtttccgcggtcggggtaggagaggcaactaaaggactcaataaaaccccgaaattttttgcatgcctaataccaatccttaagattgaggcattcatggcaacatgtgcttgtttgtctgccttctcctaggcaactgatgctccactcacttgtgtactgtgaaagtgcaactatgataagatctcgccgatctgtcttcccatatcttc

SEQ ID NO: 4905 - DNA, 541 bp, Oryza sativa
  Clone ID: uC-osflcyp120e06b1
ctttgtccccacattgcctctcattgtaaaatagtaggaactgataatccacaggaactaaacaacaattaaatccaattatggacggattggtaggcctcttgaaaatacgggtggtgcgtgggattaaccttgcctaccgcgacacaagaggcagtgatccatatgtcgtccttcgcctcggcaagcaaaaagtgaagactagtgtaaagaagaaatctgtgaatcctatttggcatgaagagctaactttgtcgatcatgaaccctattgcaccgattaagcttggggtgtttgacaaagacactttcagtagagacgacccaatgggagatgcagaaatagacctggagcccttatggaagttctgaacatggacccggagaacattcggaatggttccatcataaaaacaattcgaccatccaaccagaactgccttgctgatgagagtcacctattctggaggaatggtaaatttgtccaggacattattctccgacttagaaacgtcgagagtggtgagctgcaagtgcaactg

SEQ ID NO: 4906 - DNA, 528 bp, Oryza sativa
  Clone ID: uC-osflcyp120e07b1
tcgagaaaaggcctgtgtcaaggagagggtaggagcaccttgctctcctttgccttcagagaaaccggaagcaatggcgtctgctactctcctcaagtcatctttccttcccaagaagtctgaatggggtgccacccgccaggctgccgcccccaagccggtgactgtctccatggttgtccgcgctggtgcctacgacgatgagcttgtcaagaccgcgaaaaccattgcatcaccaggaaggggtatccttgccatggatgagtcgaacgcgacctgcggtaagaggcttgcgtcaattggccttgagaacaccgaggccaaccgccaggcttaccggaccctccttgtcaccgcaccgggcttgggacagtacatctccggtgctatcctcttcgaggagactctgtaccagtcaactgtagatggcaagaagattgtcgacatcctcactgagcagaaaatcgttccaggtatcaaggtcgacaagggtcttgtgccccttgctggctccaacaacgagtcatg

SEQ ID NO: 4907 - DNA, 503 bp, Oryza sativa
  Clone ID: uC-osflcyp120e08b1
tcgattatattgtttctttcttatgtgcagcagtcggtgttactaatgggggagatgaaccagccgccgccgccgccggtggccgtgccgccgccgatggtgatgcagccaatcatgcatccgtccgtcggcaccggcgccgtcttcccgccgcacgagcagttccaccatctcgcctactgcgtacactccaacccttcctgggttcaggtggccgcacttgcattcctccactatcttgtgatgctgggttctactgtcatgcttgcatcaactattgatcctgcaatgggtggtaccccaggggataaggctcgtgttattcaatccttcctatttatgagtggcatcaatactctgcttcaaacacttgttggaacgcggctccctacagctatgaatgcttcctttgcatttgtcgtgccagtactgtcaatagccaaagactttgaacaaaataactatgcgagcagtcaccagagatttactcacacaatgagagc

SEQ ID NO: 4908 - DNA, 430 bp, Oryza sativa
  unsure (1)..(430): unsure at all n locations
  Clone ID: uC-osflcyp120e09b1
cttatcaagaaacacaggagtgagggagaagaagatatggtaagagagagcgagagagatagagagaggggggtagcaaagcaacttagctagctttgctagccatggcgaggagctctccttgcctcgccgtcgctgtgctcctccttggagtggtggtggcggcgattggagcctttgctgatgaagaagcggcgagcggttggggactagggcatggcgcccgtttcctcagcaggcgaggccgtgctgcgtatgagaagtcgtcggagccagaggcaaagcctgcgtcgcagcaggagccgaagtccgattcttactcgcaggcaaagcctgggccaaaagatgagcccaagccggagccagaggcaatgtctgcgtcgcatccggagtcgaagcccgcaacttacntcgagtctaagcccgaatc

SEQ ID NO: 4909 - DNA, 515 bp, Oryza sativa
  Clone ID: uC-osflcyp120e10b1
gccactaatttcttctctctttctctctctctccgcgccctcgcatcgcacgtgaggcagtcgagggatagcggcgcaatggcggcggcggtggtggcgaacggcgcgagcggcgactcctccaaggccgcgttcgcggagatatacagcaggctcaaggaggagatgctcgaggacccggccttcgagttcaccgacgagtcgctccagtggatcgaccgcatgctggattacaatgtgctcggaggaaagtgcaaccgcgggatctctgtcattgatagtttcaagatgttgaagggcactgatgttctgaataaggaggagacatttcttgcctgcacccttggttggtgcattgaatggcttcaagcttattttcttgtgcttgatgatattatggacaactctcaaacacgacgtggccagccttgctggtttagggtgcctcaggttgggctcattgctgtaaatgatggtattatccttcgcaaccatatttcacgaattcttcaacg

SEQ ID NO: 4910 - DNA, 337 bp, Oryza sativa
  Clone ID: uC-osflcyp120e11b1
atcgcgtggggctcccttcgctttcttgcggggtatggtggagttccggagggagtccacagtgaagaacccttatagtcagtctgtcgctgctgtaggaaaagcagccggtgattgggagaaatccttgactcccgcgcacaaggctccctagtccatatggccaacatgctctggccgctacaacagggccattgctgactacagcaaggtcgagatccctgttggcatggagcgctaactttgggaataatgagccctcttggaccaatttaacttggggtggttgacagacactctttaagatgacaccacccgctgggagaagcatgaatac

SEQ ID NO: 4911 - DNA, 490 bp, Oryza sativa
  Clone ID: uC-osflcyp120e12b1
tcggtctaaagcatgtgcttctgcaagcattactgggttgaagaatcttaacaggggaacagtcgatgttttagcttctagggttttcacctattactcttatgtccacgaactcaccagcagccttgctgaaattcgtggaactcttctggcattgcacagaatggcaactttacatcgtgatgagcttggtcaggaaactctactcaacctgcttcttcgcaactacctgcactacaacttgtatgaccaagcagaaaagcttaggtccaaggcaccgcgttttgaagcacattctaatcagcagttctgcaggtatctgttctacttgggaaaaattaggacaattcagttggagtacactgatgcaaaggaaagcctactgcaagctgctcgaaaggcacccactacagctcgtgggttccgagttcagtgcaacacgtgggctatcatagtgagattacttttaggagaaataccagagagaact

SEQ ID NO: 4912 - DNA, 506 bp, Oryza sativa
  unsure (1)..(506): unsure at all n locations
  Clone ID: uC-osflcyp120f01b1
aaggatggcacccaggcttgcccccagtgcaagaccaagtacaagcgccacaaggggagcccggcgatccgtggggaggaaggcgaggatactgatgctgatgatgtcagtgactacaactaccctgcatctggcagtgccgaccagaagcagaagattgctgataggatgcgcagttggcgcatgaatgctgggggtggtggagacgtcggccgtcccaagtatgacagtggcgagatcgggctcaccaagtatgacagtggcgagatccctcggggatacatcccttcagtcactaatagccagatctcgggagaaatccctggagcttcccctgatcatcatatgatgtctcctaccggaaacattggcaagcgtgctccattcccctatgtgaaccattcaccaaatccatcaagggagttctctggcagcattggaaatgttgcctggaaagaaagagtngatgggctgaaactgaagcaggacaagggagcaattcccat

SEQ ID NO: 4913 - DNA, 473 bp, Oryza sativa
  Clone ID: uC-osflcyp120f02b1
aattacattcagttgcaaacgagccatctctctgcattctcgtgcccctcctgtctgcgcgcattcctccgccggaaaccctggttcatcggcgagcggcgaggctcggggactcgattaccctgcgaggaatccaggtcggaccgcgggtggggaaggcgaatatggcggggtccatcgatcggccctcaggtgcaggatttgaaggcattgtgcatgatgatgataagaaagagtggaaatccgatgaggacaactcagaaggtgacaaaaaggccaaggcagtctccttcaagaaccgagctatcagtgctggaaataaatttaggcgttccttgagaaggaagagaagaaagagggtcggcgaccatgtagcctctatagaggacataagggatgtcaaggagctggaagctgtccaaagatttcaccagtgcttacatgatgagggcttggtgccagaacgtcatgat

SEQ ID NO: 4914 - DNA, 478 bp, Oryza sativa
  Clone ID: uC-osflcyp120f05b1
cttgcattctctcctctcaaatactcctccaccttggggtcatcaccaccactaacggcgacgccactgcctgaaccaagaacactgccctgctccacacgacatggcttctcaagaagagaagacgagcgtcaagtcggaggaggcctcgtcggcggcggaggagcagccacctcaagctgcagctacgccgacgcgcaggggtgtgccgccggccaaccccttcgacttctcaaccatgatgaacttgctcaatgatccgagcataaaggagatggcggagcagatcgccaaggacccggcgttcacggagatggcggagcacctgcagaagacggagcagtcgccgacggcgcggggggcggcacaggaagctgcggcagcggcagcgccggtgctggacctcaccaagtacgtgtcgacgatgcagcagctgatgcagaacccgcagttcgtggcgatggcggagcggctgggc

SEQ ID NO: 4915 - DNA, 440 bp, Oryza sativa
  Clone ID: uC-osflcyp120f08b1
tcgctctcttgtcgccgatccgatccgtctccgcctccgtctcgcggcccggcctgcctgcctcgccgccggtggtcccgatccgaggttgctcttgctgggcatcaaacatgggtctggtgaaggatggcgccgccgatttggaggaggggaccctggagatcggcatggagtacaggactgtttctggtgtggcaggacctctggttatcttggataaagtaaagggcccaaagtaccaggaaattgtaaacatccgattgggagatggcaccactcgccgtggccaagttctggaagttgacggtgaaaaggctgttgtgcaggtctttgaaggcacttcaggaatagacaacaaatataccactgtgcagttcacaggagaggtcctgaaaactcctgtctcacttgatatgcttgggcgcattttaatggatctg

SEQ ID NO: 4916 - DNA, 432 bp, Oryza sativa
  Clone ID: uC-osflcyp120f09b1
tgcgatcgatcgatcatatgtcgattcgattcgatccgatggagagcagaagcagcagcagcagcagcagaagcgtggtgatgatgtgctgcgtgctgatgttgatgattgcggcggcggcgcatgcgggcgagcaggaggcggaggagtgcgctagcccgatgagcatcgaggaggcgtgccggggggcatcggagacgcaccacgcggtggcctacgaccactgcgtggcgtcgctgacggcggacccgcgcagcagcagcagcgaggcccgcagcctgcacgggctcgccatgctcgccacccgtatggccatcgaccacgccaccagcaccgtctgcaagatggacgacctcgcggagctggagcccgaggattcttcgtcgccgtcggacgcgcgcgcacggttcgagcactgccttgagcagtacg

SEQ ID NO: 4917 - DNA, 531 bp, Oryza sativa
  unsure (1)..(531): unsure at all n locations
  Clone ID: uC-osflcyp120f11b1
tcgattatgcatgggatacaaatgtccttgtcgaggcaatattggtgacaggacggaaacagtgcgcttcttccactgctataaaaggggagttgaccgtgtttttgttgatcatcctatgtttcttgagaaggtatggggcaagactggaccaaaattatacggtcctaccactggagatgactaccgggacaaccagttgcggttctgccttttatgcctcgctgctttggaggctccaagggttctcaatctcaacaattctgaatatttctcgggaccatatggtgaaaatgttgtcttcgttgcaaatgactggcacactggagtcctgccatgctatctcaagagcatctatcaggcaaaaggaatgtatgtgaatgctaaggttgctttctgcattcacaatattgcctaccanggtagatttgccagagaagactctgaacttcttaatctaccgacagtttccctggctcatttgattttattgatgggcatttaaacctgtagtangtagaaagattaact

SEQ ID NO: 4918 - DNA, 441 bp, Oryza sativa
  Clone ID: uC-osflcyp120f12b1
tgattcaggaagagatggcacggcatgctcccggggatggtgtcaacgtggaagggggatcactggatgagcttgagacactcacaaacatccacgagcgggggttaagacagatacatgcaattcggcaaaggaaaggtagcagtcatcgcttgagtgccccttcgctcccgcacgtcccaggtttatactcctcgcctccttcaatggcagttggtctgccggcctcgctgatccccacatcgtgcgtagcacctaatggtgcaggcatccatggaaatggccacatgaatggttccatgggtagctgggtcaatccaacctaattcagaggatgcagcaccgcaacaccggtgtccattttgggcatcaattcgacgtatcacattttgcctggccgtatttaccagctggtgagcaatccaacgtgatacccttttt

SEQ ID NO: 4919 - DNA, 439 bp, Oryza sativa
  Clone ID: uC-osflcyp120g02b1
tcgattatttctgtgaagaaaaacccaaatggtcaaatgtactctactcttggtgttttgacaaggggaactatcattgaggtgaacgttagtgaacttggtctggtaacccctgctggaaaagttgtttggggtaaatatgcacaagttacaaacaacccagagaatgatggctgtatcaatgctgtcttactcgtgtaaggacgcaatgctatacacttcattcttctcgttgcgactctcaccccagatgtacccgttcagtgggtctttttgaccgatcattcagagtagcgtgttttaaactgtgggcacaaggctcatctgttatatgcctttaacatatctggaatacattttacattgtatgtcgtggtgcagaaaagatctttactagttacattttacaacctgttatgagagctacaagtctggtctc

SEQ ID NO: 4920 - DNA, 346 bp, Oryza sativa
  Clone ID: uC-osflcyp120g05b1
attttgttctcagagacaccgttgttgcatatgtttgcaaatgctctcatgtatttcagtgccatactgagtgagtgatccacattgagattcaaaaaaaaaaaaaaaaaaaaaaaaaaaaaaaaaaaaaaaaaacaaaaaaaaaagaaaggaaacaactcaaagcgccgcaaaaaaaaaaaaaaaaaaaaaaaaaaaaaaaaagggggtctgtttaaacgaataaaactttattatgtggttctacaccggcaaaaattattaaaatgggcaaccaaaaaaaaaaaaaaaagggcggattttaaccacttcaaaaagggaaaaaacaacagctttccaaataaaa

SEQ ID NO: 4921 - DNA, 502 bp, Oryza sativa
  Clone ID: uC-osflcyp120g06b1
atttgttcagcgtcgcctctcctcctcctccctaaccgctactcttacagaaccttggggaagctcccgctcccccccccttccgctccaatggcgaaggaaccgatgcgcgtgctcgtcaccggcgccgcaggacaaattggatatgctcttgtccccatgattgctaggggtgtgatgttgggtgctgaccagcctgttattctacacatgcttgacattccaccagctactgaatctcttaatggccttaacatggagctggttgatgctgcatttcctcttttgaagggaattgacgcaacaactgatgttgtggaggcctgcactggtgtgaatgttgcggttatggttggtgggctccccaggaaggagggaatggaaaggaaggatgttatgtcaaaaaatgtctccatctacaaatcccaagcttctgcttatgaggctcatgcaacccctaactgcaaggttctggtagttgccaatccaacaaaacaccaac

SEQ ID NO: 4922 - DNA, 369 bp, Oryza sativa
  Clone ID: uC-osflcyp120g07b1
ccttagtttcgcgacctcgacgccgaccagtacggccggctcgcctgggtccgcaggacgcacaccatctacaactactgcgacgaccgcgaacgctaccccgccatgtcgcccgagtgccacacgcgaccgcgacgcctgagatctcatcgagatctgtgatcgatgcttgctggccgtccgatggatggatggatggatggggatgagtacgtgtacggctacgattaatcatgatttgagtgcgtgcagttaattaattaatgggtaacgatatgggggctatttgggcttgaatcgattggctgtatgcatgtgtggatagacgactggctaagggtgctgaattgggcgcgtgatatatggatt

SEQ ID NO: 4923 - DNA, 527 bp, Oryza sativa
  Clone ID: uC-osflcyp120g08b1
actttattagcaccaaccccgtctccttcctccattcctccgccgctagaaccttctagaagctctcctcctcctcccatggcggcgacgatcgtgtccgtcaaggcgcgccagatcttcgacagcaggggcaaccccaccgtcgaggtcgatgtgtgctgctcagatggaacctttgcaagggctgcagttcccagtggtgcatcaactggtgtctatgaagctctcgaattgagggacggtggatctgattacttgggaaagggtgtttccaaggctgccgacaatgtgaactcggttattgccccagctctgattggcaaggaccctacgtcacatgctgagcttgataacttcatggttcagcagcttgatggaaccaaaaatgagtgggggtggtgcaagcagaagcttggtgctaatgcaatcctggctgtgtcactggccattttgcaagctggagctatcatcaagaagattcctctgtaccagcacattgccaaccttgctggaaacaagcaactggt

SEQ ID NO: 4924 - DNA, 522 bp, Oryza sativa
  Clone ID: uC-osflcyp120g09b1
gcggcggcgagaccaaatcccccacttctctctcaatctctctctctgctagggtttatccctccgcgccgccgcccccggaagacgagagagcgccatggccggcggtcccgcggcggtgtcgttcctgaccaacatcgccaaggcggcggcggggctcggcgccgcggcctccctcctgtcggcgtcgctctacaccgtcgacggcggcgagcgcgccgtcatcttcgaccggttccgcggggtgctcccggagaccgtcggcgaggggacccacttcctcgtgccgtggctccagaagcccttcgtcttcgacatccgcacgcgcccccacaacttctcctccaactccggcaccaaggacctgcagatggtcaacctcaccctccgccttctctcccgccccgacgtcgtgcacctccccaccatcttcacctccctcggcctcgagtacgacgacaaggtgctcccctccatcggcaacgaggtgctcaaggccgtcgtcgcgcagttcaacgccga

SEQ ID NO: 4925 - DNA, 306 bp, Oryza sativa
  Clone ID: uC-osflcyp120g10b1
gttttgctcgctgcaggcaacacagatcattcggctagagatggcacaacgatttgtgtggtcctcggtcatggggggatcatatatggtgataaccttgagcctgctggcgctaatccattcgcacaatacccaggctatactgttaaccgtcaacgcactcttgtgtatgctccaaaccatgtccaaggagctttacaacacacaacttctttatatgcctaacgttagcgctgtaaatgactacctcatgatcaacatcatgaactgtgactatgacattgttgtacaacacggggtgggcac

SEQ ID NO: 4926 - DNA, 480 bp, Oryza sativa
  Clone ID: uC-osflcyp120g11b1
ctcattcccaactcatcgatccatcagtagctagctagctagctagctgcattgtccggcgagagagatagctgctgcagggggcggccatggggaggggcaagatcgagatcaagcggatcgagaacgcgaccaacaggcaggtgacctactcgaagcgccgcacggggatcatgaagaaggccagggagctcaccgtgctctgcgacgcccaggtcgccatcatcatgttctcctccaccggcaagtaccacgagttctgcagcccttccaccgacatcaaggggatctttgaccgctaccagcaagccatcggcaccagcctttggatcgagcagtatgagaatatgcagcgcacgctgagccatctcaaggacatcaaccgcaacctgcgcaccgagatcaggcaaaggatgggagaagatctggacgggctggaattcgacgagctgcgcggtcttgagcaaaatgtcgatgccg

SEQ ID NO: 4927 - DNA, 407 bp, Oryza sativa
  Clone ID: uC-osflcyp120g12b1
atggagaagaaggagaggagcagccatggcgtggtctgtggcagcggcggcgagcacgttcctggggacgaggctggcggacccggcgccgcagagcgggaggatcgtggcgaggttcgggttcggcggcgggaagaaggcggcggcgaataaggcggcgaggccgtcggcgccgacgacggacaggccgctgtggttccccggcgcggtggcgccggactacctggacgggtcgctcgtcggcgactaccgcttcgacccgttcggcctcgggaagccggcggagtacctgcagttcgagctggactcgctggaccagaacctggccaagaacaacgccggcgagatcatcggcacccggttcgagaccggcgaggtgaagtccaccccgttccagccctacaccg

SEQ ID NO: 4928 - DNA, 393 bp, Oryza sativa
  Clone ID: uC-osflcyp120h01b1
atctgggtcagagtcatcatctgattctgattaggtcatatcagagcaggaactgaaggatctggaagtctccatgcctccagatgcagctctgcaatcacctgcaaccctgccgcgccggacctttctttcaaggagggtgggggagaaggggaaagagcctgaagaggcttggaaacagacatgtgggatatgcctctcggaagaacagagagccacgatacagggtgtgcttaattgctgcgcacattacttctgcttcgcttgcatcatggagtggtcaaaggtggagtccaggtgcccattgtgcaaacgccgattcacaacaattaccaagtcatcaatggcagatctagggcttggatcaaggaaagctgtcattagggtagaaaa

SEQ ID NO: 4929 - DNA, 435 bp, Oryza sativa
  Clone ID: uC-osflcyp120h03b1
aggttgagcatgtcaaagctggggaaaccttcttgcagaaggggatagtgcttttatagtcaagctctactattcttttcaagatgaagaatacttgtatctcatcatggagtaccttcctggtggtgacatgatgactttgcttatgcgcaaggacacactgacagaagatgaggccagataatacattgcagaaaccgtattagcaatagaatctattcacaagcacagctacattcaccgggatatcaaaccagacaatctattgttagatcgcagaggtcacttgaagctttctgactttggattgtgtaaacctttggatagcagtaattttccaaatttgtatgagccagattatacatctactaagggcaccaagcctttacctgatagtagcagtcggctaagctcttctgctctaaagcgcacaca

SEQ ID NO: 4930 - DNA, 461 bp, Oryza sativa
  Clone ID: uC-osflcyp120h04b1
gtttgtttgttgagtggaagcagatcaggaaggggcgggataatctgtgggacgacgtggtggccggtcctcgaccggagaccggcctcgagaagctccgcaaggccgctacaacccgcccccttgtcatcaacaaagatggcgacggcgaggcgagcggagtggcgtacaagcggacgcagtcgatgccgacgaccccgacgacgccggtgacgccgtcgtcttcgtccccgacgacggcgacgacgacgacgccgcggggcagcaacgtgtggaggagcgtgttccacccggggagcaacctcgccaccaagagcctcggcgccaacctcttcgaccgcccccagcccaacttccccaccgtatacgactggctgtacagcgacgagaccaggagcagccatcgctgaactgaataatcccattgatcggaggctggtcgatctctctgtcacgccatg

SEQ ID NO: 4931 - DNA, 499 bp, Oryza sativa
  unsure (1)..(499): unsure at all n locations
  Clone ID: uC-osflcyp120h06b1
ggttcatgcttaaaagatgagagctcagttctactgcgctattctttggtccatgggaactgtgactttcaggaatatgttctggttcgaacagacctggatactttgctgatgcctatcttggaaatgctctacaatgcatcaagaaagacctccaatcagatatacatgctattgatagttcttcttatactcagtcaagattcaaccttcaatgctagtgtacacaaattggtgcttccgagcgtcccttggtaccatgagcgccttatgcatcaaacttctttgggatctttgatggttgttatactaatccgaaccatcaaatacaacctctccaaactgcgagatgtctaccttcatacaaactgccttgcaattctagcaaatatggcccctcatgtgcataggctgagtgcatatgcatctcaaaggctggttagcctttttgacatgctctctcgcaagtataccanattagccgagttaaaaaatgaca

SEQ ID NO: 4932 - DNA, 236 bp, Oryza sativa
  unsure (1)..(236): unsure at all n locations
  Clone ID: uC-osflcyp120h09b1
ctttattgttacatggtggagccactgatggtgggggctgggtgaaaatgtttgaaggcgccccatagtcttcgtccaatcagggatgctttcaaggggacgaatattgctggtggcggctactataaggccgatcggaataaagcantctccactggatatactgatttggctgcctatgggcgctatgtgtcggctaatcctgatttgcctccgaggtttgaaatagatgcttc

SEQ ID NO: 4933 - DNA, 459 bp, Oryza sativa
  unsure (1)..(459): unsure at all n locations
  Clone ID: uC-osflcyp120h10b1
cttatatgcaatctcatttgtttgccattgccggtgtgattaataaatatatggaatccctgtgattcagggcttcctgatttgaattttcaaggaaagcattgacattaggtggttaatactatccagcttaactctctaatcagtcacgcgcaggctcgatttagagtgtgtttggttactgccctgagaatcacgcctgactcaggcatcgatctcagcgttcgacttcggcggctggatcgacctgcctgagagtactcaggtgagggcaacaaccaaacaacctcttagaaatttgtgcttcgtatgttcttagttcaatctatgtttttactttgtcttgcgtttttacaaaatgttgtgtataagttnttagttcagaataattaaacgaacatgactacttctaatgttactgacaaattcagtggcaccctatgttgattgttattcttt

SEQ ID NO: 4934 - DNA, 176 bp, Oryza sativa
  Clone ID: uC-osflcyp120h11b1
tttcttattttcgatatcctatcatctccacggggggggttcattaataatatgggggcttacactttcagaaggatctctaggctcgagcacaccggggcccttcgacgctaggtggcttagcattgctctctcaactatccctacatacccacccactacattacctacatgtg

SEQ ID NO: 4935 - DNA, 429 bp, Oryza sativa
  Clone ID: uC-osflcyp120h12b1
tggttcggagagctgcagcacttgccaaatttaggctgaaaaggaaggaacgttgttttgacaagaaggtgaggttcgtgaataggaagaaacttgctgaaacaaggccgagggtgcgagggcaatttgttagacaggcaaactatacagatataaccagcactggagatgatatttaacaagatgaagatgatgatccattctccagggaggtagagatggttttttctgcagagtaacttgaaaggttttcctatatgtaaaatacagtgctaatgattactgctcactatgcaactgattagatgtaggcaatacatttgttctgcttttaactaggcaatacatgcactcgcttacacacaatacatgctttttgtaccccaggaacttgcggcatatccatcaatgctactatggaccattttg

SEQ ID NO: 4936 - DNA, 486 bp, Oryza sativa
  Clone ID: uC-osflcyp121a01b1
ggccgcttttttttttttttatactaagaggtaggccaattatagagaaaccagtccgggtgccttaacatgcatgatatttgcccttattattttctttcccttatcattcataaactgttatattctctgtgcagacctttcgaatttttggaccgatttctaatgcatgagtttggtgaaggaagtttacatcctttggagtgtgcacagagctgatttcctattgcttaagttttgctgagcttacgggaaaaagaaggatatgcatggacggtgacttcatccaagagataagctgttcatgttttgataggagtgaaactgcaaggccttgctgcagttttaggcttggattattgattaatgttggcacacctccttatgcggtgtctaagcaggcgtgttgttgcttgagatgagaataaacagctaaatgctgttgcctgctggttgggtataatgattgatctctggtacgcaatg

SEQ ID NO: 4937 - DNA, 454 bp, Oryza sativa
  Clone ID: uC-osflcyp121a02b1
gcctagttagagaggacgcgaaggcgactatggggtggagggggctagcgagggatgcggcggcagcatatctccggcggggcggcgctcccgcgcacgtcttctccgcggcctcccgcgctccgggccccgttgtcgccaaccctggcggtgagctccgcgcgttcgggttgttccggtcgccgatggccaggcgcgccgatgccttcgaggtcccttcggctgctgggaggcacggggcgcagggcgtgtggtcgcgcagctcggttccggcgttggttcgggctggtgcccccaactccagagctctccctttcctcgtggggagagtggttcgtggattctatccgcagctgtcaggtcacaagctggtaaagggacttgggatgggctccacccttgctgtgacgttttgttcacaaaaagttgcatatgctgaagaagttgctgaaca

SEQ ID NO: 4938 - DNA, 377 bp, Oryza sativa
  Clone ID: uC-osflcyp121a03b1
gcggtttgaggcaggggcagcgagagattgcagggcgggcgacggcctctatgtgcgacggcggcggcgcggcggcctggatgcgcctcgatgtgcgacggcagcggcatggcggcctcgatgcgcgacggcagcggcagcggcggcctctcttttcctcctttctgctatgaattttgttgacggcggtggcaacgacggcctgtctcttcctcctttctgctgtgaattttgttgttggatttgctgaaccaaatgtaaatggctaaatggttgattaccagcttactcttgaattgcaagtttcgtattgatgaataaaaaaacaaggttcagaaattggatctgctgtaaataatatcgattcatgcgaaaaa

SEQ ID NO: 4939 - DNA, 425 bp, Oryza sativa
  Clone ID: uC-osflcyp121a04b1
ccgttgttcagattatgcaggctacacttgtcagaaaggttctgcaatattgcccagcttgtcaatgtgccatgatgtactggttagggatgctgacgggcagcattgtgcaccaagtgaactcagtattctacaacagcttgaagcagtggttcttgtgccaaattacaataggttgatgccaagtgggcggaccttccttaacttctttaacaatgccaactgtgcagcagctgcaaagcggttagcctgctggatctcgattcaaaggtgcgacgaagatggggataaccgacttcgggtatgctactctgcatgtgagttgtacaatacagcatgtgggggcgggtcttgattgctcggaccagaccctgtttagcaagagggaagaagaggaaaagggtgttccgtgcacaagatatggc

SEQ ID NO: 4940 - DNA, 475 bp, Oryza sativa
  unsure (1)..(475): unsure at all n locations
  Clone ID: uC-osflcyp121a05b1
tgttaattttgaagaagatgaacaaccaaagaagaaaggtcgacttggaagcccagcaaatcaatggatatcagtctataatgctaggagacccatgaaacaaagataccattacaatgtagcagatgccagacttcatcaacacatagagaagggaaatgatgatggattgttcattagctcaggggcatcttcaaccaatctttgggcccttattatggacgcgggaactgggttcacatgccaagtttatgaactctcaccaatatttcttcataaggattggattatggagcaatgggagaataattactacatcagtgccatagcgggtgcaacaaatggaagttccttggtggtcatgtcaaaaggaactccttacactcaacagtcttacaaagttagtgaatcgtttcccttcaaatggatcaacangaaatggaaagaaggatttcatgttacattaatgaccact

SEQ ID NO: 4941 - DNA, 483 bp, Oryza sativa
  Clone ID: uC-osflcyp121a06b1
atccgtgagatcctatttggtcatccaaatgtcgagagatgcgcattcctgagaaacatcaatggagctacaacatattcattttcttctgctttgccagtagctgcccgaggaggatatggtccaatttttgaggacggaccaggctttgattcagcatttaaacttttccatggacgggatggaatagttccgctttcaggaaagtcatatttacctgatgagaacaacagtgagagcattgatgccaatcctgaacctgctctgctgtttaacccattggctgctagagctgccacaataagtctatctgcatttgggccatttggttttaacttctttaatggcaaggggaaaaggcagaacaagaagcccaacaatctaaatcagtcaaacaagaagcccagcaatccgaaccagaattccatgaaacagaaggaggtaactcatcatcgcacgaggcaatgagcaacgaatggatgg

SEQ ID NO: 4942 - DNA, 491 bp, Oryza sativa
  Clone ID: uC-osflcyp121a07b1
attcccggggagctctgaaagcagatcatgtttaccatgttgtcagcggacagaaggatcttcatgtgacaggaatcagggacttggttaggcagaagagaacattccatgaagttggagagcatccagctcctattgataaatctgacactaagtcctggatcaggaagcgacatggaagaaatgtgatagtttttgacactaagtcatcatcttggaagaaacagaagctgtgattttagagaagttagtcatatctatttgtaaagacccattgtctcgatctatagtttcccaccaaaacaaaggtttcttagaatgatgagatgaagtatcatcatgaaagatgatatggatcgagtaacttaatctgctggcgtacagcaattgctcataatttgccttgggaagacaacaaagtgattcagattcatatttcaatgataatttttgacgttgttaagagtaaatcgcggcggcggcaggaggtg

SEQ ID NO: 4943 - DNA, 475 bp, Oryza sativa
  Clone ID: uC-osflcyp121a08b1
gtttcagcagcgcctcatcttcgccggcaggggggtgtttgatggccgcacctgggctgactacaacatccagaaggagtccacccttcacctggttctcaggctcaggggtgggatgcatatcttcgtgaagaccctgactggcaagaccattacccttgaggttgagtcgtccgacactattgacaacgtgaaggcgaagatccaggacaaggagggcatccccccggaccagcagcgtctgatctttgctggtaagcagcttgaggatggccgcacccttgcggattacaacatccagaaggagtccacactccacctggtgctccgcctgcgtggtggccagtaagtcctcagccatggagctgctgctgttctagggttcacaagtctggctatttggcttccccaatggagctatggttgtctggtctggtccttggtcgtgtcccgtttcattaggtactatttacct

SEQ ID NO: 4944 - DNA, 425 bp, Oryza sativa
  Clone ID: uC-osflcyp121a09b1
gccttggccatcttcgtggcgctgaggtcggggggggtggagctgctgggcctgaccaccatcttcggcaacgtctacaccaccctcgccacccgcaacgccctccacctgctggaggctgttgggaggactgacatccccgtggcagagggatcccatgtaacaatcaagaaagccaccaagctacggattgcgagctttgttcatggctcggatggtctaggaaatcagaactttcctccgccaactgggaagcccttagatcaatcggccgccgcgtttcttgtcgagcaggcaaatctgtaccctggacaagttactgtggttgcccttggtccacttaccaacctagctttggctatagaacttgatccttctttcccgaagaagattgggcagattgtgatccttgggggtgcgtattc

SEQ ID NO: 4945 - DNA, 380 bp, Oryza sativa
  Clone ID: uC-osflcyp121a12b1
gtcaagaaacgagggatccattacaccaacagacgggctatcttgccaatggccggggggtcctctttccggcttgccgtggcggtggcagcactgttggttgttggctcatgtgccactgagctcaccttcaaggtcgctgagggctctagcgccagtagtctagagcttgtcaccaacgtcgccatctctgaggtggagatcaaggagaagggtggcaaggactgggtggcgctcaaggagtcatcatctaacacctggacaatcaaaagtgaggcgccgctcaagggccccttctctgtccgcttccttgtcaagaatggtggctaccgcgtcgtcgatgatgtcatccccgaaagcttcactgctggctctgaata

SEQ ID NO: 4946 - DNA, 327 bp, Oryza sativa
  Clone ID: uC-osflcyp121b01b1
gcttgagtgatgtacagacaatttcctgaaatgggctaaatatcacctttctacatgcaaggaaattctgagcccatcaattgagcgaatctgcacatacgtggataatttggcggttctgcagtcaagggacgtgtcaacagaacatgacaatgaggaactatcagaaaagacacgtccacagagatcccttgcggaagaatcttgggcaactgataagaagattgtaattgcctttatcatcactgatcacatgaagaagctcttttattctgaacatggggttaagtttaagagggatgatgaggacgacaggatcttattttc

SEQ ID NO: 4947 - DNA, 490 bp, Oryza sativa
  Clone ID: uC-osflcyp121b02b1
ggccttctcgatcgatcgatcgatcgaattgagggattaatctcctcctccaccaaccaataatataatccagttgtctctgttggccgctcgttgcgaccacgccactacagtcggggcaaccatgggtgcttgtgcaaccaagcccaagacgctcgagggaaaggctcccgaggaggccactcccattgaggcagcacccaaggttgcccttgagaccacaatgatctccaataaggaggttgtggctgatcaagcacctgagaaggtagtggaggaggccaccgcgatggcagagttaccaccaaatgatgatgccattgtcatgcaagacaaggaggaggaagttgaagaaaagatcgtcgaggaggagaagccttcagccccagctgcagaggtgaacaataccgaggtggtcgaggagaccatagaggtaaagaacaccgaggtggacaaggggaccacagaggtgaagaactccgaggaggag

SEQ ID NO: 4948 - DNA, 373 bp, Oryza sativa
  Clone ID: uC-osflcyp121b04b1
cccacccgtgtgagttaatccgctacgagtcaaacacaccaaacgggtattcttgaatggaggaggggttgctcctaccttccctgctcttttcgagctactcgcagggaggagaatgaagaccacgacgaggaaatgcaagctaatagtcgcctccgactacgagtccttctgatgaataagatcctgggcgcctggaggaaccgatagccccacgccagcatccaggatgccacagatcggatcaacaagaggggccactcccgggacgacggaccaataagctggacgctgaacttgcccgctacaaggaccatagcaagatgaccaggccaggccccgtccaggaagccataaaaggacacgtcatgag

SEQ ID NO: 4949 - DNA, 490 bp, Oryza sativa
  Clone ID: uC-osflcyp121b09b1
ctttcgaaggtggaaggatgtgtcttttccaaaacctctttacccacttgttcatcctgctgtattggttgaaacttatgagcaaggtgagagtgttgcacactatgtcgatgacctcgatggacatgatcgaattaaaagcgcccttgcacatattggcactcatgctctcctgaaaatgcttctggttgataactttgttcatgcggatatgcaccctggaaatattttggtccgtgttatacaaccaaggaattcaaataacacccttttgaagtctaggccacatgtagtattccttgatgtaggaatgactgctgaactttcaagtaatgatcgtgtgaatttactggaatttttcaaggctgttgcacgccgagatggtcgtacagctgcagaacgtacactgaggttatcaaaacagcaaaactgcccaaatccaaaagccttcattgaggaagttgaacggtccgtttccttttggggaacc

SEQ ID NO: 4950 - DNA, 477 bp, Oryza sativa
  Clone ID: uC-osflcyp121b11b1
gaattgcagtcaactgcaacctcacgtgtaaaggggcaaaaaaccgagataaaccatgctcttatggaggaaatacatgagataaaccaacagctcatagatacagagctccatgtttgcgaggatgatgctgagtcttttggtgctacatcagaagggacagaagggacagtcatcaaatgcacatttactgctgtggctgttagccccagcttgaagtccatgtttgcatcagcacagatgagtccaattttgccattgagggtgcttgtccccgctagctaccctaagtgctccccggttctcctagacaagttcccagatgaacaaagaaactcggatgacctgtcgaccaaagcgaggtccgaagttcagcatattgcttccgggtttagctgagcccatgtcactaagagaaattgcgaggacgtgggacgcgtgtgcccgcaaagtaattgctgagtatgctcaacagac

SEQ ID NO: 4951 - DNA, 439 bp, Oryza sativa
  Clone ID: uC-osflcyp121b12b1
ttggttggatggcggggcgggcactgtcaccagcagggatctcaaccctgctgtggatgatggggggtcattcaaaacacgtgtggtggcacgtgacaacgcagctcacattatcaagtcagaggttctggatgtgccggccggaagtaaggtgggcaagctcaagtcgcacgtgacagagactaatatcgaggccgccggtgccggctcttgcttggccaagataaacgtggagtatgagctcgaggacggcggctcactgtcgccggagaaggagaagctcatactcgacggctacttcggcatgctcaagatgatcgaggactacctcgtcgctcaccctaccgagtatgcttaaaaattgtcataaaccaaaataatatacatccatttccgtattggtgcttcctgataattaaataatgtgagccacgacaaa

SEQ ID NO: 4952 - DNA, 484 bp, Oryza sativa
  Clone ID: uC-osflcyp121c01b1
gccaggcttgattataacattatatgtgagcggagcgctgaacactgctttgtcatctgaacatcagaaggagatacggcggtatctctacaatcatcagaatgaagatggaggatggggtttgcacattgagggccacagcaccatgtttggctcagcgttgacatatgtttctttgagattgcttggggaggggccagatagcggcgatggatctatggagaaaggacgaaaatggattttagaccatgggggagcaacttatattacatcatggggcaagttttggctttcggtgcttggtgtatttgactgggctggcaacaacccagtgccaccagaaatatggttgttgccatatttcctgccgattcatccagggcgaatgtggtgtcattgccggatggtttatttgcctatgtgttacatttatggaaagaggtttgtgggcccagctacaccaattatattggaattaagaaag

SEQ ID NO: 4953 - DNA, 430 bp, Oryza sativa
  Clone ID: uC-osflcyp121c03b1
gtgatgggtacgggtttgatccctgctgatggggagatttggcgtgttaggaggcgcgccattgtaccagcaatgcaccagaagtacgttaccgcaatgataagtctcttcggatatgcttcagatcggctctgccagaagttggacaaggcagcaacggatggggaggatgtggagatggaatctttgttctctcgactaacactggatgtcattgggaaggcagtcttcaattatgatttcgactcattgtcttacgataatggaatagttgaggcagtgtatgtgacactgcgagaagcagaaatgcggagcacttctcctataccaacttgggaaatacccatatggaaagatattttcccgcggcagaagaaggtcaatgaagctcttgcgctgataaataagactcttgatgaactaattgaca

SEQ ID NO: 4954 - DNA, 479 bp, Oryza sativa
  Clone ID: uC-osflcyp121c07b1
gccagtaagctagctaactaactacgtgggtatggcccccaccgtgatggcctcctcggccacctccgtggctccattccaagggctcaagtccaccgccggcctccccgtcagccgtcgctccaccaactcgggcttcggcaacgtcagcaatggcggaaggatcaagtgcatgcaggtgtggccaattgagggcatcaagaagttcgagaccctatcgtacctgccaccactcaccggggaggatcttttgaagcaaatcgagtacctgcttcgatccaagtgggtgccttgtctcgagttcagcaaggttggggttcgtctaccgtgagaaccacaagttctcccgatactacgatggcaggtattggaccatgtggaagctgcccatgttcggctgcaccgatgccacccaggtgctcaaggagctcgaggaggccaagaaggcctaccccgatgcctttgtccgtatcatcggc

SEQ ID NO: 4955 - DNA, 425 bp, Oryza sativa
  Clone ID: uC-osflcyp121c08b1
tcgaataaaaggaaaaaaaaacaaaacacaccgagccaaataaaagcgacaatgggatcgctcaccaccaacatcgtcttcgccgtcgccgtggtggcagcgctggtcggcggcgggtcgtgcggcccgcccaaggtgccacccggcccgaacatcacgaccaactacaacgccccgtggctccccgccagggccacctggtacggccagccctacggctccggctccaccgacaatggtggcgcgtgcgggatcaagaacgtcaacctgcctccctacaacggcatgatctcctgcggcaacgtcccaatcttcaaggacggcaggggatgcggctcatgctacgaggtgaagtgtgagcagctcgccggcgtgctcgaagcagctcgtgacggtgttcatcacggacatgaactacgagccca

SEQ ID NO: 4956 - DNA, 451 bp, Oryza sativa
  unsure (1)..(451): unsure at all n locations
  Clone ID: uC-osflcyp121c09b1
cttgtatctttcacaggccgataaggactggcagccctggattgctcgagatgatgagcatggtcagaagatgtggagagtcaaccagcgaatagttaagctgatagcagagcttatgaggaaccacgatagcccagaagcattggtgatccttgctagtgcttcaaatcttcttcttcgagcaactgatggaatgcttgttgatggtgaagcttgtactttaccacaattagagctattggaagtcaccgccagagcagtccatctcatcgtcgaatggggagattcangtgtatccgtcgctgatggcctctccaatctgctgaagtgccgtctatcaaccaccatccgctgtctttcgcaccccagcgcgcatgtccgtgcactcagcatggtncgtgcttcgcgacatgttgaacagcggacatataaactccagtaagctcatcca

SEQ ID NO: 4957 - DNA, 485 bp, Oryza sativa
  Clone ID: uC-osflcyp121c10b1
ttgtggcgccgtcgctgaagaagaaggggttcatcctgccgaggcccaagatggccaatgctgatcttggcaggatcatcaactctgatgaggtgcagtctgtggtgaagccgctcaacaaggaggtcaagcgcagggagaagaggaagaacccgctcaagaatgtcgccgctgtgctcaagctcaacccctacttcggcactgcacgcaagatggccacccttgctgaggctgcccgcatcaaggccaggaaggagaagcttgactccaagaggaccaagcttagcccggaggaggctgctaaggttaaggctgcaggaaaggcatggtacaagaccatgatctcagacagtgactatgctgagttcgacaacttctcgaagtggctcggagtgacgcagtgagcgttgtcttgttttaagttttgagtagcagcgttaccggatcttatctcaaggatttatcaatctgtttttacctgaaca

SEQ ID NO: 4958 - DNA, 470 bp, Oryza sativa
  unsure (1)..(470): unsure at all n locations
  Clone ID: uC-osflcyp121c12b1
gtctcccgcgcgagccctcgtcgacgccgccggggtattgctgaaggaagaagagcaccaacctatttatcatgtcaggaggatcttcaccaaggtcaagacgaagcagctttaattctttatcaagagatctcgaactcccttcagagcaaggttgtctctctgttattgtcctcggggcttctggagacctagccaagaagaaaactttcccggcactcttccatctttttgcacagggatttatacaatcaggtgaagtgcatatatttgggtatgcgagatcaaacctttctgatgatgggttaagggaacgcattcgtggatacctcaaaggagcctcagaagaacatctctcagactttttgcaacatataaaatatgtcaagtggttcctatgacagncgagaaggatttgagaaattgaacaaggaaatttcagagtatgagaagtcaaacaaatcagaaag

SEQ ID NO: 4959 - DNA, 475 bp, Oryza sativa
  Clone ID: uC-osflcyp121d01b1
ctcaagtcactgagagatgctttggttgggcttcctggagtgaatggtctgtccactgaacaaagaaagaggctaacaatcgcagtggagcttgttgcaaacccttcgattatattcatggacgagccaacctcagggcttgatgcacgagcagctgcaattgtgatgaggacagtgaggaacactgttaatactggcagaactgtggtgtgcacaattcatcagcctagcattgacatatttgaagcatttgatgagcttttcctgatgaagcgaggtggtgaagagatctatgctggtccactaggccatcattcttcggagctgatcaagtattttgagagtatcccaggggtcagcaaaatcaaagatggctataacccagcaacatggatgttggaggtgacaacaattggtcaagagcaagcacttggtgttgattttagtgatatatacaagaagtctgaactttacc

SEQ ID NO: 4960 - DNA, 178 bp, Oryza sativa
  Clone ID: uC-osflcyp121d02b1
aatttgtctcttcatcttctcgctctcgatctgggacagatgctatagtagccagcaaatcaatcgatcgatccgtacaatggcggccatgaagatgaacaagattgccgtggcggcgctgttcctcgtcgccgtggtggtggcgggcggccccatccctagcgcccacctaggggct

SEQ ID NO: 4961 - DNA, 338 bp, Oryza sativa
  Clone ID: uC-osflcyp121d03b1
aagtcagtaggtgacacctttgcggacacaccaaaactgccggccatagcccatattcccacaagaagatggcgatcccggtttacagcatcacatgggcagagatcgaggagttctggaggagaaaggagatggaagatgaggagcagcgcctaaccgtcgagaaggaagctgcgagaatcaaagccaagacacttatgattgaagattatgcgatcttcgagcaaatgataagggagattcttgaggagggtatcaaaggtgacagcgcatgggcggagagagacatcaccacgaacggcgccgctgccaccaagagcactgagggaaggattggc

SEQ ID NO: 4962 - DNA, 481 bp, Oryza sativa
  unsure (1)..(481): unsure at all n locations
  Clone ID: uC-osflcyp121d05b1
gctgcctgttatacccctgatggacagggtgcactcgttggctcccacaagggcaagtgccatgtctacgatatttctgataatatgcttaagcacaagaaacagattgatctacatattaagaaaaggaaatctagccagaagaaaatcacaagaattcagtttgttccagggagttcttcaaaggtcatcatcacatctgcagattcacgaattcgagttattgacagctttgaactagtttgcaaatttaaaggctttcgtaacaccaacagccaaatttctgcttgttcagctgtgaaagggagatatcttatctctgcaagtgaggattcccatgtatatatgtgtagatgtaatgatgattccgaaccaaacacaaagaagggcattgtttctatcacanatacccatgaacacttccactgcgagggtgtgacagttgctgtattattgccttgtgccagcagcacaatgacat

SEQ ID NO: 4963 - DNA, 481 bp, Oryza sativa
  unsure (1)..(481): unsure at all n locations
  Clone ID: uC-osflcyp121d06b1
ggcagaatatttcagctgctgaccttagcctggcaccgaagctctaccatctccaggttgctctggagcattttaaaggctggaagatcccggaagacctaaccaatgttcatgcttacacagaggctctgtttagccgcgaatctttcatcaagacgaaggcagctaaggagcacctgattgctggatgggcaccaaaagtgaatgcgtaagagcctgcccttatgctctggtgctgcttggacaccatgctggttatctgatcggtccatgtcagtggtgggcactactactactcttgtgtagcttgagtgcatgattgggttggaataatgtagcctcatccgctgagtaccttgattggatgttgcaagtgtgcactttttctatgaactatctcctgctggcttaagtcgaaaccgtgngtcggtttggccttatgctcaactagagagtgcatatactgtaatggaacctttgc

SEQ ID NO: 4964 - DNA, 356 bp, Oryza sativa
  Clone ID: uC-osflcyp121d08b1
cggacgagaaggcgtgccagcaactggtgaaggtcctgccgcccgagtttgcagagacgaaagacgccaagggcctcgccaagctgtgcatctccagcgtcgggttctcggcggagcagttcaccaaggacgccatcgccgccgtgcaggagtgcaagaagcccgacaagtgcctcgacagctgcgtccaggctagcaccgccgtgaccgacgccctgaagccctccggcgccggcgtcaacaccgtcaaggtccccgaggacgaatggctcctcgccatccacgccagcttctcgcagctgctccgtggccccgccggcggcgtgagccgcccgcctctctgcaagacgtgctgc

SEQ ID NO: 4965 - DNA, 379 bp, Oryza sativa
  Clone ID: uC-osflcyp121d09b1
ctccactcctcgccttccactctccacacctcgcctcgcgtcgagcacctggcaatggcggctcacgcgccctcgatgcgccccacccacgccctctcctcgtgagatcgcctgctgcgctctctccccgcgcgcgcgcgcgcctccctccctgtttgttgaatccaagagcgagcccgaccgcatcttggaccctcccctccccgcggttcttggacgacgccggtgcgcgcggtggctctgctgtccccgcgccgcaccgtgccgaatccgagcagaacgcgcgcgcgtcggcggggggatctgcaatggcggccgtggcggtgcccccgctctccgcgtggcttgttgacgcgcgcttcttgacgcatgcggaatg

SEQ ID NO: 4966 - DNA, 491 bp, Oryza sativa
  unsure (1)..(491): unsure at all n locations
  Clone ID: uC-osflcyp121d10b1
tcgcttatttcccggcaacagcacggagatacaaattgaacacctgtatgcacatggggaacaacacgccgagcttcatggccccggctcgcccgggtgacctgctgcagatcatcagtaagccggcgcagccgccggcgatgtcgccgatgcccctcctgacgggctcggacgtggcggagccgccgctgccgcctgcaagaacagctcaggcgccgtcgctcgcgagcaggatgcaggctcatgccgcgatcgtcgtcacattggcgatgcttctcgcttgccatcccctggtatgaccggacaacgcagcaggttcacaagccaaaatactaatccagtctgtttgttctgttctttctttttttttctttttttttctcatgtagcgattcgtttcatcctcatgtatttttttttttgcattgatgatcgtccccgatttgcctattactgtcctcagnggtctcagtatatatgtgtggtatgaa

SEQ ID NO: 4967 - DNA, 440 bp, Oryza sativa
  Clone ID: uC-osflcyp121d11b1
tcggttagaatgacttatattgcgaaacggagggagtagttaatcgttaaacttcacttctagtctctaccattagtcccaaaataacttcatttctatcctcttacggttttacctaccctcggttcaaaaatcgatgagctttattcttcaataagccttaccaactccttacctaaccatccacccaccaatactaccttttctatctctacctttttttgcacacccaaaactaaaaatgaagttattttgggatggagggagtactgtttgcattattagtcttggattgattctgtattgtttttagtttgatctgcaaagttgtattctctaatatgggcccactagtgtacattgaagattcactcgagattctgagtcctaagaattccacctgaaatgctggatttatgtttttttgggaggcttatttt

SEQ ID NO: 4968 - DNA, 483 bp, Oryza sativa
  Clone ID: uC-osflcyp121d12b1
cgtctttctcggcggcggcggaggcggaggcgggggctgcggaaatggctcaccggctgctgcgagacgcgcaggcggacgggtgggagcggtccgacttccccatcatctgcgagtcctgcctcggcgacaacccctacgtccgcatgttgagagcagaatatgataaagagtgcaaaatatgtgcacgtccgtttactgtcttccgttggcgacctggccgggatgcaagatacaagaagacagagatctgccagacatgttgcaaactgaaaaatgtctgccaggtctgcctgctagatcttgaatatggtctaccggtccaggttagggatacagcactcgctattaattcaaatgatgcaatcccaaggagtgatgtgaaccgtgagtactttgcggaagagcatgatcgcaaggccagggctggaattgattatgattcttcccatgggaaggcacaacccaatgacaccattctga

SEQ ID NO: 4969 - DNA, 494 bp, Oryza sativa
  Clone ID: uC-osflcyp121e01b1
acttcttctaggaggaacagagatccagagaaccgtttttctcttctggattcttgccgatttttaggcttcctttgcttttctaaggccagaaagggttgttacgcaatacccttctagttcatcctctcaaatttttcttctttctattcaaaagctctgtctttctttgcaccctatgtttctctacttttattgaggaacagggctgatttttcacttcttgcatccaaaaagcaccccttttttctttcctgtttttaagatttccatacccttgccatcttcatcttctacctccatccagccctcatggccgcagcaatagacatgtacaagtataacactagcacacaccagatcgcatcctaggatcaggagctcatgaaagcgctcgaaccttttattaggagcgcttattcttactacgcttcctccccctgccaccactactactctttttctccttccatgagcccagattcttacatgcc

SEQ ID NO: 4970 - DNA, 422 bp, Oryza sativa
  Clone ID: uC-osflcyp121e02b1
ccatgcggattattgtctctcttttatccaccgcagggagggcgcacatcgcgactagccgtgcgtcagcagtggtcgggtcggtcggttacaagatgatggcttgcagggccctaccgctgctaacgctgccggcgcccttgcgtctattgcgtccgtgcgacgacttgctcgcgcggttcgaatccgtgcgtcgacgagcctgtgcctacttattggtccggtgctgtgccaacctcgtcggtcccgtaggccaggaggatccggcgtaagacgccgtgctcatggccatatcccaggtatagaactctaaacgtgaggctgatacagatgacaaatgttgacatgggtggaactgtgacagacgatgctagacatgtagggcttgaattggataagcatgttaatgcatagcctacagt

SEQ ID NO: 4971 - DNA, 493 bp, Oryza sativa
  Clone ID: uC-osflcyp121e03b1
cgacaacagcgggactgttgttggaatcaaatgcaaagatggaatcgtcctgggtgtggagaagctagtaacttcgaagatgatgctggagggatctaataggaggatccattcagtgcactggcactctggcttggctgttgctggtttagctgcagatggcaggcaaattgtttcaagagcaaaatcggaagcggccagttatgagaaggtctatggtgaacccatttctgtaaaagaattggctgatcgtgtggctagctacgttcatctttgtacactctactggtggctcaggccttttggttgtggagttattcttggaggttatgatagggatgggccacagctctacatgatcgaaccctcaggagtctcatacaaatactttggtgctgctctgggtaaaggaagacaggctgcaaaaactgaaatagagaagttgaagctttccgagcttacctgccgggaaggcattgtggaggttgcaaag

SEQ ID NO: 4972 - DNA, 477 bp, Oryza sativa
  Clone ID: uC-osflcyp121e04b1
catactttggtggattttgtgaaccaagcagagatctgaacaaagttagcaccatgcgcgctaactgttgcattggactgcaaagcaaggtacatgatctaagagttatgatggaagattggaggagttatttgtccttacctccaagcttgaaaagattgagtgcattggcatggagggtgccgcaaaattgcagcctttcttggtcacaccaataaaacgtccttatggacagcaaaaagaaatgaaaatggtgaagcccgccgaaagcgctctgccttccccccgaaagaaccttcagctaaacatctaaacagtgtgacgagattctgattgaaaggtcgcggtaagttttgccaaacacttcggagatccttgacaatatagagcggagttgccggaccgctctggaaaaatacactacaaggatggagcggccttagcactgctcctcagctccgctggctgtaccgaacg

SEQ ID NO: 4973 - DNA, 459 bp, Oryza sativa
  Clone ID: uC-osflcyp121e05b1
gttgatgtgagacgattagtggctcttacctgggcgtgggtctggaattcagtgtgctgacctacgggctggggattgaacgagagaggacctggtagctcgctactcaagctgggaagggatcatgacctgctctaccttcagtgtgtagaaataaccaccgggtcgggaatggaggggcaggaaagaatgcactcggcatcagcaaggagaggcactaatatccgcgaagatgatggcactggtgggcgtaacgacattcgcaggttctcaaggaggaagtgtcatcagtgcgcaggactctgggcgtggaatgactgttactgccagcagacgaatgctaggatatgatgacatgaggtgtactgcgtgcactctggggtgtctaactggctgcagtacaaggtgacggtgcaggggttcgtggagccgacaaggtggtgaagcgggtgcaggcga

SEQ ID NO: 4974 - DNA, 477 bp, Oryza sativa
  Clone ID: uC-osflcyp121e06b1
aaaaaaactcgttttcttttcttctcttctcttctctggttgcggcgaagggggagaggaaggtcgaggtcgacgagatgggcggcggcaatgggcagaagtcgaagatggcgagggagaggaacatggagaagaacaagggcgccaaggggagccagcttgaggccaacaagaaggccatgaacatccagtgcaagatatgcatgcagactttcatctgcaccacctctgagaccaagtgcaaagagcatgctgaggcgaagcatccgaagagcgacctcaccgcgtgcttccctcacctcaagaaataatggcggtggcatctctctgctcaatcagaagagaaaaagagaagctgccataatccactagtatcatcttgtatgcaatgactggttgccctatgtatgggtctaaactttggtcagctgctgctgctttttggttgtgtgcctcatctaatatgtaatgctctat

SEQ ID NO: 4975 - DNA, 491 bp, Oryza sativa
  Clone ID: uC-osflcyp121e07b1
atgggtttgacctactaagatgtgcttatagtcataaaactaacctgcctttgattgccattaagggtttcatcggggttttagccgataagttatttagacgttgcatcggcttacaaggattacatacaagttggttttagccgattacaacaaaggtttcattgattatttaatcttgtgaatttaaccttcgtatcaagcaattattctatcatatcattattgactgattggtttctattggattatattattgttctattacattatcatcagctgattatctttatatcattatttactcaagtgtcatgattatctttatattattatttactcaagtgtcagaatctacattggacatatagctgattgctcaaaaccttatcgacatttgctggtatcgagtaacaccctaaaaattcgacgacaaaatctaaactctaataatacgtatcttcaaaaactttttaaataaagttgcatca

SEQ ID NO: 4976 - DNA, 364 bp, Oryza sativa
  Clone ID: uC-osflcyp121e08b1
atggagccctgttgcagtgtcaaggacaggataggatacagtatgatttctgatgcggaagagaaaggcttgataactcctggaaagagtgttttggtggaaccaacaagtggaaatacaggcattggtcttgccttcattgctgcttccagaggatataaattaatattgaccatgcctgcatcaatgagcatggagagaagagttctactcaaagcttttggcgctgaacttgtccttactgatgccgcataagggatgaagggggctgtagataaggctacagagattttaaataagacacctgatgcctatatgctgcagcagtttgacaaccctgccaacccaaaggtacattatgaga

SEQ ID NO: 4977 - DNA, 442 bp, Oryza sativa
  Clone ID: uC-osflcyp121e10b1
atcccccctcaccgccttcaagagatccgccgcttctttgaagactacaagaagaatgagaacaaagaagttgctgtcaatgagtttctcccagcagaagatgccatcaacgcaatcaagtactcaatggacctctacggcgcctacatcattgagagcttgaggaagtgatctccagctgatcaactgcagaggctacatgattcactgaacagtttctcatcaatagtacgacatatgttaacatacatggtctaaaaccagtacttcggggatatataccttctactattcatgttaagacaagaagcagcaccttttctttccatgtatgccatgtcagatactcgggtcccaagcacctgacccctttgctgaactctctgctgcccaaaccgacagtttgctgaacggttacctaatagaaatcaaccatttacat

SEQ ID NO: 4978 - DNA, 495 bp, Oryza sativa
  Clone ID: uC-osflcyp121e11b1
atgcgaatggtacgggccgttgatgcccaagctctgcgaccccttcaacccggacatgagcccccggaaatgcgcccccggcgaggtcaacttcgacaccgcggcggcggagtggaagaagttcgagtgccataccaccgggccgcccgggtccgaggtgtgcgcgacggaggggagggtgacgccggcggcgtacgggcagatgacggcggcggcgagcatcagccaggggctgtaccagtacggcccgttcttgatggagctccaggactgcagcttcgtccgggagacgttcacggcgatcagcgacaacaactgcccgggcctcgagctctacagccggcacgtctacctcggcctgctcctcatctccggcgccgtcatgatgtccatcgtcttctggatggtgcacacgcggcagcggcggcggcgctcgctcgggctcggcaggtagatgtgaagagtgatactgtacatcgcaatatggcatgcctg

SEQ ID NO: 4979 - DNA, 467 bp, Oryza sativa
  Clone ID: uC-osflcyp121e12b1
ggctagacggccctcgtcaccggcggcacccggggcatcgggtactcaccccagcgcccttctctggttctcccctatcgctacccagtgaggagtgagacctccaccgcagagcctttgctgctcttccacgatcaacgcggggaattcatgcgcaggcatgcggtggtggacgagctggcggcgctgggggcggccgtgcacacctgctccaggaaggaggccgagctgggcgagcgcctcagggagtgggagggcaagggcttccgcgtcaccggctcagtctgcgacgtctccgtgcgggagcagcgggaacgcatgctccgcgaggtcgccggcctctacggtggcaagctcgacatcctcgtgaacaacgtgggaacaaacttttcaaaacaaaccactgaatactctgcagatgattactcgttcataatggccaccaatcttgaatctgcgtatcatct

SEQ ID NO: 4980 - DNA, 443 bp, Oryza sativa
  Clone ID: uC-osflcyp121f03b1
gatgctatcacttggatcattcaaaactggtgctattctcttggctggcctctttttctatgatattttctgggttttcttcactcctgttatggtcagtgttgcaaaatcatttgatgcaccgataaagcttctatttccaacaggagatgctgcacgcccattctctatgcttgggcttggtgacattgtgatacctggtatatttgttgcgctagcactgcggtttgatgtctcaagaggaattaagaaccgctacttcaatagtgcatttttgggttatacggtgggtttgaccgtgacgataattgtgatgaactggtttcaagccgcacagcctgccctcttgtacattgttcctggtgtgattggttttgttgctgttcactgtttatggaatggagaagtcaagccactcctggagtacaacgagtcaaaagctg

SEQ ID NO: 4981 - DNA, 487 bp, Oryza sativa
  Clone ID: uC-osflcyp121f04b1
ccctaagggaaattgttgctcctcccagagctccgccgccaggccccgccccatctggatccgccgccatggccaccgcagtcgccgcctcccccgctcagtcccgcaagactgagacctacaccgacaccaagcgccgggatgacgtccgcggccttaacatagccgccgcgcgcgccgtcgccgacgccgtgcgcacctccctcggcccccgtggcatggacaagatgatctcctccggcgagcaggaggtcatcatcaccaacgacggcgccaccatcctctcccgcatgtccctcctccagcccgccgcccgcatgctcgccgagctctcccgctcccaggacgccgccgccggcgacggtaccactaccgtcgttgtcctcgccggatctctgctccgccgtgctcaatccctactctctgctggtgcccaccctaccgcggcagctgacgctctccaccggctcgccacgcgcgccgttga

SEQ ID NO: 4982 - DNA, 484 bp, Oryza sativa
  Clone ID: uC-osflcyp121f05b1
gggagagagagcatctagctagggagagaaaggaagagacgagaggagagagatggccactgcttatgctcccatggcgagccagctgatgaagagcagcttggtgtgctccaagccgagggggctgtctggtgcttcgctgacaaggaggccccgcttcacagtcaaggccatccagtctgagaagccaacgtaccaggtggtgcagcccatcaatggcgaccccttcatcggcagcctggagacgccggtgacctccagcccgctggtcgcctggtacctctccaacctcccggcgtaccgcaccgccgtcagcccgctgctccgcggcatcgaggtcggcctcgcccacggctacctcctcgtcgggcccttcgcgctcaccggcccgctccgcacacgccggtgcacggccaggccggcgccctcggcgccgccggcctcgtcgccatcctcagcgtctgcctcaccatgtacggcgtcg

SEQ ID NO: 4983 - DNA, 491 bp, Oryza sativa
  Clone ID: uC-osflcyp121f06b1
gcttccttggttacagccagcaagatggtaaaaatatgcttgtgtatgaattcatgcataacgggacgttaaaagagcacctccgtggaggccctgatgatgtaaaaataaatagctgggtcaagcgtcttgagatagcagaagatgctgcaaaaggaatagagtatctccacacaggatgctccccaactatcatccacagagacctcaagagcagtaacattctccttgacaagaacatgagagcaaaagttgcagactttggcttgtcaaaacctgttgtcgacgggtctcatgtatcaagtatagttagaggaacagttggatatctggacccagagtactatatctcgcagcagctaacagagaagagtgatatgtacagttttggtgtcattttacttgagctaatctcaggccatgagccaatctcaaatgacaactttgggctccactgccgtaacattgttgaatgggctagatcgcacatg

SEQ ID NO: 4984 - DNA, 469 bp, Oryza sativa
  Clone ID: uC-osflcyp121f08b1
aaaaaatctcatcttccaatcccaacctggtctggtggaattcctgaatccgggtcgatcgagagctcacgatgtcggccatggagaccgacatcaacgcgccgacgacccccggccccgaccccgccggcgccggcgagggatcctgctctgccgccggcccctactcccgcaagcccaacaagcgcttcgagatcaagaagtggaacgccgtcgcgctctgggcatgggatatcgacgtagacaactgcgccatctgccgcaaccacatcatggatctatgcatcgagtgccacgcgaaccaggccagcgccaccagtgaggagtgcactgtcgcttggggtgtctgcaatcatgcttttcacttacattgcatcagcaggtggctcaagactcgccaagtgtgcccgttagataacagtgaatgggaatttcaaaaatatgggcactagacaccacctgctgtctg

SEQ ID NO: 4985 - DNA, 437 bp, Oryza sativa
  Clone ID: uC-osflcyp121f09b1
ttcttattggagagtcgtgatattcacatacattttcctgctggcgcggtgccaaaggatggtccttctgctggagtgacattgggaacatcatgagtgtcactatttaaccaccgaaaagacagagctgacactgctatgacgggagagatgactcttaggggccttgggttgccaggtggcggtgttaaggataaggaacttgcagcacatatatatggcatcaagagagtaatattgccagaaagaaacatgaaggacttggctgaagttccagcacccattctctctggctcggagattatgcttgtgaagcgcatcgaggaagtacttgaccatgcttctgaaggacgatgcccattgagaccacacttcaagctatagcatcaaccaatctgaagatggagtttgatctggtatactttcctgctggttat

SEQ ID NO: 4986 - DNA, 479 bp, Oryza sativa
  Clone ID: uC-osflcyp121f10b1
tggaaatccacaacttagagaaacactctgaaatgttgcttaatcagaagaagaatttagagactcaagtaagcgagcttaaagatatggaggcagtggcacatgatcagcatggaagaataaaggacttgagtgatgaacttagcaaaaaagaccaagagattgaaggtttgatgcaagcacttgatgaagaagaaagggagcttgaggtcttggagaacaaaagcaatgacttagagaaaatgcttcaagaaaaagaattcgctttaaagagtcttgaagtttctaggaccaaagccttgacaaaacttgcaacaactgttgacaagtttgatgagttgcatagcttgtctgaaagccttcttgctgaagtggaaaacctacagtcacaactgcaagagagagattcagagatctcttttctgcggcaagatatcacgagaagtaccaatgaactgctaacaactgaagagagcaac

SEQ ID NO: 4987 - DNA, 89 bp, Oryza sativa
  Clone ID: uC-osflcyp121f12b1
tgatattcttcctcatgtagctgattcgttctgggggtcgagtactaaagatgggagaaatcaactggcgcctgtccgtgtttggattc

SEQ ID NO: 4988 - DNA, 96 bp, Oryza sativa
  Clone ID: uC-osflcyp121g01b1
gttttcgccgaacacaccccccccacctcgggtggggacacgcctgcggctgctggcaccgaaccgtctcggcgcgagcgcgagggagagagctcc

SEQ ID NO: 4989 - DNA, 417 bp, Oryza sativa
  Clone ID: uC-osflcyp121g03b1
attgaaattcacactttcaaccagagccaatatcctcgcattgctactgaagacttcttgccacttccaagcaaggggaagactggcaaggatggctggtatcccccaggccatggtgatgtgttcccctccttgaataacagtggaaaacttgataccttgttggcacagggcaaggagtatgtctttgtcgcgaactcggacaacttgggtgctattgttgacatcaagatcttaaaccacctgatccataaccagaacgagtactgtatggaggttactcctaaaacattggctgatgttaaaggtggtaccctcatctcttacgaaaggagagttcaactgttggagattgctcaagtccctgatgagcatgtgaatgaattcaagtcaattgagaagttcaagatcttaata

SEQ ID NO: 4990 - DNA, 427 bp, Oryza sativa
  Clone ID: uC-osflcyp121g04b1
aagaaggtgagagcttggtgagctgcacagatggccgggtccgtgatggcgtcgtcgggcaccaccgtcgctcccttccaggggctcaagtccaccgccggcatgcccgtcgcccgccgctccggcaactccagcttcggcaacgtcagcaatggcggcaggatcaggtgcatgcaggtgtggccgattgagggcatcaagaagttcgagaccctcttctacctgccaccgctcaccgtggaggacctcctgaagcagatcgagtacctgctccgttccaagtgggtgccctgcctcgagttcaacaaggtcggattcgtctaccgtgagaaccacagatcccccggatactacgatggcaggtactggaccatgtggaagctgcccatgttcgggtgcactgacgccacccaggtgctcaaggagc

SEQ ID NO: 4991 - DNA, 362 bp, Oryza sativa
  Clone ID: uC-osflcyp121g05b1
aaccaaagcttattaagctagctcaagctctaatacacatttagctagaatggcgccgatcaagttcacagccgacgtcggcgttctcctggtcctgctcgtctaggaggcggagggcggcccagaggccgacgtgaccacctgcgtggcgctcgtgctggagctcagcccgtgcctgctcatcttcacggacagggcggtgacggaagctccagaagggtgctgcaccgcgctgaccgaccatcaggatgggctgggccggtgtgcctgcaccacactagaggaccacacgctggagcgcggcatagacgccgacaggcaccgtcgaccgggcgttggctctggttcgggacgtatgccgg

SEQ ID NO: 4992 - DNA, 472 bp, Oryza sativa
  Clone ID: uC-osflcyp121g09b1
gtgaaaaagcggtcccaatacagtgctttcaaagacgagcttctagttaatccttcagaagttactcgaagaatggaggaaatgactatatccaaagggaacagacataattctgaaggaattggagtgcttccaagggcagaaattgtccatgatgaacatcctctaagcctcgggaaaactagtgtctggaaccaatttttccaggaatctgaaactatagagcagattgatagagatgttaagcgtactcatcctgagatgcaatttttcaatggggattcttctgatgccttgtctaatcaagagtcgctaaagcgtatacttaccatatttgcaaaattaaatccgggtataagatatgtacaaggaatgaatgaagttttggcaccactctactatgttttcaagaatgatccagaagaaaatatgctgtaagtgtttttttttcccatgacgctatttgcttaaa

SEQ ID NO: 4993 - DNA, 483 bp, Oryza sativa
  Clone ID: uC-osflcyp121g10b1
gtgaccgactcgacccccacccaagacacgccgccgcctacgcccccgaactccccatcgcctcgcccgcggattctcctcctcctcctcctccttcctcgccgccggcgacgcgccgccggctaccttttgacgctccgaccgtggtgccctttttctgtgggacccgggatcctagctcccctcctcccccgacgattcccggtcgcctcggcggctctcctcccgccctagggttccggcgaggtcccccgcggctgcgccggcgagatgggtgagcgcaaggtgctgaacaagtactaccctccggacttcgacccgtcgaagatcccgcggcggcggcagcccaagaaccagcagatcaaggtgcgcatgatgctccccatgagcatccgctgcggcacctgcggcacctacatctacaagggcaccaagttcaactcgcgcaggaggacgtcgaaggcgagaaatacctggggatac

SEQ ID NO: 4994 - DNA, 488 bp, Oryza sativa
  Clone ID: uC-osflcyp121g11b1
aaggatggcgtgcaactatggaggatgctcattcagctttgctagatatcgataatgacacatcattctttggtgttttcgatggacatggaggaagagtggttgctaaattctgtgcaaaatatctgcacagagaagttctcagaagtgaggcctattcagcaggtgacctgggcaatgcagcccataaagctttctttagaatggatgagatgatgcgaggtcaaagaggctggcgagaactacaagcacttggagataagataaaccagattagtggcatgatagaaggcttgatctggtctccaagaggcagtgattcaaatgatcaacacgatgattgggcttttgaagaggggccacactctgactttgctgggccaacctgtgggagcacagcttgtgttgcaatagtaagaaatagccaacttgttgttgcaaatgctggtgattcccgctgtgttatctcaaggaatggtcaggcatac

SEQ ID NO: 4995 - DNA, 365 bp, Oryza sativa
  Clone ID: uC-osflcyp121h01b1
attttgtttaccaaacacactgaaacacggagcagtggcggctttgctcctttggctgtcatggcttctactctccctcctctccatctacctcctcgacctcctcgcacactcacgacgctgcctcccgccgggaccccgtccgctgccgctgatcggcagcctccacctgctcggcgacctgccacaccgctcgctcgccggcctcgccaagacgtacggccctctcatgtcgctccgccttggcgctgtcaccacggtggtcgccttctcgccggaggtcgcccgcgagttcctgcagaagcacgacgccgtcttcgccacccgttcaacccccgacgccaccggtgaccacgccaggaact

SEQ ID NO: 4996 - DNA, 493 bp, Oryza sativa
  Clone ID: uC-osflcyp121h03b1
ggtggaggagaagagccatcagcagcatcagcagcaaggggaggaggagctcgtcggcctctcgctcgccggcggcaggcccaaagtatttccaatgtcgagccctccacctaatccttcgcaacttacaattttctatggtggatcagtatgtgtttatgactcagtgccgccagagaaggctcaagcaatcatgcttattgccgcagcagctgctgcagcggcgtctgccaccaaaagcaatgctgccattgctgttaagccccctgtgatgcctgcagccaatgctacccaagcagcagtctctcctgtgctcacaagatcgctctcattgcagagcacttctgtagcaactggacaacctcaagttgccgctgaccctagctcaatttgcaagctccaggctgatctccccattgccaggaggcactcccttcagcgcttcctagagaacgccgtgacaggttggtgagcaaagctccatatcccacaa

SEQ ID NO: 4997 - DNA, 492 bp, Oryza sativa
  unsure (1)..(492): unsure at all n locations
  Clone ID: uC-osflcyp121h04b1
agccggagcccgggagaagtcgagaagatcatatacccacaccttactcgcgccgcgcgcgccgccgtcgacggcagcctcctcctcctcttcttcccccgtgccggcgttcgcgttgcctcctcgatcgcgccgcgcgcactccaggcgggcgagctggtttggagagggggcgagacgacctgactccgccctcgattggaatcgaatccaagattgatggcgatggagggaccaatcctgtgtcgtgcagtgatgcaagcgaagctacctgtcacgatgatcagcaattcactgaccaagtctgggcagcttggaactgcattcctgggttctgtgtgtaaatacaggaatatcactagactcatttccccaatctatcagccggcacaaaagaactttgctcctgtttgcggtagcttcagctcgtccgtcgatggtaatggatatatggctggcaactntagtgagagtgatgaagattatgttaat

SEQ ID NO: 4998 - DNA, 397 bp, Oryza sativa
  Clone ID: uC-osflcyp121h07b1
tttttggactggtgcccgacggggttcaagggcgggatcaactaccagccgcgcagcgtcgtccccagcggcgacctcgccaaggtgcagagggccgtgtgcatgatctccaactccaccagcgtcgtggaggtgttctgccgcatcgaccacaaggtcgacctcatgtactccaagcgcgccttcgtccactggtacgtgggtgagggcatggaggagggtgagttctctgaggcccgtgaggatctcgccgcgttggagaaggactaccaggaggttggctctgagtactaccagaatgaagatgggcatcatggtgacgagtactagaggagtcgtcctcgtctgggggcttgatgttctgtgtgtcaaggcctgattgataaccggtgctatc

SEQ ID NO: 4999 - DNA, 492 bp, Oryza sativa
  Clone ID: uC-osflcyp121h10b1
gtggtggtggccttcccgtcgtcgtcttcgactggactccaactccacctccacctccaccacccctctctcgaagccatcgccgcctgtctctcctctccagctcgcccggtcagagtccgcgggggattcgattgattggtagctagctaggcttccgcgcgcggcgacccaacgtcggtggaggcggtgctgaaggccgggcggcgtctcgttcgtggtgcggcggagatgggccaggacctcgccgagatccaccctcgcgagctccagttcacctttgaggtgaagaagcaaagttcatgtactgtccatcttgtcaacaaatccaatgaatatgtcgcattcaaggttaaaacaacatcacctaaaaggtattgtgttcgaccaaacactggagtcatccttccaaggtcaacatgtgatttcacagttaccatgcaagcacaacgtactgctccaccagacatgcaattaaaagacatgtttttg

SEQ ID NO: 5000 - DNA, 429 bp, Oryza sativa
  Clone ID: uC-osflcyp121h11b1
aagagcagcgtcgcctctcctcctcctccctaagggctacgcttccagaaccgtgtcgaagctcccgctcccccccccttccgctccaatggcgaaggaaccgatgcgcgtgctcgtcaccggcgccgcaggacaaattggatatgctcttgtccccatgattgctaggggtgtgatgttgggtgctgaccagcctgttattctacacatgcttgacattccaccagctactgaatctcttaatggccttaagatggagctggttgatgctgcatttcctcttttgaagggaattgtcgcaacaactgatgttgtggaggcctgcactggtgtgaatgttgcggttatggttggtgggttccccatgaaggagggaatggaaaggaaggatgttatgtcaaaaaatgtctccatctacaaatcccaagc

SEQ ID NO: 5001 - DNA, 467 bp, Oryza sativa
  Clone ID: uC-osflcyp121h12b1
gaatgatactgatgtccataatacttttgttgggggacacaattcctttggctgggcaccaaatgactattctcttgattgtaatgttggcgtagaggaggcttcggtaactcctgctctttcagtctgccggaatagtaatgaaatgcatggaagtttggttgataacccactggctttggttggcgatgatccatccttgcaaatttttcttccaagtcaaccttcctctgttcctcttcaggaagaacttagcgagcgtgctaatgcaccaaatggggttcagtctgatgattggatatcccttacactcgcagcgggtggagggtggtaacgaagagcctgcacctgctgatgtcaattcacagccacaaattccatcaacagagacaggggatcgaaccattgaccgatgctgcttctgcatttctgagcacatacattgaaagacgtagcggagctgattt

SEQ ID NO: 5002 - DNA, 503 bp, Oryza sativa
  Clone ID: uC-osflcyp122a03b1
aagaaacaccatcaactagttcaaaactggcggataaccaggattatgagggctggtgtaactatgtcctttgatgaacaactaaaagcctttggatcttgccatgaagggaatgaaatacctgaaaacttgtcaggtggagttcttattgatcaagtttatgctgttgcacccagtgacttgaatggacttcttttctcaccaagttcagatttcttgcaatcactagcggagatgcaaggaactactggtcttgaaatccaacaatggagacttgaaaatgatggtgaggtcttgaagagggtagtaagctacacaaaagctcctactgcactagtcaaggctgtgaaagcaacagaggatgtgtcatatctgaaggcagatggagatatatatgcaactttagctgatgttagtactccagatgttccatttgggaattcttttaggggtgggttttaacatgcataatgccagggcctgaactacctgataatgaaaaa

SEQ ID NO: 5003 - DNA, 496 bp, Oryza sativa
  Clone ID: uC-osflcyp122a04b1
atgttttttagtttaacagacatgtctctaaatgaggagcatctcaacgggaaacgggcagatgcttttggttcccttactggccttgtaaattttgatatttcatccaataacttcagtggttcattaccaccttctctgggaagcctgtcatcattgactacattgcacatgcaagacaaccaactatccggaacccttgatgtcttgcaggatctccccctcaaagatttaaatatagagaataatttgttttctggaccggttcctccaaagttgctgaatgtgccaaacttcaaaaaggatgggaacccatttaataccagcatagctccttctgcatcaccctcttcaacacctacaggctctacaccaacacaaacaccatcgtcaccttcatcttctggaactccttcgccatctagttcgccctctaattcttctggtggatctactgctcgagacagcagctctccatcatctaggaaacataagt

SEQ ID NO: 5004 - DNA, 444 bp, Oryza sativa
  Clone ID: uC-osflcyp122a06b1
agagtattagccttccggaagaatgtggtttgagcggggcaaattgcagaatcctgcggagcacactgacatccaaaggccagggacgtcagaaaagagtgacaggcaatgtcgcagctatctgtgaagcgttgacggacaacagatgccgtgaaacaataccaatggcaggaagagaaagatgcgatgcgcatgaaggaataaaggtcaccgatgcttcctctgtaccgttttccggaagctcaggatggccatcaatctgtggtgctcgagcttcggatggttctccttgtaagaatcagccaattgcagggagaaagagatgcgcgatgcataaaggccaaagagcatgtcggaccccctcaatcgactgagcagacatgatatgagtgatgctcaattgcttacgttcattcaggcatttgttggaatagcattttcagt

SEQ ID NO: 5005 - DNA, 450 bp, Oryza sativa
  Clone ID: uC-osflcyp122a09b1
tgtatgccatggacgaagccctggtgggcagggggggggccgcggtgtcccgggtgggaagctctcaatggcgccgccggtgccacggcgagaggaggctacggcggccaggtcgaccacgcgtcggcgcatgacccagcgatcctggcgttcgacgagctcgtcgccggcgccgtcgggagggtgtcggcggcggccggcaagatcggggcggaggtcgcggaggtgaccagggtgctggagaaggcgttcttggttgggaaggaccttcttgtcaggaccaagcaaactcagaagccaaccgtggattccatcgcagtattcatggggcctctgaatgaaacaatattggaggcaaattcattggcagaggggacaagatcgagccatggcaaccatctgaaagcagtcgccggtagcctggccgctctggcgtggattgggtacacc

SEQ ID NO: 5006 - DNA, 415 bp, Oryza sativa
  unsure (1)..(415): unsure at all n locations
  Clone ID: uC-osflcyp122a10b1
tgtttaggttgcgacgaggaagatctatgacgcggtggaggaggacgcctggggggcgatcctccaccactacgacggccccaagttcaggctggagctcatcgtcgccgaggcgctctcccttcttgacatctttgcagacaaggatgacgcctgaggctactgcttccctgctgctgcttgctgaagaatatcangggactgccggtgaaggacacaagtaataaagattcgacgtgtatccgttgtgagatatacatacataaatacataaatacaagtagtaagtaattaacggtgtgtgctgatgaatttggaacgattagtacaatttctgagggggtttcccatctcgcgggctaagagatgatgcgtcccattgaattttttttaatcatgtgcgacgatgatgact

SEQ ID NO: 5007 - DNA, 506 bp, Oryza sativa
  Clone ID: uC-osflcyp122a11b1
tcttttctctcctctcatctgacatatctcgggccgtgctttagaagcctctggaggcgcatcaccaagccggatggcgggcaccgccgacgtgaagctcgagggccttcgcgccgccaccgacaagctcgaccagatcagcgagaacgagaagtccgggttcatcagcctcgattcgcgctacctcagcggcgaggcggagcacatcgagcgtagtaagatccagaccccgaccgacgaggtggtggatccctacgacacgctctcggctgctcccgaagatctcaacgagactaacagctgctcgacaaactcgtcgtgctcaagctcaatggaggcctagggacgaccatgggctgcactggttccaaatacgtcattgaagtccgcaatggctttacgtttctagaccttattgtgattcaaattgagtccctgaacaagaagtatggatgcaatgtccctttgcttctaatgaactcattcaacactcatgatgacacaca

SEQ ID NO: 5008 - DNA, 467 bp, Oryza sativa
  Clone ID: uC-osflcyp122a12b1
ttcttctctaataattggtgcaggattggtctggtgaaagccttggaagcattgggtctgaaatctgtggtctgattgttgtgttgtctggtaccattttgttacatgtgacgaaggattatgaaaggattccgcaatcaagaagtttgtaaccctaacaatccctttctacatggcatcagacattcagtctcctttcagtaatgcctataatcacataaattttctcacgatgtaggtatatacgcaccattgtctccctccttgacagcaagattaaacggagacttactgaagcacgtcgaggatgataggaaccccgatgaagaaaaagccttgagaaggcaagagatgtactagctccagtctcctgaagctcaaaaaaggatgaacaactccgattgagctaactagtgacatcagtgattgctatggtgtgttggtctgtacataatcaggcatctgca

SEQ ID NO: 5009 - DNA, 470 bp, Oryza sativa
  Clone ID: uC-osflcyp122b01b1
cgctctgtcctcatgacgcagatcgtgcgggagggcgagaacgccttcaactcgctgaccggcaccgaggtggccaccgtcacctccgtcgtgcagctcgagtcgcaggacctcgcgcagatcgcgcagcaggtgcagaatctcaccggcgcgaagaacgtccgggtcaagacccgcatcgacccggagctcatcgccggcttcaccatccagtacggccgcgacgggtccagcctcatcgacatgagcgtccggaagcagatcgaggagatcacctccgagttcgagatgcccgcagtaaccctcgacgtctgatcggcatccaccaccctcccggcggcgctgccttggcccttaggtcctctcctcctgttgtctcttactcttgtgcaagtgcaacatacattgctctcatgtgattgttgaatgtttggtaagcattactgctgaataatacatagctggattcc

SEQ ID NO: 5010 - DNA, 547 bp, Oryza sativa
  unsure (1)..(547): unsure at all n locations
  Clone ID: uC-osflcyp122b03b1
attggtcccaaataataatagaggaaggggaaaaacagagtttgcagccacatcatccatggcctctctccgcaccattccggtgatcttcggcatcctcttctatgtccttgccagcactgccactgccaccgacgcaccggactacgtcgtccaaggccgtgtctactgtgacacgtgccgcgccgggttcgagaccaatgtcaccgagtatatcaagggtgccaaggtcaggctggagtgcaagcactttggcaccgacaaggtcgagcgtgcgattgacggtgtgactgatgagaccgggacatacaagattgagctcaaggacagccatgaggaggacatctgcgaggttgtcctcgtccacagcccccttgcaaactgctctgaaatcgaggccgaaagggatcgtgcccgtgttttgctcaccaggaatgtcggcatctgtgacaacctgcgcttagccacccactcggctacctcaggacatnccactgccatctgcgcgcgctgttaagcagtcgactgctgatgatgatacagaatg

SEQ ID NO: 5011 - DNA, 227 bp, Oryza sativa
  Clone ID: uC-osflcyp122b04b1
tgcagtgggaggaggcgctggcggccgtgctgtcggggggtgtttgtagcgcggcggggcgcgccaccaaggccgtgccgctgcacgacgcgctcgggctcgtcctcgcggaggacgtccgcgcgcccgaccccctccctcccttccgcgcctccatcaaggatgggtacgccgccgtggcctccgacaggcccggggagtacccggtgattacggagtcgagggcc

SEQ ID NO: 5012 - DNA, 472 bp, Oryza sativa
  Clone ID: uC-osflcyp122b06b1
cggtcgtttgggctaatttgcaaggttgtgggagaccgtgatgttaagttctgcacaaggacaactttaagcgacaatgctatcacaaatgcgatagatatacacagatctgcaagtggaagcttgcgtgttaccgtgtccaacaatgattttggtgttcgtgaatttgacatggaaacatttcagctcttgaaccacttcagttataactggccagtaaatcacacatctgtgagccctgataggaaacttctggcagtagttggagatgatcgggatgctcttcttgttgattcaagaaatggaaaggtaacctctaccctagttggccatctggactattcgtttgcttcggcatggcaccctgatggccgcaccttcgcaaccggtaaccaagacaagacctgccgcgtctgggacgtacgaaacctgtcaacctccctctcagtacttaggggcaacattggcgcta

SEQ ID NO: 5013 - DNA, 513 bp, Oryza sativa
  unsure (1)..(513): unsure at all n locations
  Clone ID: uC-osflcyp122b08b1
gatctccccaatccgagagctccggaggagcagcgcggaggcggagatggcgctgcggcgagcgctgctcagatctgccgagatctcccccgatcgcaaggctgcacttgagtacctccattctctatcgagagcacagcctactcgttctctaacaggtgctggcctttattctgctggcaaatcattcagcactcaggctgctactacatcaagcacaccacaacctccaccaccacctccacctccggagaagactcactttggtgacctcaaagatgaggaccgcatttttaccaacctctatggtcagcatgaccctttcctgaaaggtgcaatgaagaggggtgactggcatagaaccaaggatttggtgcttaaaggggcagactggatagtgaatgaaatgaagaaatcgggacttcgagggcgtggaggtgcaggattcccttctgggcttaaatggtccttcatgccaaggtatctgatggacgcccttcttatnnctgtgta

SEQ ID NO: 5014 - DNA, 422 bp, Oryza sativa
  Clone ID: uC-osflcyp122b09b1
ttttgatatgatgggatgcgtccatcgctgggggggaagctaaggggatatcctgcagatttcaaagcgctgatcgaagaatgctgggatactcagggtatagcaaggccaacattttcagagataatcatcaggctcgacaagatatacgcccagtgcatgaagcaagggacctggaaggactcgctaaagatttggaaatgacacgtgtgggctaagctgcatgaacgccttcttgtgtacatatcactgcgaagcaaatgcgtcactctctgtgaagaagaagcctgagctagcactcactcgtctggaggaggatgacacgacgtaccgacaaatttgtgtacgtgttgtaaaaggcccggcgaaaaaaaaagtacttgtaaaagatcaatttgagttaaattgggaggaacaaagct

SEQ ID NO: 5015 - DNA, 452 bp, Oryza sativa
  unsure (1)..(452): unsure at all n locations
  Clone ID: uC-osflcyp122b10b1
caacgccggcaacaagatccgcaacgccgagactggttcttcttggagatgtgggcgcaggaaaatctagcttggtgcttcgttttgtaaaaggacagtttgttgagtttcaggaatcgacaattggagcagcatttttctcacagaccttagcagttaatgacgaaaccgtgaagtttgaaatctgggatacagctgggcaggagagatatcacagcttggctcccatgtactataggggtgcggctgctgccatagttgtctatgacatcacgaatccggcctctttcacccgtgcaaagaaatgggttcaagaacttcaagctcaaggtaactcgagtacagtggtggctcttgctggcaacaaagccgatttgctagagactangcaggtgcanatagaggaagcaaagacatatgcacaggagaatgggcttttcttcatggaaaca

SEQ ID NO: 5016 - DNA, 438 bp, Oryza sativa
  Clone ID: uC-osflcyp122b11b1
tttctgtccatccaatcataaaggtcatggcccctgggtttgccctcatagccccagggtaccaattcacggcttcacacaggaacgggccaccggtatcacgtgacccggaagccctgaaggctaaatattcagaccagcttgtgttcaccgggtccatccaagttagaacagggtacgagatcctacgcctgacgtcgtatttgcaacagcacttgcacagaatcactgtcccgatgctggggatgcatggtgccgatgatatggtgaccgatccccaaggatcacagaaactgtacgaagaagcttcatcctcggacaagtccctcaatctgtacaacggtctgcttcatgatctgctcatcgagcccgagaaggagaagatcatggacaacattgtggattggctgagcccgacgatttgacagctgatatcca

SEQ ID NO: 5017 - DNA, 371 bp, Oryza sativa
  Clone ID: uC-osflcyp122b12b1
ttcttctcgccgcgcacccctcccctccccaggtcgctcgccttcctccccgcgcgcgttgctcccgcagcttcacgcttcccccgcactagtacagactcctgatggtggtggaggtaaacctcggcggctaacccatcgtacaccgcgcgcggcggctctgtttttggtttgggcggcattttggtctccttgggggtgtggatttgggttgggggggcaggaaagatttaaaaatatataatgagttggctgctggacccgttccgacaaaggtgatcaatgggcccaacttcaaaaaggatggggacccctttaataccagcataagttctttttgcatagcctcttaaacacctacaggctttaca

SEQ ID NO: 5018 - DNA, 484 bp, Oryza sativa
  Clone ID: uC-osflcyp122c01b1
agaggtttctcctagcctcgcctcgccttcttgcgccgcaagaagaaaagcagcagcaaagcaagccagccatggccgccgccgctgcgtcctccgccgcctggaagaggtggatccgccccgaggtgtacccgctcttcctcgccaccggcgtcgccgtctccatctgcgtcggccagctcgtccgcaacatcaccggcaaccccgaagtcagggtgttgaaggagaagagggcggccggtgtgctggagaacttcgacgaggggaagcgctactcgcagcacggcttcaggaagttcatcgacgggaagcgccccgagatcatgcccggcatcaacagcttcttctccgacccgcccaagtactaagaccgtgttgttggctggtgggattgattgccatatgccaccgttttgccggaatttcaattcatatgcatgtttcaacatgttcgaatatttgatttgagcgtatacaaatattg

SEQ ID NO: 5019 - DNA, 430 bp, Oryza sativa
  Clone ID: uC-osflcyp122c03b1
gaatattatcgcaccaaatttgactgcacttgtgggcgaattggttggtgctcgacgtgattgcacatggcggcagctcggtaaatctggccaagcagcctggcagcacaattcagatacttggtgcagagaaggctttgttcagagctctaaagacaaagcatgctacgccaaagtatggtctcatctaccatgcatgcttaattggtcaagcagctccaaagcacaaggggaagatttctcgttctcttgctgcaaaaactgctcttgccattcggtatgatgcccttggtgatggtgaagataactccattggtcttgagagtctagtcaagcttgagacacggctatcggttcttgagggtaaagaacttggcaggtctgcaggttctactaagggaaagcccaagatagaagtgtatgaaaagga

SEQ ID NO: 5020 - DNA, 444 bp, Oryza sativa
  Clone ID: uC-osflcyp122c05b1
cgcgtttttatcggatcgcctcgttcgttccctcccctgccctccccttcgcgcggttctttgccgcgccgcgggggttccgttccgtcgtggagcggctggccccggagccggaggccaaggggcgtggacggtggagggtaatccgtggtgttgagggagccttggtgaggtggtggttcgggctctcgcggcggcgtcttccatgggggagaggcggtccggctacagggacagagggggcggcgagcagggaaggtattggaggccaccgcgctctcacggaaatggaaatttctcagttccattgtgggaaaagaaattttgcactgatgcttgtgcaatcccatggggtaaactctgtgaaaccaagaaattgatgtcattgtacaaaaatgtggttgactgggatgattcagctgcattagaaactttcaacgatgc

SEQ ID NO: 5021 - DNA, 473 bp, Oryza sativa
  Clone ID: uC-osflcyp122c07b1
tttgttctttcttgcccttcagcttggagtgaaaccaggaatgaaggttttggacgtcggttgtggaataggcggaccactaagagaaattgccaaatttagcttggcttcagtcactggattgaacaacaatgagtaccagataactaggggaaaggagcttaatcgggtagcaggagttagtggaacttgcgactttgtgaaggcagacttcatgaagatgccgttttctgataacacttttgatgctgtctatgccattgaggcaacatgccacgcacctgatccggttggctgctataaggagatctatcgtgtattgaagcctggccagtgttttgctgtgtatgagtggtgtattactgatcactatgaaccgaacaatgcaacacacaagaggatcaaggatgaaatcgagctggcaatggcctgccagatattcgaagcactcaacaatgtcttcaagctgcaaa

SEQ ID NO: 5022 - DNA, 472 bp, Oryza sativa
  unsure (1)..(472): unsure at all n locations
  Clone ID: uC-osflcyp122c09b1
ggatatttgatctttttaagctgcggggttggggggaaatttggatcttgagggtacccgagcgcgaagcctggtttcttccggtgctccgttgctgcattgccttgttgcccccagatccgagctgccgtgcgagggaaactcggatctttgcttgcgctctccccaaatccgcccaaaatttgggctctggagcaagctgtgttcgtggtagccccccgtgcttcaaatccttttcagaaagttcatttgtttagttgggggttagatatggcagtgatgcggactactttatgaggtgtctcctgccatttttttttagagtagattcgtcagtaatggcggatcttgccatggagtagtagtagtagtagtagtagtagtagcagggggttccttcggtgatagcgaanggtgcttagccattaagcggcggcgatgtctctgaagagcattgtgcgggagctgaggg

SEQ ID NO: 5023 - DNA, 381 bp, Oryza sativa
  Clone ID: uC-osflcyp122c10b1
ttcatcagcagcagctgagcttgaagcagcagagcgaggtagacatggccgccgccaccatggccctctcgtccccggcgctggccggcaaggccgccgcgaaggtgttcggcgaggggcgcatcaccatgcgcaagtcggcggcgaagcccaagcccgccgcgtcggggagcccgtggtacggcgccgaccgcgtgctctacctcggcccgctctccggcgagccgccgagctacctgaccggcgagttccccggcgactacgggtgggacaccgcggggctctccgccgacccggagacgttcgccaagaaccgggagctggaggtgatccactccaggtgggcgatgctcggcgcgctgggctgcgtgttcccggagc

SEQ ID NO: 5024 - DNA, 450 bp, Oryza sativa
  Clone ID: uC-osflcyp122c12b1
tttattaatagaactgcaacgtaccatgaactaccggtgattaccagaaacagagggctgataaaacatcaccaggcggttcctcacaggggggttgtgcagtctacaagcaaattgtacataagaggaattgaaagagatgtatcatcatcaacaacagctccaaagccacaaccaactcttgccatctaggcagagtttcccttcagaacggcacttgcttatgcaaggaggaagtgtttcaggggaatcagggcttgttctctcaactgatgcaaagcctaggttaaaatggacccctgagctacatgagcgatttgtggaggcagtaaatcaacttggtggtccagaaaaagctaccccaaaaacaatcatgaggctcatgggcgtccctggattaacactgtatcatctcaagagtcatcttcagaaatacagactaagcaaaaa

SEQ ID NO: 5025 - DNA, 524 bp, Oryza sativa
  Clone ID: uC-osflcyp122d01b1
atttattggggtgcattcggatggatctttctcagtgcgttcattgggtactctgtgccaatgagcctctactactatggcctcaaggataccacatcatcctattccgttatctttcttaatataactcccctgttcaccttcatcctctcacttatgttcaggttggaggcattcaaacttagaagcatacctggagtactgaaaatagcgagcatactgctttccattggagggacaatgcttataagcctttacaaaggcaagtcattgcatctctgggattctatcatacaacaccaaaatgaacacaagtcagcaaccaatcagctaagaggaacaattctattggttggcagcagcttcacctttgcttgctggtttcttattcagtcaaagattctcaaagtgtatccatacaaatattggtcgtccatggtgacatgcttggttggagtatttcaaaccgcattggtcggaatcatattaaggagagacaagagtgcatgggagctaggatggaa

SEQ ID NO: 5026 - DNA, 388 bp, Oryza sativa
  unsure (1)..(388): unsure at all n locations
  Clone ID: uC-osflcyp122d04b1
cgtttctgttggaaagctgaaggtgtatgtctacgagctgccccccaagtacaacaagaacattgtggcgaaagattccagatgcctcagccacatgtttgccacagagatcttcatgcatcgcttcctgctgtcgagtgcgatccggacttcgaatccggacgaagccgattggttctacactccagtgtacaccacatgcgacctcacgccatggggccatcccctgaccaccaagtctccacgcatgatgagaagtgcgatcaagttcatctccaagtactggccctactggnncngtacggagggtgcggatcatttcttcgttgtgccacatgactttgcagcgtgcttctacttccaggaggcgaaggctattgagcgaggc

SEQ ID NO: 5027 - DNA, 434 bp, Oryza sativa
  unsure (1)..(434): unsure at all n locations
  Clone ID: uC-osflcyp122d06b1
gggtggcagagctttattgaaagccaagtgaagaggagggcagagttgagaagatggtgtacataatctatcgcagtgagaggggttgcctcctagccgccaccgcttcaccaaatcaaaagctctcgctgctcctcgagagggagttggtggagagagaaagagagagagagagatggcgtccccntcgtcctcctcatcgctgtgctcgaccttctgctctccgcgcgccgtctccctcggacgccgtctcgccttctcctcgcccaggaaagcattccgagtgagggcatcatccatggttgacaagttctcgaagaatgacatcatcgtgtccccttccattctttctgcacacttttccaagcttggcgagcaggtaaaagctgtggaagcggcaggatgtgactggattcatgttgatgtcatggatg

SEQ ID NO: 5028 - DNA, 425 bp, Oryza sativa
  Clone ID: uC-osflcyp122d07b1
acggtccaaatgcatcatgaatttagtatttgaaaacattgatgataagactgtggtatgagtatactcttttactttgttacagtgggatactgctggacaagaacgtttcaggacaattacaagcagctattaccggggagctcatggaattattattgtatatgatgtgacagaccaagaaagcttcaacaatgtgaagcagtggttgaatgaaattgatcgttatgcaagtgacaatgttaacaagctcctcgttgggaacaagagcgacctaactgccaacaaagttgtgtcatctgaaacagctaaggcgtttgctgatgagatgggcatcccattcatggagacaagtgccaagaacgccactaatgtggagcaggcctttatggctatggctgcatccatcaaggacaggatggcga

SEQ ID NO: 5029 - DNA, 455 bp, Oryza sativa
  Clone ID: uC-osflcyp122d09b1
gagtatattgattgctgagggcgcaagggagcggagtgtacccggtgtgatgccgactggatgcttccctgtctacttgaacatgctcgatgagccggccgatgggtatggcccccagagcggctgcgtccgtcggtacaacacattctcatgggtgcacaatgcacatctcaagcgcatgcttgagaagctccggcccaagcaccccaatgtgaggatcatatatggcgattactacacgcctgttatccagttcatgcttcagcccgagaagtttggattttacaagcagctacctagggcatgctgcggggctcctgggtccgttgcgaaggccgcttacaacttcaatgtcacagccaaatgtggtgaggctggtgcaaccgcgtgtgatgatccatcaacccattggagctgggatggcattcacctgacagaggcggcttacggtcaca

SEQ ID NO: 5030 - DNA, 498 bp, Oryza sativa
  unsure (1)..(498): unsure at all n locations
  Clone ID: uC-osflcyp122d10b1
ttcttattcttgcacacgcgcagctcgagccatgggcggagtgagcaccagcgtggggggcctcaagcccgccgcgggggtgccgcagtcggccgcctcgccggtgccgaagcgcgtgcacgtcgctgtgccgcccaaggaggagcagggcggtggcaggcgcgccgcgctgctgggtctcgccgccgtgttcgccgccaccgccgccgggcaggccaaggccggcgtgttcgacgagtacctcgagaagagcaaggccaacaaggagctgaacgacaagaagaggctggcgactagcggcgccaacttcgcgagggcgtacaccgtcgagttcggcagctgccagttcccctacaacttcaccggctgccaggacctcgccaagcagaagaaagtcccattcatctcagatgatctcnagatcgagtgcgaggggaaggagaagtacaagtgcggatccaacgtcttctggaaatggtgatgatctgatgatgatca

SEQ ID NO: 5031 - DNA, 441 bp, Oryza sativa
  unsure (1)..(441): unsure at all n locations
  Clone ID: uC-osflcyp122d11b1
ctcactctctctctctctctcttttcctcgggaggtggcccgccgcctcggctgggccgatctccatcgaactcggcgagcagccgaggcggacctgctgcctccttccgccgcaagcatcctcgccgccggatcataatattgctgattttgtatgatttgattcttgttgggtgagcccaagatgtctggaaatgacgataagtctcaagctgcagctgagagaataaaagcacaggccttatctgctgccaagggattgagcagaactcaagccgagcgagctgctgcagccgctgcccgcaatgtcaatgcttatgggcagaaagaagagggaccttcncgctcgcaggagagggaggaggccaagagacagatgtatctgatgagtacagagaangctgggatactgggagtgaaaccaaaagctgcgcaaacttc

SEQ ID NO: 5032 - DNA, 501 bp, Oryza sativa
  Clone ID: uC-osflcyp122e01b1
ctatgttgtgttgtctccatggaaggatgtattggatgccgcaagctgggaagacttgattgtgcgttatatcgtaccaaaattgaaaatggcacttcaagaatttcagatcaaccctgcaaaccagaaactcgaccagttcaactgggtaatgatttgggcttctgcaattccagtacaccatatggtccatatgttggaagtagatttcttcagcaagtggcagcaggtcctgtaccattggctgtgttcaccaaatcctgatttcaatgaaatcatgaactggtacaagggctggaagggccttttcccaccagaattgcttgccaatgagcgcatacggatgcttttaacggctggccttgacatgatgaaccgagctgctgaaggccttgaggtggtgcaacctggcgctagggaaaatgtgggctacttgagagcaacagagaggaggcaatttgatgcagcacagcaggcatcacaatacacgactcaccatgc

SEQ ID NO: 5033 - DNA, 421 bp, Oryza sativa
  Clone ID: uC-osflcyp122e02b1
gtaatggtcatctgagggcctatgaatggctcggggcctccttcatttctcatagcatttgtgtagcgcgcgcaaatccatcatcgcatcttcatatctgaagaaatgaaggtgaccactcagctcaagcccatggccttctcgtcgacgtcgccggcgccgtcgcggctgccgcggagcgcgagcggcaaggcgcccacctcgccgccgtccagctccaacgcctcgcgccgccaccaccagcagccgacgagggcctcggcgacgacgcccgccaccccggcgccgacgtgccaccacctcaggtcgctgtccatcaactgcatgacgatcaggaccgacgacgactcgccgccgacggccgtcacccacaaggacaaggcggcgaccgccaaaccgctgtcctactacttgtcgatgc

SEQ ID NO: 5034 - DNA, 499 bp, Oryza sativa
  unsure (1)..(499): unsure at all n locations
  Clone ID: uC-osflcyp122e04b1
aggttatcagactcaatctcttttggcgtctgatgtagattctcaatcagatcaatttataagttcttcggtgaaatctccaatggatggtaacacatctattcctaatgaggtgcctgctaggcagaacagtcttggactgtggaagtacttggatgatgacagtcctggtttaggagataatccaagttcagttccacagagcttctgtccagtgaccaatgaaagactattagaaatcaatgagatctccccagaatgggcttactctacagagactaccaaggtcgtggtgattgggaatttctatgagcaatacaagcatttggctgggtctgctatgtttggtgtctttggtgaccaatgtgttgccggagatattgttcaaactggtgtttaccgtttcatggttggaccacatacacctggaaaagtggatttttatttgactttggatgggaaaacgccaatcagtgagattngcagnntcacgtatcat

SEQ ID NO: 5035 - DNA, 487 bp, Oryza sativa
  unsure (1)..(487): unsure at all n locations
  Clone ID: uC-osflcyp122e07b1
gtgtgaacgaattgcaatggattgcattgctaaatgccaacgatcttcttgcaagatgaccagccaaattgctagctgggatacgaggtttgagttgggtacaaaagcatcattgttgttgccattttctcctattgttgttgctgcggatgaaaatgagcaaatacgagtatggaactatgatgatgcgctgccagtgaatacttttgaaaaccacaagttatctgacagaggcctatctaaacttttgctgatcaatgagcttgatgatagcttgttgttagttggctcaagtgatggaaatgtccgcatatggagaaactatactcaaaagggaggacaaaaacttgtaactgctttctcatcagttcaaggctatcgaagtgctggtcgcagtattgtatttgattggcagcaacagtcgggttatctgtatgcatctggtgacatgtcctctatccttgnatgggatcttgacaaggaacaa

SEQ ID NO: 5036 - DNA, 250 bp, Oryza sativa
  Clone ID: uC-osflcyp122e08b1
ttgtactttgcggtaccataccgctgttattccactggctatattcttgagaaaacctgaaacttacttgggagctctagtttaatgtattaaaagatcgatttgtagcttaaggaaggtggcacttccagtcctttttgtttcttttgtggtggttcatgcaaagttttttgggttaggctggatttgctgctcctgagcaaacggatttaatctcattcgtggtgaataaaaaacacggcattgtagc

SEQ ID NO: 5037 - DNA, 443 bp, Oryza sativa
  Clone ID: uC-osflcyp122e09b1
tcttatctcatcccatcatcggtcatattcgcctcagcttcatgttgctgagctataggcgaatggttgacaagagtactagttagcttaataatatagctttgcaaaagttgaggtaaggggttgtgagaagaagcagcttgatttgctactggctttgtgctgctgtgtggttgttctggtgtggatcgatcagagatggggaggggaagggttgagctgaagcgcatcgagaacaagatcaaccggcaggtcaccttctccaagcgccgcaacggcctcctcaagaaggcgtacgagctctccgtgctctgcgacgcggaggtggcgctcatcatcttctccagccgcggcaagctgtacgaattcggtagcgccggaataaacaagacattggaaaagtacaatagttgctgttacaacgcttaaggttcaaatagtgc

SEQ ID NO: 5038 - DNA, 391 bp, Oryza sativa
  unsure (1)..(391): unsure at all n locations
  Clone ID: uC-osflcyp122e11b1
ttttatcgcagagaaaaaaaaatctcccctcgaagcgaagcgtggaatcgccttgtgaagatgcagatctttgtgaagaccctcaccggcaagaccatcaccctcgaggatgagtcctcggacaccattgacaatgtcaaggccaagatccaggacaaggagggcatccccccggaccagcagcgtctcatctttgctggcaagcagcttgaggatggccgcaccctggccgactacaacatccagaaggagtccaccctccaccttgtgctcangctcaggggaggcatgcaaatcttcgtcaagaccttgactggcaagaccatcacccttgaggtcgagtcgtctgacaccattgacaatgtcaagggcaatatccaggacaaggagg

SEQ ID NO: 5039 - DNA, 368 bp, Oryza sativa
  unsure (1)..(368): unsure at all n locations
  Clone ID: uC-osflcyp122f01b1
aattaattacaatttccttttggggtggttcatcggtggatcacttctttgtttggggcgttttgttggggattcgattttcgggttaagattttctacacgatggccttgaacttggctcagagcgccgcggcggcaccgtgcttcgcgaccgccggtgatgcgcggcgagctgcttcggtggtcgccatgccgtcgtcgtcgtcgtctgccactactagactgaggatgaagaggcaggcggcgtgcgagccggtggcgtgccgggcggtggccaagcacgtggcggcggctgcggttagcaacatgaggaacggcgtgccggtgttcgtgatgatgccgctggacacngtgagcaagtgcgggag

SEQ ID NO: 5040 - DNA, 471 bp, Oryza sativa
  unsure (1)..(471): unsure at all n locations
  Clone ID: uC-osflcyp122f02b1
agatagttggcagtgcaggtgtcgctggccatggggaggaggagcagcancagagcgtgcgcggccatggcgacngccgccgtctttgcgctgctggccgcgacggcgacggcgtcggggctcgtacgggtggagcacccggccaagagcgacgggtcgctgagcctgctcgtcgtcggcgactggggccggaagggcacgtacaaccaatccagggtcgccgagcagatggggaaggttggggagaagctaaatatagacttcgtcatatccaccggtgacaatttctacgaggatggactcactggcgtcgatgaccaggcgtttgaggaatcgtttaccgatatctacacggcaaagagcttgcagaagccatggtacctggtgctgggaaatcatgactacaggggtgatgtgctagcacagcttagcccagtcttgcgaaagatcgaccagcgattcatttgcatg

SEQ ID NO: 5041 - DNA, 514 bp, Oryza sativa
  unsure (1)..(514): unsure at all n locations
  Clone ID: uC-osflcyp122f03b1
agggatactttgctatgatttcttaaacttggagaagttttttggagataaagcagtcaaagaagtaattggagctggcgaccttgaatttgtctcatgcagcactactgattagtcaagcaatgctgacagactggatgagaaacttggaagttggcatcccagctctacttgaggatgggatcaatgtgcttatatatgctggagagtatgatcttatatgcaattggcttggaaactcgaggtgggtccactcgatggaatggtctggccagaaagactttgtatcatctcatgaatcgccatttgtagtagatggtgccgaagctggtgttttgaagagccacgggccactcagcttcctcaaggtccacaatgctggtcacatggttccaatggaccaacccaaagcttccctggaaatgctgaggagatttactcaagggaaactcaaggaggaatggcttgccgagcttnctgagcaaccgatgtatgctgcgatgtgataaaaata

SEQ ID NO: 5042 - DNA, 518 bp, Oryza sativa
  unsure (1)..(518): unsure at all n locations
  Clone ID: uC-osflcyp122f05b1
gtgttaaccacaggtctcccggatactacgatggggggtattggaccatgtggaagctgcccatgttcggctgcaccgatgccacccaggtgctcaaggagctcgaggaggccaagaaggcctaccccgatgcctttgtccgtatcatcggcttcgacaacgtcaggcaggtgcagttgattagcttcatcgcctacaagcccccaggttgcgaggagtctggtggcaactaagctaagatcaagcatcgcgctggtggattgctgcctataataatagtatgcagctttgttttgggctatgttgatgatatatcaatatataatatgctatatatttttattttacaatttggttatgtaccatctcaatggcctctgctcttaacacatatgtaataatctcttccctccctctccgaccggttntattgtaagagtactacaattatcgttgggtgaggatatgtgaaaacaaagctccggctatatacacacaagatatgtatctagagcata

SEQ ID NO: 5043 - DNA, 516 bp, Oryza sativa
  unsure (1)..(516): unsure at all n locations
  Clone ID: uC-osflcyp122f06b1
ggttgcgtgggaacgaaacgaaacggagtagattcccccaaggccccaacctcctcctcgccttcccacctgtccacctccccccctccgccgccgccgccgccttcttcccgggggcggggcggggagaggaggcgcgggggtgcgggggtttagtatctcctctcgccggtggccgcgcggggaggtgacggcctgagattctcgccgcgtccgcccgtcgttctggtggtctcctcctccgccgccgccgccgcccgcgtgttgggggagagcggtttggcgtgaatcgggccggggtgagcggacgccgccgccgttggtggctgcttcatggagtgcttcctgctcagcctgaacccgttccggttcaagccgatttggccgccgaggaccgcgcccaaatctccctgaaaccctagggtttcccctcctccctgcccggngatttcgagaaaaaggaagtcccgggcggcgcttacccccaacccctcgttttttttttgggttcatctc

SEQ ID NO: 5044 - DNA, 273 bp, Oryza sativa
  Clone ID: uC-osflcyp122f07b1
cgttactcccccaactcctctcctcagatctggcctcgcctccaaaccctagctgcaccctcctcctccccctccgatccggcagcggtggctcccgcggcggcgatgcggggttccattgcgacctaccgggagagcctctcccgcctcgccggcgaggtcgacgacgccgcggccgacgaggcggagccccaggcctccgccgcgtcgtcgcccccagcgcggggcgcagccgatcgctcccacacgacgccgccctcgcgggcggggggg

SEQ ID NO: 5045 - DNA, 110 bp, Oryza sativa
  Clone ID: uC-osflcyp122f08b1
ttacatagtctgcagcagtgcatcttgtatcttggtacctatagcctatagttggcttctgaatttaacatcggaatccagggaattgaactgacgacaaacttttctgc

SEQ ID NO: 5046 - DNA, 518 bp, Oryza sativa
  Clone ID: uC-osflcyp122g01b1
ggctcttggagtgactgccaatgatttgtatcagcggtggtcaagtctacatatgagggtgaagaatttgtgaaactgttaaatggtagcagcgttcctcacacacgccatgttgtgggatcaaattactgcttcatgaatgtctttgaggacagaattcctggacgtgccatcatcatatctgttatagataatcttgtgaagggagcatcaggtcaggctgttcagaaccttaatctgatgatgggtctgccagagaacactgggctgcaatatcaacccctatttccttgatcctctatgtctgtgttccgtatgttctttgtcgggatgatactttggagttcagctacccatttccctctgtttactgttgagacaaggtgctcaacatcagaatgtaaccaagacaaattttctcaaagagtagcttggtttgtgctgttgtagtttttatagagataaatgacaatttagtagtttaatgagaatattagctcggtggatttgggcattga

SEQ ID NO: 5047 - DNA, 497 bp, Oryza sativa
  Clone ID: uC-osflcyp122g02b1
cggtcttttgggcgtttgcactgacatgatcaccatttaccagggaaactggaggtcactgaaattttcaacttttcacaagatgatttgctgactgaagacatgatggttcttgatacacatggggaagtctttgtttggatgggtcagtgtgtggatgctaaagagaagcagaaggcatttgaaattggccagaaatatgcagaacatgcggcggccttcgaatctctttctcctgatgtgcctctgtacaaagtcgttgaagggaatgaaccatgcttcttcagaacttacttctcctgggataacacaagatctgtgattcatggaaattcatttcagaagaagctttcacttcttttcggaatgcgctcagagagtggatctaagagttcaggtgatggtggaccaactcagagggcatcagcattggctgctctttcatctgcattcaacccatctttccaaaagaataaggtaatgataggcctaaaagc

SEQ ID NO: 5048 - DNA, 484 bp, Oryza sativa
  Clone ID: uC-osflcyp122g04b1
gcctcattttattgtcacttccatctcattctcctgattgtcatcactagcttctagctagcttaattaattaattagccatggcggaggagaagcaccaccaccacctgttccaccacaagaaggacgacgagccggccaccggagtagactcctacggcgagggcgtctacacgtcggagacggtgaccaccgaggtggtcgccggcggccaggacgagtacgagaggtacaagaaggaggagaagcagcacaagcacaagcagcacctcggcgaggccggcgccctcgccgccggcgccttcgccctgtatgagaagcacgaggcgaagaaggacccggagaacgcgcacaggcacaagatcacggaggagatcgcggccacggcggcggtcggcgccggcggctacgccttccacgagcaccacgagaagaagaagggaccacagagcgccgaggagtccaccggcgagaagaagcacca

SEQ ID NO: 5049 - DNA, 513 bp, Oryza sativa
  Clone ID: uC-osflcyp122g05b1
tgattgtcggggagttggtgatatcgatgcatccactgattacaatatggaagatgccttactgaatgatgaaactcgccagcctctctctagaaaagttccccttccttcatccagaataaatccctacagaatggtcattgttctgcgtttggttgttctaagcattttccttcactaccgtattacgaatcctgtgcgcaatgcgtatccgctctggcttttatctgttatatgtgagatttggtttgctttgtcctggatattggatcagttcccgaagtggtttccaatcaaccgtgaaacctaccttgataggctggcattgaggtatgacagagaaggtgagccatctcagttggctgctgttgacatttttgtcagtacagtcgaccccatgaaggaacctcctcttgttactgccaataccgtgctgtccattcttgctgttgattacccagtggacaaggtctcttgctatgtatctgacgatggtgctgcaatgctgacttt

SEQ ID NO: 5050 - DNA, 455 bp, Oryza sativa
  Clone ID: uC-osflcyp122g06b1
ctgttggcggagatcgcggcgatccgcgacgaggtcgaccggtacccgtacgtcgccatggacacggagttcccgggcatcgtgtgccgccccgtcggcaacttccgtaccaccgacgagttcaactacgccaacctcgaggccaacgtcaacatgctcaagctcatccagctcggcctcaccctctccgacgagggcggcgacctcccgcggcgggggacggggggcaggcgctgcatctggcagttcaacttccgcgggttcgacccccggaccgacccgtccaacgccgactccatccagatgctccgcacctgcggcatcgacttcgatcggttcgccgctgagggggccgacccgatccgcttcgccgagctgctcatgtcgtcgggcgtcgtgctcaacgccgacgtgcagtggatcaccttccacagcgggtacgacttcgggtacct

SEQ ID NO: 5051 - DNA, 506 bp, Oryza sativa
  Clone ID: uC-osflcyp122g07b1
tgccttcaagacgagtcgcggctgaacataacaggggaggggcggcgatctccctctccatctccatctccatctccatctggcgagcagagcaggggaggggaggggatcctcacctggaaagtgtgggtaaagcgcagggcaacaagaaatggcagcattcctgaggtcaaaatgttcgtcagttggacgtaccttgatgggaggccttgggaacaatctatttggagccgttaactcatctgttgaaacggtgtcaagaccatctcattgagatcctatctttcagcaaatcagaacattcatccagatgagaacaaacctaaaggtggcagacaactctggtgccaagcgcgttatgtgcatccagtccttgagggggaagaaaggagcgaggctcggggacactataattggatctgtcaaggaagcacagcctcgtggtaaggtgaagaaaggagatgtggtctatggagtggatgtccgtgctgctatgaagcgaggac

SEQ ID NO: 5052 - DNA, 495 bp, Oryza sativa
  Clone ID: uC-osflcyp122g10b1
cgtctacttccagctagcctgagctctagcttagctctagcttagcctgaagaagctaagagaggaagcaacaatggagattgagagagagagcagtgagagagggagcatcagctggagagctagtgcggcacatgatcaagatgccaagaagctcgacgcagatgatcagctgctaatgaaggagcctgcatggaaaaggttccttgcccatgttggtcctggattcatggtgtctttagcctacttggatcctggcaatttggaaaccgatctgcaagccggagccaaccacagatatgagctgctctgggtgattctgattggactcatcttcgcacttatcatacagtcgctagcagctaatcttggagtggttacagggaggcatctggctgagatctgcagagtgagtaccccaagttcgtcaagattttcctatggctgctggagagttggccgtcatcgctgcagatatcccagaagtatagggac

SEQ ID NO: 5053 - DNA, 519 bp, Oryza sativa
  unsure (1)..(519): unsure at all n locations
  Clone ID: uC-osflcyp122g11b1
gttctgagacgtgtaaaaaaggagcatcttaaaagagcttacaaaattgaagactgggttgatgataatgattttcttgtccaactgagcaagaccactggaaagctactcaggggtggggagcctgatcttacaacaacggccaagatggtgcttcatgactggcagaggggcaagattcccttttttgtgcctccaccacagcaaggtgaagatagtccatctgaaacagctgaacctgtggataaatccgatgaggaaggggtgagtagtgacaggactgctgccgccatgaaagcgatagcgggaataatctcatcacagcagcagatgaatgttccttgccaaaaggaatttggtgtaactaatgaagatagtgaagtcgcggagcaatcagagtgatctacaaaaggctaggaaccctgcatgataaagaacagggcacaattttgccaaatacctagagattttatgaagattggtgtctaacangaatgttacgatgaatggtacgatcgt

SEQ ID NO: 5054 - DNA, 437 bp, Oryza sativa
  Clone ID: uC-osflcyp122h02b1
cctatgtttccggtgcgctactggccaccccaggggtgggatgtcctgctcattcaggtggcaggtcattgctcagcttgagctgtggaaggagaagagcactggcaagtacgagaagaaggtgtacgttcttcccaagcacctcgacgagaaggtggccgccctccacttgggcaagcttggtgccaggctgaccaagctctccaagtcgcaggctgactacatcaacgttccagttgagggtccctacaagcccgcgcactaccggtactaggctgcccaacacgactagcggctgtggcatgagaagtgtcaacttgaagttcgccatgacgactctggagtatcctgctttggtttcatcatcttatatgccgtcacttaagaggatttgttgtggggtttatggtttgacgactgtgaaggggaggaatggg

SEQ ID NO: 5055 - DNA, 494 bp, Oryza sativa
  unsure (1)..(494): unsure at all n locations
  Clone ID: uC-osflcyp122h03b1
ctttcttggtttcttgatctgtagcttattagcgggcgggtgcggcggagcaatcaggtgcgggttcatcccgccgtcggccgctgcggcggcggcggctgcggcggccaagaagcagcagggcaggagggtcacggccgacgtgctgtggccggggatgctgcggaaggggaaggcggcggcggcggaggaggactttgaggccgacttccgcgagttcgagcgtggcatgagcgacgacnaggcggaggggggcggcggcgaggaggaggaggacgacgacnacgtggtcgtggtggtccccccgccggcggcggcgaggttcgtcgtccgtgccgcggccaaggcggcgcccccaactgcagatgggatgttgactacaaagcttgtccaacatgatggacctactgctagatcagcaaagcacaagaggaagaatcagtacagggggatcccgcagcgtccctggggcaaatgggcagctgaaatccgag

SEQ ID NO: 5056 - DNA, 523 bp, Oryza sativa
  Clone ID: uC-osflcyp122h04b1
cgattacgttcctagatggggaatgacatggatgcggatcagaaatggtccagagagcctatacagcacagaagtccagaaagtgaactatggagatcagcagcttaatgtgcgacgaaaggcagggaagttaactcaagtgatctttgacagtgggagttcatatacgtatttaccacatgaggactacgcaaacctgattgcttcacttaaaagtctctctccaagccttttacaagatgagtcggatcgaacactaccgttctgcatgaaacccgattttccagtgaggtctatggatgatgtgaaacacctgttcaaacccttgagtctggtgttcaaaaaaagattgttcatcttgccaaggacattcggtatccctcctgaggactacttaatcatcagtgataagaacaatatctgcctaggagtattggatggaacagagattggtcatgactcatcgatagtaatcggagatgtttcccttcgaggaaagctagttgtgtataacaatgatgag

SEQ ID NO: 5057 - DNA, 548 bp, Oryza sativa
  Clone ID: uC-osflcyp122h06b1
gtgttttgttgtaaagttgcgagagagagagagggggatcatttagtttgttgagtggaagcagatcaggaagatgctggagaagctgtgggacgacgtggtggccggtcctcgaccggagaccggcctcgagaagctccgcaaggccgctacaacccgcccccttgtcatcaacaaagatggcgactgcgaggcgagcggagtggcgtacaagcggacgcagtcgatgccgacgaccccgacgacgccggtgacgccgtcgtcttcgtccccgacgacggcgacgacgacgacgccgcggggcagcaacgtgtggaggagcgtgttccacccggggagcaacctcgccaccaagagcctcggcgccaacctcttcgaccgcccccagcccaactcccccaccgtctacgactggctgtacagcgacgagaccaggagcagccatcgctgaactgaataatcccattgatcggaggctggtcgatctctctgtcacgccatgtttgcttggcccttgtggtatctaatacgtaattaattatctagta

SEQ ID NO: 5058 - DNA, 508 bp, Oryza sativa
  Clone ID: uC-osflcyp122h09b1
tcatgaaccaactatggcgggcgacgggcttgcgcgggatcgcggtggtcggcgccggcatcttcgcgcgcacccagtacatcccaaggctccgcgagatcgcccacctcgtcctcctcaagaccatctggagccgcaccaaggaatccgcggaggccgccgcggagctcgcccgggacttcgcgcccgagatccagcccagatggggcgacgcgggcctggaggagattatgggagacgcttccatctccgccgtcgccgtcgttcttgctggccaagtgcaggttgacctctccttaaaaatgctcaaggcaggaaagcatgtgatacaagagaaacctgcttctggatcaacaatggaagcagaaacagcattgtcagtttacaattcatttccaaaccaattcccatacaaaccaatttgggctctggcagaaaactacagatttgaacctgcatttgtggagtcaaggaagttgatgagtgatatggtgatatgatgaacatc

SEQ ID NO: 5059 - DNA, 486 bp, Oryza sativa
  Clone ID: uC-osflcyp122h10b1
ttgtcgcgtgggctcgcctcgcctcgctgccggtagcctaggcgtgcgctaccagccagcacaggtggtgatctcatcatcccccgcccgcccgcgcgcgcgttcgcgctcccccgcccccaccaccccagatcccgaggccccgctccgccgcccgcgggatcgcgggccccgacacaagattttgcttaatgctactttatgcgtgtgtggataatggagtaatcactgctctgtgtatctgagctcacaccatgggtagcagtggcgcagacgcaccgactaagacaagcaaggcatctgcacctcaggagcaacagccacctgctagttcaagcactgcaacaccggctgtttacccagattgggccaactttcagggatatcctccaattccaccacatggcttctttgcatcacctgtggcgtccagcccacagggtcatccttacatgtggggagctcagcctatgataccaccatatg

SEQ ID NO: 5060 - DNA, 436 bp, Oryza sativa
  unsure (1)..(436): unsure at all n locations
  Clone ID: uC-osflcyp122h11b1
gctagctcggctcagctcagctcacctcgcgcgcggatcctaatgcaccaaccgggcataatgcancgggctctcgccgtcgtcgccctcctcgccgccgcagccgccatcgccgccgcccagggggagtcgccggagttgctgccgttcgcggtgggggcggcgccggaggggtgcgacgtcggggaaggggagtgggtgttcgacgaggcggcgcggccgtggtacgccgaggaggagtgcccctacatccagcccgacctcacctgccaggctcacggccgccccgacgccgcctaccagcgctggcgctggcagccgcgcgactgctccctcccaagcttcaacgcgacggggatgctggagatgctgcgggggaagcggatgctgttcgtcggngactcgctgctccgggggcagtacacgtcgctgctct

SEQ ID NO: 5061 - DNA, 409 bp, Oryza sativa
  Clone ID: uC-osflcyp123a01b1
ggcttacttgtcgccgcatagcggaaggatcttgggggggttctttttcaactgggggaggaatgctacagctaaaaaggcggctaggccgtctgctcccacgacggacaggccgctgtggttccccggctcggtggcgccggactacctggacgggtcgctcgtcagcgactacagcttcaacccgttcggcctcggtaagccggccgagtacctgcaattcgagctggactcgctggaccagaacctgtccaagaacaacgccagcaagatcggcacccggttcgagaccagccaggtgaagtccaccccgttccagccctacaccgaggtgttcggtctccagcgcttccgcgagtgcgagctcatccacgggcaatgggccatgctcgccaccctcggcgccctc

SEQ ID NO: 5062 - DNA, 297 bp, Oryza sativa
  unsure (1)..(297): unsure at all n locations
  Clone ID: uC-osflcyp123a05b1
ctgtatctttcatgggcctggtaatcccacccaggatcggttctatcataaccagggggggtcnactactctaagggtgcacacaggattatgcggatttttacatggggccaggccatgtggaacactgtgctcttggccatattctggtgtacaagaacccatatgcatacgggaggcacctctgcatgcagtccattgctcactggaacgattttcgttccaaagtcgccgagctctaccccgagtacaaagtgccaaaattacccaagggaacgcaccctgggctggtgagag

SEQ ID NO: 5063 - DNA, 212 bp, Oryza sativa
  Clone ID: uC-osflcyp123a06b1
tttttatttttaaaacacacacaaactccccactgggggggcttatatattatatgggggggctacacaccccataacaatttctatactccatgacttattaccacaggattgcacacttgatgacaacggcagaactcactcaacctgtccatcacggaacttaatggcatctcagcatctcctactatcacctcctgacctacttggat

SEQ ID NO: 5064 - DNA, 404 bp, Oryza sativa
  Clone ID: uC-osflcyp123a07b1
tggatgccgctgagatgaacaagaggtcctgggagggctcgtttgaactcgagggggggaaggccaaacgtgagagaggtatcaccatcgatattgccctgtggaagttcgagaccaccaagtactactgcacggtcatcgatgcccctggtcaccgggacttcatcaagaacatgatcacgggtacctcccaggctgactgggccgtgctcatcattgactccaccactggtggttttgaggctggtatctccaaggatggccagacccgtgagcacgctcttcttgctttcactcttggtgtgaagcagatgatctgctgctgcaacaagatggatgccaccactcccaaggactccaaggcccgttacgatgaaatcgtgaaggaagtctcatcctacctg

SEQ ID NO: 5065 - DNA, 371 bp, Oryza sativa
  Clone ID: uC-osflcyp123a10b1
tgctttcaccatggcgctctcctcccccgtggggggcctcactggaccttcggggggctccacgctcttcggcgaggcgcggatcaccatgcgcaagaccgccgggaagcccaagccggcggcatcgtcggggagcccgtggtacggggccgaccgcgtcctctacctcgggccggtctccggcgaggccgccagctacctcaccggcgagttcccgggcgactaccggtgggacaccggggggctctacagcgacccggagacgttcgccaagaaccgggagctggaggtgatccactcccggtgggcgatgctgggcgcgctcggctgcgtcttcccggagctcctcgcccggaacggcgtcaagttcg

SEQ ID NO: 5066 - DNA, 463 bp, Oryza sativa
  unsure (1)..(463): unsure at all n locations
  Clone ID: uC-osflcyp123a12b1
tcttctttataaaggtctaacagatgaangtatggcggatcacattctttctggggggggcaagaacctctacagcatatactccaagatgataaagaagaacttaacgatggatgatgttcatgacattcatggtctacgtcttgtggttgatacagagcaagattgttaccaagctcttgacattgtccataatctctggccccgagttgctggacgatttaaggactatatcctgcatccaaaattgaatgggtatcggtcattgcacactgtcatcatgtgtgagggcatacacccatttgaagttcagatccnaacaaaagaaatgcatctacaagcagagtatggatttgctgcacactggagatacaaggaaggtggttgcaagcactcttttgtactccaaatggtggaatgggcaagatgggtgctcacatggcaatgcgaatcaatgagcaaa

SEQ ID NO: 5067 - DNA, 319 bp, Oryza sativa
  Clone ID: uC-osflcyp123b02b1
tggttactggtctcctttggctgatccaaaatccagggggatcatatgtggcttgacacttgatacaagtgagaagcacttggcgcttctttatctagcaacaattcaaggcattgcttatggtactcgtcatattgtggagcattgcaatgctcatgggcacaagatcgatactcttcttgcttggggcggacttgcgaagaattccttgtatatccaagagcacgcagatataactggatgtccaataatacttcctagagagaatgagtctgtgcttttaggagctgctgtcctgggagctgttgttgcaaagaag

SEQ ID NO: 5068 - DNA, 480 bp, Oryza sativa
  Clone ID: uC-osflcyp123b03b1
ctctctctttcgcctcctcttccgccgcgagacaggaagagctgcatctcacaggggggcctgcgcgtcggcggccatgggagacagccagtactccttctccctcaccaccttcagcccgtcggggaagctggtgcagatcgagcacgcgctcaccgcggtcggatccggccagacgtccctcgggatcaaagctgctaatggtgtagttatcgccactgagaagaaattgccttctattttagtcgatgaaacatctgtgcaaaagattcagtcattgactccgaacattggagttgtctacagtgggatgggtcccgatttccgtgttcttgtgagaaaaagtcggaaacaagcacagcagtattatcggttgtacaaggaaactatccctggtactcagcttgtccgagaaactgctgctggtatgcaggagttcacacagtctggtggtgtaagaccatttgggggtttattatt

SEQ ID NO: 5069 - DNA, 289 bp, Oryza sativa
  Clone ID: uC-osflcyp123b05b1
cgctgcgttctcaaaaccgcgggaatcaatcaatggcgggtcgcgtcgcgccacgagagagttttcccccaagaaaagttggagtgagggatgagtgctatggcgatgtcgtcgctgaacccgaacgcggcgccgttcatcccggcagcgttcaggagggtggaggacttctcgccggagtggtgggagctcgtcaagaccacggcgtggatgcgcgaccactggttcaggcagcaccagatgttcgaggacactggggttgaggaggaccaccaccgacaggtgttcg

SEQ ID NO: 5070 - DNA, 428 bp, Oryza sativa
  unsure (1)..(428): unsure at all n locations
  Clone ID: uC-osflcyp123b06b1
gggtattctgatgggtccccggaagaagatcatgggtgggttggaatctacagcgcggggagggctggcgtgtaatgtacaaaggctgggcgattaagaattgcatgctcctctgcttgcttggtaaacccaaagggtccgcatgtcctggatacggcgcaagaacaaaagcgctgggcgtcttgtaatgcgtcttctgactagttgagcattcccgattctcagccagtttaggatgttttagaggctggatgaaggctgacaatgtagtattattagtctcctgttaatttttatctggtcggctcgcttggctcgtcnttaaaagacgactacaagaacaactgatcacacgtcatacctaaattatacatatgattaatttgagatcaaagaatttacagagttaatacagccggggcgacctc

SEQ ID NO: 5071 - DNA, 320 bp, Oryza sativa
  Clone ID: uC-osflcyp123b09b1
tacttgctaggccggccatggagactgtgggggtggtctgtttcaccctcgggggggggacacactcgccagcgtgctgcgccgccatgtccttctcgcagtcctacaggcccaaggccgctagaccgtcgagcacgttctacagcgagtcgctgcgggttaacacggcgaggtctctgccgtctgggaggctgttcaaggcggcgagccgggcggtgctcagcacccggtgcgagatcggggacagcctggaggagttcctgaccaaggcgactccggacaagaacctcatcatgctgctcatctgcatgggggaggct

SEQ ID NO: 5072 - DNA, 382 bp, Oryza sativa
  Clone ID: uC-osflcyp123b10b1
tacttcctgaagtctgttatcaagaagaagtgggggcaggatgccaccaatgtgggggatgaaggtggttttgctcctaacattcaggaaaacaaggagggtcttgagctcttgaagactgcaattgaaaaggctggatacactggcaaggttgtcattggaatggatgttgctgcttcggaattctacaatgacaaggacaaaacctatgaccttaacttcaaggaggagaacaatgatggttcacaaaagatatctggtgatagcctgaagaatgtatacaagtcatttgtcagtgaataccccattgtctcgattgaggatccgtttgaccaggatgactgggaacactatgctaagatgaccgctgaaattggagagc

SEQ ID NO: 5073 - DNA, 377 bp, Oryza sativa
  Clone ID: uC-osflcyp123b11b1
tcagtgaggggccgtgggccacgccagccctaccggggaggtggtcgccgcggtggctatagtgatgggcagagtggagacgactatggacgtccgcgcagggcgtatgagcgccacagcggcactggccgtggctatgagttgaagcatgaggggtctggccgcggcaattggggaactgtcaccgatgaaggccttgcacaggaagttgcggaggctgttaacactgaggaggctcctgcaactgcataggatgagaagaaacctgaagatgtgccacaggctgaggtcgacaaggacaaggagagtccagagaatgaagaagaagaaaaagaacctgaggataaggagatgactttggaggaatatgaaaaagg

SEQ ID NO: 5074 - DNA, 562 bp, Oryza sativa
  Clone ID: uC-osflcyp123b12b1
tcttcttcgaaggtgcagtgctacaagaagtgggggggttaatgtttacaccggggggggaaacctgggcccaagcccaagcccaagccgagcccaccaaaacccaagcctggaccgaagcctaagcctcccaagcctgggccgaagccgaagcctcccaagccagggccgaagccgaagccgaagcctccaaagccagggccgaagccgaagccgaagccgccgaagcccgggccgaagccgaagccagggccgccacagccctggtggcctataccattcccgaagccgccgtgtccccccggcgccgacgggtcgtcgtcggcggtcgacgacaagaacaactgatcacacgtcatacctaaattatacatatgattaatttgagatcaaagaatttacagagtaaatacagccagggcgacgtctcattgctgcaaattaactattgtatagatggcatatgcacggtaattgtcaagtgatctatctgtaaacctggcatatcagcatatgcatgcctactcctatggatgaattctatacgtactttcgtcaaaaa

SEQ ID NO: 5075 - DNA, 487 bp, Oryza sativa
  Clone ID: uC-osflcyp123c02b1
gtcgttattatgattcctgttacggcgccagacagggagagctgaaactcacaggggggcatgcactttaacagccataacagacagccaaggctaatttgcactaaacacctttagtccgaatagaaagctagctcaaatcgatcacgcgcttaccgtggtctgattgtggatgccatatttggatcaataacttcaagcgagcatttgtgcataggagtgcggacatcgacgagtgcattgatgatcaagacagcatatgctcaggatgcagagaagatggataaactgaacacaatttgtttcactctaatgacccatggacctgatgctgatgtaagtgatgtttcggagaaggaacaggcagaacaacatcattcataggaaggccggggcacgaggcagctatgtataggttatgtcttgattttgataaagtaactcttaattgatgtaggtgaaaagaaattttggctttttaattgat

SEQ ID NO: 5076 - DNA, 484 bp, Oryza sativa
  Clone ID: uC-osflcyp123c03b1
gaggtcctatcgacggaggcacccgcgtcattcctgcggttctgtgcccgtcgtcttgtcgcattgagagagagagagagatcgaccaggcgttcactgaattctactagaactcggcatgaagcgacccggcggtgccggcggctgcggaagcagcccatacatcgccacgatggctgattagagcgatgactgatatgggaggctcgtgctcaaggtcaccgacaaccacgagtgcttgaagtttaagacagatcaagctcaggatgcatagaagatggaaaaactgaacaccattttttttactctcatgacccatggacctgatgctgatataagtgatgtttcggggaaggaacaggctgaacaacagcattcatagaaaggccggggcaggaggcagcagtgtattgggtctgtcttgattttgttcaaagtaatcataactggaatgggggttgggactatttggctctttgattgc

SEQ ID NO: 5077 - DNA, 544 bp, Oryza sativa
  unsure (1)..(544): unsure at all n locations
  Clone ID: uC-osflcyp123c04b1
gttatcctcaatccctttgagtcaagtttttctggacctagcattatatcaggtgcagtaacaccatcaggtcatataccttattctggaaacatttctcttcgatcggatagcagcacaacaagtactcggtccttcgcatttccagtgctacagacagagtggaacagcagccctgtgaagatggcgaaagcggaccgcaggcgcttgagacgggaccgaggttggggttatagaatcctctgctgtaaattctgaatctgcatgctcccgcatatcttttctttttgagatcagctcttcgcgtcgcgcccctgagctcgtcgtggtagccgtgttaaattcattcaaaatgttgctatnttctcccctttccccaccacccctcctcttgctgcccccctccctccatgtcctgctctctcttttttttactcatctatagcaggttaatggcttgtctggattcngtagtggcttgtaatttgcattgagagtgagaaatgaaggtatacttggtgaaaagtattgtagctgatgagca

SEQ ID NO: 5078 - DNA, 509 bp, Oryza sativa
  unsure (1)..(509): unsure at all n locations
  Clone ID: uC-osflcyp123c05b1
ctttcttctcatcctccccaaccactgcatccggggcggggttctcctcctcctgctgctcctcgcagaatgcaacgggcaattcaagctatcgggtcacatggcagtctcctcaagtctgctgttctgcgacacatcagtgctccaaaaccatctattttacctgctgtatattcacgctccatgtcagtttcatctgctcaaatagaggagagtggatttgagactgccactgtggcagatattntgaagtctaaggggaagagtgctgatggatcttggctctggtgcactactgatgactctgtctatgatgctgtcaaatctatgacgcaacacaatgttggagctctggtggttgttaaacctggacaggataaatcaattgctggtattgttactgagagagattacctcaggaaaatcatagtgcagggacgatcttccaagtcaactaaagttggagacatcatgactgaagaggaccagctgatcacggtgaagcctga

SEQ ID NO: 5079 - DNA, 506 bp, Oryza sativa
  Clone ID: uC-osflcyp123c07b1
tgcctttttccttgttgggaaaaaaagttgggtctatcgccatgcttatcctgcctctttcggctcttctttgcacagcagctctagatcttttggtttcctgctctactggaatctgataatgctggatgcttcagaacttaggaggcttttagggctgaaacgttcaacctagttctccctatttcatcatctgcaagtatatatctttattagtttgttctatgggtagcctttgcgtatttaaagcgatttatcacttcgccgatgaatctagtttgctgttctctgaaattgctggagttcaatccttgtttgctcttgaagtcttgatagtttgcttagtgatgcactgatgaacctgtgtatatccttttcagatgaccacaaccaactgattcctattgcagctaactcaagtgtggaactagctttacgcttgaagctttcattcagaaaaaaaatagcctgcttaagtcatttgtgctttcatgcacattctacat

SEQ ID NO: 5080 - DNA, 477 bp, Oryza sativa
  Clone ID: uC-osflcyp123c10b1
ttgtgtatccgtcgctgatggcctctccaatgggcggaagtgccgtttatcaacgaccatacgctgtctttcgcaccccagcgcgcatgtccgtgcactcagcatgtccgtccttcgcgacatcttgaacagcggacaaattaactccagtaagctcatacaaggggaacaccggaatggcatgcagagcccaacctaccagtgcttggcagcaagcatcatcaactggcaagccgatgtggagagatgcatagagtgggaagcccacagccgacgcgccaccgggctgacgctcgccttactcaccgtggcggcgaaggagctcggctgcccactcacttgctgacaaggccacaccatgactgtcactgcaagcagctgctgtaggatcagcgagtaggaaaggatgactagccggtcagtttcctgagatgcgatttatgactgatattagctgatgttcccaagcatgatacg

SEQ ID NO: 5081 - DNA, 55 bp, Oryza sativa
  Clone ID: uC-osflcyp123d01b1
ggcctcctcctaccgcctcgggaggggaggcccggggggcctttttttaaatatg

SEQ ID NO: 5082 - DNA, 259 bp, Oryza sativa
  Clone ID: uC-osflcyp123d02b1
ctcctcctattctcctcttctccaagagttcttgggggggtgctggctgatctgggagagttatacaaattacagggctcaagtccttgtgggggggagagaacagatccagagggatgctccgcaaatcggagagtgcgaagactgatatagaggaagagatcgatcgttttgtgccagaaaaggtcgagatggagacccgtaatgcccatggggacctcaacttatagtgcttgtaaaaaaaatacattttaccggg

SEQ ID NO: 5083 - DNA, 149 bp, Oryza sativa
  Clone ID: uC-osflcyp123d04b1
tgttagctgagcaggcgagcgagcggacatggcgggggggctccaagccgcggccacggtgatgcagccggccaagctcggcggccgagcctcctacgccgccgctgccatcgagcagcgagttggacgtggtgaagagtgccatcctg

SEQ ID NO: 5084 - DNA, 257 bp, Oryza sativa
  Clone ID: uC-osflcyp123d05b1
gcgtcgtctacgacgacgaattcgagcgaggcgagcggcgatggaggcggtggcgatctgatccgctcttcccgtctcggcctcgcgctcctctccctccctcgcggtgtctcgggtaggaaatggcgatcatggtggatcctccaaatgggatgggttaccaagggaagtattactactcgatgtggcaaactttgtttgagatagacactaagtatgtgccaataaagcccatttgtcgaggagcatatgggact

SEQ ID NO: 5085 - DNA, 300 bp, Oryza sativa
  Clone ID: uC-osflcyp123d06b1
gcgtggtcgaagaaggcagcaaagatgcggcgaaggatggggatgttctcgctcaacaggaggcgttggccctgaagcttttgagtaaaatgcatagttaatttaatggttttgtaccgcgtgatgttaatgtaggcagctctctgcaaccggagagtgaaattttgatcagggctagtctagtttcccgggagttgatttttgcataggatctggaaatgtatcagtttttggtcttttagtttttcgttcagaatttttgtttgaatacttgttgttcctttattattttcttacttt

SEQ ID NO: 5086 - DNA, 62 bp, Oryza sativa
  Clone ID: uC-osflcyp123d07b1
tatatataaaaaaaaaaaaaaaaaaaaaaaagggaggattttatttaaaaaaaggggggggt

SEQ ID NO: 5087 - DNA, 342 bp, Oryza sativa
  Clone ID: uC-osflcyp123e01b1
cttttgctcgctcaaccacccgtcggccggcgatgctccggccgtctacgccgacgcggcgcctcctccagagcgtcggcggtgggagcaaccccaaccggatccctggcatcccgcccgccgatcccccctccggcggcgtcagctccgatgtcgtcgtcatcctcgccgccctcctctgcgccctcatctgcgtcgtcggcctcgccgccgtcgcccgctgcgcccgtaaccgccgcaacagcggcggagccggcgccggcgccggctccgactccccgtcgcacagaccggcccacgcggggcacttccgcggaggaaggagcggaagtggcggcgtaa

SEQ ID NO: 5088 - DNA, 554 bp, Oryza sativa
  unsure (1)..(554): unsure at all n locations
  Clone ID: uC-osflcyp123e02b1
gttaaattctgggatatggataacaccaacatacttacaacaacagattgtgacggtggactgcctgcgagcccacgcttgagattcaacagagaaggttcattgcttgctgttacagcaaatgaaaatggaataaaaatattagccaacactgatggacagcgtttgctaaggatgctagagagcagagcatatgagggctctcgagggccacctcaacaaattaataccaagcccccaattgtcaacacccttggttctgtttccaatgtgtctagtcctatggcagtgaattcggagagacctgatcgggcattgcccacagtgtcaatgagtggcctggcgcccatggatgttagcagaaccccagatgttaagccaagaattacagatgaatctgaaaaggttaaaacctggaagttggcagacattggtgactcangacatctccgagcactgcgtatgccggatacatcagcaacttaaagcaaagtgtgcgtctgctgtatacatataatggggtngcgcttttggctcttgggctctatgctgtt

SEQ ID NO: 5089 - DNA, 562 bp, Oryza sativa
  Clone ID: uC-osflcyp123e03b1
ggctcattgagatcatcaagtacaaggggttccaggggccaccggacgagctggaggcgctgctcatcactcacccggagatcaaggacgccgccgtcgtctcgatgaaggatgatcttgccggtgaagtgccagtcgccttcattgtccggacagaaggctcagaaatcaccgaggatgagatcaagaaattcgttgcaaaagaggtggtgttctacaagaggatcaacaaggtgttcttcaccgattccatccccaagaacccttccggcaagatcctcaggaaggacttgagagccaggctcgccgccggcatccccgacgccgtcgccgccgccgccgtcgatgcgcccaaaagcagctaaggccaacgccgacgttttctctattttcagtcacacaaccggtgaaaaaaaaatgcagagatatgatgttgctgtccatgaaaatggaggcagaaatggagcataggaagtttatagtttggtctgtggttggttgatgctgctgcagcagcttgtgcaaatgtcataaaatggcatttaatatattatttatatta

SEQ ID NO: 5090 - DNA, 510 bp, Oryza sativa
  Clone ID: uC-osflcyp123e04b1
ccttagtttgatttcagccagggatatgatggagggggggttgtggttcaaaatggggatcaaatttgtgtattcaaggctgctaatgagagtgggaagccatggttgtggtgggactatgtgcatgacttctcaattaggtgccctatgaaggagaagaaatacacacctgaatgtgctgttcatgttattaagtcactcgggttggatgttgagaagataaagaagtgtgttggagatcctgaagctgatgaggaaaaccctgttctgaaggcagaacaagatgcccaaattggtcatgataaacgaggagatgtcacaatactgccaacccttgtcatcaacaacaggcaatatcgaggtaagttggacaaatctgccgtgctcaaagcagtctgcgcaggatttgaggagacaactgagcctgctatttgtttgagcgaggatgttcaaacaaatgagtgtttggaaaataacggatgttgctggcatgaagggataatatgtact

SEQ ID NO: 5091 - DNA, 537 bp, Oryza sativa
  Clone ID: uC-osflcyp123e05b1
cattcacttaagtacaacatgaagtctagggctggggggggcttcacccttgaagagctgaaggcagctgggatccccaagaagtttgccccaaccattggcatctcagtggatcaccgccgtaagaaccgctcacttgaaggtctgcaggccaatgtccagaggctgaagacctacaaggccaagcttgtcatcttcccaagacgtgcccgcaaggtcaaggctggtgactcgactcctgaggagcttgccacagccacccaggtccagggtgactacatgcctatcacccgtggcgagaagcgctcggttgaggtcgtgaaggtcacggatgacatgaaggcattcaaggcctacgccaagctgcgcgtggagaggatgaaccagcgccacatcggtgcccggcagaagagggcggccgaggctgagaaggaagagaagaagtgaaaggattgcaacctgcaacgttaagaatagatgccctaagtttattaccattattgttatcagcttctcctgatgcgagactggcattct

SEQ ID NO: 5092 - DNA, 502 bp, Oryza sativa
  Clone ID: uC-osflcyp123e07b1
gttttgcttaattgttttgtgcttcgctgtgcgctgtctctatctctctctcttgcaaaaccctaaccctagcggcgggcgggagcggcggaggaggagggcgcggcggcggtggggtggtagtggtggtgggtggaatggactgaggatgaaagcgagcaaatccgagtgtggaactatgatgatgcgctgccagggagtacttttggaaaccacaggtcatctgacagaggcctatctaatcgtttgctgatcaatgagcttgaagatagcttgttgttagatggctcaagtgatggaaaggtccgcatatggagaaactatactgaaaagggaggacataaactagcaactgctttctcataacttcaaggctatcgaagtgctggccgcagaattgtatttgattggcaccaacaatcgggttatctgtatgcatctggtgacatgtcccttatccttgtatggcagctcgacaaggaacaacctgacaacaccatcc

SEQ ID NO: 5093 - DNA, 540 bp, Oryza sativa
  Clone ID: uC-osflcyp123e08b1
ttctctctcctctgaattgttttccagtgtgggagggtcttgtaaagatcacggggcgaggctttccagtgtgttgtgtagtgctttagtgcttgtgtggtggtgtatagctttgcttgtgttgtgttgtgccaaccttgagttgaataaagcttggggctttagagtttgctcttctttttcacatccaaggtgctgcatatattcaggctctgggcttttggactctagtaattgctggttgctacctcaactttcggcatcaagatccaagaaagatcagtagccaaaaaaaaaaaaagtcttgagctgcaatcatttggatttggattgtggagattctcttgtagcttactccttctccccttactgttcttgctctggcatttggatcaaagagtacactgtttctcaagggagaaggacaagctcaggaagcagcatgctctcctcaaggagttgttttggaagaagagattcaggtcatagaggagctcaacaatcataagttcaagtggtgaggaaaaaagcagatgaagc

SEQ ID NO: 5094 - DNA, 550 bp, Oryza sativa
  Clone ID: uC-osflcyp123e09b1
tgtttgcggccgggtgcggcggcgaccggacgaggggtcgagacctcctcctggtggtcgtcctcgtcgtgcacgtcgtcgctcggctccgtcaatgacagtgccgtcgtcgcgtgcgtcgtcaaggcagcgagcgggcgtcgtcaaggcagcggacgtcgtcgtcgtctctgcggggaacgtccccgccgccagccacttcctcaccgccatccacaaccaccctctccacgccctcgccgctgcccctcgccacgctgctcctgggccacctcctctcgcgccgtcgcgtccgcgaggccgcctccgtcgtccgctggatctgccgcccgaactccccgcagcggcccaacaacgccaccttcaccttcgtcgtcgcggcaggcgggctcgacggcgacgacggcgaccgggcgagcgtggcgtggtgacgactagcgaggcggcggcgagcgggccccgcccagatccgactagttgcggcggcccgttgcgtgccggcccgcgatttccgcttttttttttttgttcgtgcgggcggataatttga

SEQ ID NO: 5095 - DNA, 456 bp, Oryza sativa
  Clone ID: uC-osflcyp123e11b1
ttgttttggtattcccatacactttgttccgggggggctttagtgtcgagagaggccgacaggatagagacggagaggagcgctcccaatcatccggagggggagagctctctgttctacctgcaggtccctgatcgatctgcgaccaagtggaccggggcatcatacctacattgccgaggtagttatatcacattgacgcgctcatggggtccagggggggcactcagatgtctagcagcttgcgtcactccctgatgtacgaagctgctacctgctccagcatccgaggacctgcgacctgccggtcgggtcaagaaggtcacggtctgctgcttactccaactgggccaggaagccctcttgatagcccagttggctccctcgatctattagtgcacggactactatgacttctcgggctgggcttgcttacatctatctggctagctgctt

SEQ ID NO: 5096 - DNA, 416 bp, Oryza sativa
  Clone ID: uC-osflcyp123e12b1
tgattgatgatgttatctcgccttctgactattggggatgcttttgaagactatggagtttattgtgctagggccttggcgacaagcacttccagtaggctctacattttctgtcgatcggtttttgattaacatttacgccatgggtttgcttgcttgtgctatttgatgagctatctgtttgtgtgaacttaacttttggtactttgtttttcgcgcccgcactttgtatagcttgagacaatagcacaatccctttgaagctggcctagaagtttgagtagctaccatttgctcttgtgctgctcagattcgtagatgctatataggttgcgcgctgtggtagtatcgtattgtgttctgcatcgtccgcatgtactctacttttcttaatgatcattttgagccatatgaat

SEQ ID NO: 5097 - DNA, 447 bp, Oryza sativa
  Clone ID: uC-osflcyp123f01b1
cgcgccgccgctccattctttcattccaatcctcgcccctgtcggcatcgggaacggttggaagtgcgcgtgctgatgtttaatcatgcgatgccaatgatgtaagcgcccgacactgctgcgccctgctgcccgtcctccattacctctctctctctctccccttgccgttggttcctctgagctcaagctcgatggtgagaggccgactccgtccgtcggcgacgagtcagtctatccggctttcaatctggttaggtctctgtcctctgcatcacctcgtcgtcgatttacctatctccacaatccaagcccattctgccttcagatctggtgacggctgccttgcagtagccggatttggcgagctcggggggaggggggaggagcccacgacggtggtggagctgaagcggatgacagccaccgtggtggtgtaggctgatt

SEQ ID NO: 5098 - DNA, 557 bp, Oryza sativa
  Clone ID: uC-osflcyp123f02b1
ctattcattcatatgagcatatgatttcctcctgagtgattgattaatcactctgttgatgactagttgactgccaatttgcccatttcttcatgcaagaactgattgtgtttgttgattgatttgttttctttcttgataaatcttcttgtgtttctgcatgcatgcaactcaagtgagcaagcttgataaatcttcttgagcattaatttgggatccaatattaagctcaagctagcttagcttagcttctcaaagtgctactactagctaacttgatcatatgtttgcttatcactatttttattagttatttttaaaattactagctatatggctttcaagatcatgtcacatgctctccattagcttaaagctgtatatttgtcttaaattactaattagataattctgatagccacagcataggtacaaatcagttaaccagtcaagtactatgctagaatttgccaataaataaaacaaaatatacccagttcaacacaaacttcttagccataactaattaaccgaggagcatcatacaaattaacaca

SEQ ID NO: 5099 - DNA, 541 bp, Oryza sativa
  unsure (1)..(541): unsure at all n locations
  Clone ID: uC-osflcyp123f05b1
ccttcttctccgcccagcgccgccgctcttggtccgccggacgcgcgggtcacctcccacggaggggaaaggcctcaatttaggctgttcaactattccttgagatgttggcacatagtctagcaatcaatccttcaagggctgctcaatgtccggttacttcgagggcgtcgagtgcacccttgggacttgtctcttcgttggccttcagcaggggacgtaaggaaagtgttaaacttttcatcaatgtggatagatacacaaagtatagtactcctttctgttatgcaccgcgaaacaccagaatcacaccacttgctactgcatcatttggtgacacagctgactcgtcaactcccatctttcctagaatccatgtgaaggatccctatcagcgacttggaatcagcagggaagcatctgaagaagaaattcgagctgccaggaattttctgataaacatgtatgcagggcataagccaagtgtttatgcagttgagtctgcccatgacagaatcatcatgcagangttctctgattg

SEQ ID NO: 5100 - DNA, 234 bp, Oryza sativa
  unsure (1)..(234): unsure at all n locations
  Clone ID: uC-osflcyp123f06b1
cccactcgnccggcctgctgccaccaaatcacaaagtggtgtacctaaaactcctgcgagtaaccaaagtcagggaactgagtcagcaaccctttttatgggcaacctttctttcaatttaaatcaggaccaagtgaaggaatttttccaggaagttggttaggttaccatcgaatgccttcctacatttattttcttttctcttctcctttcatggaatttatctgatatgtt

SEQ ID NO: 5101 - DNA, 114 bp, Oryza sativa
  Clone ID: uC-osflcyp123f09b1
tgctaacgtgactgtatgtgtgcgattcagggcacttttccacaaagagaggaggactaatggtgacaaggtctgcttcaagagattggattcagaatcttttgttttcaaggt

SEQ ID NO: 5102 - DNA, 513 bp, Oryza sativa
  unsure (1)..(513): unsure at all n locations
  Clone ID: uC-osflcyp123f11b1
tgtctctcgacgacgacgccacaatgatggccggccggcgaagcgcccacgttgacgccgccgtcatcggcgccgccgccctcctcctactcgccgcgacggaggcggagggcgccgtgtccagctgggagtccaactgctgcgaggactaccacatcttcgtggacaaccgcgtgtcggacagcatgcacctgagctgctacgccttacaggggggcggacggagcgagttctaccacagattactgggcatcgatgcgaggggggtagaactgctttctgttatgcaccgcgaaacaccagaattacaccacttgctactgcatcatttggtgacacagctgactcgtaaactcccatctttcctagaatccatgtgaaggatccctatcagcgacttggaatcagcagggaagcatctgaagaagaaattcgagctgccaggaattttctgttaacaggtatgcanggcataagccaagtgttgatgcaagtgagtctgcccatgacaga

SEQ ID NO: 5103 - DNA, 291 bp, Oryza sativa
  Clone ID: uC-osflcyp123f12b1
tgtgtgatgagagccccctcctctccatggggcgggccctattcctgcctggggccaccttcgccgccaccaccaagcacatcgccgtcctgcacccgcccgtcgcatccgcctgcaggccccacccgcccaggctgatcaggtgcggagcctacaacacgcacgccgaggagtgcctggcatgttattacagaacccgggttccacggcgaaaatacatggaagtgggctagataccctaaagctgtagatgaaaaccctgttctgaaggcaaaacacgatggccacatt

SEQ ID NO: 5104 - DNA, 191 bp, Oryza sativa
  Clone ID: uC-osflcyp123g02b1
gtcttcgtcggcggcggagcggaggagcacggcgggctagtttctctaccttggaggggcgactgttccagttaacccaaaacctttgtgtagctgacgcagcaccagcagtcgcggtgaaagggacacgtctcgccgccccagcttaccgacttccttccatcccgccgacgaggacgcgtacaagccac

SEQ ID NO: 5105 - DNA, 78 bp, Oryza sativa
  Clone ID: uC-osflcyp123g03b1
cgcattgtcatatgatatgaagtccctaacagtggggattattgtacgactactcgggggaatggattctgcaagagc

SEQ ID NO: 5106 - DNA, 68 bp, Oryza sativa
  Clone ID: uC-osflcyp123g04b1
ggatgactcacaagacggaggccacatccgatgggggggggttacaataattgggggttataatgagt

SEQ ID NO: 5107 - DNA, 147 bp, Oryza sativa
  unsure (1)..(147): unsure at all n locations
  Clone ID: uC-osflcyp123g07b1
tgaggtggtttagcagaacaccaagaaccactttngggctattttatactaccttggaggggcgactgatccagttaacccaaaacctttcttgaacaacctgacagggaagcctgtcattgctaaacttaagtggggtatggaata

SEQ ID NO: 5108 - DNA, 263 bp, Oryza sativa
  unsure (1)..(263): unsure at all n locations
  Clone ID: uC-osflcyp123g09b1
tcatttcatgtgaaaaaaaaaatagtaaaagggggcttttgaaacttgctgggcggtagctaagcagtcnaagccaatgaagtaagcgcccaacccttgtgcgcccggctgcccgtcctcaacacctttctctctctcaccccttgcccttggttcctttaactcaaccccaaggtgaaaagccccctccccccccctgggccaagagacactctatccggctaacaatctggggaggtctctgtcctctgcatcacctcggc

SEQ ID NO: 5109 - DNA, 291 bp, Oryza sativa
  Clone ID: uC-osflcyp123g12b1
tcttttcgtcgcgcctccggatcccgagcttccagagagccgaccggttcgtcggccggtcgccggagatggaagccaatcacgcctcgcgggggcgccgcaccctggaggagatccggcagaagagagccgccgagaggatgcagcagcagcacaacccggccggcgcggcttaccttgtcgacccttactggaacctaggagccggagctgagcttcttggtcgagttagagaactttgaaaatgggaacaaaccattggagagggaaaacaaaaagctgttattcaag

SEQ ID NO: 5110 - DNA, 158 bp, Oryza sativa
  Clone ID: uC-osflcyp123h03b1
gagtgagtgagagctgggtgaatgaacagctgaagatccccttgcctgtggagcaggcagcaagcatcccatctgtgaagatctcccctgtgcacaacctgccactgacatgggcttttcttggccctagcacagatgaggaattattgtccggcctg

SEQ ID NO: 5111 - DNA, 78 bp, Oryza sativa
  Clone ID: uC-osflcyp123h05b1
gattctactctatacaagaaatggaaagctcacaggaaggtgccatatggagaggcggggacgctcccagaaaacacc

SEQ ID NO: 5112 - DNA, 185 bp, Oryza sativa
  Clone ID: uC-osflcyp123h06b1
gaatgcttacgcacgcaacacgcacgcacccctagctcatgtgcaagacgagccggcgagctgtatacgtagcagctggactctggagaagcatcagctaagctgtacgtactactgtagttcgatcgatggatgctggtaataacgcaatcgctgcggcgtccttcgccatcgtcgtcctttgt

SEQ ID NO: 5113 - DNA, 123 bp, Oryza sativa
  Clone ID: uC-osflcyp123h09b1
ttaatcttgtctgtgcaaagaatctaaagagggacagtttcattcacagtgcggggtgtcaaagcaatcaggtctgcgcagcactttatattcattgagaaccagttttttattgtgtttatc

SEQ ID NO: 5114 - DNA, 53 bp, Oryza sativa
  Clone ID: uC-osflcyp123h10b1
tgctgctctcacagctcactgcatcaatggccggggtcaccatgacactctcc

SEQ ID NO: 5115 - DNA, 102 bp, Oryza sativa
  Clone ID: uC-osflcyp123h11b1
tgtatgggatcatgaattggcaatgcatacagggggggcttctgtttgaaatagggagccttttgtcacaaaggttgactttttataagcctaaggtatttg

SEQ ID NO: 5116 - DNA, 477 bp, Oryza sativa
  unsure (1)..(477): unsure at all n locations
  Clone ID: uC-osflcyp124a01b1
attacacttttgaaaaacagcgctaatggcccagagcaaggccatatctgaggccggggtgcttgccacccttgtggcgggcatgggaaaggagccagagacgctagaggaggcagtgagagctgggtgcaaagaggaatgcagtgagcagaaaaagaaagcccccatcgacgagaaacaatgtgaagacttctgcttcatcaagaccaagtctatatttgaggcccataagggagtgaaggatctaaaggcggatagattcatagatttttgcaacaatgagtgtaatgcagtatataaggaggatcccgccacaagcaagaagtgtgcagaaagttgcgaagctgatgctaaagaggccgaggtattccttgataaagtcgtcgcttatattcaaacaacgaaacaagcatgattatattatgtagtacctncccatctgttccttcatcatgaccgagcgacgacattattaat

SEQ ID NO: 5117 - DNA, 527 bp, Oryza sativa
  unsure (1)..(527): unsure at all n locations
  Clone ID: uC-osflcyp124a02b1
gttgactattcctgccaatccatcacacgattcccgctgagtgctaatccattcaggaaggggctgcactggtaatatctctcccatagtggggaatcatgtgtcttttgtacaaattacataggttattaaactggattctccatttcactttagaagttgattttcttgctttcttggctatatttcctgtcatccatcttacatttacaagtaggaacgaaatgatggccgactaccttcttgatcactgcgatgtgccccttcgcttcaaggatatgcataaatccaaggttgacattgtggccaactggagattttggtaaaatcctatcatgtttcaacatggcatttcactgtttggcgcacggtatttaggagctatttgtatagtaaatgctggagtattgaagtaaattatatgttcagcttattaactgcattgcgataagctntgatctagatcccgtttcaatttttcattgtgtggtcgcatcctttaatttatatagcttcataagagtata

SEQ ID NO: 5118 - DNA, 434 bp, Oryza sativa
  Clone ID: uC-osflcyp124a05b1
gctttatgttcagggaaaagaagtaaacggtgctgggtggactccagctttgctgggcaccaggatgttgatggaagagcaacagatgtcgctcttggatggtcagttgctctaggttctcctttcacatttgctactactctagagcaggagtaccgaagcgatatttttggcgagcgaggtattttgcttggggctgtacatggtattgtggaggctcttttcaggagatacacagagcatgggatggatgaggactcagcatacaagaacactgttgagtgcatcactggaatcatctctaaaactatttcgaaaaaggggatgcttgaagtgtacaattcattgacagaagaaggaaagaagcaatttatcgaggcttacagtgcagcatattattcatgcatggatatactatatgaatgctatgagat

SEQ ID NO: 5119 - DNA, 306 bp, Oryza sativa
  Clone ID: uC-osflcyp124a07b1
tgagtggtggtggtggtcaaatcccaacggggggggtttatattaaaagaggaggagtcattaaaacgggaagacggccacacaacagtatactaactgttagtgggcacattcacacggtgctaatacgggaatgtgtaaacgagctgagaaacaaattattcaacaaactccatatcttccacgtgcatatctcaccaagcctcacatatctgataactcaaaacacactatctttacaactgcagtaacaaacatagctaatcttattattatactaattttagagattattttcgatctaaa

SEQ ID NO: 5120 - DNA, 436 bp, Oryza sativa
  Clone ID: uC-osflcyp124a09b1
ttcttcttcttcccactagccaaaagcacaaaggacggagaaatcgcttctcagatgggcatcatcaccatggcggcgtctcttgcctgcgctttcttcttcgacgccgagccggtgggcgagcagggcaggcacgcgctggacgcctgcgcgctctgcaccaagcagctcacgagggacagcgacatcttcatgtacaagggggacacgcccttctgcagcgaggagtgccgctacgagcagatgcagctcgacgcggtgtacgcgaggtcagccggactgaggcagcagcagcagtactcccggagggcggattcgcggcgcgggcaccgggagaccaggaatgtgtccgtggcgagctaatcaagctgcgtcgataatataatgatcagctgagaagaattggcgttgaatccagacgagatttcaagagcta

SEQ ID NO: 5121 - DNA, 374 bp, Oryza sativa
  Clone ID: uC-osflcyp124a11b1
gtaccggacctcccttcccgagtcaacccacccgtctcttacttttcttgctaaagcaatcgccaatggtacggattctatttatatccgggtgatgtacattaaattaattcaaaaatatgttggtgaaggggcaccaatggtccaggaattatctcacatagccctctcaaataaagcatgcattgccttctttataatgttgatactattggaatgtgcctcactctccatgatcagggttatggggtgatatctatgttcaacataccatgttcgaaattgtgaaccaactccatgagtctgatacgacgggaaacatcaaagttctaatagccacaaacacgcctgataccttagatccttcacttcta

SEQ ID NO: 5122 - DNA, 496 bp, Oryza sativa
  Clone ID: uC-osflcyp124b01b1
gtcataatgtgtaccaccaccgcactgagatgaatgagagggtttactagatcgggaggtgtggccaggaaagccatgctgcctgcactgaatttgacaggactgagaaggacatcactcccatgggtggcttccctcactacggtgttgtgaagggcgactacctcatgatcaagggttgctgtgttggccccaagaagagggtcgtcaccctccgccagtccctgctcaagcagacctctcgtttggcgctcgaggagatcaagctcaagttcatcgacacctcgtccaagttcgggcacggtcgcttccagaccaccgacgagaaacagaggttcttcggcaagctcaaggcttagtttgggcggttcctcagcaaagtcagaatttgtcaaaacgatcatcactactctatacttgggtctcttctcttgatattttctggggtattaagtttttgtagcagatgtttcaggacctgttgatctatgaattt

SEQ ID NO: 5123 - DNA, 505 bp, Oryza sativa
  Clone ID: uC-osflcyp124b04b1
ccgtttccttatctcactcccgcttgtgtatccgggtgcggaatctcaacggcaaaaacctagggtttgctcttccaaatccccaacaccccatcccccacctcagacctccacttccatctctccaccacccaccctctgcagcgccgacgacacctcctcctccccatcgccggtgaagaagacgcggaggattgcacacattgggcttgtgatacaggaaaaatgctaatctacatgccctgaagatttacactaggaccaccttacaagatgcgaatggtcttgatggagtgcattgccttgccaagattgatggctcttttggtgacaaccttgaaaattttgtcctacttagtttggaccaataattgtgctggtggttaaacatgttttctcagggatttgctgggttccatggagaactgcaggccatcttactctgctgccaccgtttgttttgaaacagtgttgctcgattatatgtcagtaggatggttggctc

SEQ ID NO: 5124 - DNA, 456 bp, Oryza sativa
  unsure (1)..(456): unsure at all n locations
  Clone ID: uC-osflcyp124b05b1
gtgtttgttgttttcatagcgaggataaagccagggtatgggatgctctatgcaagcgggtgcgttcanacatcctcggagtcaacaactccattgatggcacgcgcatgaacacagactattttggagagaattatcagctcggtgtgtatagttggctttcttatcacttcatatcccagtgctgtattgtcctactgttgcttggtccgtccccgttggatcggagagttattttgatttcatctgtacctgttctgtaaagcttgtgatcagtagcagactagcatttaccagcatacagccggctgtcgaagggatgaaacttgggggcgcgtatcatgngtggngccgttcttgtgcttgtacatcaagtttgagaattgttgacaatatcttcttcatcccactgacgctggtaataccatgagtgcaatgagcctggttatgtggctt

SEQ ID NO: 5125 - DNA, 341 bp, Oryza sativa
  Clone ID: uC-osflcyp124b08b1
tccctactttgcaaatatgggatactgctggccaggaaaggtttcagagtcttggtgttgcattctaccgtggagcagattgctgtgttctagtttatgatgtcaattctatgaagtcatttgataatcttaacaactggcgtgaagaatttctaattcaggcaagcccatcagaccctgataacttcccttttgttcttttgggcaacaaagttgatgtagacggtggcaacagccgtgtggtctctgagaagaaggcataggcatggtgtgcctctaaagggaatatcccatactttgagacatctgccaaggatggtacaaacgttgaggaggctttc

SEQ ID NO: 5126 - DNA, 350 bp, Oryza sativa
  unsure (1)..(350): unsure at all n locations
  Clone ID: uC-osflcyp124b09b1
tgttcgaagccggattactgaaactgggtgacagaataatgtaaactaaaggttctatagacaaacgaaaataaactataaaatgagaaaatgttagtgatggagagctgtaatttttcactggagggaggattttatttcttctctggtttttagctgcagaaatttaccagcccatttaccaccttgggcatgtgtatttctgaccctctgaagattcgcagtagaatgtcctgtaccgggttccaggtcttgcataggagttcatcttctgcacattgtaaactcattgcagtgtacttttgctgggactactaaaaagcttaccacttgggagtggagccagnggg

SEQ ID NO: 5127 - DNA, 425 bp, Oryza sativa
  Clone ID: uC-osflcyp124b11b1
ttatgattaacagcgctaatggcccataacaaggccaggggtgattcatactcggtgggacccttgaggcggtcatgggaaaggagccagagacgctagaggaggcattgagagctgggtgcaaagaggaatgcagtgagcagaaaaagaaagcccccatcgacgagaaacaatgtgaagacttctgcttcatcaagaccaagtctatatttgaggcccataagggagtgaaggatctaaaggcggatagattcatagatttttgcaacaatgagtgtaatgcagtatataagggaggatcccgccacaagcaagaagtgtgcagaaagttgcgaagctgatgctaaggaggccgaggtattccttgataaagtcgacgcttatattcaaacaacgaaacaggcatgattatattatgtagtacc

SEQ ID NO: 5128 - DNA, 396 bp, Oryza sativa
  Clone ID: uC-osflcyp124b12b1
ttcacttccatctcctccgctccctccccaggggcgaggttgcacaccaccggggccggggcagtataaaccccttcgcgaagaatcccactccgcgagaggcgatccggagcatcaaacgtgagctgacgaatgctaccagaggtattgagagagatattggaacgttgcagctagaggaaaagaggctagttgctgaaatcaaaaggactgcaaaaactggcaatgaggcatcaaccagaattctggcccgccagctgatcaggctaagacagcaaatttctaatttacaaggtagcagagctcagattaggggcattgcaacacatacacaggcaatgcatgccaacacttcagtggctgctggcatgcaaagtgcaagcaaagcaatgggag

SEQ ID NO: 5129 - DNA, 235 bp, Oryza sativa
  Clone ID: uC-osflcyp124c01b1
ctcttccatcccaaagcacagccgccattactgcgcctggtccattctaatgggggcgtgcgagctctgcgcatcccttccattccattactgaccttggctgcgctgcagagggggtttggtggtgcggttgatttccggcaataaattctctagggggaggtatcggtcatggctgccgctgctgccaggaggggctcatcactgctctctcgctgtctgctgtccaagccct

SEQ ID NO: 5130 - DNA, 334 bp, Oryza sativa
  Clone ID: uC-osflcyp124c02b1
gcattatctgtctgggaagcactgaggcatataagacagggggttgtattattggtaatggggctgaagcacaatacggacatggagtgaaatatgcgatgatgtttgcccacttacagcagcttgagcgtatagttggcatgtactgggatgatatgaatggcacaaacattatttgagcagagttcacattaagcatgagaactatgatgaatgaggaatcatataacgccagcggctttgttgttatcgctgttgacacatcaagtatagacccctttgttgttgacagtggcaaatttgggaaaacacctttggcagatccaaaggctga

SEQ ID NO: 5131 - DNA, 470 bp, Oryza sativa
  Clone ID: uC-osflcyp124c03b1
atcttgggttccaaacacaggttcttccttaaatggaagggtttattttaatgaaggctgggggtgacaaaaagaagtctagcagcgcgtcgatccttgacggatgaagcgtccctgggctacagcattgatgacgctccacctgccggaggcgtgaagaacctccagcctggtgcttactccaactgcgcgaagaagccatactgatagccctttcggcttctccatcctagtaggtgatgatgtcttgcactgccatttcggcacttttcttctgacctatatctctgggtggtgcttcctgaaaatcgaccaggtctgtagccttggtccctgcactcctacctgctgcatctgcggcacagtgttctgaccaacctgcttcaatgggtgacttgtctgctgctgacccttccccaggctcagcaattgggcctgagggctatgagaagcgccttgagatcactttt

SEQ ID NO: 5132 - DNA, 501 bp, Oryza sativa
  Clone ID: uC-osflcyp124c04b1
ggcgtggctacgaactcatcacctccactctctgggtgagcacgagtgaatcggaggcggcacgatgcgcaagtgggcgctctcctccgcgctcctcctcctcctcctcctcaccacactccccgatccagctaagaagctccaagtcaatgctgatgacagcactgatgagttagttgatccgccgaaggtagaggagaagattgggtggtgttccccatggcctgtccacggactctgaggttgttcagagggaggctgagtcaatctcgaggaagaccctcaggagctcagcggagaaatttgagttccaggctgaggtgtccagactcatggacatcatcatcaactcactctacagcaacaaggacattttcctgagggagctcatctccaatgcttctgatgctttggacaagattaggttcctggctctcactgatcaggaggtttttgggcgaaggtgacactgctaagcttgaaatccagattaagctggat

SEQ ID NO: 5133 - DNA, 288 bp, Oryza sativa
  Clone ID: uC-osflcyp124c05b1
ggctctcctgccgatgaggatctcggcggctgcgggacggtcaagattggcgccgggcgcgacaaggacagcgcggagcccaagtcgcgggtcgccaagggcaccggcgaacacggcggcggaggaccttccgagatggagctgatgaaggagaagttcgccaagctgctgctcggggaggacattgcggggtccgggaagggcgtgccgtcgtcgctggccgtgtccaacgccatcaccaatcttgcagcttctgtgtttggtgagcaacggaagctggagcccatg

SEQ ID NO: 5134 - DNA, 413 bp, Oryza sativa
  unsure (1)..(413): unsure at all n locations
  Clone ID: uC-osflcyp124c07b1
atggtacaaatcctgcaagtgctgctatgtgtggggtgaagatcgatgctgttgggagctgattccaaagggaacattaacatcgaggagttgaggaaagctgctgaagcaaacaaggacaacttggctgctcttatgggtacctatccttcgacccatggagtctatgaagaaggcattgatgagatatgcaggataattcatgagaacggtgggcaggtatcatggatggggctaacatgaatgctaggtcggattgacaagccctggctttattggagcagatgtttgccaccttaaccttcacaagacattctgcattccaatggtggggngggggcctggaatgggtcctattggtgttaagaagcacttagcaccatttttaccatcttatccagtgatcaccactg

SEQ ID NO: 5135 - DNA, 499 bp, Oryza sativa
  Clone ID: uC-osflcyp124c08b1
tccttctcaagttctgggacatctgaagcaaatacttccacgtctaagaacacaactcctgaaccttttgatccttttggtgctattcctataaacagctttgatggatctgatccatttggtgccttcaactccgatgttggatcatctagtataccaccacccacgcagagttctgttggaaatatcagcacaccaagtcagaaccctcaagcagcatctgactttggtggctttgtgtcgagcactgtagaaacagcagctaaggacccctttgatttttcaagtagcaatcttgggaaaacacctttggcagatccaaaggctgatgcatccgattttggtgcctttgtatcgcacagtggggaagtagccaaggatcctttttgatctttctttgagtaccagctctggaaggacaaaccaagcacctctggcggctcccatgtcagataccaagaaagataatttttagggcaagtctggcatatgggctgac

SEQ ID NO: 5136 - DNA, 460 bp, Oryza sativa
  Clone ID: uC-osflcyp124d01b1
ggactcctatagaagtggacatcgaggatttgggtgggggggtccacttaagcctggcccggacatcttacctccctcaacctttggtgcctcagccacagcaaagatcagtgttgatgcatccctggctggcggtatcattgggaagggtggaaccaacacaaagcatatatcccggatgactggggccaagctagccatccgggataacgagtccaaccccaacctcaagaatatcgagcttgagggtacatttgaccagatcaaacatgctagtgctatggtcacggagctaatcgttcgcatcagtggtaatgcccctccagccaagaacccgggcagggggtcgcatgctggggggcctggaagcaacttcaagaccaagctgtgtgagaacttcaacaaaggctcctgcacgtttggagacaggtgtcatttcgcccatggtgaaagtgagctg

SEQ ID NO: 5137 - DNA, 292 bp, Oryza sativa
  Clone ID: uC-osflcyp124d03b1
gacctggattgcttcttgcttgcactgcacatggctgctgaagccgtttgcaccatacttcaggcttggctataatagtttgggtgcctttgcaaccatcaaccacctccactttcaggcatactacttgacagtgcctttccctgttgagaaggcagctaccaagaggattttccttgctgagggcacaatgaatagtggagtaaaggtgtccaagctgatgaactaccctgtgaggggactggtttttgagggaggcaactcactgatcgttttgtcctatgttaccttc

SEQ ID NO: 5138 - DNA, 293 bp, Oryza sativa
  Clone ID: uC-osflcyp124d04b1
ctctctccctaccccatccctccccgcccaacgccggcgggacccgttgaaatactccgtggctcccaacagccgccgtcgtcgccgccgtcctcccaggccgcccgcccagcaccgccgtccatcgtcgccttccccgtgctccccatccccccgctcgagttgcgggtgaagaggggctcgaagcggctgatacccctagcctctctgctccatctaacacggtgaggcctagattgacggagacggcgtgttgatagccgcctacaactcctgtgtgaggcttgaacacc

SEQ ID NO: 5139 - DNA, 107 bp, Oryza sativa
  Clone ID: uC-osflcyp124d05b1
gagatcgatagagcgacagtgtataagtagtggctggttggttggtttcaacactggttgggtttaatcaaccgagcgagatacccatacctccactgtgagctctc

SEQ ID NO: 5140 - DNA, 352 bp, Oryza sativa
  Clone ID: uC-osflcyp124d10b1
tggatgagtggaagggctcggcaaacatcagggaggcgtccctcctatatccactgggctctctactctgcagcgctgcatcctactccctgggtagcaatagcaagggtaggaagatgagcacgttagatgccacgcgagcagagctcggccttgttggactggactcgaacaaagccgaggccagggacaagatatgcagggcgatccaatacggctcgaagtttatcaggaacgggcagcctggcacggcacaggatgtccacaggtccaccacccttgctcgcaaagttttccggcttctcaagtgggtcaatgatctgcatgggcttatcagccctcctgctaaagg

SEQ ID NO: 5141 - DNA, 482 bp, Oryza sativa
  Clone ID: uC-osflcyp124e01b1
gagttgattgatctatctatagcagcaagcaagcggagaatattatcatcagaagaggggtgattaatcgatcgggcggagatcagagagatatattagattgttttggttgatcgatcgatcgatcgggatggctgctgcttcatctgctgacatggagaggatcttcaagcggttcgacaccaacggggacggcaagatatcgctggcggagctgaccgacgcgctgctgacgctggggtcgacatccgccgacgaggtccatcgcatgatgggcgagatcgacaccgacggcgactgcttcatcgacttcaacgagttcatctccttctgcaacggcaaccctggccttatgaaggacgtcgccaaggtgttctgattcttttttctttatctctcatcgcttcccatacatcatatcatcttttctaatttatttatatctattctgcattatattcttccctttcatttctaccact

SEQ ID NO: 5142 - DNA, 448 bp, Oryza sativa
  Clone ID: uC-osflcyp124e02b1
gattatattttatgcgaattcgctcttcgtcatcggggagtttggtggcaacgactacgatgcgccactgtttgcggggaatggccttgaggaggcctacaagttcatgccggatgtcatccaggctatctccgatggcatcgagcaattgattgctgagggcgcaagggagctgattgtaccctgtgtgatgcccactggatgcttccctgtctacttgaacatgctcgatgagccggccgatgggtatgggccccagagcggctgcgtccgtcggtacaacacattctcagggtggcacaatgcacatctaaagcgcatgcttgagaagctccggccaacgcaccccactgcgaggaccatatatggcgattactacacgcctgttatccagctcatgcttgaggcactgacgtcggattttacaagcagctacctagggcatgct

SEQ ID NO: 5143 - DNA, 480 bp, Oryza sativa
  Clone ID: uC-osflcyp124e04b1
ggccactgtgcgcgctggagagcaacgggtgggtctactgggcgcactgctcgttcagcctcttcacggccgacgcggcgtggcggtgcctggacggcaagtggctcttcttctggggcgactccaaccacgtcgacaccatccgcaacctcctgaccttcgtcctcggcgtcacgaacacgtccgccgtgacgcgccggttcgacgccgcgttcacgaaccccagtggcgggccggggactgtgaggatcacgagcattttcaatggccactggaacatgagcatgaactatcttggtctgcattccctccggaacaaggggttccagcgtcttgtccgttcatacttcttggctgaggaccgtgccccggacattgtcatcctcaactctggcctgcacacgggtgctactggaccagcgtccgcgcatatgtgcaggctgctgagtatgctgcacaattctgggctgagttatggct

SEQ ID NO: 5144 - DNA, 358 bp, Oryza sativa
  Clone ID: uC-osflcyp124e05b1
gcgctgcctcggccggagcaggcgaggccgaccgggatggcactcctcgccgccggcgccgccgcccgccgcttctttcgcagcctccgccgcttcagctcctatgccgcttctggaggagaagaagcaggaggagtgcccgcgggcgtggtggagcccgagtcccccgtccgcgcgccgccggacgagcagttcgctgcgtgggtcgcgcggctccggccgggcttcacggcgggggatcttgccgaggcgatctcctccgagcgcgacccggacctcgcgctcgcgctcttccgagtgggcggcgctccgcccggggttccgccacgcgcccgcgtcctacctcgcggcgctgacc

SEQ ID NO: 5145 - DNA, 337 bp, Oryza sativa
  Clone ID: uC-osflcyp124e06b1
ggactacgttgtccatgaggacttcatgaaggctggcagggagctgaacgacgccgaggagctggaatccagcgcccactacagtgcagacttcggcaaagagtaaggtgcaagattctgatcctgtattcgatcttctaccatgccgggagttctccgccatggtgcaaaagcaacagagaaatcggtttttcaccgtcaggcttctattctgcactgcaagctgaagccatttgtcatgtgtgcaatcaaagagccatgaatggttgtcaagcttatctctgggactggagaaacataccgagaacttgcaaattttataactgatgcttttgcc

SEQ ID NO: 5146 - DNA, 506 bp, Oryza sativa
  Clone ID: uC-osflcyp124e07b1
gcctctgctgccgcgcccgcttcctcccgaggtgcatctctggccggggcacgcgcgcgcctccccggcggggggccgccgcagtcggtggactacggcggcggccaggcatccgacagcagcggaactgctgatgatcttcctccaccatatccaagcaataggggtattagaggcagtggacgtgtcagtggtaatggaagagctattgttcctgctggttcatacactagagcccatactgatatggcaacacaaatccatcatcttgaacaagaagcatattgctcggttcttcgtgcatttaaagcccagtctgacgccattacatgggagaaagaaggtctcataacagaacttcggaaagagctaagggtatctgatgtagaccacagggaactactaaatcgggtcaacagtgatgatattatccgtagcataagggaatggagatcagcaggagggcctcaagcatgttacccataatgctcagcctatgcatgatc

SEQ ID NO: 5147 - DNA, 456 bp, Oryza sativa
  Clone ID: uC-osflcyp124e09b1
catttccacatccaatgggatcaatgccgtttgaggctccaccaatgcctggcccggacatcgttcctccctcaacctttggtgcctcagccacagcaaagatcagtgttgatgcatccctggctggcggtatcattgggaagggtggaaccaacacaaagcatatatcccggatgactggggccaagctagccatccgggataacgagtccaaccccaacctcaagaatatcgagcttgagggtacatttgaccagatcaaacatgctagtgctatggtcacggagctaatcgtccgcatcagtggtaatgcccctccagccaagaacccgggcagggggtcgcatgctggggggcctggaagcaacttcaagaccaagctgtgtgagaacttcaacaaaggctcctgcacgtttggagacggtgtcatttcgcccatggtgaaagtgagctgcg

SEQ ID NO: 5148 - DNA, 424 bp, Oryza sativa
  Clone ID: uC-osflcyp124e10b1
taagttcattgcccaaacagatctttgttcatgagggtaccagagaacaccaattcaggattctggaaatttgaagctactcataaggtaggagatggatgccgaaaacttttgtgcaaactggaaactgagaagagaacttccttaatagttgcggtgataggggggagaatatgcatcggtggataacatttcactaagttggaatatccatcttcagcctctcactgtcactgatcactgtacttatctatgttgtatcatgccctcttggcatactgcttagtgtgcttaatgttggctctatgttgtagcggcagattagacttgagagtagagaagtaataagcctattgtttactgtacttgaaaaatccgtatgtcctggtatcatgtgctgtaaatcttcgtaattacccctcat

SEQ ID NO: 5149 - DNA, 470 bp, Oryza sativa
  Clone ID: uC-osflcyp124e11b1
tgccttacgtgacgttcctggacatcagcaggggcaccatgatcggggcgcgcgcgctggaggcgttcggcaagaactgcaagtcgctggtggggctccggcgggtgatgcacccgacggacgtctccgtcaaggcgtgccatcgcgacaaggcgcgcgccatctcctgcaccatgccgaggctccggcacctggagatgggctacatggtgatcgcgacggatgcggtgctcgacatcctcgcgcggtgccgcgacctacggttcctcgacctccgcggctgctgggccgtcgacgacaagttcctgcaggagaggcacccggggctgagggtgctcggccccggcgtcgacgactggcttgagaacagctacctggaggagtgctccgactactgcgacgactccttcatctactcgtgggagctcatggaggacgacgacgacgactactacgccgtcgggagcgac

SEQ ID NO: 5150 - DNA, 422 bp, Oryza sativa
  Clone ID: uC-osflcyp124e12b1
gcatttcttgagctcaatcagcaacaacatgtaggggcttcttgcttagttaagtgcgtcgccctcccaagaagaagaagatgtcttgctgcggcggcaactgcggctgcggcagcggctgccagtgcggcggcggctgcggcggatgcaagatgttccctgatgtggaggccacagccaccaccaagaccttcgtcctcgctgctccatccaacaaggcgagctctggaggaatggagatggcggtggagagcggcgagaacggcggctgcggctgcaacacctgcaagtgtggcaccagctgcagcggctgctcctgctgctcctgcaactgaatctatcgtccgtcgtcgcccggctgcatgaggatttactcgatggatgctgctactgtcgatcagagctttgatcgaggccttaat

SEQ ID NO: 5151 - DNA, 118 bp, Oryza sativa
  Clone ID: uC-osflcyp124f02b1
ctgttgtttgaaactcatggatgatgggatggagggaatgatcttaaataaatggtgctccatctcaaagacagaaccctgtttcttcttttaacttgactcctgcatggatttttgt

SEQ ID NO: 5152 - DNA, 425 bp, Oryza sativa
  unsure (1)..(425): unsure at all n locations
  Clone ID: uC-osflcyp124f04b1
ctctctgattctgacaaaaagttaaagaatgtcatggcagaattggattctcttacggctaaattcctttccgaaaaagaatcatgggagaaaaacgtggcaagtgtagaggaaagctggagattgaaatgtgagtctgtgaaggctgagagcaatgggcatgctggagatgaacttaagaagaatttagtggagttgacagtaaaacatgagaaactaaaggaagagcatgattctttccgtgatattgctgatagaatgcttgaagagaaggaccgngaagggtggctaagctcctcagggaaaacaagggatctacataactctttagaggctaaagcgggagttagcatcaatggtaatcaaaatccaggacctgctaaacaggatgcaatggacattgaactgggtgagcagcaaattct

SEQ ID NO: 5153 - DNA, 512 bp, Oryza sativa
  Clone ID: uC-osflcyp124f05b1
cgtctttggccgtcgagtggttcgagcgcatgtacgcctgggacggcgtcctccccgacgaggtcacctactccgccatcctcgacgtctacgcgcagctcggcatgaaggaggaggtcctcgcgctcttcgaccgcgcgcgcggcagcggctggaagcccgaccatgtcgctttcgccgtcctcgccaagatgttcggcgaggccggcgactacgacggcatccagttcgtcttcaaggagatgcgcgaggtaggcatcaagcccaacatcttcgtctacaacgcgctgctggaggcgctgggcaagaccggcaagccaggcctggcacgcaacctgttcgaggaaatgacggccgagggcgtttagcccaacgcgcgcacgctcacggtgctcgcaaagatctacgggagggcgcgctgggggcgcgacgcgctgcagctctgggagcagatgcgggagaagaagctgcccgccgacaacatcctctgcaacacgcttctgagcatgtgt

SEQ ID NO: 5154 - DNA, 395 bp, Oryza sativa
  Clone ID: uC-osflcyp124f06b1
ctctcttgcactgcacatggctgctgaagccgcaagcccgtacttcaggcttggctataatagtttgggtgcctttgcaaccatcaaccacctccactttcaggcatactacttgacagtgcctttccctgttgagaaggcagctaccaagaggattttccttgctgagggcacaatgaacagtggagtaaaggtgtccacgctgatgaactaccctgtgcggagactgccatttttaggtgcacttgcaacctgtgcaaacacttcaattcaagaaagtggactcctgtaacatgcaaaatcctataggctgtcaaatgcaatccatgcaagtaaaaacatggacattcccttcagatctcatgaaaaggccattaaccataataaagatgata

SEQ ID NO: 5155 - DNA, 106 bp, Oryza sativa
  Clone ID: uC-osflcyp124f09b1
ctctcagcagcttagctcctgcctccttgtctgatcattcttgcaaaccaatcgagtcttgaacgaggtcaatgggcaaggaggtggacgtgtccactctcgaggc

SEQ ID NO: 5156 - DNA, 144 bp, Oryza sativa
  Clone ID: uC-osflcyp124f10b1
tctctataagtagcttacctcctggctgcttttgtggtcattattgcaatccattggagtcttgaacgaggtcaatgggctaggaggtggccttgtcccctcctactggtgcgtgggcgtttggctacacgacctcgtggagat

SEQ ID NO: 5157 - DNA, 413 bp, Oryza sativa
  Clone ID: uC-osflcyp124f11b1
ttactcacgcaacagaggtcattgtgaccaagcctggacacttgctcataaattctgggatccaaggatactccctgctaaagacaactcattccggggtcgaaaaatttgcgagggatcgctacacacttattcctgatacaagagataggattgcagcaacagaagctactgcctggaggaggtatccttttgagcatgttccccatattccatcaaaggcattctgcttcacacaaaggtatcaggacgtaaagacagttcttgcagatacgttctttggtcctcctgatgttggagtgcatagtccatcactgcagactacactatacctgatggctaaggaagcatctaacaggctcccggatatagcatctgctccgctaaggatggcggacctccacttatccctg

SEQ ID NO: 5158 - DNA, 474 bp, Oryza sativa
  Clone ID: uC-osflcyp124f12b1
tccttccgaaatctcaaattctagtcatgacaactgtgtggatccagattctgagcggttcttttgggataatttcgaggatccagagataaagagtgcacttgatgaagtccttgaattcattcgagtagaaaaaatggagcagaccaagagagttgggtctaagaatgaaaggaacaatgatgataatgatgccaccaaggaagttccaaatgggcagaaacagccagttttaggggcacgtgcaacctgtgcaagcactgcaattcaagaaagtggactccgtgaacatgcaaaatcctataggctgtcaaatgcaatccatgcaagtaaaaacatggacattcccttcagatctcatgaaaagggcattaaccataataaagatgatattggtaaaagagatgtatgcagatcattggcagttgcaaatgcattagagcttctgaagctggcttttctcagcacctcatc

SEQ ID NO: 5159 - DNA, 106 bp, Oryza sativa
  Clone ID: uC-osflcyp124g02b1
acggtatcctgaatccccacccacccgcctcctcctcctctggtccgcccctcctccgatggcggcgtgaactaacacctagctgatccgtgcctcctactacccc

SEQ ID NO: 5160 - DNA, 128 bp, Oryza sativa
  unsure (1)..(128): unsure at all n locations
  Clone ID: uC-osflcyp124g06b1
ctcttaccctcaagaaacaagaaagacaacaccaacaaaggagctagctcaccaatggcctggttgtcctccttccggctcgccgtggcagnggcggcattgttggtcgaccacatattgcgccactg

SEQ ID NO: 5161 - DNA, 214 bp, Oryza sativa
  Clone ID: uC-osflcyp124g09b1
ggatcctgagcttggagagagacaacaatggcggctcaggctcttctctctgggaggcagctgctggggaggccattgcaatcttcagtctccaggtcttcttcctccaggaaggcacccttcatggtcagggcagaggccactccccctgccaagcaaggtgctgacaggcagctgtggctcgcatccaagcagtccctgagctacctgtatg

SEQ ID NO: 5162 - DNA, 305 bp, Oryza sativa
  Clone ID: uC-osflcyp124g10b1
tctcgtactcgccgcgagagacccaccgatctgccctccgccccccaacatggcgacgccaccgccgctccgccgcgtcgccgccctcctcctcctcctcgtcgccgccgcctccacccccaccgcacgggccgatctcgtcgtcaccagggcggatcggaaggttgacctgacttcgcacatcgttcgtgtcctcacttcgctcaaggttgagaatagtggaccggaggctgtttctcaatttctactggcgtttcccattgtccaagcatagaacttatgagctattaagagtatttggtact

SEQ ID NO: 5163 - DNA, 370 bp, Oryza sativa
  Clone ID: uC-osflcyp124h01b1
ggcagcagcagcagctagggtttagagagcatccgggaatcccatggccccaccctgcgactccgacgactcgggcccgatccccgccggcgccatctccaagctcctcatcgtcatagcgatgcagacggaggcgctcccgctcgtcaacaagttccacctcgtcgaggcggaggaatccatatttcctaaaggtgccccatggattagataccatggcaactacaaaggccttcacgttgaccttgtatggcctggaaaagatcctgttctcggagttgactgtgtgggcacggtatcagcagcacttgtgactcatgcctttattcagtcattgaagccagagctggacatcaatgctggcactgct

SEQ ID NO: 5164 - DNA, 344 bp, Oryza sativa
  unsure (1)..(344): unsure at all n locations
  Clone ID: uC-osflcyp124h02b1
ttcgacctcacacctaccgcaccttttatttatgaatatgatggaaattcttcaaagtcaggttactaccgagatagtgatggttaataaaaaagttngacactttatctgggcaccttcattagctggttatattttttttttttttcttatatatttccgttttttataattttttaaccttttacttttttatttattttcatttttcttaatatttatttctcgttcatatatttcttttatttactaccattcctatatctttactctttatatattttccatttcattttcttcttttttcataatattattctttaccttttattattttttttttt

SEQ ID NO: 5165 - DNA, 235 bp, Oryza sativa
  Clone ID: uC-osflcyp124h04b1
gttcttgatgaatctgatctcatgttcaatcctgggttggggacctattagaatatcgatgggcatcatcaccataccagaccctcttaccttggctttcttcttctacacccaacccataggcgagcatggcagtcacacacttgacacctgcgctctctgcaccaaacagctcacgagggacagcgacatcttcatgtacaagggggacacgcccttctgcagctaggagtgc

SEQ ID NO: 5166 - DNA, 175 bp, Oryza sativa
  Clone ID: uC-osflcyp124h12b1
tctcctctcgtccgattttttaagtgttcctcgggttggttcaatacacatggggtatgggcacattgctattaactctaagagcaagataagggctaaagatcaaataggttccagcaatgccaaatatttcaccatgttacaaacaccaagatcgattaaaggttctaaggat

SEQ ID NO: 5167 - DNA, 501 bp, Oryza sativa
  Clone ID: uC-osflcyp125a02b1
gggttgtttactatgatatcaagaataatgctgggcagcgggttctaaattggtggggggtgctaaactctaattccagatttgtatcgtggtcaggttgctcttgatgtagcggaagctcaggatctgatggaaggtctagactgaccgggtgcggtcaaggatattcaagctttagttaaatggctcaaggcccatggatcacccaaggttggtgttactgcatattgcatgggaggcgcttcgtcaatagcaagtagagtttcaataccagaggttgatgctgatgtggctttctatgggacaccaccttctgagcttgccgatgcttccaaggcccaagctcacatccaggctcatttttgggagctcgacagtactagtggatttgcaaatgtcaccgcagccaattcggtggaagagaagctcaagtcacttggcgtgccacatgaagttcacatctaccctggctgctcacatgctattatgaacacatcacct

SEQ ID NO: 5168 - DNA, 402 bp, Oryza sativa
  Clone ID: uC-osflcyp125a04b1
gcgacggttacctcgtcgagcaggtggggcgcatccgcggtttcgtcatccccagccaccgcgacaaggacggcacgccgttctgcccttgatgagagatgagcttcgccttcgccttcgccgcgcacatggacaccgtgatgacaccattgccatcgtcgacttcttcatcttcttcatcttcttcttcacatatgacaccaccattgctgccgtcatcgtcttcttgaattcacatgtcttttgtgatgatcaaggataagtaggatgatgagtgcacctttgggatcatgcaccaatggaggcggtggcgctgatgcgtgtgagccgacggatcgagaacggacgggtcggatcggaccgtggagatattgttattatatataggctcttttttttttc

SEQ ID NO: 5169 - DNA, 482 bp, Oryza sativa
  unsure (1)..(482): unsure at all n locations
  Clone ID: uC-osflcyp125a05b1
ggttgaggcggatctgagggggaagaaggcgttggggcgggccgacctaaacgtgccgctggacgacgcccagaagatcaccgacgacacccgcatccgcgcgtacgtgcccactgtcaagttcctcctcgagaagggcgccaaggtcatcctcgccagccatctgggccgtccgaagggtgtcacccccaagtacagcttgaagcctattgttccacgcttgtctgagctacttggagtcgatgttgtgatggccaatgattgcattggtgacgaagttgagaaattggctgctgctttgccggaagggtggtgttctactcctagagaatgttagattctacaaggaggaagaaaagaatgatcctgagtttgccaagaagcttgcagctgtcgctgacctctatgtaaatgatgcttttggcactgcacacagagctcatgcttcaactganggagtgaccaaatttttgaagcctgct

SEQ ID NO: 5170 - DNA, 386 bp, Oryza sativa
  unsure (1)..(386): unsure at all n locations
  Clone ID: uC-osflcyp125a06b1
gcgttcgatcgatgctattgctgaactggacactggtggggaggagtcttacaaggacagcgccttgatcatgcaacttcttcgtgacaatctgactctctggacctctgacaatgcggaggatggtggtgacgagatcaaggaagcagcgaagcctgaaggagagggccactaatctgtcctgaagtctatttctgagtccatttactcagctacctgctgtattactggatcataagatgtactaggatcaattgctatgtggaatcataagattagggctgcgtatgtcaaaatgtgtcgagctgaagtacccagtggacacagtttatgtgcactacattgcttccgngacttatttactaggtaattagcaactttcaacc

SEQ ID NO: 5171 - DNA, 423 bp, Oryza sativa
  Clone ID: uC-osflcyp125a07b1
aggtcgtgggcaagagcggcaagccgctgcgctacaaggggagcaccttccaccgcgtgatcccggagttcatgtgccagggcggcgacttcacccgcggcaacggcacgggaggggagtcgatctacggcgagaagttcgccgacgaggtgttcaagttcaagcacgacagccccggcatcctgtccatggcgaacgccgggcccaacactaacgggtcccagttcttcatctgcaccgtgccctgcagctggctggacgggaagcacagtcgtgttcggcctgcgtcgtcgagggcatggaccgtcgtcaaggccatcgagaagggtgggatcccgcggcgggagcaccgccaagccgtgtcgtcatcgccgactgcggccagctatcctagatctgtgctgttccccttcgccttcgcca

SEQ ID NO: 5172 - DNA, 453 bp, Oryza sativa
  Clone ID: uC-osflcyp125a08b1
ggttccaacatcctacgtgccattgctggtgctggtgtgctatcaggctatgaccagctgcacatcctcttctttggaaagaagtacggctcgggcggtgcctaaactggcagagaatgatgacgaacaagtgtttattcctggtcctgcactaacgggatctggtgaattttgcctttttaacattgaaaacaataataattcttgtaggggagaacactccccgacattcgttttcttggtggaagcgtttatctccaaacattgacataggcggaggcgttaatcgcaaacagtttaccatcataaggttgagtttgagttgagtctggccggctctgatatgtctggcgattttcctaccatacattaccctcggtgaaatatcgaaagattattgagttgctgtcttttgttggtgttactattttgcgatgcttcattatttctact

SEQ ID NO: 5173 - DNA, 386 bp, Oryza sativa
  Clone ID: uC-osflcyp125a10b1
ccttgtgcgcctccgcctacgcatcctacggctggggctcctccaccggcggatgcggcggatgcagaatggactagcatccgtatcctgctgcgctcccactcttctccagctggcctccaatcatcggcgaccccgaacaatcagttcatccaccaggcaggcagtccagtccacgcgcaatcttggacgagcacccacatcttagactcgggtgatagattccgccatcacatctacgcgagagccatgaacggcggctactcagcagcagctgtggcaacgcccagccaccggcggctggcggacttcctccatagcgtgaaccttaagtacgtgaagctggggtaccactacctgatcacccacctcctcacgctcttgct

SEQ ID NO: 5174 - DNA, 499 bp, Oryza sativa
  Clone ID: uC-osflcyp125b01b1
gtcttaatttgtggccgccagccccacactgcgaggcgggccctgacctatccagggggccgtcaccctacggcgatccaccgctgcctgcgccgaagccaagtcgcccatactcgctgctcgatcctcccgtcgccagatcaccaccaggccgctgaaaccgacgaagaagctggcgggctcggcgtagccaagccgatctcctccgtgccgccagaacttcatcacctgttctagaaatacgatgcacactgacagagagagaaaagagaagaagaaaagctgcaaaagccggaaaagaattgcggaggagacctcctcctaatcggcgggaaataaaaaaaacagagagagtggttcttgcttcgcctgcaaggaatcctctccggcctgtgttccaaaattttgatatgtgatttgaacctttgaagtaggactacccaactaaaattcctgactactgttctggtactacacgcctgcacattcctacatgcgg

SEQ ID NO: 5175 - DNA, 478 bp, Oryza sativa
  Clone ID: uC-osflcyp125b02b1
gtcgtcttttccccttcttctcctcctcctcctcgatggggagctccacccgcagccatggctaagaactaccccgtcgtgagcgccgagtaccaggaggccgtcgagaaggccaggcagaagctgcgcgcgctcatcgacgagaagagctgcgcccctctcatgctccggctcgcgtggcactcggcggggacgttcgacgtgtcgtcgaagaccgggggcccgttcgggacgatgaagaccccggcggagctgtcgcacgccgacaacgcggggctggacatcgcggtgcggatgctcgagcccatcaaggaggagatacccaccatctcctacgccgatttctaccagcttgccggagttgtggccgtcgaggtgtccggtggacctgccgtccccttccacccaggaagggaggacaaacctgcaccctcacctgagggccgacatcctgatgctacaagggttctgaccacct

SEQ ID NO: 5176 - DNA, 500 bp, Oryza sativa
  Clone ID: uC-osflcyp125b03b1
gccatatagtcattatcttgattctatcaggagggtggggctagcgaattcttgttagcaacaaattgacatattgctcggcacatccccaccgagaataccaagatgacgttctctggtacacaggacaagtgcaatgcttgtgacaagaccgtgcatttcattgatctccttaccgcggacagtattccctaccacaagtcttgcttcagatgcagccactgcaaaggcacactttcgatgtgcagctattcgtccatggatggggttctttactgcaagacccattttgagcagctattcaaggaaacaggcaccttcaagaagaacttcccctcaggtacaaaggcaaacagtgaacaggctaagattcccagcaagctgtcctctgtgttctgtggaacccaggacaagtgtactgcctgcaagaagactgtgtatccattggagaagatgaccatggagggtgagtgttaccacaggacctgcttcaagtgcgc

SEQ ID NO: 5177 - DNA, 458 bp, Oryza sativa
  Clone ID: uC-osflcyp125b04b1
caatatttgcttcatgagcgtcggccggaccttgggcgggaagcaggccatcatgggcagcggcgtcaactaggagcccgacaaggagaccctcgagcacatcggccacatcctggcgatcgaggagttcgtcttcctcgagctatgatgaacagcagcagcagcagcagcagctcgtcggattcaagtaggttaagctaagctaagtagcagcacgtaatttgggccaagttgccacaggtggcaacttgggggcttctgcattttttcctgtcacgagtaagtatatatgtgatcatgtgaaggggtgccttcgcttggcccctgcttaaataagcagttaagcacggtgtatgtctatgtacgtatgtgtaactgcgtattattattgatgaatgcttgtgctgtatcagacatatattgtgctgcttgatgctatgaaaatagtcgctaattct

SEQ ID NO: 5178 - DNA, 498 bp, Oryza sativa
  unsure (1)..(498): unsure at all n locations
  Clone ID: uC-osflcyp125b05b1
aagaaaccttaccatttccgttggtgttttgatggagtggatatgataggattgggttctttctgttattccctgcaagtttcgtcaagctcagctttgcgattagttactatgagcttattacaattttttacctttctacaagttattcattaccgatttttgtacctaataatgtggttcaatttgggatttggaagtatgcctgcgattttgtctggtattaacaatttagctctcaacaagcaaaagcaaccttttgaggctagttgcaggctgcagcagaagcagagtgaattaagggcattcaagtgtaaagaacagaggcaatggcttcatcttcggacccatggatgaaagagtacaatgaggcatctaggcttgctgatgatatcaattccatgattgccgatgagggtctcttcacaatcaggcccggaaattatacgtcacacatcagccattcgaagaaaaataactatnctttgtactagactg

SEQ ID NO: 5179 - DNA, 481 bp, Oryza sativa
  Clone ID: uC-osflcyp125b06b1
ggattaacatagcttcctgatcaccaaactgctcgtgcgccttgattagaacatgggtggttagtaataaaaatgtattgtccctccccatatctctgtttcccccccatttttccatggttgtatgggtttggtccccttttatcagtcaaggacaggactgctcttgggcgagtcaaacaatttccacttagcacattcctttcgttatttttcggagcaaatcatttttctataaaaaatgctttaccctactctactccactactaacatctcaacacactctgtttatgtgagcaaacatatataaattattgtgtaccaaccgtacctctcaacatatgtagttttttattctgtagattaattgaatatgcacatgagaattgcttgattaagctggtgttatggtgctgaattgctgattgaaaggctggtgataatgttggtatcggtttgggattagttcatattttagaa

SEQ ID NO: 5180 - DNA, 443 bp, Oryza sativa
  unsure (1)..(443): unsure at all n locations
  Clone ID: uC-osflcyp125b07b1
gcataagcaacacaagggattaactcatcactcaggtagctaattaaatcttcgaccatgtcggacaagtgcggcaactgcgactgtgctgacaagagccagtgcgtgaagaaaggtaccagctatggcgtcgtcatagttgaagccgagaagagccacttcgaggaggtcgccgccggcgaggagaacggcggctgcaagtgcggcaccagctgctcctgcaccgactgcaagtgcggcaagtgaagtcacgaagcaaccgaacactcgccgccggcgagtcacctaccttaattagtccacaataaaaaccacccatatgagtgtggtttgtngtgtgtgctgattattgctgaattaaaccctgtgtgttatcgattaattaagcagctggtcgcttcggcgactatgcgtgtatcaacgtatgaatttgtgtgatgtga

SEQ ID NO: 5181 - DNA, 485 bp, Oryza sativa
  Clone ID: uC-osflcyp125b09b1
tctttttacacccctccacttgctggtgcggggctgctggccgactaggccgggaaggaattttggactttgatgagggagctgctgattgtgagtcaagaacagttgtgaagagtgagaagaaagctagagaagatcaaatggcagctgaatcctacctggttccacaaacctcctctgaatcgattgcgcagaagatgggcttcttcagggtccctgaccttcttgtcaaactgagcagcaaatgtttgattgagctggatgcagtccgcagcccaacatcgcccctagacctcatattcttcccaggcctcggtgccaaatcgccgaggtcgtctttccttggcgacagggttgggcttggactggaggattcacttactgatgatagctacactcccttgggcagcaggaaggttcttattggatctgagatgatgattactgataatgtaacttccaagaacagcttcactgctcctgtc

SEQ ID NO: 5182 - DNA, 476 bp, Oryza sativa
  Clone ID: uC-osflcyp125b10b1
cttgtctcgctgtggctcgctggacacaaggcacacccacacccactcccccactctctctccggttcatgtcctgctgctccccatgtcgcccccactcgagctcgactacataggcctctcgccgccggtgcccgccgccgccgatgccgccgccgacaacgacctgaagggcaccgagctccgcctcggcctgcccggctcccactcgccggaccgctccccgcccgccgccacgctcgaccttctccccgctgccaagggcgccaagcgcgggttctccgacgaggcgcgtccgctgccggcgttcgccgacgccgccgccgtcgccgggaagggcaagaaggcggcggccggcgaggaggatgaggatgctgaggaggaagacaagaaggtcgccgccgcgccgcaggcgcctgctgccaagggtcaagtggttggatggccaccaattcgcagctaccgcaagacacgat

SEQ ID NO: 5183 - DNA, 463 bp, Oryza sativa
  unsure (1)..(463): unsure at all n locations
  Clone ID: uC-osflcyp125b11b1
tgacacgttactgctgcataacaaccggatggacgtgtcaatgtgaagacgggtcgtactaacgtgctcagctgcttcactgaatattttaatgacatgctagcagaaattattcctagagattttagaatacgtatatcaaggaatcaaatatcatggattcgttttgacttcaattcagtaaataagaagcacgttcctccaaaagaactcttgtttttcttttaaatatgcagaggagagcattggatgcaaatctcatgccgtcacatagtcgcatacaaagcctactgaactggtatgccttttgccttcaccgattgtaactctgcgttcctgcaaatatgaactgtttattcttaaagagctctttgtaatatcgtgtaaataatgtagcgaatatttatcagttatgggtctgctaaagcctacacgcttcatccggcnnnaaaaannnnnnant

SEQ ID NO: 5184 - DNA, 498 bp, Oryza sativa
  unsure (1)..(498): unsure at all n locations
  Clone ID: uC-osflcyp125b12b1
gcttgatcctgtgccaataacaattccagggtcgggaatgatgcacgactgtgccattacagagaattattctattttcatggaccttcctctgttgttccgaccaaaggaaatggtgaagaatggtgagtttatctacaagtttgatcctacaaagaaagctcgttttggtatactccaacgttatgaaaaggatgacacaaacatcagatggtttgaacttcccaactgcttcatattccacaatgctaatgcttgggaagagggtgacgaagttatcctaattacctgccgcttggagaatcctgacttggacaaggtgaacggttaccaaagcgacaatctcgagaactttgggaatgagctgtatgagatgagattcaacatgaaaaccggtgctgcttcacaaaagcaactatctgtttctgctgtagattttcctcgaattaatgagagctacactggcagaaagcaacgngatgtgtattgcgctattct

SEQ ID NO: 5185 - DNA, 441 bp, Oryza sativa
  Clone ID: uC-osflcyp125c01b1
gcgtgcttttgcccaccgcttctctcctcctcctgtccgcccttacctttccctcgcggcgtgtggtggtcggaggttgccattcattggccgcccccaccatcgcgcccgccggtgaggagggacaccgccatcacattcttgctatatccaacgacctccattgattagctacgtgcgtgtgagaaactaatcaaccggccggcttgctggctttcctcatcttcaagatgcaccggtggttcattgccagctgcggagacatacgtgcggcggcggcgcgctcatcccgccgccgaggaggcgatgcgattgcgcccaagtcggcgccgccgtcgccgtcgccgccgccgaggctgaagaagacggtgtccgagaccgcggcggtgatgctggccgtgcccaaagacgtggaggagttcccgaccatgccggcgtacc

SEQ ID NO: 5186 - DNA, 491 bp, Oryza sativa
  Clone ID: uC-osflcyp125c02b1
atatactttatgcattttggaaactatgatgtgtggtatgttacctaccaaggtcttgctccgtcgccaccaacagctcccgggatgaacaatggtcttagcaatgttaatgatccaaggttgcatccacttgctgttgatgtgggaaaccacagagaaacaaaaagcaggggcataattgttataattgttctttcaagtgtctttgcttttattttatgttctggagctgcgttggtaatttgtttcaagattagaaaccgcaaccatttaactgaagagtcacctatgccaccgaagcctgcaggtcctgggtctgcagttgttgggagcaggctaggaagcagacctatttcagcatctccatctttcagctcaagcatagtgacatataaagggacagcgaaaacatttagcttgattgagatggaaagagctacacaaagatttgacaactccagaattattggcgagggtggttttggacgtgt

SEQ ID NO: 5187 - DNA, 347 bp, Oryza sativa
  Clone ID: uC-osflcyp125c03b1
gtcgttttttcgcctgcttctcctcctcctccttgattcggatcttcacgcgcagccatggctaagaactaccccgccgtgagcgcctggtaccaggaggtgcgggagacagccaggcataagctgcgcgctctcatcgccgagaagagctgcggccctctcatgctccgtctcgcagggcacttggcggggactttcaacttggcggcaaagaccgctggcaccgttcggacatgaaacccaaccgagctgtgcacgccgccaaccggggtggacatggtgcggatgctcagctcatcaaggaggagatacccacgatctactacgtccgatattctaccagactt

SEQ ID NO: 5188 - DNA, 498 bp, Oryza sativa
  Clone ID: uC-osflcyp125c04b1
gtgtgctagcagaggcgccgtcgtggtcgccgtcgttcgtcctgctgcttccgccgcatgccggtgagcatccatcagttacgcgcatcctcttgctcatctctccctacccacgcgctttttcctccaatttgaacaccctttgtttctcttctagacctggaagctcttctcttaatttgccttaaacctcaatactaatagcagtttgtttgttcccccagatccgccactgctgaacggggtgctttcgccatgtcgaggctgcgggcgctgtggcaagcctccgttaacgccaccaggcgagccattgtgtggaattcagaagacctaatcccaccaagtgaaaagtacatcttcaattttaattcaaaagatgagctgaaaaggtggcacttgtattcagattccgagtatggaggtttatcatctgcatcattggagataactgatggtggtgctggtggggatacttcataactggtactctgatgtttg

SEQ ID NO: 5189 - DNA, 499 bp, Oryza sativa
  unsure (1)..(499): unsure at all n locations
  Clone ID: uC-osflcyp125c05b1
aaccaatcggcgccggccatctccgccctctcgagtttagtcacttcaaacatctcgttgtcgaatagaggcaggtcgcatcgcgtgattgggccgcctctttggtctcccctttccgtgtgtgaatgtctctgcatttctggcttctcccacagtgctctccgctctgctcgacgtcggcgtcgcgatcatcgtttccggtcctcaggtttggggctgcgttgcgcgccactcgaccggaatggcagccggatgcttccaaggttgacgctccatccagctcgccggacagcaacggctcggcggacggccggaggcggcaggatcggacggcggagagggngttggaccacccgatcgacggctggatgggctccttgtctcgcatcggtagcacgnggagtggctcaattccgtcctcgcggcagccaccactttacagattgtcacttcccaggtgatgtaaatgtgcaggcgcagcgctagctgccagctcgct

SEQ ID NO: 5190 - DNA, 491 bp, Oryza sativa
  unsure (1)..(491): unsure at all n locations
  Clone ID: uC-osflcyp125c07b1
tattttttcgatccccatgtcgttcgccgctgcaaggatgatggcggcagcccggcgcgccttccactccaaggccgcggaagacgtgcgtagacatctcgatgccatggaaaaggccaaccttgaaaggttgccacagctcttggatcccatcatccggcagcgagccgctcgagatgtccaccgcaatacccacaggatcaagatctatgctaatccttgcatagggaggccaccgcccgaagggcacatttggtatgatgtcgcctgggcaaaaaatcttggactagttttttttgtcacctcattttttgggatgtacgatgttctattcgaggagactcaacagtctgaccaccatatgtcctcctcgttgccaatgccacccttctaaattattctgtgtaaaatcatcgctgccgaccgattttagattatgaaataataatctncatgtcctgtggtcttactctatgaggaccttcttaatt

SEQ ID NO: 5191 - DNA, 468 bp, Oryza sativa
  Clone ID: uC-osflcyp125c08b1
gttcgcctccgcttcttcctcacgcagctctcgcctcgcctcgccgcccgccactagagaggagagggagaaggaggaggaggcaaatcccagcaaaagaagatgcagatcttcgtgaagaccctgacggggaagaccatcaccctcgaggtggagagcagcgacaccatcgacaacgtcaaggccaaaatccaggacaaggaagggatccctccagatcaacagcgtttgatattcgccggcaagcagctggaagatgggcgcacactggccgactacaacattcagaaggagtcaactcttcacttggtcctcaagctcaggggtggcactatgatcaaggttaagaccctcactggaaaagagattgaaattgacattgagcccaccgacacgatcgataggatcaaggagcgtgttgaggagaaagaaggcattcttcccgtgcagcaaaggcttatctatgct

SEQ ID NO: 5192 - DNA, 491 bp, Oryza sativa
  Clone ID: uC-osflcyp125c09b1
ctccgccgccggccttgcttcttccccattgctgctcttcgaggcgttttttaacttcacaatgaagctgatcgctgcctacctgctcgctgttctgggtggaaacacctctccatctgctgatgacattaagaacattctggaatcagttggcgttgaagctaatgacgagaggctggagttcctgctctcagaactggagggcaaggacataacagaagtgattgctgctggaagggagaagtttgcttctgtgccctcaggtggtggtggtggcatagctgtggcagctcctacagctgcaggtggcggtgcagcacctgctgaagaggcaaagaaagaggagaaggtcgaagagaaggaagagtctgatgatgatatgggtttcagcttgtttgactaagtaccttcggctgcatatttacccccgttcaccccagtatctttctgcattgcttgctttatactatgtgtgcaaaaatgagcaatgt

SEQ ID NO: 5193 - DNA, 494 bp, Oryza sativa
  Clone ID: uC-osflcyp125c10b1
gccctctcctcgtcggtttcgaaccatctagaagcgtcgccgccgactcgccatctcctctctaggtcaccggatttcctagccggcggcgagctcgtcggctcacgcggcggcggcggcggcgatggactggagctccgtgactgcggaggatctggtggacgcgctgcgggaggtggactggtcgacgccgccgcgccccgtctccgagttcttctcccgcttcaccgccccgcgatcctactccaagtggaccagccgcctcaagtgcaacctctactactacaggacgaactacttcatcttgatcatgttcattcttgggatgggctttctccggaaaccagtttccatccttgcagctttttcaacaggcctcagcattgcatttctcaatgacaggtttgcagttacattcaatgagaaagtcacaaggacagtcagacaattttcaccacatttagcagcaaagatgaggccacccttaagacctg

SEQ ID NO: 5194 - DNA, 458 bp, Oryza sativa
  Clone ID: uC-osflcyp125c11b1
cgcacagatccctcccctctcctcgctgcccatcggtctctctctctctcttcccctcgacgcggcgagatcaggaggaggaggaggagagggggggaagggaggaagggaggccgagatcccgaggccccccaccggagacggcgaatcctggtccggcgcctggtttgcccccggattcgggaggagtttccgttcggtgacgagggatttcgggggcgcgcgcacccatgaacgagaaggcctccgtcttcaaggagctgaacgccaagcacaagaagatatcggaaggccttctgcggatgcctgagaatagagaatgtcgcacactgcaaggaaaaggggcctcaatcggcaagcgtaaatcttgggatcttgatatgcatgcagagctctggaagtgatagaagcctcggggtacatatatctaaggtaagaacggctaccctggatacatg

SEQ ID NO: 5195 - DNA, 405 bp, Oryza sativa
  unsure (1)..(405): unsure at all n locations
  Clone ID: uC-osflcyp125c12b1
cggtgagccggttgccataaaaaagcttgagccgggcgtgtcaagcgactctggagcagacttctctgctcagctgtcaatgggttcgaggctcaagaacgagtatttcatccggctgatgggctactacctggatgcaaaccgaagaatcctggtctaccagtttgccacgcacgggtccctgcatgacatcctacacgggaagaagggcgtgagggacgcggcgccngggccggcgctgaactggagccagcgggtgaaggtggcgtacggcgccgcgagagggctcgagtacctccacgagaaggcccagccgcccatcgtccaccgcgacgtgcggtcgagcaacgttctcctcttcgacggtacgagtccaagctcgccgacttcaacctcaccacccag

SEQ ID NO: 5196 - DNA, 425 bp, Oryza sativa
  Clone ID: uC-osflcyp125d01b1
ggggttttgggatccgttggctcgtggggtggggggcggtgcggtgcggctaccgcgccgagcccacgctgagatctgagccaccaccgcgcgatggatggatgattcgtacgtttgtttcagttgagcttttgatttggtttttggtttggggtgctcggcttcaccattaccatcacgagatttgtgatttgcttcaatctggggcgccttcacacacgctcgcgcgtggctgcttggatgctcatccatggctgtgcggccgtggtggggggctggaaccctagatcagagcaggtttaatagtacagcagactaatggctatcagccaaatctggtgagaaaattgcacatgtaccatctgaagaggtgatttgctggaatggcatgactttaactggcattcgatgtaatgccattcact

SEQ ID NO: 5197 - DNA, 240 bp, Oryza sativa
  Clone ID: uC-osflcyp125d03b1
atgcgcacttcttttgcttccattaagattcgtcatgctggttggttcgctagggtagcctggaggcctgtacacaatgacgctgtcttgtgctcggtgggcagctgcacagagccacagattgttcttgttaggattcgagagaatccatccataacaacattgtatcgggaacaatttgcacaagtggcctcgtaatcagtgctaactcatatgtatctatttgaatgaaccctgccc

SEQ ID NO: 5198 - DNA, 493 bp, Oryza sativa
  Clone ID: uC-osflcyp125d04b1
ggttaattatggaaagctagaacgcggcgaattacaaggtttcatcgttggtattaactttgaagatattgactggaacagtaaccttgctgcagatcaagtcatggctgactttgatacatcacggaaccattttattgaaaagggtgaatttgttaatggaatgttgagatggctggatgaagctaagcgtactgttacatctggtgcctactcaaaaaagttcttgaatgattttcatgcgagaacaagggatgaacaaaccggtctgctcgacaaggatgaagaggaaggtgaagctgatggaaatccaacctggacttgcattaaggccatcttacttttgcttctgggaactgcaatggcagcagcatctgcagatcctcttgttgatgctgtgcacaatttctcaaatgctacacatattccctcctttttcatctccttcattgtaatgcccttggctactaattccagcgaggctgtctcagca

SEQ ID NO: 5199 - DNA, 488 bp, Oryza sativa
  Clone ID: uC-osflcyp125d05b1
cacaaaaccccccctcctctcctcctctggctccctctgccacccagccaccacaggatggcatcctcctcctcacctccactcctcctcctcgtctccctcctcgccgccgtcgccgccgccttcctcgcggcgcaagctctcgcccaacaccaaccccaaggaaatgatacggcggcggcgggggaggggtggaggccgaggctgaggaagacgtacgtggagggcggcgccgccgggatggtgccgcggcggcggaggctggtggggaggttccagatatgcgcggtgtgcacctgctgcgggggcccgcacggggtgtgcatcccggcgccctgctgctacgccatcaactgcaacatcccgaaccgccccttcggcgtctgctccttcaccccgcgaacctgcaactgcctcaactgccacctctagcagatatgcagcacagcacatcagccaagaaaatcagagctagtatggttcttctc

SEQ ID NO: 5200 - DNA, 492 bp, Oryza sativa
  Clone ID: uC-osflcyp125d06b1
gttctttgagaaggagatcccagttgatgctgtgttcgagaaggacgagatgattgacatcattggtgtcaccaagggtaagggttatgaaggtgttgtcacgcgttggggtgtcactcgccttccccgcaagacccacaggggtctccgcaaggtcgcctgtatcggtgcctggcatcctgctagggtttcctatactgttgctcgcgctggtcagaatgggtaccaccaccgcactgagatgaataagaaggtttacaagatcggcaagtctggccaggaaagccatgctgcctgcactgaatttgacaggactgagaaggacatcactcccatgggtggcttccctcactacggtgttgtgaagggcgactacctcatgatcaagggttgctgtgttggccccaagaagaagggtcgtcaccctccgccagtccctgctcaagcagacttctcgtttggcgctcgaggagatcaagctcaagttcatcg

SEQ ID NO: 5201 - DNA, 483 bp, Oryza sativa
  Clone ID: uC-osflcyp125d07b1
ggccaccgcccacagacagacccgtcagaaaacctctccctccggcgatgtacggcgacaccgagccggccgccgccgccgccgcggagcgcacggcgttccggcgagccgagaagcagtacaagctctacaagccgctgaagcccaagggcggcagggcaaggagcaagccgggaggcggcggcggcggcggaggattggaggacctgtccgcggtggtcgacttccacgcgctgtcgctgccgcgcggcggcggggggagctgcccgtcgggatcgggaggcgcgacgtcgccgggttcgacctcttctgcttcttggaccgacctggattctatttcatacctggtgctctatctattgaggaacaatgctattggatcagggaaagcttgaaaaccttcccacagcctcctaatagaactaacctgacagctttgtatggtccaatttttgacttactcactgctgccaaagtggaaag

SEQ ID NO: 5202 - DNA, 487 bp, Oryza sativa
  Clone ID: uC-osflcyp125d08b1
gcgcgaggtgcacaagcgatccagggatgcccggcagttgcttggtgctaagggtaagaggttcgccaagaagcggtatgccgagaaggcacagatgaagaagaccctgaaaatgcacgacgagtcaacttctcggcagaaggttgaggatgttcaagagggtgctcttcctccatatctgctggaccgtgatcagacacaacgtgccaaggttctcagcaacacaattaagcaaaagaggatggaaaaggctggcaaatgggaggttcctttgccaaaggtcagacctgtggctgaagaagaaatgttcaaagttttacgaactggcaagagaaaaaccaaacagtggaagagaatggtcactaaggccacctttgttggacctgggtttacaaggaaaccaccaaagtatgaacggtttattaggccaactgggcttcgtttcacaaaggcccatgttactcaccctgagctgaaatgtactttc

SEQ ID NO: 5203 - DNA, 498 bp, Oryza sativa
  unsure (1)..(498): unsure at all n locations
  Clone ID: uC-osflcyp125d10b1
acgggctgacctccaacctggccggcagccgcaacccgagcttggactacgggttcaagggcaccgagatcgccatggcctcctactgctctgagctccagtacctcgccaaccccatcaccaaccatgtccagagcgcggagcagcacaaccaggacgtgaactcgctgggtctcgtctcggccaggaagaccctggaggcggtggacatcctcaagctcatgacctccacctacatcgtcgccctgtgcctaggccgtcgaccttcgccacctcgaggagaacatcaagagctccgtcaagaactgcgtcacccaggtggccaaggaaggtgctcaccatgaaccccaccggcgacctctccagcgcgcgcttcagcgagaagaacctnctcaccgncatcgaccgcagggccgtgttcagctacgccgacgacccgtgcagcgccaactacccgctcatgcagaagctcctgcgccggctcgtcgagcacgccct

SEQ ID NO: 5204 - DNA, 496 bp, Oryza sativa
  unsure (1)..(496): unsure at all n locations
  Clone ID: uC-osflcyp125d11b1
gggccatgaacgctttggttcgagtatccgcagttctgacaaatgccccttacattcttaatcttgactgtgatcactatgttaacaatagcaaagctgttcgtgaagcgatgtgtttcatgatggacccttctgttggtagagatgtctgctatgtccaattcccacaaaggttcgatggcattgatcgcagcgatcgttatgccaataggaatgttgtgttctttgacgttaacatgaaagggcttgatggcctccaaggtccggtttatgtgggaactgcgttgttgtttctataggcaagcgctctatggttatggaccaccatcactgcctgcgcttccaaagtcttctgtctgttcatggtgctgctgctgctgtcctaagaaaaaagctgaaaaaagtgagaaagaaatgcatagagacttncgacgtgaagaccttgagtccgccattttcaatcttcgggaaattgacaactatgatgagtatgaac

SEQ ID NO: 5205 - DNA, 487 bp, Oryza sativa
  Clone ID: uC-osflcyp125d12b1
ccttcctcctcgccgccgccaccaaatccggcctgctccaccaccgccccctcccggtccgcctcgccgcctccatgtcgtcgtcgtccccttccccctctcccgctgctccggcctccgcctccgccatcgacttcctcacgctctgctaccgcctcaagacgacgaatagggcccggtgggtgaggcgcggggtgcaggggccggagtccgtcgccgaccacatgtaccggatgggcgtcatggcgctcgtcgccgccgacctgcccagcggtgtgaaccgcgacaggtgtgtcaagatggcgatcgtgcacgacatagccgaagctattggtggggatatcaccccttcaatggcgtgccgaaggaagaaaagagccgcagagagcaagaagcattggaccatatgtgcagtttgctcggcggtggtccgagagctgaagagatccgtgaactttggatggaatatgagcagaatgccactttg

SEQ ID NO: 5206 - DNA, 502 bp, Oryza sativa
  Clone ID: uC-osflcyp125e01b1
gagtggcagctgatcgccacagcgtgctcctcggggcccgcctgacatggccgacgcatacagcaacggcaagggcctcaagcagcagcagcgccagaagctcaagcccgcgctcgaggtggaggacttcatcaacctcctccacggctccgatcccgtccgagtcgagctcacccgcctcgagaacgagctccagtataaggagaaggagcttggggaggcgcaggctgagatcaaggctctgcggctgtccgagcgagcgcgcgagaaggccgtcgaggatcttacggaagaattgacaaaggtggatgggaagctgaagcttacagagtctctcctcgaaagcaagaaccttgaggcaaagaagataaacgatgaaaagaaagcagcacttgcagcccaatttgcagcagaggctacatttcgaagggttcatgcagcacaaaaggatgatgacatgccccctattgaggccattcttgcgccattggaagctgaactg

SEQ ID NO: 5207 - DNA, 482 bp, Oryza sativa
  Clone ID: uC-osflcyp125e02b1
atatcatttaagaagacatggatgatgatactgagcactcatctggtggcagtgaatgtgacaacaacattaagaccagtgtctctgatgacaaggttaaaagcaataactctggcacagcatctaatggcaacgatcagggtttacaacctcctaagaaagcagcaagaacaggacatggtgcggtaagggaagacacctgccaaattgaaagcaatgatacatccaatcgaaaacaagaattatacgaatcaaatggatccacagaccaaatagaaaagttaaatgttcgctcatcatcagcaagagcaaaatttatggagaaatcaagcagctcaagaaataagagcaaaaagaccttatggggccgtacttcagcaagaaaagacctgtcagcagaagagattgactattgcagtgatgacgagactcttattgagaagcttgagaacagcaagacagatctccaatctaaaattact

SEQ ID NO: 5208 - DNA, 469 bp, Oryza sativa
  unsure (1)..(469): unsure at all n locations
  Clone ID: uC-osflcyp125e03b1
gtagtccctccacacacctcgtacctcgatctcgaagcttaattactagttaacattaacaatggctgctaataagctcaagttctcccctctccttgccctcttcctcctcgccggcatagccgtcacctcccgtgccggcgacatcgccgtgtactggggccagaacggcgacgagggcagcctggccgacgcctgcaactccggcctatacgcgtacgtcatggtcgccttcctcagcaccttcggcaacggccagacccctgtcctcaacctcgccgggcactgcgaaccaagctccggcggctgcaccggccagagctcggacatccagacgtgccagtcgctgggcgtcaaggtcatcctgtccatcggcggcggcgccggcagctacgggctgtcgtccacccaggacgcccgngacgtggccgactacctgtggaacaacttcctcggcggcagctcgggc

SEQ ID NO: 5209 - DNA, 498 bp, Oryza sativa
  Clone ID: uC-osflcyp125e04b1
ctctccttcgccgctcgcgtcgccgcctttttcccctatggcgctgccgaatcaggggaccgtggattaccccagcttcaagctggtcatcgtcggcgatggcgggactggtaaaactacatttgtgaagaggcatctcactggagagtttgaaaagaaatatgagccaaccattggtgtcgaagttcaccctctagattttaccaccaactgtggtaagatccgcttctactgctgggacactgctggacaagagaagtttggtggacttagggatggatactatatccatggtcaatgtgcgataattatgtttgatgtcacttcaaggctgacttacaagaatgttccaacatggcatagggacttgtgcagggtgtgtgaaaacatccccattgtcctgtgtggtaacaaggttgatgtgaagaacaggcaggttaaagccaagcaggtcacattccacaggaagaagaatctgcagtactatgaaatttctgc

SEQ ID NO: 5210 - DNA, 493 bp, Oryza sativa
  Clone ID: uC-osflcyp125e05b1
gtctcgtggtctcctgacgagccgcggctgaacaggggaggaggcgccgatctccatccggcgagcagagcagagcaggggatcctgtgacacgtaccaaatacaaagagcccacaaaggcactaatctactggcctaatctatccaatccaggaggcaacccagcctggtaatatattggatcggtgcttgaggttgagggggaagcaaagcacgatcgaccaggaaccaggcaggcagccaaggtgaggaaggagaagaagctgagagcctctccctgcttagacgtccctgtgcagcggcctgggagtttcccagcctgctctcacctggctggctagatccagcggtcatccctgccacgaggaatgggcctgtggacgttgctggagggctttttgcttctcgcaaatgcattagcgatactaaatgaagaccgctttcttggccccagaggatggagcatgtctgaagtctcggaaatggacaaacc

SEQ ID NO: 5211 - DNA, 184 bp, Oryza sativa
  Clone ID: uC-osflcyp125e09b1
ttcacctgtgggtgatccgttttgggatgtggtcttagtaggagggattctttgatcaaaggaatcccttctttgtaattgtaaatatttcttcttagtgaaatgaagcacaattctccagtgcgcaataaaaaaaaaaaaaaaaaaaaaaaaataaaaaaaacaaataccaaaaaaagaaaaa

SEQ ID NO: 5212 - DNA, 500 bp, Oryza sativa
  unsure (1)..(500): unsure at all n locations
  Clone ID: uC-osflcyp125f01b1
gcagcagtatacgagcaccacacaccagcagcaggggcaagtcgatcgatcgtcagcacacacgaccaagatcgagatggcccgtgcacagctggtgttggtcgccctcgtggcagcggctctgctcctggcgggcccacacaccaccatggccgccatcagctgcggccaggtcaactccgccgtgtcgccctgcctcagctacgcccgcggcggctccggcccgtcggcggcctgctgcagcggcgtcaggagcctcaactccgccgccagcaccaccgccgaccgccgcaccgnctgcaactgcctcaagaacgtggccggcagcatcagcggcctcaacgccggcaatgccgccagcatcccctccaagtgcggcgtcagcatcccctacaccatcagcccctccatcgactgctccagcgtgaactaatccgatcgatcgctaccggaggatgacatgcagcgcctgccgagatgcagctgtcgtctcacgcttt

SEQ ID NO: 5213 - DNA, 497 bp, Oryza sativa
  Clone ID: uC-osflcyp125f02b1
gagagaggaggaaaaaaaatatccgggatcccatcatcccttcacccacccgcacgcgtctcctccgactccgatccgagctccagatctgcggcgccggcgaccaacctctccggcggcgggggcggcggcggagatccacgatgccttcgtcggagcagggggcctcgcccctgcgccgcctcctccgcgtcgacgccctcgtcctcccctccgcttgctcccaccgccttaagccttggtctctccatccccacctcctctcatcctcctaacgccatccaatctctcttctccccgtctctttctcctgctccccgttgccctcccatttcttccccttttcttctcgtagctatagggtgatacacttctctgattattgttgttgttcttcccgtgctgatttggatttaattacaagtatttgtgttggatcggttggacgcgctcactcggtttggtttggtttggattgtattgggttggatcggatc

SEQ ID NO: 5214 - DNA, 500 bp, Oryza sativa
  Clone ID: uC-osflcyp125f05b1
gctttggctcagctgcgtcgggcaccaccactgccgcgaccgctgctgcctcgacaccgtctttcggcttcgggttgaacaccggggccgctgcatcgagtaccaccactacttcggcttcctctccggctctagggtttggagcaggcaccggctcggcgctgtttggatccactacctctgcaccactcttcagcaccaccaccgcctcgtccccagcgaccacggccacgaccacggcgtcctttggcttctcatcgtcgccagcgaccgccgcctctgctccgtcgttcggcttcacaccgtcatcggcaaccaccacgaccgcgagcaccgcccctgccttgttctcttctgcatcttccgctcccgccttctccttcacgaagagtagctctgctgctcccaccaccgcagcgtctgctccatctactggcttctccttggccacttcgccggcagcacctgctccctcattgttctctaacaccagtgcagca

SEQ ID NO: 5215 - DNA, 490 bp, Oryza sativa
  Clone ID: uC-osflcyp125f06b1
aaaacgtgaagaggaagagaggagaaagagggaagagacggagaggaaggctaagctggatgcaattgcagccaagcagctgcagagagagagggaactagaagagaagaaggaaaaacagagaatggaagctctcatgggaagaggagctggagctgctgagcctgcacgcactcctgatgctgctccggttgcacagtcagctcagccggtagctgcaccggctgctgttgctgccgctgctgcaccagctgctggtaagtatgacccgaagtttaaacgaggtggtgatggtggcagtagtgctggcggacagagacctgctgtggcacctgagcaagaccgttggggttcacgggatgatcgcccacgtcctgatatgcgtacgctccgacaagaggcaccccctgctcgcgatgctgctcccccagcccgacaagatggttctacaggcacatggcgaccttcaagatactcaagttcatcatct

SEQ ID NO: 5216 - DNA, 500 bp, Oryza sativa
  Clone ID: uC-osflcyp125f07b1
attatgagcaccgtgagaggcattgccctgtggagcctcctacctgtgttgttccacttcctgaaggatataaacgcccagttgagtggcccacgagcagggacaaggtgtggtacagcaatgtcccccacactaagcttgctgagtacaaggggcaccaaaactgggttaaagtttctggggatcatctcctatttcccgggggtggcactcagttcaagaatggtgcacttcactacattgatactattcagcaggcattacctgatattgcatggggcaaacgaagccgtgtcattctagatgttggctgtggagttgctagctttggagggtatatgtttgagagagatgtactcacgatgtcatttgccccaaaagacgagcatgaagctcaagtacagtttgcacttgagagaggtattccagcaatatcagctgtcatgggcaccaaaaggcttccataccccagcagggtctttgatgtcattcattgcgct

SEQ ID NO: 5217 - DNA, 502 bp, Oryza sativa
  Clone ID: uC-osflcyp125f08b1
gggtgcgctgaggccgtcggcgctggacctggtggcggcgctgctcacggggcggggacgaccggaggaggaggggtggccgccctcgctcgccgagaaccgccacctcatcgtcctgctcaccacctccctcgccgtcctcgtcggctgcggcgtcgcgctgctcgtccgccgctcctccatctccgcgcccgccgtgagggcgcaggagccgcagccgcgggcccccgcccccgcgaagaggaagcaggaggccgagcctgaccccgacgacggcaggcagagggtcgccgtcttcttcggcacgcagaccggcaccgccgagggcttcgccaaggcgcttgcggaggaggccaagtcgaggtacgacaaggccgtcttcaaggtgctcgatctggatgagtatgctgcggatgatgaggagtatgagcagaagcttaaaaggagatcatcgcctttgtcttcgtggcaacgtatggggatggggaaccaactgacaatg

SEQ ID NO: 5218 - DNA, 492 bp, Oryza sativa
  Clone ID: uC-osflcyp125f09b1
ccccaggctagcacctaactataataccacgatacacttagcttagtgtttacctagctagctagcagctggctgcaacaaacattctgcatgcactttgaattctagagataggagagttaattagatagcttagctaccacaatgcatgcgtgcaacctgatagcttagctacgcgtagttgccaattcaaccggccgacatatatatcggcctgaggaaactagtggaggactccaaagggatcgcattgatctggctagctatctcgatcgatcgcctcatcgatcgacgacgacgtgcgtgatcgatcagtgcaatccctttggaattttcctcttgcttccgcctcctcatcttccttgatcgatcgatcctttgcctgctggacgcgcttgcctgccggcttgcttcttccatcgcccgcttgatcaatccgcaagctgctccagattcaggagttaaatcgaagcccaacgctagcacacagtg

SEQ ID NO: 5219 - DNA, 357 bp, Oryza sativa
  Clone ID: uC-osflcyp125f12b1
catgagtaaattgcttgcactctcgggcgatccaggctgtcaaatgagcaactagcgaggcataagctcgatcactagctctgatctgatcttcagctagcgccggcagagctgcagaggtctccatccatggcgccggcggtcagcgcatcacatggtgacatcatgcggtccctgacgagcaagctcgactcgctgctgctgcaaccgtcacagtcgccgacgactgcgcaaccgtagtggttgctgagggggagaggacaagatcctcctactgaaaggcgatctccgacaactgctagatgactactacctactcgaggagccggccgtcagacaccgtgccaccgtcagact

SEQ ID NO: 5220 - DNA, 503 bp, Oryza sativa
  Clone ID: uC-osflcyp125g01b1
cgctgacttcatcatcaccagtaccttccaagagagtgccggtaacaaggacactgttggtcagtatgagtctcacatggcattcaccatgcctggtctgtaccgtgttgtccacggaattgatgtttttgacccgaagtttaacattgtctcgcctggtgcggacatgtccatctacttcccttactctgagtctcgtaagaggctcacctccctccacccagagattgaggagttgctctacagcgaagttgacaacaacgagcacaagtttatgctgaaggacaggaacaagccaatcatcttctccatggctcgtcttgaccgtgtcaagaacttgactggtctggttgagctgtatggtcgcaaccctcgcctgcaagagctggttaaccttgtggttgtctgtggtgaccatggcaacccatctaaggacaaggaggagcaggctgagttcaagaagatgtttgaccttattgagcaatacaacttgaatggccaca

SEQ ID NO: 5221 - DNA, 465 bp, Oryza sativa
  Clone ID: uC-osflcyp125g02b1
actttttctagatcgcgagcggctgcttcttcttcgtcattccaatctccccccagtgtcggttggattcgtggaggcggattggggatttggatttggattggagagaggggggagatggaccaggtgctgaacaaggtggggagctactggttcagcaagagggcaagcaaggagatcgactccatcggcgacgacatcagctcaatctctacaagcattggaacaggagctaaatggatggtgaacaagatcaaagggaagatgcagaaagcattgccagaccttctcaaggaatatgacatgcccgcgggcctcttcccaaaggatgctactaactatgagttcaatgaggagacaaagaagctcaccgtgtacattccttcaacttgtgatgtccggtacaaagattccgctgttctgcgattcttacctgtgagactggctacctggagagggaaagct

SEQ ID NO: 5222 - DNA, 497 bp, Oryza sativa
  unsure (1)..(497): unsure at all n locations
  Clone ID: uC-osflcyp125g04b1
cggtatttcatttgcattggggggcattgctattgcttggcttgcgcttggccacccaccatttcggcgcggagaggagaccgcttcacccgccgatctgcgagaaaccctctccgcctcgccttctccacctcccaatcttaacccaacctccccccttcctctcgcgtcgaccccttgctttgctcctccttcaaccttcttctttcttggagtttcttgagagagagagagagagagagagagagagagagagagagagagggggtacgcggtcgcaggaggaggaggacggcggcgtctgctgcgaccgacggggagcggcgaggatgagcgcgtccaggttcataaagtgcgtcaccgtcggggacggcgccgtcggcaagacctgcatgctcatcttctacacctncaacaccttccccactgattatgttccgacggtgtttgacaacttcagtgccaacgtcgtggttgatggtaacaccgtcaacctc

SEQ ID NO: 5223 - DNA, 494 bp, Oryza sativa
  Clone ID: uC-osflcyp125g05b1
gtagccaagcaaccctagccgctttccccatctcctcctcccagaactagaatttcgccaccccgaatcccttccatggtaggacttccgtttgattccgggtcgaatccgtcgcctccgatgccggaacggtgaggttttccctccctttatatggacaacacgcgtttgttttttctgttgcgcaggtttcagatcttggatggacttgctcatccttcggcggccatggatctatcggcggaagctgctgctgctgctcgtcctcgcgttcggcgagtcagatctggagccgatctgacctcttagaggtccggttggggcatgctccgtacgagctggcgtggatgaagcggcggggcgagggaggaggctggtcgtcgcctggatcctctccatcggggcctcgcgcgatgatgtctctttgtattgataattattcgatgaactttcgataattattagatctagagatgttgttcgaggagccgtgt

SEQ ID NO: 5224 - DNA, 499 bp, Oryza sativa
  unsure (1)..(499): unsure at all n locations
  Clone ID: uC-osflcyp125g06b1
ggccggggctggtggtgccggggatctactactccgacgacaagatgctgcagtgcagggtgttcgcgtacgccgacacgcagcgctacaggctggggccaaactacctgatgctgccggtgaacgcgcccaagtgcgcccaccacaacaaccactacgacggcgccatgaacttcatgcaccgggacgaggaggtggactactacccgtcgcgccacgcgccgctccgccacgcgccgccgacgcccatcacgccgcgccccgtggtggggaggaggcagaaggcgacgatacacaagcagaacgacttcaagcagcccggggagaggtacagngtcgtgggcgccggatagacaggagaggttcatccgccgcttcgccggcgagctcgcgcaccccaaggtctcccctgagctccgcgccatctgggtcaactacctctcnncagtgtgatgagtcgtgggggtgaagattgcgaataggctcaacgtgaagccaa

SEQ ID NO: 5225 - DNA, 281 bp, Oryza sativa
  unsure (1)..(281): unsure at all n locations
  Clone ID: uC-osflcyp125g07b1
tgctcctcctgcctaacccaccaccgctttggtcctcctacacgcttcgtccgccgccgccgccgccgnagaagnagttgttgacggcgaatatgatgtctgacagtggctactacgacctcgacgaccacaaggtctccggattctttctgaaggagacggggccagatcagatgaccatcaagttcgacgactataacctacagatcttaccgccttccgagggcaagtgaaagatttgcggcgaatatcgaccgaacactgacgaggatgatacgtta

SEQ ID NO: 5226 - DNA, 460 bp, Oryza sativa
  Clone ID: uC-osflcyp125g08b1
ttctatgccatccagcaatcctggaattaccatcagaacttttctatgggggagaattaattgcctgtaaagaagatgaagtgtcgtctatttatgacagcattgatcttcctaacaagtcgttccctgttctttttgttggcattcagggatgtgatgagagagaaggaaataatccttcatggtttaataggattgaagctagtaaagtagtaaatatcattaggaatctgacaaggggtggtgatgttcgtgaagctgacataggagtcattactccatatcgacaacaagttgtcaagataaagaaggcacttgagacatttgaaatgcctgacttgaaagtgggaagtgtcgaacaattccagggtcaggaaagggaaataataatcatctccacagtcaggtctacagtaaagcataatgagtttgacaaattcttcaacctgggattcttaag

SEQ ID NO: 5227 - DNA, 492 bp, Oryza sativa
  unsure (1)..(492): unsure at all n locations
  Clone ID: uC-osflcyp125g09b1
cgacgatggttcacgtcagcttctaccgcagctatggtaagacattcaagaagccacgtcgcccttacgagaaggagcgtcttgatgcagagctgaagctagtgggtgagtatggactgaggtgcaagcgtgagctgtggcgtgttcagtatgctttgagccgtatccgtaacaatgcaaggcatctgctcacacttgatgagaagaatccacgccgcatctttgagggtgaggcactgcttcgccgcatgaaccgttatgggctccttgctgatgggcagaacaagcttgattatgtccttgccctcactgttgagaacttcctcgaaggcgtcttcagactcttgtcttcaaggctggcatggacaagtccatccaccagcttcgtgtcctgatcaggcaacgccacatcagggtcggcaggcaaattgtcaacatctcgtcngtcatggtgagggttgagtctgagaagcacattgacttctcactgac

SEQ ID NO: 5228 - DNA, 491 bp, Oryza sativa
  unsure (1)..(491): unsure at all n locations
  Clone ID: uC-osflcyp125g10b1
ggattaaagccaagatacaggagcgatcggctccgcggcgttcgtcgctgtaaaatccattgttcatcgtctccctcaccggcgtttgtgttcgtgagtgtgagagtgttcctgggctgagccaacatcgaagtcagcaactccatctccaaggttctctggatggccaccctcagccccacctcgctgcccaactggaacaggatgcggatctcggtgaacaccatcacgcagaaccgcgccaagtcgctgcggcggctgcttgcgtcactgcggaacacgtactacgtcgacgacgaggtggtgccgatcagcttcaacatggacagccgcgtcgacgcggcgacgctgaacgccgtcaactcctccgacgctgaaccagtactaatgtgattcactccacctgactgacattgctcaaagttgagcaacaagacttgtncatcgtgatgaacctgcttgtcagcacacagttgtaccggatgagctac

SEQ ID NO: 5229 - DNA, 411 bp, Oryza sativa
  Clone ID: uC-osflcyp125g12b1
gaagaagaagaggaggaggcgagctccgtttggtgcgaggcgccgccgcgcgctgcgggcctctactactacacgggcgctccactccaccatgcttccgagccggcagagaagcatcttccatctaagagaggagggtggcggggccaccaacgccgagcacctaagagctgaccactgcgacagccatggcgatacaccgtatcatcagtatccaccagcaacgccttccagacgaccggctgcagatcgtcctcgaccagacgaggcaccaccaccgtcagcagcacggccatgtcggactcaagcacacgcagatctgagtccccggcgccggcgggcacgtcaccgacggaagctgcatccttgcggcgactacttaggcgcgagcgtcatatgcatgctggagct

SEQ ID NO: 5230 - DNA, 471 bp, Oryza sativa
  Clone ID: uC-osflcyp125h02b1
gcgaattttgtagagaaaaaaaaatctcctccttaggggaagcgtcaaatcgtcttggtgggaggcatatctttgagaagaccctcaccggcaagaccatcacccttgaggttgaggcctcggacaccattgacaatggcaaggccaagatccaggacaaggagggcatccccccggaccagcagcgtgtgatctttgctggcaagcagcttgaggatggccggaccctggccgactacaacatccagaaggagtgcaccctccaccttgggctcaggctcaggggaggcatgcagatcttcgtcaagaccttgactggcaagaccatcacccttgaggtcgaggcgtctgacaccattgacaatgtcaagggcaagatccaggacaaggagggcatccccccggaccagcagcgtctcatcttcgctggcaagcagcttgaggatggacgcaccctggccgactacaaca

SEQ ID NO: 5231 - DNA, 479 bp, Oryza sativa
  unsure (1)..(479): unsure at all n locations
  Clone ID: uC-osflcyp125h04b1
ggcagcttcaagtacgtgttgctggcgccgtggggggcgcacgggtggtatgaggtggcgaccaaggggtggcgggaggtggatctcgggtacatcgccatcctcccgtcgttgctgctgcggatgctgcacaaccaagcctggatcaccatctcccgcctccaaaacgcccgtggccgccgccagattgttcgccgcggcatcgagttcgaccaggttgaccgcgagaggaactgggacgaccagatcatcctgagcggtatcctactatacctcggcgcactgtacgtaccgggcgggcaacacttaccgctgtggaggacggatggcgcggggctgatcgccttgctgcatgcggggccagtggagttcctctactactggttccatcgtgcgttgcaccaccactttctctacacccactaccactcgcaccaccactcnttaatcgtcactgagcccatcacatccgtcatcca

SEQ ID NO: 5232 - DNA, 494 bp, Oryza sativa
  Clone ID: uC-osflcyp125h05b1
tccttttgtgccatttacagctcccaatggggcccaaagccagctcgtctgctttgggtgccgtccagccagagcaacgtcggtttgctgcgcggtttgcagtaccgtgaccgctgtgcctgctcccgagcagaaatctagctgcaatgttcacaaaaatgtaaagacaaattaaaggggaatacaaacggcttcagggctccgcaatggcgcgcacgttgcgttgatggtgcctatgctcaggccgctcgcgaagaagtacacactagagttgttgttcgcatcttcgccgccgtcggtgaccgctgcggccatgaaggagtgtgtgcttgatgagtactccaccaagcacaggatctctatcgataggtttctccagctgaagatatttgtcaaggtgcatgatcgggcttaaaggtcactgcatacgtgaggtgcttgagcagtaggaatctgcatctaccatggatgttgatgctacacaaacaaaacaa

SEQ ID NO: 5233 - DNA, 498 bp, Oryza sativa
  Clone ID: uC-osflcyp125h06b1
gctcgatctcgccgcgcgcgctcagctcgtcgacaaggcggcgtgcacccaccaagatagcgggatgatccagtgagcgcgtggaggcggtgtttgattctagattgttctagaaccgaacgagcgagcttagctagctagctagctgctgctgcttcgatcgatcggtcgttgcctcatgcaggagttccagtccatcccggggctcgccgggcggctgttcggcggcgcggcggcggctgacatccggcgcgcgcaggcgcagcagggcccggcgtcgcggtgcggcgggataccgtcgccggaggcggtgaagtgcccgcggtgcgagtcgaccaacaccaagttctgctactacaacaactacaacctctcgcagccgcgccacttctgcaagagctgccgccggtactggaccaagggcggcgtcctccgcaacgttcccgtcggcggcggctgtcgcaagaccaagcgtagcggcagctcgtccgctgcgtt

SEQ ID NO: 5234 - DNA, 379 bp, Oryza sativa
  Clone ID: uC-osflcyp125h08b1
caaggatgacgcctgaggctactgcttccctgctgctgcttgctgaagaatatcaggggactgccggtgaaggacacaagtaataaagattcgacgtgtatccgttgtgagatatacatacataaatacataaatacaagtagtaagtaattaacggtgtgtgctgatgaatttggaacgattagtacaatttctgagggggtttcccatctcgcgggctaagagatgatgcgtcccattgtattttttttaatcatgtgcgatgatgatgacttcagtctgcagaggattagcccctttgttgttgtaatatttataccacacgttatttgcttctggacggccagccatgtataatactttgagacctctttctgtt

SEQ ID NO: 5235 - DNA, 266 bp, Oryza sativa
  Clone ID: uC-osflcyp125h10b1
atgaagacttatggattccttactcctgacttctggagggacaccaagttcgtcaagtctccattccaggagtacaccgacctcttggccaagccgactaaggctcttatgattgatgcacctgtcgagaacgtagaggcttaggatggcggagtaaagagagtctttgctagctcggacttgtctgatgcactttgttttacaatagttaagaaccggttgtcatccttggattgtgctgcgtctggatgtttctatttcctgtc

SEQ ID NO: 5236 - DNA, 492 bp, Oryza sativa
  Clone ID: uC-osflcyp125h11b1
gccggcatctccggaggacacatcaacccagcagggacttttgggctgttcttggccaggaagctgtccctgacccgggccatcttctacatagtgatgcaatgcctaggggccatctgcggagctggagttgtgaagggcttccagcagggtctgtacatgggcaatggcggtggtgccaatgtagttgccagtggctacaccaagggtgacggtcttggtgctgagattgttggcaccttcatcctggtctacaccgtcttctcagccactgatgccaagaggaatgccagggactcacatgttcctatccttgccccactgccaattggttttgcggtgttcctggtccacctggccaccatccccatcaccggtactggcatcaacccagccaggagccttggcgctgccatcatctacaacaaggaccatgcctggaatgaccattggatcttctgggttgggtctcttcgtggcgctgccctggct

SEQ ID NO: 5237 - DNA, 422 bp, Oryza sativa
  unsure (1)..(422): unsure at all n locations
  Clone ID: uC-osflcyp125h12b1
ccacccgccgctcgccgctcgcccaccatggccatggcgacggcgctccgcaagctctcctccgacgccctccgccgccagccgctctcccgcatcaccccgctctactacatggcgtccctgccggcgacggaggagagatccggagtcacctggccgaagcagctgaacgcgccgctggaggaggtggatcccgagatcgccgacatcatcgagcacgagaaggcccgccaatggaagggtctggagctcatcccgtcggagaacttcacctcggtgtcagtgatgcaggcggngggatccgtcatgaccaacaagtacagcgaggggtaccccggcgcgagatactacggtggaaacgaatacattgatatggccgagtcattgtgccaaaaacgtgctttggaggcctttcgcttgga

SEQ ID NO: 5238 - DNA, 468 bp, Oryza sativa
  Clone ID: uC-osflcyp126a01b1
atcattatctggttggagccgaagccggcgtagctgggcgcgggagctgtggctcgggccgcctctacttcttctgctgccttgcatcaacgccgggagccgctggacgtcggggagagtgcgtcgaacacctgcgtgcgctgccgacgtcgattcgcccctgcttcacccgcaccgtgccgcgcatcaccgacctatgccgttgctccaccgcacggtaaatacttgcgctcttagcaccctctactgacctagaaacatttggccccctcgatttgaggtgtgtgtgccgctgctagcctgccgacgggccgccattgcgccaccgttgagctcaccgtggacggcactagttccaaactaacctaggccatattattgcatgaattagttcactagagaccctagatggtgaatttaggctcggttagatttaattcgtcctctcccgcgccatggccgagctcg

SEQ ID NO: 5239 - DNA, 438 bp, Oryza sativa
  unsure (1)..(438): unsure at all n locations
  Clone ID: uC-osflcyp126a02b1
tggttctcatcgtcctaccttcacacagctgaaagggttccctcatatacaagataagggtaggaggagggccgggagctcgacggatttcgatcaattgtggtttttttttgtggtaaccgtataagagaggagattttgtttaacgtagctagatcatatctgagttgagttttagcaatggaggtgctgatccggtggagcaagctgccggcggccggctccttggtgctgtacgccgtcttcttattgctgtcggcggcagccacatcggaggccaacatcggggagtacgatgagtactggcagaagcgcaagctcatggctgatgccgccgccgaggctacctacaagcgtgaccccttcgaggtcaccaacagcttcaaccgcgccgtccacagatcggaggaggagagcgggaggagggagcntgcgatg

SEQ ID NO: 5240 - DNA, 503 bp, Oryza sativa
  Clone ID: uC-osflcyp126a04b1
gagtttgatgaagctaaagatgaccgttcttctggggaagaatcagaagatgccgggccaacatctgactcgaacaaaatttcctccaatgctgatgagccggtggcaaaatccagtgagacagatagagatcaggagggagacaaagatcatagttctggcagtgacattagtgaagctacgataaaaaatgctattgtcaaaagggcctcatattttagagagaactcagaaactattactttacaaggagttcgccggactttagaagaagatctcaagcttcagaagaaagctttggatgcttacaagtcttttatttcgacggaattagacaatattcttcaagaacctgcaaatgggacaaagaaaactagtaaaactgaatctcataaggattctggccagaagacaagcgaaaactctaagagagctcgtcaagactctgatacttctgaaataaatgatagccattgtgagaggggagacagtgatgaggatgc

SEQ ID NO: 5241 - DNA, 476 bp, Oryza sativa
  unsure (1)..(476): unsure at all n locations
  Clone ID: uC-osflcyp126a05b1
gttttatgggtgtgcttatgtgtgttactatttggggtttattacttaatgtatgctggttatcatgcactcggacaatacatacatcttttctaaagtgtcctagtggaaagctgttttccagagttcacggtctgcagatctgttctcttaaatgtcatataatatgttcatttatcagttacttgattacttcagatctgttccctttaggtacgtttggtgcggattacagaaatggtccatgatgcatactattctcgattgtatcttgctaaggtaaaatgacttcacatgaactactccctccatactcgtaaaggaagtcgttttggacagcaacacggtctccaaaacacaactttgacttcttgtttctataaaaatatttattgaaaagtgatatatgtatacttttatgaaagtagttttcaagacacatctattcatataatttttacattntcaaaactcac

SEQ ID NO: 5242 - DNA, 450 bp, Oryza sativa
  Clone ID: uC-osflcyp126a06b1
cggtttcccccgccgccgccgccgcggcgggacgggggcccagcgccggcgcgcgcggtagaaaccgcaagagcgaagcgcggcgagatccggagcccgcgccgctcgccgccatgcagccgccggtcctcctcaacatcgggggcagcaggtacgagacgacggcggacacgctcacgcagcgggatcccgggtcgctcctcgccgccgcgctctccggcgccgccgcccacggcctccccaccaccgaggatggggccgtgttcgtggaccgcgacggggagctgttccggcacgtgctcaactggctcagggacggcgccgtccccgcgctcgccgacgccgagtaccggcagctgctgcgggaggcggagtactaccggcttcctggattgatcgattgcataagtgaaaggattgaggattgggatgataagattgaagatcttc

SEQ ID NO: 5243 - DNA, 367 bp, Oryza sativa
  Clone ID: uC-osflcyp126a09b1
ttgcgcgtgggcgacgaggttggctcgcatgcggaagctcaagatgccatggggtgctgtgcacaaggatggatcatgcccttcatgggaagccatggttctcttcggatttggtctgcgccgggcataggtcggagatatcatctctggcatactgcagtagccacaacaatcttgcacaatgggatgatctctgcagaagatgcactgtagcaaccaatgatgtggtggacacatggagatcgaaatccaggcagctgagttcttgctgctcggagccattcaccaaggcgcgcagtgcgcataggatttctgagactgccagtgattctggggagatcaaccgggaacatattcctgcagatca

SEQ ID NO: 5244 - DNA, 469 bp, Oryza sativa
  Clone ID: uC-osflcyp126a10b1
cttttccccagatctccagccccaggagctccggggggttcccaatggcggtgagggtctatgtcgtgtactactctatgtatggacatgttgctaaactagctgaagagatcaagaagggtgcttcatctattgaaggtgttgaggctaaaatatggcaggttcctgaaactctccatgaggaagtacttggaaagatgggcgcgcctcctaagccagatgtgccaacgatcacaccacaagaacttactgaggctgatggaatcctgtttgggttccctacaaggtttggcatgatggctgcgcagatgaaagcattctttgatgcaaccggtggcctgtggagtgagcagagccttgcaggcaagcccgccggcatcttcttcagcactggtacccagggcggtggtcaggagactacaccgttgacagcaataactcagttgactcaccacggcatggtgttcgt

SEQ ID NO: 5245 - DNA, 509 bp, Oryza sativa
  unsure (1)..(509): unsure at all n locations
  Clone ID: uC-osflcyp126a12b1
gtttctcccaaaaaatcctcaaaatctcattggggacccgtgttatataaccgggggcggacattgggagggacgcccataggggtgctcgtttcatcgcgggacgagatcagatcgggctcatatcttgcaaatggccgcgccgcctacgacgccgcatcatgaaaagagagggttatgagaggaggaggctacaatgtttagcgggacacaccagaagtgcaaggtgtgcaccaagactgtgtactctatggaccagctgtccaccgacggggtcgtcttccaccgctcctgcttcaagtgcgaacactggaagtacaccttctaccttggcaactactcctcgatagaaggagtgccatactgcaagccccatttcgagcaactgttcaaggagaccgggagctacaacaagagcttccaataaccctggaaaacctcatacgagaagttgactcctgagctgacaagatcacctagcanagccgcactcatgttttcagggacac

SEQ ID NO: 5246 - DNA, 417 bp, Oryza sativa
  Clone ID: uC-osflcyp126b01b1
gcgaataaaaaaaaaatcatcagcacaagatcgagggggctttatctgaacaagggagatggcggactacgtgtatgggccggggcggaaccacctgttcgtgcctgggccggtgaacatctcggaccaggtgatccgcgccatgagccgtcagaacgaggactaccgctcgccggcggtgcccgccctcaccaagaccctcctcgaggacgtcaagcagatcttcaagaccaccaccggcacccccttcctcttccccaccaccgggacgggggcgtgggagagcgcgctgactaacacgctgtcgccgggggacaagatcgtgtcgttcctgatcgggcagttcagcctgctgtggatcgaccagcagcaacgcctcaacttcaacgtggacgtggtggagagcgactggggcta

SEQ ID NO: 5247 - DNA, 492 bp, Oryza sativa
  Clone ID: uC-osflcyp126b02b1
gtttttatggacataatgtcgcctataataggtggggaaggtgaaggtaactggctgttgccagatgttttggttaatgtgttgagggcaggcgatgatggtcctggtgtggtgagggaagttcttgcggatggatcttgtcgcgtcgcccttgggtcatcaggtaatggtgagatcgtgacggttcttccaaccgagctcgaggttattcggccaaagaagagcgacaagatcaagataatgaacggcaatttccgtggatactctggaaagctcataggtatagatggttccgacggcattgtgaagcttgatgacacatacgaagtcaagatcttagatatggtgattttggccaaactggcgagttgagatggatgtatattttgtacgagtccatcgtatagccaaatgtttgtaacagataccctttgtagtcaataaaaacgtttgttatttattccattatttagttgtatccagattttgaca

SEQ ID NO: 5248 - DNA, 234 bp, Oryza sativa
  Clone ID: uC-osflcyp126b03b1
ttttttttttttttttttaacaatcaggtaatacggggttgtagtaccaacgaaggggttaacttcagccacaggattccaagtacaaaatagaaagaaaacgtcggcatatgctgtagcgaacgagaaaccacctcctagatgatcttaggtactgataacggagtcaatgctaaacaacaaaactccaaaagtttagaggattgtctctacttaaataattccgggcgcctc

SEQ ID NO: 5249 - DNA, 481 bp, Oryza sativa
  Clone ID: uC-osflcyp126b04b1
aatttctctcctcttcagaaatcacgttcacacggcggtgccttcatcgctctgccgctccatctccctctccgccttctcccgttcctccccgcacctccctcccgctccaccatctctccctgtccatggccttccgcatcaatctcgatgtggtgatagaggcataagcttgtaaggagggagatccaacgcagccgacggtggcgtcggatggatgcggctcggatgcgatggtgaaggtgagagtgacgagcggatgcggcgtcgatggcgggggcggccacgagcggaggcggcgttgtcggcggggacggccacgagcggacgcggcgtcgtcggcgggggcggccatgagcggacgcggcgtcatcggccgcggcggcaactagtggacgcgggcgttggcgagatgctatagtatttctctttttctctggtcttgctcttctctgttcttcttgataccttgctagtcatg

SEQ ID NO: 5250 - DNA, 439 bp, Oryza sativa
  Clone ID: uC-osflcyp126b06b1
aattttgagtcgtggtaaagaagacggatggacggggggatgggcatgggcggggagcgatggacacgacgcgacccatcctggtttcccgaaacgcgctacgctgccgagcatctagggtttcccacccgctggagatcgatcgggatggggaggggtcgggtggagctgaagaggatcgagaacaagatcaaccggcaggtgacgttcgccaagcgcaggaatggcctgctcaagaaggcgtacgagctctccgtcctctgcgacgccgaggtcgccctcatcatcttctccaaccgcggcaagctctacgagttctgcagcacccagagcatgactaaaacgcttgagaagtatcagaaatgcagttacgcaggacccgaaacagctgtccaaaatagagaaagtgagcaattgaaagctagccgcaatgaatacc

SEQ ID NO: 5251 - DNA, 541 bp, Oryza sativa
  Clone ID: uC-osflcyp126b07b1
ggtgttcaagtcaattggaaccttgaggaaagaggttgcagaattacaggaaggattggcaaaagctcacaatcaggttcatctgtcggaaactagagtatcatctgcccttgataagttggcacaaatggagacccttgtcaacgacagactgttgcaagatggaggctctagcgcatctacagccgagtgcacttcccttgctccaagcacgtcatcagcgtcccgtgttgtaaacaagaaacctcctcgccggagtctgaacgtgtctggtccagtgcagccatacaatcccagtctgaagaacttctggtacccagttgctttctccagtgacctaaaagacgatacaatggtgccaatagattgttttgaggagcagtgggtaattttccgaggaaaggatgggagacctggatgtgttatgaacacatgtgctcacagagcttgccctcttcatcttggctcagttaatgagggcagaatccaatgcccttaccatggttgggagtattcaactgatggaaaatgtgagaaaatg

SEQ ID NO: 5252 - DNA, 492 bp, Oryza sativa
  Clone ID: uC-osflcyp126b08b1
cgctcccgcacgcgctgacgccggaaactgctcgggcatcagcgctcccatcacgacagcctcgccgatctgccccgcaggtgccggctcgccgcagtctacatcgccgcccactccgtcgtcatcgaatccgtcctcgggcaggaatcacgtcgccgccggtgccctccgcgccgatctgttcctcaccgccaccgatccccgctgccggctcgccctccaccgaccccccgccggaagcccttctgtcgccaggtctccgccgatgcattccacgccgagttgctcctcgccgccaccgatccctgctgccaggtcgctgtcgacgccttccgcaccgagctgctcctcgccgcgccgccacggcgacgacgatagactcctcagcaagttgctcctgccgaccacctagctagctagctaacgtctcgacgatgtgtttgtggctagctagagctctgatgcggcagcttggatggtgtgggctggaga

SEQ ID NO: 5253 - DNA, 445 bp, Oryza sativa
  unsure (1)..(445): unsure at all n locations
  Clone ID: uC-osflcyp126b10b1
gctgtcgcggaggcggatcccgaggcggcgacggcgactgtcggcggcggcggtttggtttccctcttgtttgtattttaatccgtcgtgggtgggtgatggaggtggagcgtcgtggtggtggggaggtgaacggggtggtggagatggaggacgcggnggggatactggtggactacctggtgcggccggcgctgcggaaggggagcaggatgacgcctgagaaccaggccgacgtcacgcgccaggttcatatggcagtcattctgtataactattaccaccgaacgcagttcccacagcttgcttttgctgatccaagcggctcttcaaatgtgcatctgttactcttggtgacagttcggtcgcgttctccaatatggtccaccaacataccaagagttctcgaaattctttagaggttgtgaatttctttgtgactgac

SEQ ID NO: 5254 - DNA, 523 bp, Oryza sativa
  Clone ID: uC-osflcyp126c01b1
acatcactgatgagtcaatccgagcttttgctggagcttctatgacaactgcttaggagaagaaatggccgctttatcttagcaccaaaaacacaatcctgaagaaatatgatggaaggttcaaggatattttccaggaggtctatgaagctgggtggaaatccaagtttgaggctgctggaatatggtatgagcatcgtctcatcgatgacatggttgcttatgcacttaagagtgaagggggctatgtgtgggcttgcaagaattacgatggagatgtgcagagtgatttcttagctcaaggctttggttcattgggtttgatgacatcagtattggtgtgccctgatggaaaaacaattgaagctgaagctgcccatggcacggttacccgtcatttccgtgttcaccagaagggaggtgaaaccagcacaaacagcattgcttcaatctttgcttggaccagaggacttgcacacagggcaaagcttgacgacaatgctagacttcttgactttgcact

SEQ ID NO: 5255 - DNA, 585 bp, Oryza sativa
  Clone ID: uC-osflcyp126c03b1
gcgcatgcttggtggttctgctcttgcacaggctttggatcaaattggaaatgactgcccagacattgatgatgttccctacttaaagaaagcttttgaggccgttcaggaattgcttagtcagcgccttatctcagctggccatgacattagtgatgggggtcttattgtgagtgttcttgagatggcatttgctggtaattgcggtgttaagctgaacattgactcagaagattcgggccttcttcaagcactctttgccgaggagcttggccttcttcttgaagtgcacttgaaagatctcagtgttgtgaagcaaaagcttgaagcaggaggcatttccgctaatgtaattggacaagttacagcatcaccagatattgagctagttgttgatggcaggctgcatctcaaggaaaaaacttcagatctcagggatatctgggaggaaacaagcttccagcttgaggggctacaacgcctgaaatcttgtgtcagacttgagaaagaaggactaaagcacagaacatcaccatcgtggtctttgctttcacttccaaattacagatgaaaacctgtgactgt

SEQ ID NO: 5256 - DNA, 254 bp, Oryza sativa
  Clone ID: uC-osflcyp126c05b1
gtgtaatgttagaatgacttacgttgtgaaacgggggaagtaagtaggacatgctgctaaatgaggatcacagtgttttgtcctgactagtggcggatcgtgagcctaggcaagtttaacaacaaatatagtatacacaaatctatacaaatttgtagatcattttagagtgagcatttgctttgctattttacactaaatcgttataagtatgtacactatatactattgttgtttcaattcatacggtgatt

SEQ ID NO: 5257 - DNA, 446 bp, Oryza sativa
  Clone ID: uC-osflcyp126c06b1
gctttaacttcaagtctatcagagattagttaagaggatccatatcattcagaggcggaaggagccagccaaggcacatcaaattaagctagaagtcgttgtaaaagctttgaaatggcttgaaattgacatggacgtggatgaggtggagtgcatcatggcgtgcctaatatacaagaatctcattaaaggatactttgctcataagagcaaagttcttgtcctcagcaaacaagatcctttcccaaagttgaatgggaagcctgtctagttcatagtcgcccctgaaaagaattaactatctcctattctgttgtattcggcacatgtttttgtaaaacgttgaaaaactattgcctgacagtaacatttgtattattgtaacagtggtgtttgtactagtgtaacaaagagaccatttcgcacggtaataaatgacacttatc

SEQ ID NO: 5258 - DNA, 492 bp, Oryza sativa
  Clone ID: uC-osflcyp126c08b1
gatattttcatgcaccggttcctgttgtcaagcggtgtccgaacttttaatcccgaggaagctgattggttctacacaccggtgtacactacatgcgacctgactccctccggtcttcccttgcccttcaaatccccaagaatgatgcgcagcgcaattgagctgattgcaacaaattggccttactggaatagatcagagggggctgatcatttctttgttacaccacatgactttggcgcttgcttccactatcaggaagaaaaggcaattggacgtggaatcctcccattgcttcagcgtgccaccctggttcagacctttggacaaaagaaccatgtctgcttgaaggacggctcgatcaccattccgccatatgcacccccacagaaaatgcaggctcatcttattcccccagacacccctcggtctatctttgtatatttccgtgggctgttctacgataccagcaatgatcctgagggtggatac

SEQ ID NO: 5259 - DNA, 505 bp, Oryza sativa
  unsure (1)..(505): unsure at all n locations
  Clone ID: uC-osflcyp126c11b1
aatatcagcagatgcacaagatccgagtaaaatgccacttctaggagatgcccttgtcattgccgggacaatattttttgcatttagcaatgttggtgaggaatactgtgtcaagaaaaaagatcgagttgaatttgttgccatgtttgcactctttgggttgcttgtcagtataattcagatattaatatttgaaaagaagaacttagttgcaattgcctggtctccaacaatgttatgtctgttcgcaggatttgcagtggcactatttatgttctacagcatcactccttttgtccttaagatgagtggatcaacattgttcaacctttcactcctaacatccgacatgtgggcagtcgccattcgagttttattctatcaccaacagataaactggctgtactatatagcgttcgcagttgtggccattggattgatcatctattcgctgaatgaccattcttncgacagtggaacaagaacaactgcanatacagaagca

SEQ ID NO: 5260 - DNA, 496 bp, Oryza sativa
  Clone ID: uC-osflcyp126c12b1
gatctctactggctcgagcacggcatcgagcgggggggcaccatgcccagtggggcaacggttggcgtcgcacatgatgcgttcaacactttcttcagcgagacaggcgctggcaagcatgtgcccagggccatctttgtcgacctggagcccactgtcatcgacgaggtgcgcactgggtcttaccgtcagctcttccaccctgagcagctcatctctgggaaggaggatgccgctaacaactttgcccgtggccattacactgttggaaaggacatcgtagatctatgcctggaccgtgtgcgcaagttggcagacaactgcactgggctgcagggattcttggtgttcaatgctgttggtggtggaactggatcaggacttggttctcttctgttggagcgtctctctgttgattatggaaagaagtccaagcttggcttcacaatttacccttccccccaggtctcaacagctggtgtagaaccatacaaca

SEQ ID NO: 5261 - DNA, 511 bp, Oryza sativa
  Clone ID: uC-osflcyp126d02b1
cccaaaaaacctcgcaaaaccctcggccctcacccgccgccgccgccgtcgcctccaccggtaaacggcagcatgagtcggcaccctgaagtgaagtgggctcagaggattgacaaggtttacataactgtacaattagctgatgctaaggatgctaaggtcaatctggaaccagaaggtgtattctctttctctgctacagctggaactgatgggaacttatacgaatcaaagctagagttgaacgacaaagtaaatgttgaggagagcaaaataagtgtaggtgttaggtccatattctgtattgtagaaaaagctgaggccaaatggtggaagaagcttgttcgagatgatcaaaaggcaccacactttgtgaaagttgactgggacaaatgggttgatgaagatgatgatggtgctgatgtcaacgtggatggaatggacttttcgaattttggtggcatgggtggaatgggtggaatgggcggaatgggtgatatgatgggtggca

SEQ ID NO: 5262 - DNA, 542 bp, Oryza sativa
  Clone ID: uC-osflcyp126d03b1
ctttaatgagacagggagagaaggacgacaagatgcatagccgtctgcgtggacgatcctgagtaccgccactacaacgatctcagtgagctttcgcctcatcgcgtccaggaaatccggcgtttctttgaagactacaagaagaatgaaaacaaggaggtcgccgtgaatgaggtactgcctgtgaccgctgctcgggatgccatccagtattccatgtaagtgatgaactgtccatcagttcagattttagaacgatatattgagtagtttacagtttacacgtgtaacagcaagatgacatctttgcaagtttgcagggatctgtatgctcagtacattgagcacttggggcagtagaccagtagtataacaccagaacaatccttcaccgccattgatcatgtgtttaatagaagtgccaaactaccttgaggtactaaaattttagtgtaaaattttgatacccgcaccgcaggtacactttctgaaagaccgtaaaatatctactcaaaaggggtaccccaaactgaaaaaatatt

SEQ ID NO: 5263 - DNA, 531 bp, Oryza sativa
  unsure (1)..(531): unsure at all n locations
  Clone ID: uC-osflcyp126d04b1
ctttttctcgcgaatctcctcccctcccccacggagctcgccgactgcgctgccggggctcgtgaaggggagacgacgccggaggagatcgccgccgccgccgccgccgcctcggacggccgcgcccccccgccgcgcgtgtaccacgggcttgggggattgattggtagcgatggcggcgccgccggctagggctcgggccgactacgattatctcatcaagctgctcctcattggcgacagcggtgtaggaaaaagttgtctcctcctacggttctcagatggctctttcacgactagtttcattaccacaattggtattgacttcaagataaggaccgttgagttggatggtaaacggattaaattgcaaatctgggatactgctggccaagaacgctttcgaactattaccactgcttactacaggggagcaatgggcattntactcgtttatgatgtcaccgatgaatcttcattcaacaacataagaaatnggatcagaaacatcgaacaacatgcctctgatat

SEQ ID NO: 5264 - DNA, 490 bp, Oryza sativa
  Clone ID: uC-osflcyp126d06b1
cgcccacgcccaccggcgagcctcagccaagccatgcgatcgcggcaatggcgacgtcgtcgacgctgagccagacgcagcggtacgcggcgggggcgctcctggcgctcgcgctccgccaggcgcagatccaccagtccgtcctgctcggatcccacggcctcgacgacgccccggccgccgctgccgcagtcccctctctcgccgaccccgtcgacgcccgccacctctggacccacgactcccacggcctcctccgccccgtcctcaggtttctcgagatcgaccacaaggcatggccgggcgtggagacgacggccgccacctccgagcccaagcaccacatcggagcctttctccggaaggtgttcgaggacgaggacgacggcgaggcggcggcggcggagaggtcggagcaggagctcgcgctcgccaaggccgtcgaggcgatggcgatggggctggagaacgacgtcgtcgcggccgacga

SEQ ID NO: 5265 - DNA, 429 bp, Oryza sativa
  unsure (1)..(429): unsure at all n locations
  Clone ID: uC-osflcyp126d07b1
cccgaatcgacgaggcaccgaaaaaaagaaaaaaaaacacacaaaaaataaagaagggagaacgaagccgaccacccccatcggttccccttcctcctcgcagatctccgacgccggccggccaccgccatgaactcctactccggcgaccgctcctcctcctcctcctcctcccgccccaccaccacctccttcgactcctaccagttcgacttcggcgtcaactcgtcccgctcctctgcgtcccgccccctcagaccggggcccggggccaccgcggggcgcggctgncnncnncngngnnngcgnccgcggcagcgcgtggacgcaccagccggctaagacgacggcggggacccacctagccgcgcccgcctcctcggcggtgggggctggatccggacccacgttcatggtcggcgacatctt

SEQ ID NO: 5266 - DNA, 490 bp, Oryza sativa
  Clone ID: uC-osflcyp126d08b1
ccggccaccaactttgacccgtcctcctcctccgcatcccccatcccctcctccccggcggcggcggcggcgcggaggcggcggcacgggagcggctagtggtttcgtcggcggaggcggaggcggggccaagatgttcgggcgcgcgccgaagaagagcgacaacaccaagtactacgagatcctgggggtccccaagaccgcctcccaggacgacctcaagaaggcgtaccgcaaggccgccatcaagaaccaccccgacaagggcggcgaccccgagaagttcaaggagcttgcacaagcttatgaggtattgagtgacccggagaaacgtgaaatctatgaccaatatggtgaagatgccctcaaggaaggaatgggtggaggcggatcccatgttgatccatttgacatcttttcatcattctttggaccttcttttggtggtggtggcagcagcacgggcagaaggcaaaggaggggagaggat

SEQ ID NO: 5267 - DNA, 525 bp, Oryza sativa
  Clone ID: uC-osflcyp126d09b1
ctttcgatcgagcagggctcgtcgtcggaggtggggctggtgccggacgccatctgcggcggcggcggcggcggaatcatcgagctcgacttcgcgcagtccaaggcggcctacctgccatacgccccgtactcctcctcttcagcggcgatgaagggacggcaaggccagcgcgtgaggctgtacgtccgcggcaccatcctcggctacaagaggtcgaagtcgaaccagtacgagaacacgtcgctgctgcagatcgagggggtgaacaccaaggaggaggttgggtggtacgccgggaagcgcatcgcctacgtctacaaggccaagacgaagagcaacgactccaccatccgctgcatctggggcaaggtcacccgcccgcacggcaactccggcgtcgtccgcgccaagttccggtccaacctcccgcccaccttcatgggcaagaaggtccgcgtcttcatgtaccccagcagcatctaaaagcaaccaaggtttcttgcctatgctgcgaaactgata

SEQ ID NO: 5268 - DNA, 458 bp, Oryza sativa
  Clone ID: uC-osflcyp126d10b1
ggttgattcaatcaatgatattgtaaggtatcgggttggtgggagtgtgttaggtgatccacacttgtcttcgattagttcttatcagctgtatgtggaggtagtttgcgaagagctcgagtggcttccattttacagtggtgatgtgccagctgcaacaattgaaggtagagaggatgtgcataaaggagaaataatatcaagagtgctaaatgtgtgctcttattggatgactagttttataaagtacagctcatggcttgagaacccttcaaatgtaaaggcagccagatttctgtccaaggggcattccatgttgagtgattgcatgaatgaactggacttaacaaagtatgatatgccaaaagaccaaacctttccagaagccaaagaacacttggttgctaggacagagctagcctcttttgacaagtcacttgaaagtgttgaggaagctt

SEQ ID NO: 5269 - DNA, 398 bp, Oryza sativa
  Clone ID: uC-osflcyp126e01b1
ctcgtttttattttaaaaaaaaaaaaaaaaaaagggggaatataaaaaaaaagggggggaaaaaaaaaaaaaaaaaaaaaaaaaaaaaaaaaaataaaaaataaaaaacaattgggggggcggcctttatgtttaaaacttgcttacctcctcggggggccgcgtttttagtattccctgtgtcccccccccatttcctcggcgggccgttttttttttgggccccggaagtaaaaatcgtggggccccctttttaacccgggtgggggggaaacccccgttgttcccccattttatttcgttgggggccccccccttttttccctttcggtgtataaggatagggggcccggacattggccctctttcccagtggcgtccccccggagggggggggg

SEQ ID NO: 5270 - DNA, 492 bp, Oryza sativa
  Clone ID: uC-osflcyp126e02b1
ccctgtttacgagaggaggagaagaagaaccgcgcgacaccccaccccacctcccgatcgccaagaaccacaatccccaatccacccaataactctaattcctcccccgattcgccctcgaccaagaaccactcggatcgatcaaagccgccacctttccaccaaatccccaatctttttttttcttcttcttttcttgcaattgatgcgcttcgccatcgggatttgaggggaggaagaagaaggggatggcgtgcagggggttcttcgagtgggtcctgaagctgctcaacttggtggtgatggtggtcgggctggccatgatggggtacggcgcctacctcctcgtggcgtggctccagctgctgccttcgccgccgccgctgccgcctgcgccagcggtggctcccggcggcggccgaggcggccagatggtgcggctcgggaggccgctgctgctcctcctcgacgtgtcgtccttgcccgatggga

SEQ ID NO: 5271 - DNA, 499 bp, Oryza sativa
  Clone ID: uC-osflcyp126e05b1
tggaagtggcgagtgccaatgcccttttatgcccaatttctggctgtggtgctcatctagattgcctggagaactttgaggaccactatcgcacccgtcatactgcttcatgctctgtatgttggagagtgtatccaacttcaaggctgctgagtattcatatttctgaggcacatgattccttttttcaagcaaaagttgcccgtggttttccaatgtatgagtgtttggtggagggtggggtgaagttgaagagctacaaaagtcggcagcagcatcttcttgataagcaccagtttcccaagtcatttgaattcttcaaaaaagcacgcccttcgcaacgccagcggaacaagaaccagaagcaacggcaaacagttcacaagggagacgagacaagcgaaacactaatggatgttgatgggaagaagagctcaaggtacatgaattccagatatcggccaaaagcacatgatggaaaagagtcaaaagaaaatga

SEQ ID NO: 5272 - DNA, 541 bp, Oryza sativa
  unsure (1)..(541): unsure at all n locations
  Clone ID: uC-osflcyp126e06b1
ggctgatggaaagactcaacaagccttgaaggttgcgaaggcagtgaagtctgggtgaatcaagagaaagtcaaagaagatccgcacttcggtgacatttcacagaccaaagaccctgaagaaggcgagagaccctaagtacccaagagtcagtgcacctggcaggaacaagcttgatcagtaccaaatcctcaagtacccccttacgaccgaatctgccatgaagaagattgaagacaacaacacccttgtcttcatcgtcgacctcaaggcagacaagaagaagatcaaggcagctgtcaagaagatgtatgacatccaggcaaagaaagttaacactctgatcaggcctgacggcaagaagaaggcttacgtgaagctcactccagactatgatgctcttgatgtggccaacaaaattggcatcatttaagttagggcgctttttttcatcatgttgaacgtaagattntggttggctagttcttaatgttgaacagaaccttataacttgcaaaagacatcttgagtttgttgagcg

SEQ ID NO: 5273 - DNA, 503 bp, Oryza sativa
  Clone ID: uC-osflcyp126e07b1
gaaccccccctcgacacgccgtcgccgccgaggggagagagagagaggccgccggccgccgctaccactgacccccccccctcgccggagcgccccgtcgccggtcgggtttgatcgatggcgtccaagaggatcctgaaggagttgaaggacctgcagaaggaccctcccacctcatgcagcgcaggtcctgtgggtgaggacatgttccattggcaagctactattatgggaccctcagacagcccatttgctggtggggtattcttggtgaacattcatttcccaccggattatccttttaaaccaccgaaggtctctttccgcaccaaggttttccacccgaacattaatagcaatggcagcatttgcctcgacatcctcaaggaacagtggagtcctgcacttaccatatcaaaggtcctcctgtcaatttgttcactgctgacggacccgaaccccgatgatccgttggtgcccgagattgctcacatgtacaagac

SEQ ID NO: 5274 - DNA, 478 bp, Oryza sativa
  Clone ID: uC-osflcyp126e08b1
tgtgaggataggtgatctggcaagtgctgtttgatgtggctagtgtaaaattctcacattaacactaaccaaattggtgaatacgaagaaagccatgaagtcccataagtttggtacatgcagctctgcattgcctgaatatgcaaactaggtggatctaggtttatgtgatgagatcaaaagaatctgatgaaagatccatttccagaaagcaaggccagtgggttggaaataacaccagaagttgaagtggatgtccagtgacgctgctccggtggtccttataatcgtttcagtcatactgatcactatgaactctgaaggcatccatgaaattcggctgttgaacaggtgtgaaaataacgtgtaaccaaacgtggatcggctgttgtacatggcgttgtgaaaacagcagccaaggggaacgcaacctgtcttctccttaatttaccggaacagtgtagtctgttggtttaat

SEQ ID NO: 5275 - DNA, 484 bp, Oryza sativa
  unsure (1)..(484): unsure at all n locations
  Clone ID: uC-osflcyp126e10b1
gcgtctccggcgatctcccggccatggcgactggccgggccctctcctccctcgtccgcgccgcctccaggctccgcggggcctcgcccgccccgcgcccgcgcgggccgctccaccgaccgtcgccatcggggtacctcttcaaccgcgccgccgcgtacgccacggccgccgcggcgaaggaggcggcgcctcccgcgcccgcgacggggaaggccacgggtggaggtaagatcaccgacgagttcaccggcgccggcgccgtcgggcaggtgtgccaggtcatcggcgccgtcgtcgacgtgcggtttgacgaggggttgcctcccatcctcacggcgctcgaggtgctcgaccacaacatccgcctcgtgctcgaggtggcgcagcaccttggcgagaacatggtgcgcacaatcgctatggacgggactgaggggcttgtccgcggtcagcgcgtnctcaacaccggctccccaatcac

SEQ ID NO: 5276 - DNA, 430 bp, Oryza sativa
  Clone ID: uC-osflcyp126e11b1
cttcgcgctctcccccatcctcccgtaggttagggtaggctagggtttcgaggagctcgcggaaatggtggccttcaggttccatcagtaccaggtggtggggcgcgcgctgccgacccccggcgatgagcaccccaagatctaccggatgaagctctgggccaccaatgaggtccgcgccaagagcaagttctggtacttcctgaggaagctgaagaaggtgaagaagagcaacggccagatgctcgccatcaacgagatcttcgagcgcaacccaaccacgatcaagaactatggcatctggctgcgttaccagagcagaaccggttaccacaacatgtacaaggagtaccgtgacactacattgaatggtgccgtggaacagatgtacaccgagatggcttctcgccaccgtgtgagattcccttgc

SEQ ID NO: 5277 - DNA, 478 bp, Oryza sativa
  unsure (1)..(478): unsure at all n locations
  Clone ID: uC-osflcyp126e12b1
ggtggtcggaggagccatggaggtgttctactagctcntgttcgggggcctcggggccgtggtggccgggctggagctcggcaagagcgccaaggaccgggtcaccacctcccaggccttcaactccttcaagaacaactacgtcctcgtctactccctcatgatgtccggggactggctgcaagggccgtacgtgtactacctctacagccagtacggcttcgacaagggcgacatcggccgcctcttcatcgccggcttcggatcctccatgctcttcggcaccatcgtcggatcactcgccgacaagcangggaggaagagggcgtgcatcacctactgcatcagctacatcctcagctgcatcaccaagcactcccccgagtacaagatcctcatgatcggccgcgtgctcggaggaatcgccacctcgctgctcttctcggcgttcgagtcatggctcgtcgcggagcacaac

SEQ ID NO: 5278 - DNA, 491 bp, Oryza sativa
  Clone ID: uC-osflcyp126f02b1
cgattgtagaaaataaaacagccgacattattcatgaaacacgcaaattgaacataggaagaaaaggagctggctcaactacacaaggagaagctccacaaagatttactcaaaggaatcttccacaaaatccacttgactacgaaactcaattgaaggcatctcgcgacgtaaggtggccaatatgtgtcactagatatgttgcttagtgctacattttgcatcttggaatccacgtggtttccaaatttaatctggtggcatttttgataaacatcatttttacctgatagctgttcaagttttttttttgtgttgagcgtgatatctgtgtgattatattctttgcaaagtatttttcattaaacatagcctttcagtgcttatttcatcctgccctttattttttctctggttgacgaacagtggcatcagtttagtaatcttttgtctctcatcggcctttctgttggagtggattagtgacccat

SEQ ID NO: 5279 - DNA, 512 bp, Oryza sativa
  unsure (1)..(512): unsure at all n locations
  Clone ID: uC-osflcyp126f04b1
gccggagttatctatgttatgacccatgactctatgggtcttggagaagatggtccaacccatcagcccattgagcacttggtgagcttccgtgcgatgcccaacattctgatgcttcgtcctgctgatggtaacgagactgctggggcatacaaaatcgcggtcctcaacaggaagaggccatccgtccttgctctctccaggcaaaagcttgctcagctgcctggtacctcgattgagggtgttgagaagggtgggtacatcgtctctgacaactcaactggcaacaagcctgacttcattgtgatgagcactggctctgaactagagattgtcgccaaggctgctgatgagttgaggaaggaggggaagactgtccgtgtcgtgtcatttgtttgctgggagcttttcgatgaacagtcggctgagtacaaggagagtgttctccctgaggctgntactgcaagagtcagcctttgngcagggtctactcttggatggcagaagtacgt

SEQ ID NO: 5280 - DNA, 490 bp, Oryza sativa
  Clone ID: uC-osflcyp126f05b1
gaggtggagtcttctgacaccatcgacaacgtcggggccaagatccaggacaaagagggcatccccccagaccagcagcgtctcatcttcgccggcaagcagctggaggatggcaggacccttgctgactacaacatccagaaggagtccaccctccaccttgtcctccgcctccgtggtggcatgcagatctttgtcaagacactgaccggcaagaccatcaccctcgaggtggagtcttctgataccatcgacaatgtcaaggccaagatccaggacaaggagggcattcccccggaccagcagcgcctcatctttgctggcaagcagctggaggatggcaggacccttgctgactacaacatccagaaggagtccaccctccaccttgtgctccgccttcgtggtggtatgcagatctttgtcaagaccctcacaggcaagaccatcaccctggaggttgagagctcggacaccatcgacaacgtca

SEQ ID NO: 5281 - DNA, 356 bp, Oryza sativa
  Clone ID: uC-osflcyp126f06b1
gatttgccctccttcgcggggcccgcagccatgaggcatgccacaaaggcgatttaccggctgatgcgctccgactatgtcaactgcagaaaaggttgtgaggggggtacgctggccggcgagcaagacgttcttcataacatggaataatctgatgtgattgccttacacctgacagtgcatgttaatgacatccgctggtggcgctatactgctggtcaactgctaggcgctctctaggtgatggaggacattgctggagaacgcgtgatatacactggcgactactatcatgaggagaatcgacccctgaaagctgcggaacgccactagccatacaatgatcatgccaacat

SEQ ID NO: 5282 - DNA, 497 bp, Oryza sativa
  Clone ID: uC-osflcyp126f10b1
gtcgctgccgtcctccccggcactcccaatccctgtctcctccatgccgcaccgcctccccatcgtcgcagccgccccgtcgcccctgctcgcctgcatccaccacaccgcctccctccccagtcgagacggcgtcgcctcctcgcccccttcgcagccagattgacaccgcgccgttcaatccaccgcctcaagcaccatgcatcgtcgtcgttgcaggcgtcagcacgggcgcgggcgctgccgatcccgagtcgagacgacgtcgtccgctgctgcttctccaccactgacggttgccctgcgtatatcctccctattatcgcggtccccacctgctcctgaatcctgatccacaaaaacagcggagcgccgtcggcctctctgcctccctgcgaccaccagtggcatctgccccgccgtcggctctccctcacccgcgactcgccgacgatggtgctccacaaaccattcaggccgtcactggtctccggagc

SEQ ID NO: 5283 - DNA, 500 bp, Oryza sativa
  Clone ID: uC-osflcyp126f12b1
gccacatcttattgtcacttccatctcattctgctaattgtcatcactagcttctagctagcttaattaattaattagccatggcggaggagaagcaccaccaccacctgttccaccacaagaaggacgacgagccggccaccggagtagactcctacggcgagggcgtctacacgtcggagacggtgaccaccgaggtggtcgccggcggccaggacgagtacgagaggtacaagaaggaggagaagcagcacaagcacaagcagcaccttcgcgaggccggcgccctcgccgccggcgccttcgccctgtatgagaagcacgaggcgaagaaggacccggagaacgcgcacaggcacaagatcacggaggagatcgcggccacggcggcggtcggcgccggcggctacgccttccacgagcaccacgagaagaagaaggaccacaagagcgccgaggagtccaccggcgagaagaagcaccacctcttcggctgatcg

SEQ ID NO: 5284 - DNA, 373 bp, Oryza sativa
  Clone ID: uC-osflcyp126g01b1
ttccccttgacctcctcccctctccgccgcctcgggggcaagccctcctcctcccgcgccgccgccgccgccatgtcgtccgccatcgccgcgccggtcgagcacatcgtgctcatcaaggtccgcccggaggcggcgtcgtcgggcgccgccgcggcgatggtgtcatcgctgcaggcgctgtccacggcggtgcccgggctgtcgtacatccacgtcggccccgtgctccgcctccggtcgccggcggcggaggcgctgggtccgacccacgtcctccactcccgctacgccaccaagcccgacctggcggcgtacgcggcgcacccggcgcacgtcgccgccgtgcaggggcacgttctccccaacgcgc

SEQ ID NO: 5285 - DNA, 406 bp, Oryza sativa
  Clone ID: uC-osflcyp126g02b1
gtttgttccgattccgctggcggcggggatccctacggctctcgtcggcgtcaccgtcgccgtagccaacaagatcatccgccgcgatgccttgtatctattgcgactactgcgacacctacctgacccatgactctccatctgttcgtatacagcacaatgctgggtacaaacataaggcaaatgttcgaacctactatcaacaatttgaggagcagcaaactcagagcttgattgatcaaagaattaaagaacatcttggacaagctgcatctatacaagttggtgctcctttgaatcaacatcttctctcatttccaggaggagtgcctcgacctcgtcttacaattctgacaacacctggcatgccacttggtgtttctcaagtacctggtgcacctttgat

SEQ ID NO: 5286 - DNA, 431 bp, Oryza sativa
  Clone ID: uC-osflcyp126g03b1
gtagatacaagcctagagagtactatggagcagaggaaatttttgttgtgcctaattcttggcttacttgcgacttcaggacctgccaagaccgtcaatgctgactcgccctttgatttttattatctcatcctcatgtggcctggagcatactgcactgacagcgagtatggttgttgcgtgcccaagtatggttacccgtcagaagatttcttcgtcaagagcttcatgacctttgactcgtcagagaacacagctgttgtcaggtgcaactccgacaatcctttcgacattaacaagctagactcaatcgagaacaacctgaaccactactggagcaacatcaagtgtcctcgcaccgacggcgtgaactcatggaagagcgagtggaacagctatggcgtctgctccggcctcaagagttggactac

SEQ ID NO: 5287 - DNA, 523 bp, Oryza sativa
  Clone ID: uC-osflcyp126g06b1
gccgagtccttggaagctaaggagctcaagaagcactgcgaggatatagctattcgcaatcttgattacattttcacagtggcagctccatcagttatgaatgcttctcctgaaactcttgcaaacttagagagattgctggatgaaaaatcgtcagagccatggagtcatcgtcgccttcccacagtgacagctacttatcctgctgtcattgatagtgatgaagagggagatgaagcaggaggatttcttaggctcagggacagtcagaagtctgcatcgaagtcatatggaatatcaagttatgggaacttccttgagaaagatagcaatgctggacaagctgcctctaaacagatcagggcacttcgcaagaaactgcagcagattgagatgctcgaggctaaacaactggatggtcatcagcttgataatcagcagctagcaaagcttgagtcaagggctgcccttgagggtgaacttgcagaactcggcattcccacagatttaagaactccagtct

SEQ ID NO: 5288 - DNA, 471 bp, Oryza sativa
  Clone ID: uC-osflcyp126g09b1
ggagagattgggttcagcacctacttctcgatggctaggggcaatgccactgtccctgccatggagatgaccaagtggtttgacaccaactaccactttatcgtccctgaacttggtcccaacaccaagttctcctactcttcccacaaggctgtgaatgaatacaaggaggctaaggcgctcggcgttgacaccgtgccagtacttgttggaccagtttcatacttgttgctctccaaacctgccaagggtgtagagaagtcgttcgctcttctttcccttctgagcagcatccttcctgtctacaaggaggttattgctgagttgaaggcagctggtgctacttggattcagtttgatgaacccacacttgttcttgaccttgactctcaccaattggctgcattctctgctgcatacacagaacttgagtccgcactttctggattgaatgtgcttattgagacatac

SEQ ID NO: 5289 - DNA, 546 bp, Oryza sativa
  Clone ID: uC-osflcyp126g10b1
cttataacgtcgccatgggagccctcgtgggcggggcgttccagaatgacacttgggtcgactctcgggacaatgctgttcagacagagtcaagcacttacaacagcggcaccctcgttggtcttctttctggtctggtcacaacttcctctgtggcgcagtcgttcacctagagctctctcagagtttgggcaatggctttgaccaaccgggaggatatacatgtagccatgtacaatgagagatttttggcgtgaccaaaggcaatgtgccatcagcgaaacgccttcacggtgttcttcgttgttcatcttttgggtgatgggtggttagcagtagtagttcttgtgccatagtgctattgtttatacaaatactgctgcgtagttgcatccggtttgctggtgtactatctgatactacgagtgttgtatttgtaggacggattccatttgttgattctaaaatgatctctggtagcttgtattgatgatctgtaaaatccctcccaagatgaacattgcactgaacatgtgagatcacatg

SEQ ID NO: 5290 - DNA, 454 bp, Oryza sativa
  Clone ID: uC-osflcyp126g11b1
ctcatctgaccgcagtttagctccctcttagacagaggccagagggagaaagagagagagagaggagaaggctgagactgaacattcaagatggccggaggtgtcatcgtggcgaacgacggtgatggctccgccgtggaccacggcggacggctgacgttctcggtggtcatcacctgcctcgtggcggcctccggcggcctcatcttcggctacgacgtcggcatctcaggcggcgtctcgacgatggagccgttcctgcggcggttcttccccggcgtggtgaggaggatggcggaggcgaggcccgggaacgagtactgcgtctacgacagccaggcgctgacggcgttcacgtcgtcgctgtacgtcgccgggctggtggcgtcgctcgtggccagccgcgtcaccagggcgatggggcggcaggccgtcatggtcatgggcggcgcgc

SEQ ID NO: 5291 - DNA, 434 bp, Oryza sativa
  Clone ID: uC-osflcyp126h01b1
gcatggtgcttgtgaacatcgagcagcagtcccctgacattgcacagggtgtgcagggccacttcaccaagcgccctgaggagattggtgctggtgaccagggacacatgtttggatatgcaactgatgagacccctgagttgatgcccctcagccatgtccttgctaccaagcttggcgctcgtcttacggaggttcgcaagaatgggacctgcgcatggctcaggcctgacgggaagacccaagtgactgttgagtaccgcaatgagagcggtgccagggtccctgtccgtgtccacaccgtcctcatctctacccagcatgatgagacagtcaccaacgatgagattgctgctgacctgaaggagcatgtcatcaagcctgtcattcccgagcagtaccttgatgagaagacaatcttccatcttaaccca

SEQ ID NO: 5292 - DNA, 406 bp, Oryza sativa
  Clone ID: uC-osflcyp126h02b1
gtgtaaggagtaaacaagcaaggcaaagaggttatggatgactttaaggacaaggtcaatgctgctgtcttcccaggtctgcaagggggaccacataatcataccattactggcttagctgttgcgcttaagcaggcaactactccggagtacagagcttatcaagagcaagttatgagtaactgtgcaaaatttgcacagagcttgacagcaaaaggctacgaacttgtctctggtgggactgacaaccatttagtgttggtaaatctcaagagcaagggcatagatggttcaagagtggagaaggttttagaaaacgtgcacattgcagcaaacaagaacacagttcctggtgatgtttcagctatggtaccaggaggcatcaggatgggaaccccagcactga

SEQ ID NO: 5293 - DNA, 439 bp, Oryza sativa
  Clone ID: uC-osflcyp126h03b1
gagaatcaaccagacactgcacacatcatcatctggggccccgagaccgggtgatcgggggttagcttagctagctaaattaagctgcgtgcagcatggggctcctcgaccagctctgggacgacacggtggccgggccgcggccggactccggcctcggcaagctccgcaagtacgcctccttctccccttcctcctcctcctcgacgatggcggcgtcgccgtcgcccatctcggcggcggcggcggcggccgacgcgccggccgtgacgcgcagcatcaccatcctccgcccgccggcgctgtccgtgacgtcgccgcgcggcagcgagtcgggcccctccacgccgtcgtcgccggccagcgtcccggactcccccttcggctcagcaccgacgctcaagggatcggagggctggaagaagctgcgccgtggggc

SEQ ID NO: 5294 - DNA, 479 bp, Oryza sativa
  Clone ID: uC-osflcyp126h06b1
cgactttgactctgccatctatgaaggacagaagtgagcttcctactcctcggacggaaggtgaaattttgtcatcttcaaatttgaaggccttctcgttcaatgatctaaggaatgcgacaaagaacttccgaccggacagtcttcttggtgaaggaggatttggacatgtctacaaaggttggattgatgaacacacgcttgctccttcaaaaccaggaagtggtatggttgttgccgtcaagaagcttaaaccagaaggtttccaaggacacaaggaatggctgacagaggttaactaccttggccaacttcaccacaaaaatcttgttaagctgattggctattgctctgatggcgacaaccgacttctggtgtatgagttcatgccaaagggaagtttggagaatcatctgttcagaagaggtgctgatcctttgtcatgggcaataaggctcaaggtagctataggtgctgct

SEQ ID NO: 5295 - DNA, 467 bp, Oryza sativa
  Clone ID: uC-osflcyp126h07b1
ttcaaaccccagcgcgatccgaggtagaaggggaggaagaagaagaagaagaggaggcgatcgagagatggagagcgccatgttcgggctggagacgccgctgatgacggcgctgcagcacctgctcgacattcccgacggcgagggcggcgccgccgggaagcagggcgcgaccggtggcccgacgcgtgcgtacgtgcgcgacgcccgcgccatggcggcgacccccgccgacgtgaaggatctgcccggggcgtacgcgttcgtggtggacatgcctgggctcaagtcctccgacatcaaagtgcatgtggaggaagagaggctgctggtgatcagcggggagcggcggcgcggcggcggggaggagaaggaggagtcgtgcaagtacctgcggatggagcggcggatgggcaagttcatgcgcaagttcgtgctccccgacaacgccgacgtcgacaagatct

SEQ ID NO: 5296 - DNA, 377 bp, Oryza sativa
  Clone ID: uC-osflcyp126h08b1
gtctactgcagcaactaataaacgatggatcgggcgaaccttgccgagcccgtggtggggctactggcggcggtggccgcaacgctgccggcgccgtcatggcatggtcttcgacctatatcatgcccggcgaccccaaccaccgatactgcggcggatgagatgaccaagaggtgctgatgaaccacgaggagtacctcgagaagaaatctctgtacgccatcaatgccgactgcgacatcggaggtaagaccatcgacgcaagcctttacacggccaacgaggccaatgtgacgtctactgttgaccacaatgggactctcaacgacaccaccttcaccaccatcgaggctgcgctcgagaaggtccccctaggg

SEQ ID NO: 5297 - DNA, 402 bp, Oryza sativa
  unsure (1)..(402): unsure at all n locations
  Clone ID: uC-osflcyp126h09b1
caaccgcgagagccgagagagaagcctttttccgcgatcgattcccttctctccgctccgcatcgccatggcctcctcagcaccgacgccgccgccgctcctcccggtgaccaacccggcagccgcggggtcgtccccggccgccaccgccgtgggatctgacgcgccgatcgcaaccccggcgttccggctcttcctgagcaagctctccgactcggcgcggcgctcgctgtccgaccggcggccgtggacggagctggtcgaccgctcggcgttctcgcggccggactccctctccgacgccacctcccgcctncgncgnaacctcgcctacttncgcgtcaactacgccgccgtggtggccttcgcgctcggggcgtncctnctcgcgcaccccttctc

SEQ ID NO: 5298 - DNA, 528 bp, Oryza sativa
  Clone ID: uC-osflcyp126h10b1
ccgatcctgagttttgatcaggtggtccaggagggggagaagcgaggggtcagcgggcccagcttgcccgcggatatgattgaggccgcaaagagcgtcgggattcagaagctactgctgctgagatacttggacatgcaggcatcggcttggccgttgggtccagccattaggtcctgctcacttctccggaacaggatgctagttgacccttcatttctctttaaaatcgggactgagatagtcattgacacatgttgcgcgacattcgcggaggtacagaagagaggggaggagttttggtcggagttcgagttgtatgcggcggatatgttggtaggcgtagttgttaatgtagctttagttgggatgttggcgccatatgctcgatttggtgggggatctgcatctccaggtcttcttgggcgtgttaggcatgcttatgactctctcccaaacagcgtgtttgaagctgaaaagccaggatatagtttttccattcaacaacggataggaaccatacttttt

SEQ ID NO: 5299 - DNA, 493 bp, Oryza sativa
  Clone ID: uC-osflcyp126h11b1
ggtaacaggggagggaggtagcatctggggaccggcaaggctgcaacacagtgatggtgaggttggaaggaatgagaaagacctgtgggggcatgtgtgattgaatcattagagatatactaaaaattagagggagtataaggcacaaccacttttaatccaaagaccaagaaataattactatcatctcctagtttggatcaccctaataaatataatgtatgcatacaatagaattagagatcttgagagcagaggatttaaaaaagtaataatttaatggagaagaggtcctaattaattatttgcatgcatccataccttatattatggaacatctaaccaaagtagttgtgccttatattatggaatggagggagtatatgcactgtacttcattttgtctaacaatggttggttgtctgctggtgttaactggagcggaattaatacaattgccatttgtcttcacttgttttcactatgtccacac

SEQ ID NO: 5300 - DNA, 574 bp, Oryza sativa
  unsure (1)..(574): unsure at all n locations
  Clone ID: uC-osflcyp126h12b1
gagcttgtcaggactcagacccttgtaaagagtgctattgtgcaagttgatgctgcccccttcaagcagtggtacctcactcactatggagtggatattggtagaaagaagaaggctcctgcagccaagaaggatgctgaggggcaggatgctgaagctaccacagaggaagcgaagaaaagcaaccatgttgtcaggaagcttgagaagcgccaacagggacgcacacttgacgcccacatcgaagaacagtttggcagtgggaggttgctggcctgcatttcttcccgccctgggcagtgtggccgagcagatggctatatccttgagggcaaggagctggaattctacatgaagaagctccagaggaagaagggcaagggtgcctcagcttagagcaagtctttctttgttgctggttctacactgaaagaactaccctttttgttccctgagagctcctatgtatgtttgcagacgcatangctgttttttatgattaaaacaacttagcatgatgacatgagaatgggtatgtacttctgatgntattagttaaaatattactttctgc

SEQ ID NO: 5301 - DNA, 439 bp, Oryza sativa
  unsure (1)..(439): unsure at all n locations
  Clone ID: uC-osflcyp139a01b1
ttcgcccggatagnattccaaggcgaagaagggcggcggcggcgggctgcagggtctaggcctcggcttgcggccggcgccggcggcgccgaccgccgcgggagctggaggtgctttccggccgccgccgaccaccatgaacttgctgtcggggctcgacgcgccggcggtggaggtggagccaaacacggcggaaacagcggccgacgagctgcctctcatcaaggccccggccgatcagcaaagcgacgaaagtgcaagcgaggcagctggagagaaggctcaacagctgaccatcttctacggtggaaaagtagacgtctatgagaacttcccgtccaccaaggacaaggatctcttacaaatcgtaagcacaggcgatggcgtcgacaagaacaccggcaccgcggcaacgcaaagcctgccccgacccgcacac

SEQ ID NO: 5302 - DNA, 453 bp, Oryza sativa
  Clone ID: uC-osflcyp139a02b1
gtatcttttgcttggagagagacaacaatggcggctcaggctcttctttctgggaggcagctgctggggaggccattgcaatcttcagtctccaggtcttcttcctccaggaaggcacccttcatggtcagggcagaggccactccccctgccaagcaaggtgctgacaggcagctgcggatcgcatccaagcagtccctgagctacctggatggcacgctttcgggagacttcaggttcgacccgctggggctatcggacccggaggggaccggtgggttcatcgagccacggtggctggcctacagcgaggtgttcaacggccggacagcgatgatgggcgtcgtcggcatggacgaccccgagcttcttggcaagctgggccctcgtcccgccgaacggagatcccgtggctccagacggcgtgatcccccccgcgggcacctacaccta

SEQ ID NO: 5303 - DNA, 445 bp, Oryza sativa
  Clone ID: uC-osflcyp139a03b1
gaatagattgcattagagaagtatcaagatgaagagcacaagtcacttaaggcacaacaccaatgccaagacacggagcggaaggccccggggcaatgcaaaactgcgaagacgaagctgatcacgccgccttgtgccaacgatgtgccccggttctcccttcaggatctgatacaagagaagcagctcctcatcggagaagccaaggccaccagcaagctcggaaacggcaagaaagccattgctgatcgtaaactccctccacctccggctgcctccagcgcgacgttggctatggtgataaagcgacctgatgggggaaagaagtcgatgggagtgatccgccggtgcgtgcaggccctgaaccagatggtcaaggccaaacatggcttcaagaagaacaagccttctttctaataagtgagtacatgcatctggtccagag

SEQ ID NO: 5304 - DNA, 457 bp, Oryza sativa
  Clone ID: uC-osflcyp139a04b1
gtggcatatgacgcgatgcacatcatcctgcagcaatgcgtgcggtcaaagacggtgcggtgcgtcatccacacggcctccgtcaccgccgcgtcaccgctcagggaggacggcgaggggtacaaggacttcatcaacgagtcatgctggactcctcttgatctctccaaccgctatagcaacgtcatgatggatgcttatgtttcatccaagacactcacagagaagctactgctgaggtacaacgagtccgagagcagggcgttcgaggtggtcaccctgacatgcgcgctcatcggcggcgacaccgacaccacgcagctctaccactcgctaagcatcccgctgattcgtgtcgccgctcaccggccaggagctctaccacgggcggcttcaagtccctgcaagcgctgctgggtttctgtgccactggcgcacatagacgacatatgcgagg

SEQ ID NO: 5305 - DNA, 441 bp, Oryza sativa
  unsure (1)..(441): unsure at all n locations
  Clone ID: uC-osflcyp139a05b1
ctggagncnagaagctcgcgagtgtttagcagcaagttgtcgctggcactttgtactatttcacaattgaggtgaaggaaggggatgccaagaagctctatgaagctaaggtctgggagaaaccatggatggacttcaaggagctccaggagttcaagcctgtcgatgccagtgcaaatgcctaaggcccatctcgtatcctatgtgtatcaagttatcaagaagatggggaataatatgctgtggatatagctattggacatgttaattatccacatgataatatggctcggatataaggatctcacacaataatatggcttggatatatagctattaaagattttacctatggcatattcaaatgtgtatttagactaagtaagaatgattgcaaggtgtattaactacaaatattgcaataaaagttcctggtactac

SEQ ID NO: 5306 - DNA, 360 bp, Oryza sativa
  Clone ID: uC-osflcyp139a06b1
gttgagatggggatcgactgattgatccggattgggaagaataagttgcaggggagcatgggcagcaagccgtacccgacggtgagcgatgagtccctggcggccgcgggcaaggcgaagcgcaagctccgcggcctcatcgccgagaagaactgcgccccactcatgctccgcctcgcgtggcactctgctggcaccttcgatgtgtcgtcgaggaccggcgggcccttcggcaccatgaagaaccccggcgagcagtcccacgccgacaacgccggcctcgacatcgccgtcaggcttctcgaccccatcaaggaccaacttcccatcctctcctacgccgacttctaccagcttgct

SEQ ID NO: 5307 - DNA, 444 bp, Oryza sativa
  Clone ID: uC-osflcyp139a09b1
tcgaatatccttcggatttggtggacacaattcagttgtagtatttgcaccatttaagccttaacttgctgcatgttacacaaatcttggccagaatagtaaatgtctcttcaggaagttctgagttattctgcatgtcttttctttgggtgaagcaactgttgatttgacagccggcaacgttacaatgaactggatctgagattaattccattttaggcactcccatcttccattgaaattgagagctctgtataacgttgttttgcataatttgcaattgattctacctacttctgtataatggaaaatgtgggaatttctagaattgtcatgtagaagcaaaagttagatctcctgttccatagaaatgcttgagccaaggaattgcttgtctgtaatttgtatctggtctagaaaaatgttctcttcattttttttttc

SEQ ID NO: 5308 - DNA, 473 bp, Oryza sativa
  unsure (1)..(473): unsure at all n locations
  Clone ID: uC-osflcyp139a10b1
tcngataagttgcgtacatgcagaaaagggaagttgagctgcagaatgacaacatgtacctgaggagcaaggttgctgagaatgagaggggacagcagccactgaacatgatgggggcagcatcaacaagtgaatacgatcatatggttaataacccatatgattccaggaactttcttcaagtgaacatcatgcagcagcctcagcattacgcccatcagctgcagccaactacccttcaactcgggcagcagccggccttcaattagttttggtgtagacaccgtacgtacacacgtacgttagatgaaatctgaaggcgtcgatacccgcggctacgtacagcgtgatcaacctgaagaaatcgatgcagtaattctatgtgttcgtcagatcatcataaccagtattgtcataggcgttgtgaaaaacaaatgtgtcagcatgcattgcagctagcgtttgtggctgct

SEQ ID NO: 5309 - DNA, 428 bp, Oryza sativa
  Clone ID: uC-osflcyp139a11b1
tcggctgatcagcagcagcaacgacaacaagatgagcagctggttgaagaagagccagctgccggcgtcggagtcggtgccaaaggaggaggcgatcgggggatacatattcgtgtgcaacaacgagacgatggaggagaatctcaagaggcagctgttcggcctgccatccaggtacagggactcggtgagggccatcaggcccggcctcccgctcttcctctacaactactccacccaccagcttcacggcatcttcgaggccaccagcttcggcggatccaacatcgatcccgccgcttgggaggacagcaagtgccccggcggcgagtccaggttcccagcgcaggttcgggtggccacgcgcaagatctgtgagccgctggaggaggacgccttagggcccgtgctgcaccactacgacggcc

SEQ ID NO: 5310 - DNA, 477 bp, Oryza sativa
  unsure (1)..(477): unsure at all n locations
  Clone ID: uC-osflcyp139a12b1
tcggtaggatgtcgtacctgctgccgcacctgcactccgggtggtcggtagaccaggccatcctcgccgaggaggagcgcctcgtcatcatccgcttcggccacgactgggacgagacctgcatgcagatggatgaggtgttggcagcagtggctgagaccataaagaacttcgcggtcatctacctggttgacatcactgaggttcctgacttcaacaccatgtacgagctgtatgatccatcaacagtcatgttctttttccgaaacaagcacatcatgattgatcttgggactggaaacaacaacaaaatcaactgggccctgaaggacaagcaggagttcatcgacattgtggagactgtctcaggggtgctcggaaggggcggngtctgggtgatcgctccaaaggattactccacgaaataccgttattgaggcatttgtgttttgcctgttgcagtttctagcctactct

SEQ ID NO: 5311 - DNA, 427 bp, Oryza sativa
  Clone ID: uC-osflcyp139b02b1
gatggaatacaagacaagaaaagaaaaaaaacactcgagtgtgcattgtgggttgcgtctccgctccttgcgcctgcgctgcgctgcggcgatctccatctccatctctctctctctctcgagcagagcagagcacgccgtcatcctcgtcctgctgctgcttccggcaggagctcagctcggatccgtaggacaaacccaagcttggtcgtcggtgtgtttccggagaatgtgaccgcgccgcgccgcgccttctcttatcacaaatggcggctacaccagggagcagcaggccagcgaatgttgctgctgctgctgcgacggaggccagattccactcccacccaccacagcaggataggcggagtggatgggctggctgtttgtctggcttgccatgttccggatccagaaaggtgggaagcgt

SEQ ID NO: 5312 - DNA, 465 bp, Oryza sativa
  Clone ID: uC-osflcyp139b04b1
attcactcactcagcttaagcgagcgagcgagtgaacgagtgagagagacagagatggcgagtgttgcctccttcccggagatcaacatggagaacctggagaccgaggagaggggcgcaccaatggaggtcatccgcgacgcctgcgagaactggggcttcttcgagatgctgaaccatggcatcgcgcacgagctgatggacgaggtggagcggctgagcaaggcgcactacgccaactgccgggaggagaagttcaaggagttcgcgcggccgatgctggaggccggcgagaagggccccgacgtgaagggcatcaactgggagagcaccttctttgtccgccaccgccccgtcttcaaccttggcgacctacccgacgtcgacgaccactacaggcaggtgatgaagcaatttgcgtccgagatcgagaagcttttggagagggtgctggacctgctgtgc

SEQ ID NO: 5313 - DNA, 443 bp, Oryza sativa
  Clone ID: uC-osflcyp139b06b1
aataaagtataagcaacacaagggattaactcatcactcacttagctaattaaatcttcgaccatgtcggacaagtgcggcaactgcgactgtgctgacaagagccagtgcgtgaagaaaggtaccagctatggcgtcgtcatagttgaagccgagaagagccacttcgaggaggtcgccgccggcgaggagaacggcggctgcaagtgcggcaccagctgctcctgcaccgactgcaagtgcggcaagtgaagtcacgaagcaaccgaacactcgccgccggcgagtcacctaccttaattagtccacaataaaaaccacccatatgagtgtggtttgtgtgtgtgctgattattgctgaattaaacccgtgtgttatcgattaattaagcaggtgggcgcttcggaactatgcgtgtatcaacgtatgaatttgtgggatg

SEQ ID NO: 5314 - DNA, 441 bp, Oryza sativa
  Clone ID: uC-osflcyp139b08b1
atcggatgcttctcctccccctcccggttcggttcggttcggttcgggtccggttcgatttcggtttttccttcggttcgggggttggtgggaaagcatggcggcgccggatgttgagtaccgctgcttcgtcggcggcctcgcctgggccaccgacgaccgctccctcgaagccgccttctccacctacggcgagatcctcgagtccaagatcatcaacgatcgggagacggggaggtcgcgcgggttcgggttcgtgacgttctcgagcgagcaggccatgcgcgacgccatcgaggggatgaacggcaaggagctcgacggccgcaacatcaccgtcaacgaggcccagtcgcgccgctccggaggcggaggcggcggtggctacggccagcgcggcggaggcggaggctacggtggcggcggtactgtggtggtggc

SEQ ID NO: 5315 - DNA, 455 bp, Oryza sativa
  unsure (1)..(455): unsure at all n locations
  Clone ID: uC-osflcyp139b09b1
tctactactgaaggattcaagcaaaaatatcagaatatgcgccttccatgtttttaaggtttttgttgccaatccgaacaagcctcgcagtatcatcgaggctttgatcgaaaatcgcagagaactgctgaagctactccaaaatcttcctacaagtaaaggcgaagatgaacttgatgaggagaggaatctaatcattcaggggattcagaagctggcctgctcatcagcatagacacttgaattaatggaatagctggtttagggaaactgcctttactgaaaatacatngacagggtgtgcctataagaattgcgtctttttggagtttgaaatgaaatagttgcaaatagatgcacaatacaaaatgagtgcaacgaattttgttctttagggacagtactaatgttgatatgtcttttttctctgctatgtgtttgcgtactgcatattc

SEQ ID NO: 5316 - DNA, 468 bp, Oryza sativa
  Clone ID: uC-osflcyp139b10b1
tgtttccctgcttttcccgtccaatcccggcggcggcggtggctcggtgacgagaggagtagcagcggtagtggcggctcaatgacgaggaggggcggcgagagctcggcgacagggaagggcggcgagagctcggttcctccctcccctcttctcctctccaatcccggcggcggctcggcgacaagtaaggacggcgggagctcggctccttccggcaactgatgggagaagacgccccttgtggagagctgctgccggtgctgccgtcgtcgtcagcgccgccgtcgcaaccaaggggacacggcttccttgctggagagctgctgccggtgttgccgtcgtcgtcctcccccgccgattacgagtgctacgtccactacaccgagtgtaagcgacctcgccctcaccaggatgcttcgttttagggttaggtttggggtgcttcagaatgaggaaatctggggc

SEQ ID NO: 5317 - DNA, 467 bp, Oryza sativa
  Clone ID: uC-osflcyp139b11b1
tcgttttgtccaagaaggacactaaagcagtagtctagtctccttgccaagcaagaaccaaaaagcaattaagatcgaactcgagcaaacatgtcgtcgactaacaacagttcaggcgagccgccgccggcggtgcgcgtgctgggcggttgggcgagccccttcacgaaccgcgtggtggtggcgctgaagctgaagggcgtggagcacgagatgttgcaggagacggtggggaagaagagcgagctgctgctccggtccaacccggtgcacaagaagttccccgtgctgctccaccacagcaagcccctccccgagtctctcgtcatcgtcgagtacatcgacgaggtctggccggcctccaatggcggcgccccggccattcttcctcgcgacccccacggccgcgccgtcgagcggttctgggcacggtacgtcgatgacaagattctaccagggcttcgggt

SEQ ID NO: 5318 - DNA, 475 bp, Oryza sativa
  unsure (1)..(475): unsure at all n locations
  Clone ID: uC-osflcyp139b12b1
tcgcttccttcagtgagatcacttcaaattgataaacctgtcccagtccctccaagattaccccaagttgataaagctgcttcactttcttcagaattgccacaaacttctaccacttctaattctgaagctcaagaagagactgctgccataagggttgcatctccctcagtttctgaagttactgtcacagcatcaagaccttcgagtgcccctgtgttccctgccccaagatcaactgtaccagctacacaagtacaagtttccacattgctttcgcgctcaatgagtgaagcaactcgaagatcaggaaatgatccttccccttctgcaccagcttacattccacaaacctaccgtaacgctatcatcggtaagcatgggcggngtacaacctcaggaactactgcatatcagtcaacctctctgggccaaggtactgccctttacagccattgtcgacatatgcaccaac

SEQ ID NO: 5319 - DNA, 475 bp, Oryza sativa
  Clone ID: uC-osflcyp139c02b1
tttccacttcgtccggattaaatgcgagaatcggtttgttattagtaagaagaaagaccgctcactgacatcgccacagtacaaaaggcgcagtgtgctcgagcatgctgataattccaatttcatcccatttgtcccattccctcctgattactttgccaagaaaaataagcctgtggagaattcatcagatgcaggaatagtgccagaaggccctccatcagctgaaaaattaccagaaacaaaatattcatctggaaatctgggaaattttcagaacagctcacaggtgatgggcagtcaggcagcaaacaacatgaacaatgagaacaggaacggaaattatccacatcaaaacttgagtacaagtggttatgggtatcggtgaaagcatcacttatcagcatcaaccacaatctcaagggatggtcggtcgttctggtggtgcttttgaaactggcactcggaatgcaaa

SEQ ID NO: 5320 - DNA, 458 bp, Oryza sativa
  unsure (1)..(458): unsure at all n locations
  Clone ID: uC-osflcyp139c03b1
ttcgcccgcataagttaccagccaacaaaancaaacaaaaaggaaaaattttccccagcggggaaagccgtaaaaccccagcgcggcggcgangncgaacacgagggcgcccaccgacaagaccgccggcggagctccggcggggcggaccgcgacggagctgaacgcgaaggacgngccgcggacggcggagaactcccgcgcgctctgcaccggcgagaagggcgtgggcaagagcggcaagccgctgcactacaaggggagcaccttccaccgcgtgatcccggagttcatgtgccagggcggcgacttcacccgcggcaacggcacgggaggggagtcgatctacggcgagaagttcgccgaccaggtgttcaaggtcaagcacgacagccccggcatcctgtccatggcgaacgccgggcccaacactaacgggtgccagttcttcatctgca

SEQ ID NO: 5321 - DNA, 459 bp, Oryza sativa
  Clone ID: uC-osflcyp139c04b1
ataagatcatgaagctatcagaaatcagaaacgctagctagcagtttgaacaaacaatgaggtcgtccccgatcatcttcctgctcctggccgccgccgccgccatcgccgctccgtggcaggttgcgcacgccgcgggcaagtgcggcaagacgccggcggagaaggtggcgctgaagctggcgccgtgcgcgaaggcggcgcaggaccccggggcccggccgccggccgcgtgctgcgcggccgtgcgcgacatcggcacgcaccagagccacgcgtgcctgtgcgccgtgctgctgtccagcaccgtgaggcgctccggcgtcaagccggaggtggccatcaccatccccaagcgctgcaaactcgccaaccgccccgtcggctacaagtgcggcgcttacacgctgcccagcctgcaaggctgatgacgacgtacgacggcccttgttaggctct

SEQ ID NO: 5322 - DNA, 471 bp, Oryza sativa
  unsure (1)..(471): unsure at all n locations
  Clone ID: uC-osflcyp139c05b1
ttcgcccgcttaagctcacagaccagnncnaccacgnacaacagcagaagtgagttagggagaagaagacaagggacgaggaggagccgagcnagccagccacggcgaggcgcgcacgcagccacgccgacgccacgcgccagcaaggggcgccggcagaggcgagcgcccccaccgacgaagcggcggccgccggccgggggcccggccacggcgcccgccacaagagcaagcagggccgcgagacacacgagaagccgccggagccggagccgaagccaaagccaaagccncancccaaacccacgccaaaaccngagcccaagccagagccggagcccaaaccagaacccgagcccgagcccaaaccggaaccaaagccagaaccaaaacccgagcccaagccngaacccaaaccaaacccagagccaaaaccggagcccaagccagagccaaaaaccgagccggagc

SEQ ID NO: 5323 - DNA, 296 bp, Oryza sativa
  Clone ID: uC-osflcyp139c06b1
ttttgatgcgcacgctcgcgatcgcgaacccccccagcgagggcaaggaagggagaggagacgaggaacccgagcgcgcgcgagcgagcgagcgcaagggcgggcggccccggccgcggcgggggggcagccccggggctggatgagaaggagggcgtcggcgccggcgtcggcggcggcggcggaggcggcggcggcggcggcggcggcggaggaagcgccaggcgaacccggagacggagcccgcggagaaggcccacatccaccacgccgacacccaggccgccaaggccccc

SEQ ID NO: 5324 - DNA, 453 bp, Oryza sativa
  unsure (1)..(453): unsure at all n locations
  Clone ID: uC-osflcyp139c08b1
ttggatacctaccccccaccgcgcgatccatggcgnacgccggcatccgctccggcgtcctcagatcggcggcgggtgtggacggtctcgccgccgccgccgcggcgcgccccactcctctcctcccgcgcgtccacctcgccggcgacggcacgggtaagtagatccttcctcagttcctctcctccctcgcgtccaccgccgacgagggtagtgggtaggcgaaatgctaaatcaatcgagggttcccacagggcggatggcgaccaccatcgggttctgcccccgtctcagagccgcgccgccgtcctgcaagaaggcggaggcggacccggcgccgtctctccaggatgcggtggtggcggcggatgctgcgctgcgtgccccttcacctccccagagcatggcggcaagatggcggcgattctggagtttctgaagaaacactcgctc

SEQ ID NO: 5325 - DNA, 452 bp, Oryza sativa
  Clone ID: uC-osflcyp139c09b1
ttggataattcgatgccacaatacaagagcagccttcctgctacaagcccaccacagccttcatcagtggtctccggatttggaggttttggtagctcaaataatattcctggaaatttcggcttaaatcagaatgtcccatctgcacccacaactatggggtttgaagaagctttaagcacacagttcaaagataacagtcaatacattgccttgcagcagaacgacaactctgcaatgtggcttcatggagctgctggttcaagggccgtttcagcggtaccacctggcaacttctatggtttccagggccagaatcagccaggtggcttccgccaggggcagcagccctctcaatacggtggccttgggtacccaagcttctaccagtcacaggctggtttaccgcaggagcacccgcagaaccttactgagggaaccttgaacagctc

SEQ ID NO: 5326 - DNA, 371 bp, Oryza sativa
  Clone ID: uC-osflcyp139d01b1
ggcccggaaaccccgggccgatccactcgcccggaataggttccgaaccccaccgcccgggcgccaccgaagagcgaaaataaggagaacaacccgagaccccccggcgaagaacacgccagagaaggaaggcgcgagagcccaagaaaaggcaacagcccgagaaggaaggccaagaggaccaccccgccgggaatagaaaaacaaccccccaaagcaaaaccccgccaaaaaacgagaagaacccactgacaccccccacaccaaaacccgacagaccccgcaaaccaaaatgagcccaaccccactggaaggcacggccccagccccgagacaaaacaaccacacaaaccccaaccaacaacccaagc

SEQ ID NO: 5327 - DNA, 455 bp, Oryza sativa
  Clone ID: uC-osflcyp139d03b1
cctcgcttccgcccacgcgtccggggaagcagagtagccgttagctagcgagagacgcagataagcgagcagggcggggccatggccatggctcgctgttccttgctaccgatcttggccgccgtcctcttggcggcgtcgctgtcgctgccaccgcgcgctgccgcgtacgccgccatggtggacagcctcctccccgcgtcagcgacggctctctccttcgaggaaggctacacccagctgttcggcgactccaacctcatgctccacggcgacgggaagagagtgcacatctccctcgacgagcggacaggcgccgggttcgcctcgcagggcgcgtaccaccacgggttcttcagcgccagcatcaagcttcccgccgaccacactgccggcgtcgtcgtcgctttctacatgtcgaacggggacgtgttcgagaggacgcacgacgagct

SEQ ID NO: 5328 - DNA, 446 bp, Oryza sativa
  Clone ID: uC-osflcyp139d04b1
gtgaagtatgcaacgaccactgatgttggcgagctcaccgttgagtagcggaacctgctttctgtggcttacaagaacgtgattggtgctcggagggcatcgcggaggatcatctcttctattgagcagaaggaggagagccgtgggaatgaggcatatgttgcatcaattaaggagtaccgtagcaggattgaaactgagctcagcaagatctgggatggtatccttaagcttctggattcccaccttgtcccatctgccactgctgcagagtccaaggtgttctacctgaaaatgaagggtgactaccacaggtaccttgctgagtttaagtcaggagctgagaggaaggaagcagctgagaacactcttgtggcatacaagtctgcccaggatattgcactcgctgacctggctacaactcacccgataaggcttggacttgc

SEQ ID NO: 5329 - DNA, 472 bp, Oryza sativa
  unsure (1)..(472): unsure at all n locations
  Clone ID: uC-osflcyp139d05b1
tgcgccgcttattttctttatcccgnnnaaaatacgncgccattcagataaacatggatgactggaacaagcatttctgatatatgcatagcaccgtcacgtaactgggctaattattgcaactaagcatgaggatccactcgagggaaaggctgctccatatgacaagtgaacttttttcgaacagcaaaacaaaaaaagatgggcaaaagtttcatcattatccctcaagggcagaagcgccagagataatctcaatgagctctgaagcgatagatgcttgacgtgtcctgttgtatgtgagggtgagatcgatcaagcatttcaccagggtttctgctggagctgtccatggcagacatacgtgctccaagctcactgcatgcattctctagagcagcattatacataacacaagaaaactggaacttcggtagattctgaagaatttctgatttagtttcacctcctt

SEQ ID NO: 5330 - DNA, 416 bp, Oryza sativa
  unsure (1)..(416): unsure at all n locations
  Clone ID: uC-osflcyp139d06b1
gttgctttcccgcagatagnacaccggctatctatccatctatcttctcagctttgcgtcctcccgcgaattcaccgcagcaatggcgtccctcgtcgccgtccagccggtcgccgcgaagggcctcgccggcagctccatctccggcaggaagctcgccgtcaggccgtcgccccgggcgctctgccgcaccacccgcaggccgcgcgccgccgtggtggccaagtacggcgagaagagcgtctacttcgacctcgaggacatcggcaacaccaccgggcagtgggacctgtacggctccgacgcgccgtcgccgtacaaccctctccagagcaagttcttcgagacgttcgcggggcccttcaccaagagggggctcctgctcaagttcctgctgctcggcggcggatcgctgg

SEQ ID NO: 5331 - DNA, 442 bp, Oryza sativa
  unsure (1)..(442): unsure at all n locations
  Clone ID: uC-osflcyp139d07b1
tctgatacgagccgcccgggacgccaaaaacgaggnggagtgcattcagaaccccatacgatccctcccaccaccagangancnggcancagcgccccacccnggaagccaacggngcccccagcacaaaagaaccccacgngccagacccgagccccgaccaccaacccacgcgcccggggaagcgccaccgggcnacccaagncaccccacacaagccccaaccggaggacgccccagacacccaagagaagcngaccagggaaacccagccacaacaacgcgaaccacggagcaaggacgaaacccagagaagccacaccgcagaacccggcaccccagcagaacggaagcaagacgccccggcaccnacaaagaaaaccanggagaccagcaaagcgcaccggagaaacaaaccccgcggggcaaccggaagaaagcc

SEQ ID NO: 5332 - DNA, 340 bp, Oryza sativa
  Clone ID: uC-osflcyp139d08b1
atcgcgtaacattcactcctttgttcagcttgacactccattgcatagggagggtatagctggtgacagagagaaatgggcgaggaggccaattgcaacgtcgcgatggagtccgctgcgcccaaggagaacggccacaccaccggtggcgccgcggcggaggccaaggccgccgccgccgcctgggctgagatcgccgtcaccgacgccgcggcggtgccaaagccgacgccgccgcctgcggccgtggccgtcgacccccggctttaagggaatttccacgccattccgggtggcccccactttcccaaggcagggattatggtcaacgacatcaccc

SEQ ID NO: 5333 - DNA, 456 bp, Oryza sativa
  Clone ID: uC-osflcyp139d09b1
tttggtcctccacgctatcatggccatcaagatggcggtcaattgacagaaaaagttaggacgcttccttacagtgtcatcctttttgatgaggtggagaaggcagatccctcggtgttcaacgtgttccttcagctcctcgatgatggcatgttgactgatggcaaaggaaggacagtagatttcaagaacaccatcatcattatgacctcaaatctgggagctgagcacctaactgaaggagtgactggtgaaagaacaatggaagctgcacgggaccttgttatgaaacaagttcagaagtatttcaggcctgaacttctcaacaggctgagtgagattgtgatatttgagccgctttcgcacgacaatcttaaggaggtcgtcaaaattcagatgaagagtgtcgttaccagtgtggctcacaagggcgtatctctacttgcaagtgatgat

SEQ ID NO: 5334 - DNA, 460 bp, Oryza sativa
  Clone ID: uC-osflcyp139d10b1
tcggtacgtccgttgtgtgactcatcagatcgagcagagccatacatggccatggagaagagccgggtcctcatcgtcggcggcaccggctacatcggccggcggatcgtggcggcgagcttggcggagggccaccccaccttcgtcctgctccggccggagatcggcctcgacatcgacaagctccagatactgctggccttcaaggcgcaaggcgcgcggctcctcgaggcgtcgctcgacgaccacgatggcctcgtcgccgcggtccggcaggtggacgtcgtcgtctccgccatgtccggcgtccacctccgcagccacaacctcatgctccagctcaagcttgtcgaggccatcaaagaagctggaaatgtcaagcgtttcctgccgtcagaatttggcatggatccatcaaggatgggggaatgctcttgaacctgggaggggtacatttgat

SEQ ID NO: 5335 - DNA, 460 bp, Oryza sativa
  Clone ID: uC-osflcyp139d11b1
tcggtgttatggctcaaacttgcttgccacctggcttttgttttcatccaacagatgttgaacttgcttcatactatttgaaaaggaagattatgggaaagaagcctcttattcaagctatatcagatgttgaactgtataaatttgctccctgggatcttcctgctcaatcctgtctccagagcagagatcttgaatggttcttcttttgcccacgagacaagaaatatcctaatgggtctaggacaaatcgttccacaccaaatggttactggaaaacaagtgggaaagatagaacgattgagcttaactctcgcattgttgggtcaaagaaaacactgatttttcatgaaggcaaagcacctaaaggcaacaggactgattgggtgatgtacgaatacaaaatggaagacaatcaattggtctctgctggcttctcaaggatgattttgtcctctgc

SEQ ID NO: 5336 - DNA, 457 bp, Oryza sativa
  Clone ID: uC-osflcyp139d12b1
ttcgttagttctacctcctcccatggaggtagaacaagttctatttatcacctccaactccaaggtagacaatatcaccaatggcgacaatgtgatcatcatccctagtgtgagcacggaggagaaggagcacatcaatggagctgcagagacaaatcatgttgtgatgatcaccgctgcttccatggacagaaccgacggcgacgacaagacgacgatggaggaggagtcggacgtcggcatcgccatcgccaggagcgcctcctccaacggaagccggcagcaagacaagaagcggggcgcgttcggcctcttccgggcgatgttcatgtccttcaacggcagcgccagcatcaagaagagggccgccgccaccatgggcaatcagaagaaggccgaggcggccggcggcggcgccgcggctgccgtggcgagggccgtccagcgacgtcgcgtc

SEQ ID NO: 5337 - DNA, 325 bp, Oryza sativa
  unsure (1)..(325): unsure at all n locations
  Clone ID: uC-osflcyp139e01b1
cgttaaggtacccaccaccgccgccgccaccgccaccancgccgccgccgacgcgaagcacgccgccacccccgcccccgaccccaaccggagccgccacacgccacgcgggaaccccaccgcgcgccgcagcgacgccgcgaaggccgagaccacccccaggacggccgccgccgccgcgaaccacgagcgccgcgagacggagcgcgcccgccaccacggcaagaaccagggccccgggaacgaccccaacaaggnggacaaaagggacaccggccgggccgaaagagacgccggaggaggcggccaagccgagcgacaggaa

SEQ ID NO: 5338 - DNA, 453 bp, Oryza sativa
  unsure (1)..(453): unsure at all n locations
  Clone ID: uC-osflcyp139e02b1
gatanagtcacattccctcctctctcctccttgcagggcctgtctgtttctcaccatagtcaggaaggaaagaaggaaggaagaggaaaaaaaaggatcatcaaccatgtcgaattcggcgtcgggaatggccgtgtgtgacgaatgcaaactcaagttcctggaacttaaggcgaaaaggagcttccgcttcatcgtgttcaagatcaatgagaaggtccagcaggtggtggtggacaggttggggcagccgggtgagagctatgacgacttcactgcctgcttaccagcagatgagtgccgctacgcggtatttgattttgactttgtcactgatgaaaactgccagaagagcaagatattcttcatctcctgggctcctgatacatcaagggtgaggagcaagatgctgtatgctagctcaaggaacggctcaagagggagccggacggc

SEQ ID NO: 5339 - DNA, 468 bp, Oryza sativa
  unsure (1)..(468): unsure at all n locations
  Clone ID: uC-osflcyp139e03b1
ttccacttcgtccgcttcnctttctgaaacacttcagcagaggagcaacaatggcggcggtagggncgctgggacttctccaggcgccatcgtccttcacggcggcagcggcgagccggccggcttctcggcgagcaccgcgagctctgttcgccgtgagagcctcggctgccgccgatgccaccaaggacgccgtcctcaaggccttccgcgagaagagagctctcaagatcatttcagggcttcagaatttcgacaggagtagtgttgcctctgttgtctcggctgcagataagggaggtgccacccatgttgatatagcgtgtgaccaagacttagtaaagcttgctctggagcttacttcccttccgatttgtgtcttctccgtagatccttcagcgttccgttctgcggtagaagctggagcaaagatgattgagattggaaactatgattctttttatgata

SEQ ID NO: 5340 - DNA, 448 bp, Oryza sativa
  unsure (1)..(448): unsure at all n locations
  Clone ID: uC-osflcyp139e04b1
catcgcctacgaaaatggctgaattttcttggctcacggcgctcggtttcatgttcctcaccttcaactccggcatggcgatctaccgctccaacggcgacaccggctccatcctcttcgtcggcgtctcctacctggaccttgtcgcgctattcgcctgcctccggatctatgagggcctggaccagcactcgcctcgtcgcggcggggtcaaggctgccgtctgggccctcacgacgctcctgaccgtcatgttcagctataaagtcgccgaaatcatgccgcttgtcgtcaagatcgccgtgtgggcgatggcaacggccacgacatgcggcggcttctatgccttcttcatccacgaagagaagcagccgcagtacatggccgtgccgctccngcgggcaagacgcccgccgatcgccacgatggcttcacctaatagggatag

SEQ ID NO: 5341 - DNA, 223 bp, Oryza sativa
  unsure (1)..(223): unsure at all n locations
  Clone ID: uC-osflcyp139e05b1
gttatcatagtgatcaaaacatgccgcctcgaacgcnnccctggcaccctatagatcaggacctgttatcccaggacgctgtaaaacctctggacgttgaggcctggagctcgatgcagggagcacaggcagagcacaagcggatcaaaagttacataccagaagggtgccacaggagctcttttcccagtgtgattgagattgatactcagggggtataccg

SEQ ID NO: 5342 - DNA, 418 bp, Oryza sativa
  Clone ID: uC-osflcyp139e08b1
tcgcataattcaagctagcccatcagatccagagaatggcccttttgttgtacttggaaacaaaattgacgccgatggtggtaatagccggactgtttctgagaagaaagctaaagcttggcgcgcttctaagggaaacatcccttattttgagacatctgctaaagaaggcttcaacgtggaggctgcttttgagcgcatagcaaggaatgctatcaagaatgaaccggaagaggagatatatcttcctgatacaattgatgttggaggtgctggaaggcaacagcgctcgtcaggctgtgaatgctagaagatatggcaccagcgatatcgccagttgattctaccggatcggggtagatcatcatcctcacctcttccactgtgtgatatctttagtctgaaagcctctatctat

SEQ ID NO: 5343 - DNA, 423 bp, Oryza sativa
  Clone ID: uC-osflcyp139e09b1
atcgaatagcgagcccgaccgcatcttggaccctcccctccccgtggttcttggacgacgccggtgcgcgcggtggctctgctgtccccgcgccgcaccgcgccgaatccgagcagaacgcgcgcgcgtcggcggggggatctgcaatggcggccgtggcggtgcccccgctctccgcgtggctcgtcgccgcgcgctcctcgacgcaggcggaatgcggcggcgccgacgagcaccaccaccaccaccatcagcagcagcaccagtgctgcgtcggcggcgggtccagcacggtgatgttcggccggcgccgccgccgcttcctcggcggcggcgcgcggcggcgcggcgcggcgcgctctggaatggcctgggctgttgccctgcagcctgaaaggagaactgttgaaaagaaacctgatg

SEQ ID NO: 5344 - DNA, 454 bp, Oryza sativa
  Clone ID: uC-osflcyp139e10b1
atcgaatgctcctagcgccgccgccgccgccgccatgaagttcaacatcgccaacccgaccaccgggtgccagaagaagctcgagatcgatgacgaccagaagctccgggcattttatgacaagaggatctcccaggaagtcagtggtgatgctcttggcgaagaattcaagggctatgtattcaagatcatgggaggctgtgacaagcaaggtttccccatgaagcagggtgtgcttacttctggacgtgtccgccttctcctccacaggggtaccccctgcttccgtggatatggcaggcgtgatggtgagcgcagaaggaagtcagtccgtggttgcattgtcagccaagatctctctgttatcaacttggtgattgtaaagaagggtgataatgaccttcctggcttgactgacactgagaagcccaggatgaggggacccaagagggca

SEQ ID NO: 5345 - DNA, 431 bp, Oryza sativa
  Clone ID: uC-osflcyp139e11b1
tcgcatgtcgctcgccgccgccgccgccgccgccatgggtgcgtacaagtacgtgtcggagctatggaggaggaagcagtcggacgtgatgaggttcgtgcagcgcgtgcggtgctgggagtacaggcagcagccggccatcgtccgcctcacccgccccacccgccccgacaaggcccgccgcctcggctacaaggccaagcagggttatgtggtttaccgtgtccgtgtgaggcgtggtggcaggaagaggccagtgcccaagggtattgtctacggcaagcccaagcaccagggtatcacccagctcaagttccagaggaacaagagggtcagttgctgaggagagagctgggcgcaagttgggcggactcagggtgctcaactcctactgggtgaacgaggacttcactacaagtactttgagatca

SEQ ID NO: 5346 - DNA, 351 bp, Oryza sativa
  Clone ID: uC-osflcyp139e12b1
tgtctgatttaaccatttccaaggtgttgctgtcaatctgttccctgctgactgatccgaaccctgatgatcctctggtccctgagatcgcccacatgtacaagacagataggcacaagtacgagaacacagcaaggacctggactcagaggtacgccatgtagcacctcagatatcgatggacatgtcgatgttgtaacaacattatcaacgggtgtgtctccctctcgccttgtgtggtgtaaggatcaaaaccggctttgcagtgcactcttggtgttgctccattgtgtcactcactcattgcagtgatttcgaatagtatcaaactggtggtttttttcggtccac

SEQ ID NO: 5347 - DNA, 308 bp, Oryza sativa
  unsure (1)..(308): unsure at all n locations
  Clone ID: uC-osflcyp139f01b1
aaataaggtcccagaccccnncnccangggaaacggggaggaggccacaaaaaagaacgaccccgcacgccccccgccaaaaacataccaaggaccacatccgcacccaaagacccaaacaaacccaagaaccacccccctgttacggcctgcacatcactaaacacactctctcgcccaggacaaccaccactgcaggagcagggactgcagcgcacccgggacgacacaccggacggcggcccccacccaaggagacccgacccggggggcccgaggccctgtcccaaagacccgacacagggggg

SEQ ID NO: 5348 - DNA, 463 bp, Oryza sativa
  Clone ID: uC-osflcyp139f02b1
ttccacttcgtccgggtaaggtagatcatgaagcgcgagtaccaagaagccggcgggagctgcggcggcgggagcagcgccgatatggggtcgtgcaaggacaaggtgatggcgggggcggcgggggaggaggaggacgtcgacgagctgctggcggcgctcgggtacaaggtgcggtcgtccgacatggccgacgtcgcgcagaagctggagcagctggagatggccatggggatgggcggcgtgagcgcccccggcgccgcggatgacggtttcgtgtcgcacctggccacggacaccgtgcactacaaccccttggacctcttctcctgggtcgagagcatgctttccgagcttaacgcgccgttgccccctatcccgccagcgccgccggctgcccgccatgctttcaccttgtccactgtcaccggcggcggtggtaggcgcttttttgaacttcccg

SEQ ID NO: 5349 - DNA, 432 bp, Oryza sativa
  unsure (1)..(432): unsure at all n locations
  Clone ID: uC-osflcyp139f03b1
cattagcttacagntcagntctaccacgtacaacagcagaagtgagagagggagaacaagacttggcacgaggaggagcttagctagccagccatggcgaggcgctctccttgcctcgccgtcgccatgctcctgcttggggcgttggcggtggcgagcgccttcattgatgaagcggcggctgctggccgggggctcggccatggcgcccgcttcatgagcaagcagggtcgtgtgacatacgagaagctgccggagccggagccgaagccaaagccaaagcctcatcctaaacccacgccaaaacctgagcccaagccagagccggagcccaaaccagtacctgagcctgagcctaaaccggaacccaagcccgaaccaaaacctgagcctaagcctgaaccttaacccatcccagagcccaaaccggag

SEQ ID NO: 5350 - DNA, 459 bp, Oryza sativa
  Clone ID: uC-osflcyp139f09b1
atcgactcctcgccgatggctccgtttctgcaacccagagttgagtgaaatagtaacaaaatggctaaaaacagatcagtggacaagcaaccttgatcttcttaccggacttcggaaatttgcagatgatgaaaagcttcatgctgagtgggcatcagctaagttggctagcaaaaaacgcctagccaagcatgtgttggatgtgacaggtgttacaatcgacccaaatagcctttttgatatacaaattaaacgcattcatgagtacaagagacagctgctaaacattttgggagctgtttacagatacaagaagttaaagggaatgagtgcagaggagagacaaaaagttacgccacgcactgtcatgatagggggaaaagcattcgcgacttacaccaatgccaaaagaaatagaaaattggtaaatgatgttggtgctggggtgaacaatgatcc

SEQ ID NO: 5351 - DNA, 453 bp, Oryza sativa
  unsure (1)..(453): unsure at all n locations
  Clone ID: uC-osflcyp139f10b1
atcgcatacatccgcaagcacgtcaccgtcgccatggcgtactccatcacgcccgaccggctgttcaggcggntcccctgcctcgagtcgctcaagctcaaggccaagccccgggcggccatgttcaacctcatccccgaggactggggcggctccgcctcgccgtggatccgccagctctcggcctcgttccacttcctcaaggcgctccacctccgcaggatgatcgtgtccgacgacgacctcgacgtcctcgtccgcgccaaggcgcacatgctctcctcgttcaagcttgaccgctgctctggcttctcaacatcctccctcgccctcgtcgcccgcacctgcaagaaacttgaaacgttattcctggaggatagcataattgctgagaaagaaaatgacgaatggattcgggagcttgctaccaacaatagtgtccttgagacactg

SEQ ID NO: 5352 - DNA, 450 bp, Oryza sativa
  Clone ID: uC-osflcyp139f11b1
ttcgatagtcctctccacccactccctccttgagcacaccgatgtcgctgtcctgctcgacaatgaggccatctatgacatctgccgccgctccctcgacattgagcgcccaacctacaccaacctcaacaggcttgtgtcccaggtcatctcctcactgactgcctccctgaggttcgatggtgctctgaatgtggatgtcaacgagttccagaccaacctggtgccctacccgaggatccacttcatgctttcctcctacgccccggtgatctcggccgagaaggcctaccacgagcagctctccgtggcggagatcaccaacagcgccttcgagccgtcctccatgatggccaagtgcgacccgcgccacggcaagtacatggcgtgctgcctgatgtaccgcggcgacgtggtccccaggacgtgaaccccgcggtggccaccatc

SEQ ID NO: 5353 - DNA, 288 bp, Oryza sativa
  unsure (1)..(288): unsure at all n locations
  Clone ID: uC-osflcyp139g01b1
gcatgangtcatctcctcctcctctcgcatggcagccatggccaccaccgcgtccagcctcctcaagacctccttcgctggcgcgcgcctccccgccgtcgtccgcaaccccaccgtctgcgtcgcgccgcgcaccggcggcgccatctgcaactccatctcgtcgtcgtagcccacttccccctacgacctgaacgccctcagggtcaggctcatcagggggccatcgtgtcccgcgagatgacccggcggtccatgacccgcatgatcacctacgccgacaccgac

SEQ ID NO: 5354 - DNA, 452 bp, Oryza sativa
  Clone ID: uC-osflcyp139g03b1
gtttcacctctcgccgcgatccatccaaaatcccccaagctgctgcaaggatcgtccaatcaatccgtcgtcctcctcctcctccgcctccgtctcaagaatgacagaatcaccgtttttgccgcgcgagaggctctttaagcagcagcagtattttcagaacttgaccaagcacacgtatctgaaagggcgttatgatgtggtcacctccgttgccattcccctcgctcttgccgcctccagcttgtttatgataggccgtggggtgtacaacatgtctcatggagtcgggaaaaaggagtgaacgacatggtttcctctcatttcagtacttcagcataggggtgatagcttcaaggcttcctatggtgtcttttaagttgcacaaataaatactgtttgagttaactcttgttatattactgttggtaactgtggatttctgatttaag

SEQ ID NO: 5355 - DNA, 335 bp, Oryza sativa
  unsure (1)..(335): unsure at all n locations
  Clone ID: uC-osflcyp139g05b1
ggaacaagtgccaaccgccgnaaccaacaagcanggggagaagcaagtgggagagccgcaccacacgggcccaagcaagacacgncgnaagggngacaagggaccccacaccngaccacagaacagacagcaccgacncaaagacccgacggccgcaccgacaaagaaagggaccagagccacccggccagaacccagcggaaaaggagaaagagaaggagaaaccgagcacggaaaccacaggaaagaggccgacgaagagcaccccgcggcaccagaccccngcaaggaaaagcacgacgcaacagcaaccggcggccacagcaaagggggag

SEQ ID NO: 5356 - DNA, 367 bp, Oryza sativa
  unsure (1)..(367): unsure at all n locations
  Clone ID: uC-osflcyp139g09b1
ttcggtttagcggcacgcgcgcaccgacaccaccaccgagaataatggaggcggcggcggcagacgatgcgaacggggcggggggcaagaagatgggtcgccggggcgaccacacggatggtgacggcgctgctnaccgaccctcagcagatcagcaaggactacgactactgcaaggaccgcaaggacctgcaccgccccgagttggaggggcacttccggaaaaatccgctggggggggaatcaaccatactccgggggcttgaggagtgtctaagattcattgctaactacaagctgacagaaaccgaaataacagggctgggaccggtgcagcacaccagggaggaccggttcttcgagtacc

SEQ ID NO: 5357 - DNA, 426 bp, Oryza sativa
  Clone ID: uC-osflcyp139g10b1
tcgagtcgtccccgacctaggatttcgccgccattctcctccaaggagatgccgcgctatgatgatcgttatggaagcacgcgcttgtatgttggtagactgtcttcccgcactcgttctcgtgacctagaataccatttcagcagatatggaaggtacggacagaaccatggtccttaagattttatttctctgaagcgcagattttttgcagaagtttatggattttttttctgttaaatttgtaataagctgcattttctgtgtataaatgtaaaacactattactatgataacacttgctaaacagttgatattacaacaacttggtacgttcaaatttcactgtagaaatttaattatttcccattaaaattgtaacctttcaaattgtgtgcgagtcttctgtgctgagcatagactagt

SEQ ID NO: 5358 - DNA, 431 bp, Oryza sativa
  Clone ID: uC-osflcyp139g11b1
tcgcctagcaagaagctcatctcctcctcctctcgcatggcagccatggccaccaccgcgtccagcctcctcaagacctccttcgctggcgcgcgcctccccgccgccgcccgcaaccccaccgtctccgtcgcgccgcgcaccggcggcgccatctgcaactccatctcgtcgtcgtcgtccactcccccctacgacctcaacgccatcaggttcagccccatcaaggagtccatcgtgtcccgcgagatgacccggcggtacatgaccgacatgatcacctacgccgacccgacgtcgtcgtcgtcggcgccggctccgcggggctctcctgcgcgtacgagctctccaggacccctccgtcagcgtcgccgtcatcgagcagtcggtgtcccccggcggcggcgcgtggctcggcgggcagctgttct

SEQ ID NO: 5359 - DNA, 463 bp, Oryza sativa
  unsure (1)..(463): unsure at all n locations
  Clone ID: uC-osflcyp139h02b1
ttccactgnccgacttcattacttctgcccnnncnnnnctnnnnnctctcggtgatcggtttgttcgatcagatcggttctttggagagatggagcagtccttcatcatgatcaagcctgacggcgtccagagaggcctgattggagacatcatcagcaggttcgagaagaaaggattctacctgagggggatgaagttcatgaatgtgcagaggtcctttgcacagcagcactatgccgacctttccgacaaggccttcttccctgggttggcggcggacaccagctgttggccccccccttgcaatggtttggcaaggagggatttgttgttgccactggccgcaggatcattggggccaccaggccctgggaggcagcccccggcaccatccgtgctgactatgccgtggaagttggcaggaatgtcatccatgggagcgactccgtggacaacgggaag

SEQ ID NO: 5360 - DNA, 436 bp, Oryza sativa
  Clone ID: uC-osflcyp139h04b1
cattaggatactatacacaagcagaacgacttcaagcagcccggggagaggtacaggtcgtgggcgccggatagacaggagaggttcatccgccgcttcgccggcgagctcgcgcaccccaaggtctcccctgagctccgcgccatctgggtcaactacctctcccagtgtgatgagtcgttgggggtgaagattgcgaataggctcaacgtgaagccaagcatgtgaagaaactaaggcacaagaatgcatcatctcttgctaattaattggagtactaccaacaaataaggccagacaatgtcagatgcacgcatcttctgttgtcgttgggccatcttttgtatgcatcctattgttaattactagtacatgatatccaagtgatcatctgcaaggctacagaaattctgtaatacgataaattaaaagaaac

SEQ ID NO: 5361 - DNA, 437 bp, Oryza sativa
  unsure (1)..(437): unsure at all n locations
  Clone ID: uC-osflcyp139h06b1
atttagttttataagcctgcctggagccgacgtccttcaccgttaaggcggagggcgtggccaagaacgcgccacccgagttccagaagaccaagctcatgacccgcctgacctacaccctcgacgagatcgagggcccgctcgaggtcagctccgacggaaccatcaagttcgaggagaaggacggaatcgactacgccgccgtcaccgtgcagctgccgggaggcgagcgcgtgccgttcctcttcaccatcaagaatctggtcgccaccggcaagccggagagcttcggcgggcccttcctcgtgcccagctaccgtggttcgtccttcctcgacccaaaggngccgcggtggctctaccggctacgacaacgctgtggcgctccccgccggaggcagaggagacgaggaggagctcgctaggagaacgtcaag

SEQ ID NO: 5362 - DNA, 351 bp, Oryza sativa
  Clone ID: uC-osflcyp139h07b1
attgacctaatccccccaccatggatcaccgcctcctcctcctcggtctcctcctactctccccggcggtggccgccgcctcagtccccggcgaggaggagccgctgatccggcaggtggacggcggcggcgacgacaacgagctggagctgaacgcggagcgccacttcgccagcttcgtccagaggttcgggaagtcctaccgtgacgccgacgagcacgcgtaccggctctccgtgttcaaggccaacctccgacgcgcgcgccgccaccagctgctcgacccctccgcggagcacggcgtcaccaagttctccgacctcaccccggccgagttccgccgggcctacc

SEQ ID NO: 5363 - DNA, 357 bp, Oryza sativa
  Clone ID: uC-osflcyp139h08b1
cctgagatcccattgatattttaataaacatcatgcatagactacttttgaaatcaagtccgttttatggcccagcacaactcttgcacactagggactatgacacacaaagagcggcagcattacaaggtttgcgacaacataatagttattcagtattcactcatgcaccaacagaaacatcctgcatggtatcaaaagacccagcataggttacgcaaacattttggctttggttgctccaacactatgcttcagggcctaatagtacaacaatttttcttgccgcgcagctttgtttcaagagccctatcaagctttccgctcatcctgctgggtcggaatagctttacctga

SEQ ID NO: 5364 - DNA, 330 bp, Oryza sativa
  Clone ID: uC-osflcyp139h09b1
tttagatattctgcggactaggaggacacaggccaggtggaggacttgcaccaaataaggcttaacttgctgcatgtgacacaaaagaaggccagaacagcaaacgcctatgcaggaggcgatgagctattgtgcatgtgtgcttctgtgggagaagcaactgttgattggacaggacggcaacgatacaaggaactggatctgagaccaactccatttgaggcactaccaactctcataggaagtgagagctctgtatgcacgatgagttgcagaacacgcaattgactctacctactgatgaataatggcaaatgtgggaaattgtag

SEQ ID NO: 5365 - DNA, 452 bp, Oryza sativa
  Clone ID: uC-osflcyp139h10b1
tcgccttactaatccgattcaaacccgccgtttccaagcttgctctcctctcccccccaatccttccctcccgagtggcagggtgctcgacgggatggcgcagaaggaggccaatggcagcagcaacggggagcacaccacccgcccgccgccgacgccctcgccgctccggttctccaagttcttccaggcgaacctgaggatcctcgtcaccggcggagctggcttcatcggctcgcccctcgtcgacaagctcatggagaacgagaagcacgaggtcattgtcgcagacaactttttcactggttcaaaagacaacctgaagaagtgggatcggacacccaagatttgagcttatccgtcatgatgtcacccagcccctgcttggggaggttgaccaaatctaacaccttgcttgccctgcttcaccaatcttttacaagcacaaccct

SEQ ID NO: 5366 - DNA, 285 bp, Oryza sativa
  Clone ID: uC-osflcyp139h11b1
tcggatatcaacaaagtctctctctcttctctctctcgcctcgacgccccaaaccctagccatggccgacccagccgctgccgccgccgccgccgagttcggggatcccgattcgccgcccgcgccggccgccgaggaggccgaggcggctgcggcggcgggggaggaggcggtcccggcggcggaggccgcggcggcgaagaggtggcccgggtggcccggggacagcgtgttcaggctcgtggtccccgtgctcaaggtcgggagcatcatcgggaggaaggg

SEQ ID NO: 5367 - DNA, 439 bp, Oryza sativa
  Clone ID: uC-osflcyp139h12b1
gaatatcagccattcttttttgttttgaatctctgtttatgtatgagttctgcatagtttacagattatgtgtttatattttccctaatagagatttaatgaatttttttagttctgcatgagttttgatatatgattttgcatataattttattgttctcgactaatatttctcaaatctgttgaaatatggaatgcaaatttcatatatcatcatgttgttcaacctaagaatacacataacaattgaattctaagataatatgatctgtgatgtttctataaaatctgtgaagatttctgtataaaatgtagacccataactcagaagatatttttttttggagtgatgaagctttgtgaattattttgatggagattcatatgaaaattcgaagctaaacactcaaatatttcaatctgtgaatactctgaattc

SEQ ID NO: 5368 - DNA, 498 bp, Oryza sativa
  Clone ID: uC-osflcyp140a01b1
gtgctatggtggttgagacattggtaaggtaccagctgcctgttgttgtaattgtcttcaacaataatggagctcatggcggtgatcggagaagccctgatgagataaccggaccgtacaaagatgatcctgccccaacctctttcgttccagctgctggttaccataaaatgatggaagcttttggaggaaaaggttatcttgttgagacaccagatgagctaaaatccgccctttcagagtcgtttcgtgccaggaagccagcggtgataaatgttatcattgatccttatgctggtgcagagagcggtagaatgcagcataagaactgaaggtgtttgtatcataccagaacgcaggtcccagttaataagcaatgtcctattgaaattaaaacggacacccatggaagaacatcttatatcactgtccctgaaataagaaagatcctgggtagtactccgtacttaatggcatgtgagatatcgaattcaagct

SEQ ID NO: 5369 - DNA, 359 bp, Oryza sativa
  unsure (1)..(359): unsure at all n locations
  Clone ID: uC-osflcyp140a02b1
ctcttctaatactcttcaccttnncctcctcggntcggcgccgtggttttactagggtttagtgggttgagaccgcggcgccggatggcgagtaccgctgcttcgtcggcggcctcgcctgggccaccgacgaccgctccctcgaggcccgccttctccacctacggtgagatcctcgactccaagatcatcaacgacagggagacggggaggtcacgtgggtttggcttcgtcaccttctcctccgagcagtcaatgcgcgacgccatcgagggcatgaacggcaaggagctcgacggccgcaacatcaccgacaatgaggcccagtcctgccgctccggcggcggaggcggaggcta

SEQ ID NO: 5370 - DNA, 531 bp, Oryza sativa
  unsure (1)..(531): unsure at all n locations
  Clone ID: uC-osflcyp140a04b1
agaatacaattcttgcatcagngacagacggcatnagcaaaccgttcatgagagctcggagcttgttgaagagngaaagcataagcgcttccaagtgtattggtgaaaaaccaaagcaagacagagatcaggaggattcccttacagagaacatggacgaaacagctgatgaggtctcggaaaaggttgctcaactgaaaacctgatgattcccgacaaggtcacagaatcgatcggagttagtacaacagcatgtgtatagatgcccttccccagaagacgagaatcccagatcaggacggtcttaaccatgataaagagtctacaactaataataccacaagttgttttggtaacctctgttgtactgcaaatttttcccccttcagttttgtgttctgacagcaaacaactgtctaactgactggttagntcctcgcttttccctcacgggacaatcaccgatcctgtaaaatttactttcttttgaagacagaatcatacactgtttctatgaaatattctaaaatt

SEQ ID NO: 5371 - DNA, 403 bp, Oryza sativa
  unsure (1)..(403): unsure at all n locations
  Clone ID: uC-osflcyp140a05b1
gngttagcatacaagcgcgcccaccacaacaaccactacgacggtgccattaacaacatgcaccgtgacgaggaggagcgctactacccgncgagccacgcgccgctccgccacgcgccgccgacgcccatcacgccgcgccccgaggtggggaggaggcagaaggcgacgattcacaagcagaacgagcacagtcagggggggagaggcacaggtcgcgggcgcccgatagacaagggaggaaaaaacgacgcttcgccggcgagctcgcgcaccccaaggtctccgctagagactgcagcacatacagggtcaactacctctcccagagtgatgagctggtgaaggcgaagaccgaggctagggatgctgtgaagccaagcatgtgaagaaactaaggcac

SEQ ID NO: 5372 - DNA, 454 bp, Oryza sativa
  Clone ID: uC-osflcyp140a06b1
ctattatatatggcgcgcagctcgaaaaaatctggaaaacgacttacgaatgacttcgacactttccattggcatgcacaaccaagacctatacctgcatcagcattgcaattagctggctcagcttatttgctgagggccactgcttgggaacactacgggagtgctccgatggttcgaatgaattccttggtctatgcaacctgctttgctgatgctgcaagttcagcagagctgacgctagcagatgtcaagctaattcagcatttagcaactttcaaagggtattcagaggcattctctgctctcaagcttgctgaagagaagttcccgctgtcagcaaatccacatatccagcttcttaaaatgcaattattgcacgagcgtgctctgcatcgaggacacctgaaagttgcgcaacagatctgtgaagagtttgctgtgttcgcatctt

SEQ ID NO: 5373 - DNA, 538 bp, Oryza sativa
  unsure (1)..(538): unsure at all n locations
  Clone ID: uC-osflcyp140a09b1
attccataaccccctgccttctctcgccgattccgccaccgtcgacgtgccgcgcctcgccgtcggccgcccttcgatctcctcgtcctcctcggaatggatctcgacatggacgactacatcgacccctacgaggaggccgaggcggaggccgccgcggaagccgccgggctgacgtccgcggcagcggcggaggactcctccgacgagggcgactccgaggacgactccgaggccgagagcgactacgaggagaggtcctacggcctcctccgctccggcaaccaccgcgtgcgcaacccggacggcaccttccgctgccccttctgccccggcaagaagaagcaggactacaagctcaaggacctcctccagcatgccgacggcatcggcgccttcagcaagcgccgccgncacggccgngagcgcgccttccatcgcgccttcgcccgattcgtccgcaccgaccctttcttcgcccaagacctcgccgccatcaacgggatcgccaccactgctgatgctagctctaattcta

SEQ ID NO: 5374 - DNA, 541 bp, Oryza sativa
  unsure (1)..(541): unsure at all n locations
  Clone ID: uC-osflcyp140a10b1
ttttaatacctctcctttcccctcctctcttcccccctctcacaagatagagagcgccagactctccccaggtgaggattcagccatgaagggggccaaatccaagggcgccgccaagcccgacgccaagttggctgtgaagagtaagggcgcggagaagcccgccgccaagggcaggaaggggaaggccggcaaggaccccaacaagcccaagagggctccctccgctttcttcgtttttatggaggagttccgtaaggagttcaaggagaagaaccccaagaataaatctgtcgctgctgtaggaaaagcagccggtgataggtggaaatccctgaccgaagcggacaaggctccctatgtagccaaggccaacaagctcaaggccgagtacaacaaggccattgctgcctacaacaagggcgagagcactgccaagaaggcacccgccaaggaggaagaggaggacgaccaggaggaatctgacaagtccaagtccgaggtcaatgatgaggatgacgacnagggcagcgaagaggat

SEQ ID NO: 5375 - DNA, 465 bp, Oryza sativa
  Clone ID: uC-osflcyp140a12b1
atggaatcctctcctcctcctccgcctcctcctccggcgtgttcggtgtcagcagcggtgcctgccatgggttgcggtggctccaaggaggacgtggccaccggcaacaccaccgcccccgccgccgccggcagcagcaagctcttccggaggaagtcctccgtctccgccagccaccgctcctcctcctcgtcgtcttccaatggatgcacctccgtctccgtcaaggacgtcgcgacgaagaaggaggaggagaccgaggccgacgccgtcgaggtgacgtcggccgaggaggcggcggcggcggcggtggtggtcaagaaggacgtcaccatcgccgctgccacgctcgcggtgaccgaggcgatggcgacggcggcggaacctaaggaggaggaggaggaggaggaggagctgcccgagtccaccatgggcgacgaggcgcccgcggcggtggtggaagcg

SEQ ID NO: 5376 - DNA, 521 bp, Oryza sativa
  Clone ID: uC-osflcyp140b02b1
cttttcgttggcggaactgctggacggtgtgaaaaggtgtatcgaacagatcaacaaggccaacaggggtgatttgactcaggaagagattcaggaacgacagaacaaggctatgcaggatccagagatccagaatattcttacagatcccatcatgcgacaggtactggtcgatttgcaggagaaccctagggcttctcaggagcatcttaagaaccctggagtgatgcagaagattcagaagcttgtaagcgctggaatagttcaaatgagatagtcgaccaaagcaagaagcgctgttcgtgtctatgttcattgctccttactttttttccatgctcagtctttgtggacttaagatttacacagtttggggctaatcttcattctcaattggattatgtgagtgcagcgtgtcactggattattagtggttatggcatccgtgctacagctgcacgtgcaaacgtatgtctctatttgttagtcctaaacattttccctaccgaatgaaaatagag

SEQ ID NO: 5377 - DNA, 511 bp, Oryza sativa
  Clone ID: uC-osflcyp140b03b1
gcgttttgtccgaggctccaagagttgagtcctgaaaagcttgtgaaggctggaatagtcagagagaaatcattcggaacaacaaaagatcgcatgctttacattgaacagtgtgccaactccagagctgtaactatcttcatacgtggtggcaacaaaatgatgattgaggagaccaagcgaagtcttcatgatgctctttgtgttgcaaggaatcttatccgtaataattcaattgtgtatggtggtggttcagcagaaatatcttgctcagttgctgttgaagctgctgcagatcggtacccaggagttgaacagtatgcaatcaggtcatttgctgatgcgttggatgctatttcactagccttggccgaaaacagtggtttgtctcctattgatacactgacagcagttaaaatttaacaaggtaaggagagcaatcctcactgtggcattgacttgaacgatgttgggacaaaccacatgaaggaaccaaatgtttttgaacact

SEQ ID NO: 5378 - DNA, 511 bp, Oryza sativa
  Clone ID: uC-osflcyp140b04b1
gtatggagtgtgtagtagcaccttgctctcctttgccttcagagaaaccggaagcaatggcgtctgctactctcctcaagtcatctttccttcccaagaagtctgaatggggtgccacccgccaggctgccgcccccaagccggtgactgtctccatggttgtccgcgctggtgcctacgacgatgagcttgtcaagaccgcgaaaaccattgcatcaccaggaaggggtatccttgccatggatgagtcgaacgcgacctgcggtaagaggcttgcgtcaattggccttgagaacaccgaggccaaccgccaggcttaccggaccctccttgtcaccgcaccgggcttgggacagtacatctccggtgctatcctcttcgaggagactctgtaccagtcaactgtagatggcaagaagattgtcgacatcctcactgagcagaaaatcgttccaggtatcaaggtcgacaagggtcttgtgccccttgctggctccaacaacgagtcatg

SEQ ID NO: 5379 - DNA, 532 bp, Oryza sativa
  Clone ID: uC-osflcyp140b05b1
cccttatattctccccacctccgcctccgcctccgatccgccgccgccgttggagaccgccggagtcgcgtgtagcacgccgcctcacccccgcccctccccccccccccaatcgctctccatttccctcccctttcgctcgctgctgctcccgcacgccgccggtgcccggatcccgctggccgacgtcgcccccgccgccgagctgcctcctcctccccttctcttgccgctcgaaatgatgttggagctctggtggtaattaaccatggatgcaatggaggccgaggaaggtccttttctggctaatgatgctaagttgcatgccggaatgtacagagcatttcatcctgcggtctcaaaacttgtagcgaatttccctttcattgaagcatcaagacccagaagcaaatctggcatacaggcgctatgctctctacatgtagctctagataaagccaaaggtcttcttcaacattgtgcagattgcagcaggctctacttggccataactgcagaaactgtgcttttg

SEQ ID NO: 5380 - DNA, 435 bp, Oryza sativa
  Clone ID: uC-osflcyp140b06b1
agttagaatagtagtaaacggtcagtcaattgttgcaaagcgatcagctactggcgatggctcatggaaggggcagtgctgcaggacgacgcaacgccgccgtgctggcgatggtcctcctctgcgtgctcctccacggcgagctcgccgagtcggccgtgtacaccgtcggcgaccgcggcggctggggcttcaactccggcggctggctcaggggcaagcgcttccgcgccggcgacgtgctcgtgttcaagtacagcccgtcggcgcacaacgtggtggcggtgaacgcggcggggtacaagtcgtgcagcgcgccgaggggtgccaaggtgtacaagtcgggcagcgaccgcgtcaccctggcgcgcggcaccaactacttcatctgcagcttccccggccactgccaggccggcatgaagatcgccgtca

SEQ ID NO: 5381 - DNA, 445 bp, Oryza sativa
  unsure (1)..(445): unsure at all n locations
  Clone ID: uC-osflcyp140b08b1
gtccgactgagctgcggttgtgtgcaaaccttgaaataatatatatctactaattgcataaaggtttatggaggattgaatatgaagcaactagtatattcagtgaatatcacttaagttgttcacaaagtagaaacgggcctcttttttgttttgttaatttaatactggcacaacttgaggacaaggttgatggtgcaatactgaaacgcattgtgcttcattttcagttgtgctgagccagcgcctcaaggtatatttgcgaatttttccctgttactgaccgaaggcagagtagaggaacctgatgtggntgatctcggcacgatatttgaagaagaacaaaccaaagctcctgtgctaactggaagccaagaagatggagacgacgaagatatagattgggatgacccgttgcatttcccagctgggaaaaggagattga

SEQ ID NO: 5382 - DNA, 577 bp, Oryza sativa
  Clone ID: uC-osflcyp140b10b1
atggcattcttggttgctaggtcgtcacgttgtgagcatgactgcatgagagtaggctcaagtccttgttttccatttccttcttttttttttcccttccttttctccccgccccctccctctcatctttgtttggtcattcctgtaaattttattcctcttaatacaaaggtgagcaatccttttgagtatttccaaaaaaaaaccccattacttgtagttgtaggtgttcttgactattgagacttcagaagggttagatttgaattctttgctcaattgaaatagattacaacgaatagattagttaattacaacgaatgttgaatgacctcaacatcctaggtagggaaatcggaatgtatccctattgcattgccaagttactgggttcttaagggtccaaagaattattgcttcgaagtaaccatgttgttctctgaagactggccatcccttgaactatgttcttctcatgatcctattgggtaatatgctcggtagctctaaattccatattatgcccagcttaacataacagtaacttctgcttggagagctataactattctttttt

SEQ ID NO: 5383 - DNA, 323 bp, Oryza sativa
  unsure (1)..(323): unsure at all n locations
  Clone ID: uC-osflcyp140c01b1
gcgcacccgcncgcgggcaggagtaaaggagaaaacccggcccaacacccccgangangaggangagagacnagaaccagccgcagcaacgcacagacagccaggggcaaccaggagcacccgcanccacgacgcaggcgcagccacagcggccagcaccaacccgcggcggcggcaacgccgcccgccaggaacccaaagggcagcacaagggcagacacaaacgccgaaccacgccaaggcccaaccaagcaacggaagaggaaaacaaaaggcaccacaacaaggacnccaaggaacgaacaggacagagaacaaacaag

SEQ ID NO: 5384 - DNA, 443 bp, Oryza sativa
  Clone ID: uC-osflcyp140c02b1
ggattagattaacggcgaggaacacgccgaacccgagcgcggagccgaacatacgggcgccgcccacgaaggcaggcgacgatctcgacggagtggccagaccacgacaagaccaccgcggggacacgcgaccactggagcaggcagaaccagatggaccaggacacagcagcgggagacgaccaccaccgccaggcgaggaacgacgaccaacgccggcaccagcccgacacggcggcaaccgccacagcagggacaacaccaacgacctcatggacaccaacgacccgagggcccaccacaagcagacgacgacgcccaccctcaacgccgacgagcgcagggcgcgcagcacgaactcgacgaggagggaccacaccgggatggcgaggcacgccaagaagccggaccagcgcgccgtccccaagggcggggcccaccgc

SEQ ID NO: 5385 - DNA, 514 bp, Oryza sativa
  unsure (1)..(514): unsure at all n locations
  Clone ID: uC-osflcyp140c03b1
caaatanattctgagacaatgcagcacggnggaagaaggagcaagagaataactggagccttatttaggttcgccatccgaggaaagctaccagagtagagaacttgaaaaggcttctcagcaagttgcgaagcacctctatgattcaaaggttcaaccaactacattaatcccgaaacaagtcgggaatatgtacacagcgtctctatatgctgctttggcatcagtgatgcataacaaaaatgaaactctggcaggccaaaggattgtcatgttctcatacggcagtggcttgacatcaacaatgttctctttcaagatcaatgaaggccagcatccattcatcctatcaaacattgcaggcatactggatgtctccaagaaactggagtccaggcatgtggttgcgcccgagaagttcgtggcggcgctgaagctgatggagcaccggtaccgcgccaaggatttcacgacgagccangacacgagccttgctcgcttcaggcacctacta

SEQ ID NO: 5386 - DNA, 511 bp, Oryza sativa
  Clone ID: uC-osflcyp140c04b1
gcatacaatatcatttctctcgcgagtcgcgagttgcaccgattgaattaagggtcgaagatgtttgggttcgggcaccaccacaaccaggcaccggcggcgccgtcggacccgaaccagatcttcaagatcttctgccgcgccaacgagaactactgcctcaccgtccgcgacggcgccgtcgtcctcgcccccgtcaaccccaaggacgagcaccagcactggttcaaggacatgaggttcagcaccaaggtgaaggacggggagggcatgccggcgttcgccctcgtcaacaaggccaccggactcgccgtcaagcactccctcggccagtcccaccccgtgaagcttgtgccgttcaacccggagtacgaggacgcgtcggtgctgtggacggagagcaaggacgtcggcaagggcttccgctgcatccgcatggtcaacaacacccgcctcaacttggacgccttccacggcgacaaggaccacggcggcgtccgcgacggcacca

SEQ ID NO: 5387 - DNA, 495 bp, Oryza sativa
  Clone ID: uC-osflcyp140c06b1
agcatgcttttcaagctgtccctcccgggaaaaacacacaggagctgaggtgcaagatgtctgcttgattgcctcctgcttcacttcactgcttctcttccttctccctctcctctctgcaatcttcttgtatttttctccctagctctcctgcatcagcatcagttcttgcctgtggctaaggatcttttgatcttcaaagggagagaaaaggatcttgcctgagcttcagtttcttgtgctgcctcctcctctgtgtttgtgtgatccaatttccaacttggaggagttcttggtttcctggcattgtgctttcttggacccagagcttgacaagattgggtcaatagtttgccaatctagagagagagagagaatacttggtttcttggcaagggggacaccagggcatagatctttgtagttaatagttgctcttgccctctggactgaggagtaaatagttgtgtgccagtggtctcttgcttcatcttg

SEQ ID NO: 5388 - DNA, 427 bp, Oryza sativa
  unsure (1)..(427): unsure at all n locations
  Clone ID: uC-osflcyp140c07b1
acaccacaacccnccccaaaaccggccgaagtttagcaagangnacgcgcttcgggcaccacggccaccanggccaagaccagccgccccagcaccacggcggcggcggcggcggcgcgcaccagcccaccnncaagaacnncngccgcgccgacgaggggnaccgcgncgccgngcgcgaggggaacgncgnccncgccccgaccaacccgcgcgacgagcaccagcacnggnacaaggacangcgcnncagcgccaagaacaaggacgaggagggcaacccggcgancgcgcccgncaacaaggccaccggccncgccancaagcacncccncggccagggccacccggngaagcnggcgccgnncaacccggagnacccggacgaggcggcgcngnggacggagagcggcgacgngggcaagag

SEQ ID NO: 5389 - DNA, 503 bp, Oryza sativa
  unsure (1)..(503): unsure at all n locations
  Clone ID: uC-osflcyp140c10b1
aatgcattccccgagaggcggcgaaanccccaaaggcgaacattccaaagccatcgctttgctttttcacccaccgatcgattcgatctgaccgcgccgccgcaagggaggaggaggaggaggacgacgagcagcagccatgtgggcggcgtcttgcctggcgtcgtgctgcgccgcgtgcgcgtgcgaggcgtgccgtacggcggtcggcagcatcggccgccgctccgcccgcatcgcctactgcggcctcttcgcgctctccctcttcgcctcctgggcgctccgcgaggtcgccgcgcccctcctccaatccatcccatggattaaccacttccacaagacgcccgaccgcgagtggttcgagaccgatgccgtgcttagggttagcctcggcaacttcgtcttcttcaccatcctcgccatcatcatggctggcatcaaggaccagaaggacccccgcgacaagatacaccatggcggatggatggccaagatattct

SEQ ID NO: 5390 - DNA, 592 bp, Oryza sativa
  Clone ID: uC-osflcyp140c11b1
atggggtactcccacggaataatactgccagcgacatccttaatcaaatggcatcagtactttagagaattcatgcatctatggaatcaaattctgccataggaacaactttacttcagggtgaagagaatattggccaattcctctaccttgagggcattgagtattatatgtggaacacatatgatgttcatttctatgcatcattctctctgatcatgctgtttccaaaactccagctcagcattcagagagatttcgctgctgctgttttgatgcatgatcctgaaaagctcaggatgttacatgatggaaaatgggttgcgagaaaagttcttggtgctgttcctcatgatcttgggctatatgacccctggttcaaagttaatgcatatacgctctataacacagatcgatggaaggacttgaacccaaagtttgttctgcaagtttatagagatgtggttgccacaggtgacaaatcctttgctcgtgctgtttggccatctgtttatatggcaatggcatatatggagcatttgacagggataaagatggatgattgaaatgaggactttcagacagacttatg

SEQ ID NO: 5391 - DNA, 384 bp, Oryza sativa
  Clone ID: uC-osflcyp140d01b1
ggctttgaatactggacgaagcccaaacccgcactggtacggcagtacggtggttgtaggatcgcaacataaacggcgaaatgaaattttgtagcgatggatgtaatattgagtaggttggtgcaatcacatgtaatcactagatctctcaaatcaaatgtactactggtctttaccagtggcacttggtatttgtcaccattgaccagtgacttactttatttcagcttaacggctaataacctttaaatatcaaattttgatgaacgaaagtgcactcgatagtatgataaaaaaaaaaaaaaaacctaaaaaaaaaacaaataaaaaaaaaaaaaaaataaaaaataaaattttaaaaaacaaaaatggggcggccgtttt

SEQ ID NO: 5392 - DNA, 485 bp, Oryza sativa
  Clone ID: uC-osflcyp140d02b1
atctgacatcatatccctcccagcttggggttcgaatcccaattccgagcgggaaaaaaagtctgaaagttaacgcgtccttcggccgcggattcagaattctgcgaatataagtacattacggtgggccgtgataccaatttgtaccgagcaattaattgaaggttagagtttgagcttataggagatgaagtgattggagctgaatcctgttgctgaaagcagcgatttcgtgtcaaaatttgatgcctttgcttggttcgagagctgtacatgcttgatactgttgcgatcctgcaatgtcccgaaggaatgccggggcaatgcagcgggaggggtcagtcaaggactgggaggaatttgacccctcgccgtctcccaagctggcgtactcgcagtcctatgttgcaatgagggggcttctgacatcggtggcctcgctggacccttgtctgatgtcgagcagcctcaagtctgcttgggca

SEQ ID NO: 5393 - DNA, 533 bp, Oryza sativa
  Clone ID: uC-osflcyp140d08b1
ttacatatagctcgctaactaatcttccccttcgtctcctttattattccacttggacgaacactagctcaccggccggccatggcgtcttcttccgttctgatcaagctgctcgtcgtcgtcggctgcgccgccgcggcctccgcggcgacgctcaccgtgggtggtagctccgggtggacgcttggccagaactacgatacttgggcaagtggccaaaccttcgcggttggagacaagctcgtgttcagcttcgttggggcgcacacggtgacggaggtgaacaagaacgattacgacaactgcgccgtcgcaagcaacttgatcagctcgaccagcaccagcccagccaccctcgacctcgccgccgccggcatgcactactacatctgcaccatcagcggccactgcgccggcggcatgaagctggccatcaacgtcggcagcggctccggcttcggcttcggctccgggacgccacccagcaccaccccaggaagcagcgggacgccgccggtcacccctttttcccc

SEQ ID NO: 5394 - DNA, 552 bp, Oryza sativa
  Clone ID: uC-osflcyp140d09b1
ttagttttgcgagcttgagcttggagagagacaacaatggctgctcaggctcttctctctgggaggcagctgctggggaggccattgcaatcttcagtctccaggtcttcttcctccaggaaggcacccttcatggtcagggcagaggccactccccctgccaagcaaggtgctgacaggcagctgtggttcgcatccaagcagtccctgagctacctggatggcacgcttccgggagacttcgggttcgacccgctggggctatcggacccggaggggaccggtgggttcatcgagccacggtggctggcctacggcgaggtgttcaacggccggacggcgatgatgggcgtcgtcggcatggtcgccccggagctcctcggcaagctgggcctcgtccccgccgagacggcgatcccgtggttccagaccggcgtgatcccccccgcgggcacctacacctactgggccgacccttacactctcttcgtcttcgagctcgccctcgtcggcttcgccgagcacccgcgctttcaggactggtacacgccg

SEQ ID NO: 5395 - DNA, 264 bp, Oryza sativa
  Clone ID: uC-osflcyp140d10b1
tttacatgctgccactctcaagaacctgactttggatcgctatcccttttgcttcttattagtgctcacggaaagaaagctatagcagtagctaaataagccagagagaggctaagagagagagagaggtgaggggagagaagaaatcctcgcagaattcgagcaagaaccgagggagatcgatcgcctcttgtcctcgttccgaggcagagatcgacctgaagtgagctgagctgcggcaaggaggaggaggaggaggaggac

SEQ ID NO: 5396 - DNA, 587 bp, Oryza sativa
  unsure (1)..(587): unsure at all n locations
  Clone ID: uC-osflcyp140d11b1
atgcntttctcttattcagtttgatgcacaaatccgttcgagtcgaaacatgcttgactctttcatgccgcttgaattttgctactcagtaagtgccaacggaattgttcatccaaatgtaagtctgacagcaaaaggtggaagcatatttcctgttaacgatccaataattaccataacggacaatgcttttaatccagttgggtactgcttggctattatgaagagtgagggtgttaacttaataggagagaatttcatgtctggactgaaggtcgtctttgaccgagagagaatggtgttgggctggaaaaacttcaactgctacaacttcgacgaatcgagcagacttccggtgaaccccagcccttcagctgttccttcgaaacccggtcttggtccgagtagctacacccctgaagcagccaaaggagctttgccaaacggcacccaggtcaatgtgatgccttcagcaagctcaccgctgcaaccgcagagcgtttccgccaccattgttctcctattcctcatncgtctctgaattcttgaatctgatcagctcagcttcagccaccatagcttcagag

SEQ ID NO: 5397 - DNA, 510 bp, Oryza sativa
  Clone ID: uC-osflcyp140e01b1
gtattcggtcgctcgccctcccctcaatcaaccggcgtcgcgccgccgtctcgcttccgccgccaccgccactgcctctgccgcttcacttctcgtctggacgacgccggcctcctcccccaatcgcagccgccgccgctcgcttctcctctggagtctggacaaactcctcgttcccacgtgtccccatcgttccccgtccctgctgcctcctctcgtccccgatcccagtccccagaggcgtcaatcggaaggagctcgagggcggcgccgactccgcgtgcaagacctgcacgatccaccagcgcccaagcttcgtcctctcagtctcctgcgccgttcgtccttccgtccccgccatcgctgcctcaggtcatccctgccgtggccgagcggcggtggatgggcaaaatggtggcagatccgcgactagatgccggtgaggaggttgcggatcagccttctttcatcccatcacacaggagaaattagaggcaaaccagatgcaaa

SEQ ID NO: 5398 - DNA, 415 bp, Oryza sativa
  unsure (1)..(415): unsure at all n locations
  Clone ID: uC-osflcyp140e02b1
gaatacggtgtacgtggtgaaggcgcagaaggccttcatcaccaggtgcaaggccaactctgaggctacccttggtacataccagggtgatgctgtgctcggcgagggtgcctctgagagccttcacgtcaaggactacaagtactgatctgcctctggtggtggctgaagatccgattggacatcctccgtatgcatatttagggttctgagtgtggtttggctatcaagcgtccaatcttacgggtatcaaaaacttttgtcgcaataatctgaacctgtgctttttaataattaatacctgtcatcggtagtagttttttggtattcctgtaatcaaatgctgcgtatggtaaattggagcagcggctttaattccatgctatctttttattggtaaaaaaaaaaaaanaaa

SEQ ID NO: 5399 - DNA, 538 bp, Oryza sativa
  unsure (1)..(538): unsure at all n locations
  Clone ID: uC-osflcyp140e04b1
cggttgcgtggccagctagcnnnngcagagcgagcgaaccgttaacataaaccggccagctcgttcctctcctctctctctctctctctctctctctcggtcgcagccagctaacttcgagtgtgaagaacactcacgctagctagctttctcaaggccacatacgctagctccgcctccacgcgcggcgtacgtctagtttgattgaggctgaagagagtgcgtgtttggtagaagaggctagctgttgacgatgtcgagcagaaggtcgtcgcgtggctccatctcggaggaggaaatcaacgagctcatctccaagctccagacgctgctccccaactcacgccgacgcggctccagccaggcgtcgacgacgaagctgctgaaggagacgtgcaactacatcaagagccttcaccgggaggtggatgacctcagcgaccggctgtccgacctcatggccaccatggatcacaacagccccggcgcggagatcatccgcagcatcctccgctcctgatcggcaagcagcagcagc

SEQ ID NO: 5400 - DNA, 569 bp, Oryza sativa
  Clone ID: uC-osflcyp140e05b1
ggattctgttttagcttcagattcgtcagaagaattagtgcaagatgatgtgaagagcacgtcatagaactcattggaagattctaccactgaggagcttcagcaggatgatgttccagatggagattcagactcagctgaagatagtaaaagtccagaaatgaagctcttcattagtggagtggttcataacaaggaggatgctggagcaaaatcatatgttcgagttccagctgaaatcaataatttggaaaaggattccttcgaactttacattcctggaaaaggttctgatcgagatctggctgatacaaaggctgcaaaacagaaagttgctgatatggctgccaaattggcatcagaacttatgccttctgatgttgcgaaggcattatggggaacgaccaagagttcttcgaagataaataaagaagtacaagagctcttaaagcttaccctcagcaaggctcgagtcaagctgactgagaatacaattttcaataggatcattactgacagtaacggctcagatccattagtggtctctatgtggagcatttagccatatg

SEQ ID NO: 5401 - DNA, 495 bp, Oryza sativa
  Clone ID: uC-osflcyp140e07b1
ttgcgtggggcgcatcaccatgcgcaagtcggcggcgaagtccaagtccgccgcgtcggggagcccgtggtacggcgccgaccgcgtgctctacctcggcccgctctccggcgagccgccgagctacctgaccggcgagttccccggcgactacgggtgggacaccgcggggctctccgccgacccggagacgttcgccaagaaccgggagctggaggtgatccactccaggtgggcgatgctcggcgcgctgggctgcgtgttcccggagctcctcgcccgcaacggcgtcaagttcggcgaggcggtgtggttcaaggcggggtcgcagatcttcagcgagggcgggctcgactacctcggcaacccgagcctgatccacgcgcagagcatcctcgccatctgggcggtccaagtggtgctcatgggcgccgtcgaggggtaccgcatcgtcggcgggccgctcggcgaggtcgtcgacccgctctaccccgg

SEQ ID NO: 5402 - DNA, 344 bp, Oryza sativa
  unsure (1)..(344): unsure at all n locations
  Clone ID: uC-osflcyp140e10b1
natatgttgtcttatcttgataggccctgctgttttttcccatcacattgcatcaaataaaatgcagtggatgactcatgatactgtctctcattttgaagttccattttcatatatattcgtgtgtgatgcattggtcgtcactgattacttcgcatccttttcaaatatgttaatttaacagcaacaatttttcttttacatcattgtcgtaaattcttcatgtattgtgcttcacatgagaagaatgtctgttgtttgctcaaaaaaaaacaaaaagcaaaaaaaaaaaaaaaaaaaaaaaaaaataaaaaaaaaaaaaaaaatcatcccctcccgctttt

SEQ ID NO: 5403 - DNA, 541 bp, Oryza sativa
  Clone ID: uC-osflcyp140e11b1
attgagttatgtactctttcccccaaatacgcttaccaccaaaagctatagatgcagccaaatgggctggcaaagcggccgatgttttctactgcctcaagcttcttgaagcaactggaatatccactgttccagggtcaggtttcggacaaaaagaaggggtgttccacctgaggacgaccatcctgccagctgaggaggacatgcctgccatcatgaccagcttcaagaagttcaacgacactttcatggatcagtacgatggctactccaggatgtgaaatgaaaacaagatgagcactaccccaggagaagagagaaagaatctgcctcagcgtggctgatcgagcagttataattaaaaggcactgttaattaattaattaatcaatcaatcgaaaggctaattatttgctgcaacaatctgtaactcgatctactgaaggaaaaaaaaaacttcttgtccttgatatgcatgatgtatagataaaattatttctgctctttgggaattgataatacgggcgcactcaccgttaca

SEQ ID NO: 5404 - DNA, 341 bp, Oryza sativa
  unsure (1)..(341): unsure at all n locations
  Clone ID: uC-osflcyp140e12b1
atggngtatggcttggtgctcatggaagatgatttccgggagcgcctccaagtgcccaagaagaaccaggcctaagctgctgcatcgcatttggcgaaagatgtcactggagcatacttaatagttgggtttcaccattatttgtgtcgcagttcattgtggaatttgggttccaataaattctgatacacctttgttgttcacctgaaatattgtgttactagaatcgtcatacggggctgggctatttgtatcattaccgcttttggagaactctttatacttttgtttgtagcctgtgtactcgcctaaatcaattatagcaatgttgatgaattttt

SEQ ID NO: 5405 - DNA, 348 bp, Oryza sativa
  unsure (1)..(348): unsure at all n locations
  Clone ID: uC-osflcyp140f01b1
acccccaacccaacccaagcgggggggggttagatagaaaannccaancctttcctccaccgncgnngncgncgnngncgtcagaactcggaaggaagcagatcgaccgactgcgatccgacctgacgacatctgcggcgacctggacgacgaccccaccccttctgcgccgacgccgctcgccgctccgacacccaacggcctcaacgatcgcctcctccgacttacccgcacgcaccaacggggcccctcccaaaacccaaaccctaaccctaaccctaaccctaaacccccttcgccgccgcctcctcaagggacccttctctctctctctctcggttccgtttc

SEQ ID NO: 5406 - DNA, 482 bp, Oryza sativa
  unsure (1)..(482): unsure at all n locations
  Clone ID: uC-osflcyp140f03b1
cttttcagtaattccttcgactgcccaatcacctaattgcttcctgtcaatatctgcaaactcttcgggtgggccaacatctaatatgtttgctgttgggccatatgctaacgagcctcagcttgtctcaccacctgtcttctcaacttacacgaccgagccttccactgcaccactgacccctccacctgaactagctcatgcaactactccctcctctccagatgttccatatgcgcggtttcttttgtcatctatggatctgaaaactgctggcaaagatcacaacatgccgtacttatctacagcatattctggaggttcagggctccaggcatcttatccgctttacccagaaagcccttcaagcagcctcatatcacctgcttcagcaactccaaggactggtctttcatcacctatacctgagcaagaggtgcctacttgcacatggaagacatctaggtctgnctgcgacacac

SEQ ID NO: 5407 - DNA, 352 bp, Oryza sativa
  unsure (1)..(352): unsure at all n locations
  Clone ID: uC-osflcyp140f04b1
agcatancgtacgaaagatcaacaagctctcttgagaattgagatcaccctctttccatctagaacacaaaccagacaaccaaaaaacagcaagacacaatacacaatgtcgctgatccgccgcagcaacgtgttcgaccccttctccctcgacctctgggaccccttcgacggcttccccttcggctccggcagcagaagcagcggcagcatcttcccgtccttcccccgcggcacctcctccgagaccgcggccttcgccggcgcgcgcatcgactggaaggagacgccggaggcgcacgtgttcaaggcggacgtgccggggctgaagaaggaggaggtcaaggggagg

SEQ ID NO: 5408 - DNA, 473 bp, Oryza sativa
  unsure (1)..(473): unsure at all n locations
  Clone ID: uC-osflcyp140f07b1
ttagatagtgaactgaaccattntctcctgaatnngagcatcagctgggttttgaatttagtctgagtaatcgntctgttgttgacatagatctggaggaagatataagtaaaactacccactgtgatcgaaatgatccattacagtatctagaggaggataataaaacagaaggtgaagatagttctgcccactgtcgcaaggtatctgatatgtccattgtaggaggttctcatggcaagaccaaggagacagcctcttctgaaaatgaggcgaataggcctgatggtttacattcaaccattggaaccagtgacaaagacaaattaggtagcattccagagaactcagcagctgaagaggaactaaataaagaagagcatcccaaattacaaaagggcttggggttcgaaatttctctttgtgggcacatgctacggccaggaatgggccaagcatcagcttgagaagtt

SEQ ID NO: 5409 - DNA, 430 bp, Oryza sativa
  Clone ID: uC-osflcyp140f09b1
tggatttagattggtagtagtaggctggtagtagcgcagcggtagcctccttcgttatccccaaaccccgcgccgacgggcgtcctcctcaccgacatttcctcccacccccgcgcgcgccccgccgcctttctcgaacctccgccgcattcttgtcaccttgttgattcttcattcttgatttgttctccttttttttttggtgattttgttgtttcttggcctgctactgttggcggcggcgagcggtggtcaccggccgtgcgttcccttctttctcctcagccctcggctcccccgccggccggacacgccgccggagctgagttgttgaggttttgcagggaagggatacactccgatccccaatgccccgcgtttggtccgcccctgcatcctcctccacagattgctaggcttcaccggagat

SEQ ID NO: 5410 - DNA, 557 bp, Oryza sativa
  unsure (1)..(557): unsure at all n locations
  Clone ID: uC-osflcyp140f10b1
ttccatcntaaatttccctacattgcttcgatgggagtttatgtcttcaaaagagatgttcttttaaaccttctaaagtcaagatatgcagaactacatgactttgggtctgaaatcctcccaagagctttacatgagcacaatgtacaggcatatgtcttcgctgactactgggaagacattggaacgatcagatcgttctttgatgcaaacatggccctttgcgagcagcctcccaagtttgagttttatgatccaaaaactcccttcttcacttcacctcgatatttgccgccaacaaagtcagataaatgcaggattaaagatgcgataatttcccatggctgtttcttgcgtgaatgtaccatcgagcattcgatagttggagtccgctcacgccttaactctgcatgtgagctcaagaataccatgatgatgggtgcggatttgtacgaaactgaagatgaaatttcaagactactgtcagaaggcaaggtccccattggtgtaggggaaaacacanagataaacaactgcatcatcgacatgaacgcgag

SEQ ID NO: 5411 - DNA, 563 bp, Oryza sativa
  unsure (1)..(563): unsure at all n locations
  Clone ID: uC-osflcyp140f11b1
ttctgttataaaatccggtaaattgaatgcagaattgctacgagaaatatgagatgcctaccttgatggaatcttttatgatgcagatcatagttaaggagaagggcatcttcaccaacgtgacgtctccgacagccaaggccaagctgaggctcctgttcgaggtggcgccgttgggtttcttgatagagaaagccggcgggtacagcagcgacggcaaacagtcggtgctggacaaggtgatcaacaacctcgacgagcggactcaagtggcctacggttccaagaacgagatcatccggttcgaggagactctctacggctcatcgaggctcaccgccggcgccaccgtgggcgccgccgcctaatcttttgctgcaacgcgagcccagtgtctctgcaggcctcaaaaacgctgaaactgcagtcgttttagactcccatcctgtaatgcagattgggttgtnagtgaagtgggacttgaaactgcaaagttatactcctttttgcaaggtaccccgttttttccccttttgtgtaacaagtgcatataaaggaaattc

SEQ ID NO: 5412 - DNA, 492 bp, Oryza sativa
  Clone ID: uC-osflcyp140f12b1
ttgcctatgcgtcgcggccgtcgctgaagccgaagcccaaggtcaagggcgcgaggaagggatccccggcggccgacgaggagcagtccacggctgcggcggcggtgcggttcgtcaaggagtggaccacgtggaccatgaagaagaccaaggtggcggcgcactacggcttcatcccgctcatcatcgtcgtcggcatgagatccgagccgaggccctccctcgcccagctcctcagcccggtctgatctgacgatcgccttcaagccctagatgcgatcgatctgctcccctttactaccgctttagtagtgactttagtaatagttctttcttagatcgggccttctgagcagttgatgctgctgtgcggatttagaggtttttgctatatgaatctaataatgttatatgggtggatgcttctttggattaaactcttgctattattgtgcgggtcatggatctgctattaatacttcggtatggtat

SEQ ID NO: 5413 - DNA, 474 bp, Oryza sativa
  Clone ID: uC-osflcyp140g01b1
ccgtatgatgagaccagagcgagcgcgcgcgccgccggagcaaacccttcctcctacccttcagccatggtgctctccaacgacatcgacctgctgaacccgcccgcggagctggagaagctcaagcacaagaagaagcgcctcgtccagtcccccaactccttcttcatggatgtcaagtgccagggctgcttcagcatcactactgtgttcagccactcccagacagtggtggtctgcccggcctgccaaaccgtgctttgccagcctacaggtggaaaggccaggctaacggaggggtgctccttccgccgcaagaatgattaagatctaaatatctgaaagcaaaaaaaagaaaaggcttgaacgagcttagtttctccaggatgtagtctgaaaattttgcaatgcctgtcaagtgaaccccatgtttggtaatttaatctctgggatatgtcatgactctggtacttt

SEQ ID NO: 5414 - DNA, 456 bp, Oryza sativa
  unsure (1)..(456): unsure at all n locations
  Clone ID: uC-osflcyp140g02b1
caaatccattgctaagcttcgagctcccccattgatcagngagctagctagtagctggttggttaaaaggcctttttggtttgtttgagttggagcagaggagaagaatggcggctctgcttgtggtcgtgttggttgccatgtcggccatggtggcgacggccaactttaaccaggagttcgacatcacctggggcgatggccgtggcaagatcctcgaggatggccagctgctgacgctcacgctggacaggacgtccggctcagggttccagtccaagcacgagtacctctacggcaagatcgacatgcagctcaagctcgtccccggcaactccgccggcaccgtcaccgcctactacttgtcgtcgcaggggccgacgcatgatgagatcgacttcgagttcctggggaatgtgaccggngagccgtacacgctgcacaccaacgtgttca

SEQ ID NO: 5415 - DNA, 574 bp, Oryza sativa
  Clone ID: uC-osflcyp140g04b1
gccgtgtcttgtcccctcgccgccgcagccagcgtcgagggctcggcgaccggaggaggagaggtcggaacccgccgccgccgccgccgcctccgcctgtagcgagatcgctcgatccggttcgcctcccgcgcgccagtccgccagcccagttcgatccgttgagggggaggggacgctctagtgtggggattgggggaatcgatggcggcgccgccggcgagggctcgggccgactacgattacctcatcaagctgctcctcatcggcgacagcggtgttgggaaaagttgtctcctcctacggttctctgatggttccttcaccaccagtttttattaccaccatcgggattgatttcaaaataagaacaatcgaactggatggtaaacggattaaacttcaaatctgggatacagctggtcaagaacgtttccgaactattacaactgcctactacaggggagcaatgggtattttgcttgttatgatgtcaccgacgagtcatcatttaataatataagaaactggataggaacatagagcacatgcttccgatatgtgaacaagattt

SEQ ID NO: 5416 - DNA, 561 bp, Oryza sativa
  Clone ID: uC-osflcyp140g05b1
cccatactatactctccttcctcctctcctttcccctcctctctttccctctctcacaagagagagagcgccagactctccccaggattcagccatgaagggggccaaatccaagggcgccgccaagcccgacgccaagttggctgtgaagagtaagggcgcggagaagcccgccgccaagggcaggaaggggaaggccggcaaggaccccaacaagcccaagagggctccctccgctttcttcgtttttatggaggagttccgtaaggagttcaaggagaagaaccccaagaataaatctgtcgctgctgtaggaaaagcagccggtgataggtggaaatccctgaccgaagcggacaaggctccctatgtagccaaggccaacaagctcaaggccgagtacaacaaggccattgctgcctacaacaagggcgagagcactgccaagaaggcacccgccaaggaggaagaggaggacgacgaggaggaatctgacaagtccaagtccgaggtcattgatgaggatgacgaccagggcagcgaagaggatgaagacgatga

SEQ ID NO: 5417 - DNA, 591 bp, Oryza sativa
  unsure (1)..(591): unsure at all n locations
  Clone ID: uC-osflcyp140g06b1
gcgatcgagtatggtcgccgncgntcgccgtcgtcctgctgctttcgccgcatccatcccggtgagcagtcacatcctccgccaccgccgcctgcgccgatccccatccatccctccagcgagcagggcgggcgccgtcgttcctcctgctgcttccgcccgcatccatcctggtcactgtgaaaatggaaggaaatgctagaggcggtgggcattctgaggcactgaagaactacaatctaggaagaactttaggtattggttcatttggaaaagtgaagattgcagagcataagcttacagggcacagagttgctataaagatcctgaaccgtcgccaaatgagaaatatggaaatggaggagaaagcaaagagagaaatcaagatattgaggttgttcattcatccccatatcattcgcctttatgaggtcatatacactcctacggatatatatgttgtgatggagtactccaagtttggagaactgtttgattacattgttgagaaaggcaggttgcaggaagatgaggctcgccgaatcttccagcagattatatctggggttgaatactgccacagaaacatgg

SEQ ID NO: 5418 - DNA, 536 bp, Oryza sativa
  Clone ID: uC-osflcyp140g08b1
ttgatttggtcttctcaagattcagtcatggcgatcgccgcatgcagggccaacgccaacgccaaccgaagccgccaccatcatcaaccgaggcggtgggaaaaaaattcctgccaatgctggcacgcacgcgcactcgctcgagaatccggcgggtgggactgaaaaaacaaaacaaaaaaaagcagatcgattttgtcatctgcggcgcaaagcgggtgtgcatttcttttcttttatccccacatccagtcaccgtgacgtggttcttgattcctcaggccgggcgattattctagctctagttgggatgattggattggatccccagccagcagcagcaagcaattcttggccatcggttgtgggtggctgttgattcatgcatcacgagcactcaataaagtatgcagatctgtgcgcccctctctgatttgttcatccaggcaaaagagtatcttgcttctgtgaggatactaaagcgtgaagtgtttgggttagcttttgattaagccatcgaaattttcagtgaactt

SEQ ID NO: 5419 - DNA, 422 bp, Oryza sativa
  unsure (1)..(422): unsure at all n locations
  Clone ID: uC-osflcyp140g09b1
ttgcattatctagatcgcgagcgggccgccctttntttgtttttttttttttctcggttcataatagatagattcatagatagatcagacagtgcaaatccatggcttgtctctcaaaccgacccaacgaaacaaaaagattaaaccactccaagactcccatcccattacatagaacgacgacgacgacgaaccgatagatccatagctttcctaacgagatctacgactactaataagatagaactgatcacccgctgctcggtgattcagtggagggaggggggagcaaaacgcatcatgggagggagctggatctgacgccgcgagcagcgcctagtaggtcttgctggggcactcgcgagcgatgtggccggtctcgccgcagttgtagcacccgtcgncgtcgtcgtcaccaccac

SEQ ID NO: 5420 - DNA, 529 bp, Oryza sativa
  unsure (1)..(529): unsure at all n locations
  Clone ID: uC-osflcyp140g10b1
tagagtanctagctcgggagagaaaggaagagacgagaggagagagatggccactgcttatgctcccatggcgagccagctgatgaagagcagcttggtgtgctccaagccgagggggctgtctggtgcttcgctgacaaggaggccccgcttcacagtcaaggccatccagtctgagaagccaacgtaccaggtggtgcagcccatcaatggcgaccccttcatcggcagcctggagacgccggtgacctccagcccgctggtcgcctggtacctctccaacctcccggcgtaccgcaccgccgtcagcccgctgctccgcggcatcgaggtcggcctcgcccacggctacctcctcgtcgggcccttcgcgctcaccggcccgctccgcaacacgccggtgcacggccaggccggcgccctcggcgccgccggcctcgtcgccatcctcagcgtctgcctcaccatgtacggcgtcgccttcttggcgagggcgagccgtccacggcgccgacgctgacgctcaccg

SEQ ID NO: 5421 - DNA, 315 bp, Oryza sativa
  Clone ID: uC-osflcyp140g11b1
actggaatcctggacgcgagagtgcattacccgctgcagggtatgaatggggcaaacgggcagcaagagagggggcgggcggcgctacagccgatgcacactgaacggaggttgctaacccgacaccgagaggcgcggcctgtaccagaccgaccaatacacaaccttcttctgacggaaggacaacgccaacggtcgcgactgcaagtccatgcgcgagtatctcgagacgaattgcaagcgagcaccaacggcaaggagaccactaagctggtcatctcgagccgaccttgaggctgaagagagcggagccag

SEQ ID NO: 5422 - DNA, 392 bp, Oryza sativa
  unsure (1)..(392): unsure at all n locations
  Clone ID: uC-osflcyp140h01b1
aattaaataatcccccaccatggancaccgcctccgccgccttggcctccacctcctctccccggcggcggccgccgcctcagtccccggcgaggaggagccgctgatccggcaggtggtcggcggcggcgacgacaacgagctggagctgaacgcggagcgccacttcgccagcttcgtccagaggttcgggaagtcctaccgtgacgccgacgagcacgcgtaccggctctccgtgttcaaggccaacctccgccgtgcgcgccggcaccagctgctcgaccccttcgcggagcacggcgtcaccaagttctccgacctcaccccggccgagttccgccgggcctaccttggcctccgcacgtcgcgccgcgcctttctgcgggggctcg

SEQ ID NO: 5423 - DNA, 397 bp, Oryza sativa
  Clone ID: uC-osflcyp140h04b1
gcgataaattctaacccaaaggcaagggagaagaggagcggacgccatggatgcttctcgcgttggccagctccgcactttcgtggaggcctgcaagaaggacccctccctcctcgccgaccccaacctcgccttcttccgcgactacctcgagagcctgggcgcccacctccccgccgccgccttcaccaaggccacccccaagcccaagccgtcctccatggatgacatcgacgatgaatacgacgacgacgacgacgacgatctcaacatgagggatgccactccggagccggacgagcttgaccaggacatcgtcgagtccgatcttgaacttgaaggagacattgtcgaatctgaccatcaggaccctccgcaaaagatgggagatccttct

SEQ ID NO: 5424 - DNA, 522 bp, Oryza sativa
  unsure (1)..(522): unsure at all n locations
  Clone ID: uC-osflcyp140h05b1
gccgtctgttgctcctccctcgccaccgccgtctcctcctcctccgccaagcccctcgccggcatcccccccgccgcgccgcactccctctccctcccccgcgctcccgccgccaggcccctccgcctctccgcctcctcatccagatccgcccgggccagcagcttcgtcgcccgcgccggcggtgtggacgatgcgccgctggtcgggaacaaggcgcccgacttcgatgcggaggcagtcttcgaccaggagttcatcaacgtgaagctgtccgactacatcgggaagaagtacgtcattctcttcttctacccgttggatttcaccttcgtctgcccgaccgagattaccgctntcagtgacagatacgatgagttcgagaagttgaacactgagatcctcggtgtttcaattgacagtgtgttctcccatctggcatgggtgcagacagacaggaaatctgggtgggctggtgatctgaaatacccattgatttcagatgttactaaatcaaattcg

SEQ ID NO: 5425 - DNA, 299 bp, Oryza sativa
  Clone ID: uC-osflcyp140h06b1
gagacggggagggcgcgcgggggcgttatattgacgttctctagcgatcatgccatgcgcgacgccatagaggggatgaacggcaaggagctcgacggccgcaacatcaccgtcaacgaggcccagtcgcgccgctccggaggcggaggcggcggtggctacggccagcgcggcggaggcggaggctacggtggcggcggctacggtggtggtggcggcggcggtggctacagccagcgccgtgaaggcggctacggcggtggcggtggctacggtggcggccgtggtggcggctgcta

SEQ ID NO: 5426 - DNA, 458 bp, Oryza sativa
  Clone ID: uC-osflcyp140h07b1
tttagcatattgacacatacgacaccagtggtccacaaaacattagttcaaggattggacttccaaagataaggaaggaatggattgacaggagggagaagttaggtggtcctcggtacacacaaatgtattacgctaagcagggaatcataacagaggagatgttgtactgtgctacacgtgagaaccttagtcctgaatttgtccggtcagaggttgcccgtggacgagctataattccttccaacaagaggcacctggaattggaacccatgattgttggacgaaacttccttgtaaaagtgaatgcaaacattgggaattctgctgttgtgagctccatcgaggaggaagtacacaagctccagtgggctacaatgtggggagctgatactgccatggacctttcaacagggcgtcatatccatgagacccgggaatggatccttcgtaaatct

SEQ ID NO: 5427 - DNA, 492 bp, Oryza sativa
  Clone ID: uC-osflcyp140h09b1
tgaggtatgcctccaacaaaaagggccaagaaagcggctgcggcgggcggaggcgacctcatcggcgccctcccggacgcgatgctgcaccgcatcctctccctcctcccggcgcaggaggccgtgcggacgtgcgtgctggcccggcggtggcgccacctctggaggtccgccccaggcctgcgcgtcgtccgcgccgccggtcggccgccggcgaccgtcgaggagctccaggggttcgtcgaccacctcctgctcctccgcgggggctcctctctcgacacctgcgagctttccttcgatcagatccgcagacaagacattccccgcgtgaacctctggattcgtcacattgtcatgtgcaaagtccgagtgctcgtgcttcacctcaatccttattgtcatgaattggacgaactgcctctggtgtcgcagcacctgacgagggtggagctttctggtctgatcttaaacgacagcttcctcaatttc

SEQ ID NO: 5428 - DNA, 502 bp, Oryza sativa
  Clone ID: uC-osflcyp140h10b1
tatcatactcagctctcacagctcactgcatcaatggccgtggccaccatggcgctctcctccccggtgatggcccgcgcggcgccgtcgacctcctccgcgctcttcggcgaggcgcggatcaccatgcgcaagaccgccgcgaagcccaagccggcggcgtcgtcggggagcccgtggtacggcgccgaccgcgtcctctacctcggcccgctctccggcgagccgccgagctacctcaccggcgagttcccgggcgactacgggtgggacaccgcggggctctccgccgacccggagacgttcgccaagaaccgggagctggaggtgatccactcccggtgggcgatgctgggcgcgctcggctgcgtcttcccggagctcctcgcccggaacggcgtcaagttcggcgaggccgtgtggttcaaggcgggctcgcagatcttcagcgagggcgggctcgactacctcggcaacccgagcctgatccacgcgcagagca

SEQ ID NO: 5429 - DNA, 491 bp, Oryza sativa
  Clone ID: uC-osflcyp141a03b1
cgaaaattctgaatgagggacagagtgcttctacagatgttgtcgcggtggttgccagcccaccttatgtgttccttcccgtggtcaagagtcagctgcgcccggagatccaagttgctgctcagaattgttgggtgaagaagggcggggctttcaccggtgaggtcagcgctgagatgcttgtcaaccttagtattccctgggttattcttggacactctgaaaggaggagtttgttgggtgaatcaaatgagtttgttggagacaaagcggcatatgcgctctctcagggcttgaaggtcattgcatgtgttggtgagactctcgagcagcgggaatctggatcgaccatggatgttgctgctgcacaaacaaaagcaatttctgaaaggatcaaggattggactaatgtggttgctgcctatgaacctgtgtgggccattggaactggtaaagctgctacaccagatcaagcacaagaagtgcatgat

SEQ ID NO: 5430 - DNA, 455 bp, Oryza sativa
  Clone ID: uC-osflcyp141a05b1
cccctctcggcgaacagccgggggtcctctttctgctcgtcgccggcttcttccccgacgcctccccggcatttggttcgcgcgggtggtgccgtgagatacgtggtggacggggtagggatggagtcggacgcctccacctcgccgcgccggcggagcaccagctgctacagcgacagcggcgattcgtcatgctccgagccgttcagcgagtgcgggagggacgacctctcaatcacgccggctgccgccgcgggaatccaccggctgctgctgtcatgcgcggcggatgcgtccgacggaacaatctcgtcgctcgccgtgccacagaagagcccgagcagcccattggtaccttacggcgcgcctggatggagctcctgctgctggcgaagcacaagcctgacaagcggactctgatcgcggctggcgatgcggtaaggacatgtctatgg

SEQ ID NO: 5431 - DNA, 500 bp, Oryza sativa
  Clone ID: uC-osflcyp141a07b1
gctggacacaacacacacccacacccactcccccactctctctccggttcatgccctgctgctccccatgtcgcccccactcgagctcgactacataggcctctcgccgccggtgcccgccgccgccgatgccgccgccgacaacgacctgaagggcaccgagctccgcctcggcctgcccggctcccactcgccggaccgctccccgcccgccgccacgctcgaccttctccccgctgccaagggcgccaagcgcgggttctccgacgaggcgcgtccgctgccggcgtccgccgccgccgccgccgccgccgggaagggcaagaaggcggcggccggcgaggaggatgaggatgcggaggaggaggacaagaaggtcgccgacgcgccgcaggcgcctgctgccaaggctcaagtgggtgggatggccaccaattcgcagctaccgcaagaacacgatggctactaaccagctgaagagcacaaggaggatgctgaag

SEQ ID NO: 5432 - DNA, 536 bp, Oryza sativa
  Clone ID: uC-osflcyp141a08b1
gcagaacttttgggacctgacaggctatttttatgtcgatcatcctcctgtcccgcgaagaaggggccgtttaaacctctaaatccacatataaacactgagcaagctgatgcagttgcaacaatacttggctgccgaggggttgcgccatacgtgatatacggacctccaggaactgggaagaccatgacccttgtggagtctattttgcagctttatacagccaagaggagggcaaatgtcctcatatgtgctgcttctaatagtgctgctgaccatgtattggcaaagcttcttcaggctagctatctgattcgaccaagtgacatatttaggctaaatgctgccagccgtcaatatgaggatgtcgatcctgattttattcgattttgcttctttcaagatatggtgttcaagtgtcctccattgcaagcactattgcggtacaagatagttatatcaacctacatgagttcatcgatgctgcagtctgaaggcattcgtcggtggcatctcacacacatttttttggatga

SEQ ID NO: 5433 - DNA, 542 bp, Oryza sativa
  unsure (1)..(542): unsure at all n locations
  Clone ID: uC-osflcyp141a09b1
tagagtggtttcagatcagagtagagtatgccacagtggtcgagcacgcgaacagcaggggtgtatagtcattgtcaggccatttatgacactgatctgtagatgttgctcagcccattatgcgaaacccagtttaagcttcctgcactgaccggtcgctctgttccaccaacatccttaatcagtaaactaataataaggatcaaggtcattatcagaactcacaaaacgtctacgtcgcacatactagatcctcacctgaagcttaacaactcgaaagctcgagcaaatgatcagaaaaggaatctggaggcgggcagagccagagcatggaaggaagccgatggtttttactcgcccgtggcccgccggattgaatgcgtggattcactcatgccagtatgccacggtcgagtcagtccgtccggccggctggctggctccattatttacggttgtttggtgagaattcaagccttgtccccgccgcattgagngagatcggccggctggcgcgtgagacatcagagctggtgctggct

SEQ ID NO: 5434 - DNA, 386 bp, Oryza sativa
  Clone ID: uC-osflcyp141a10b1
agcacttcgactcatatgtgctggcagagtttagcctttttgtccatccccacacggatgttctgaagacctgtggtacaacaaagcttctgctctccattcctcgcatccttgagcttgctgcagagttgtcactgcctgttctatcagtgaagtactctcgtgggatgttcatcttccctggagcgcagccatcaccgcatcgcagcttcttggaggaggtttctgtgctcaacagcttctttggtggcctcaagtcaggtggcaatgcttatgtcattggtgatgcattcaagcccaagaagaagtggcatgtctactatgccacagaagagccctgagcagccatggttacactcgagatgtgcatgactgggctggatgct

SEQ ID NO: 5435 - DNA, 269 bp, Oryza sativa
  Clone ID: uC-osflcyp141a11b1
tcgatggcctttggaattcgagaagaagcttcaagagatcatcgagctttggcaagcttgcagcatttccttggtccacaggacttactttttcttgctattcaagggagaagcagctgactcgatctacatggaagtggagcttcgaaggctatcattcctgagagatacatactcaagggggagcacccctagcaatgcgatagtaggcagcctgagtacttcccctgttgcgagcgcaaaaagctgcagcgggagaaggaagatgc

SEQ ID NO: 5436 - DNA, 345 bp, Oryza sativa
  Clone ID: uC-osflcyp141a12b1
tcctcctcctcgtcttcaggactgaattcgtcttctgatagcttagcttgattggggtgggtgacaatgggaggtggcaaggacaagcatgacgagagcgacaaggggctcttctctaacatgatgcacggcgttgccggcggccatgggtatcctcctcaccagggataccctcctcagggctacccgccgccgccgggagcgtacccgcctcctccgggggcttatccccctgctcctggggcttaccctgcaccacctggggcataccctccacagcatgggtacccctcagcctggtggctaccctcccctgggtggttacccccaacatggtggctaccc

SEQ ID NO: 5437 - DNA, 488 bp, Oryza sativa
  unsure (1)..(488): unsure at all n locations
  Clone ID: uC-osflcyp141b02b1
ccagcaagccaccggcgtcgactgcgtcgtgatgtacagcccgcgggtgttcgagcgcgccggcattaagtcgaagacgaactcgctgggggcgtccatggcggtgggcgtttgcaagaccttcttcatcccgatcgcgacgctcctcctcgaccgcgtcggacggaggccgctcctcctcgccagcggcggcggcatggccatcttcctcttcaccctggccacgtccctgctcatgatggaccggcggccggagggcgaggcgaaggcgctaggcgccataagcatcgccgcgatgctgtcgttcgtggcgtcgctcgcctcggggctgggccccgtcgcgtggggtgtacacgtcggatatctacccggtgcggctgcgtgcgcaggcggcggccatcgggacggggctgaaccggctgatgagcggtgccacaccatgtacttactctcgctgtacacgccatcaccatcgncgggagcttcta

SEQ ID NO: 5438 - DNA, 502 bp, Oryza sativa
  unsure (1)..(502): unsure at all n locations
  Clone ID: uC-osflcyp141b04b1
ggcaggcaatcagcggcgaggcaccagccctccggccggcaatggcgtccacctcctgcttcctccaccagtccacggcccgcgtcgccgcgcgcgtcgcctccccgtccccggcgacacggacccacctcctcgtctgccgcgcccagaagcaggacgacgccgacgtctcccgccgcgcggcgctcgcgctgctggccggagcgacagcggcggtggggatgaaggatggcgcccgccgccgcggcctacggcgaggcggcgaacgtgttcgggaagcccaagacgaacacggagttcatcgcctacagcggcgaggggttcaagctgctgatcccgtccaagtggaaccccagcaaggagcgcgagttccccggacaggtcctncgctacgaggacaacttcgacgccaacgcaacgtctccgtcataatcaaccccaccaccaagaagaccatcaccgagttcggctccccgaggagtttctcgcccaggtcgacttc

SEQ ID NO: 5439 - DNA, 351 bp, Oryza sativa
  Clone ID: uC-osflcyp141b05b1
cccctgacggaggagatcctgcaggagaactttaacatgtgcgcgcacatgtgttccgccgctggacgcgcgagaggacatcgtcgtcgtcgaggcccccaagctggggaaggcggcggcgcacaaggcgatcaaggagtgggggcagccgcgctcccgcatcacccacctcgtctgtatggccacctgcggcgcagacatgccctgtgtgaactaccagctcggcgacaggctcgacctgaggcccaacgtgaaccgcctcatgatgtaccagcaggggggcttcgccggcggcacggtgcttcgcgtcgacaaggacctcgccgagaacaaccgcggcgcgcgcgtctc

SEQ ID NO: 5440 - DNA, 364 bp, Oryza sativa
  Clone ID: uC-osflcyp141b06b1
gctgaacaaccaagatgggggccttttggagcgcgagaccgactcttccctataaagaaaccaaggccagatgtaaggctcatcatcaccggctcgtcgctttacagttcagatttttactgcatacccaaatcatcatcgactcttttagctttggttttggtgtggcggctgtacattccccgaatcgttgctatgtttggcgctccgctttgtaatctgattcacttccccgttacactgcatcactccgtttcatcctttgtattcctatgttgctgagtctggtgttgcagacgttgctcctgtttaaaaaaaaaaaacaaacagctgactcccttcctcggtctaccccggatcatct

SEQ ID NO: 5441 - DNA, 537 bp, Oryza sativa
  Clone ID: uC-osflcyp141b08b1
ttgcgcaggaggcctttcttgatgaagaattttgaaaatgttatgcgcttattccttcagtcactggagttcttcgaagaaaatgagaggaagaaacttgccattttcacagcacttgccttttctcagaagttatcaggtcttccacctgaaactgtcttccagccactgctcaaggataatcttgtttccaaagggatagtgctttcgttcattactgagtttttcaaagaatatctgaaggagaacactttagatgatcttattgcacttttgaagaaaggcaaaatggaggacaatttgctggaatttttcccatcggcaaaaagaacctccgaggctttatctgaacatttcactaaagaaggtctgacaagtcttgttgagtacaatgaaaagaagatgctcgaggctaaacttaaggagataaagttaacactgacaacaatgatcaatgaagaggctgaaatatctgaagtcacagaagctgtcaagcaacaggtgaaagatgctaaatttcctgatatagaggtgttc

SEQ ID NO: 5442 - DNA, 264 bp, Oryza sativa
  Clone ID: uC-osflcyp141b11b1
catggccatcgcgacgacgaccttaccactcgtgccactcgccctcgcgccgctcatcctccccgatctcccagtgctcgctcctcctgctgcgcccccgcgccccggccgccctctcgctccgcccctccgcgcgcctcctcgtcgccgtcgcggccagggagcccgagctcggcggatcgggaggcggaggcgcaggcgacggctctgggagcggcggcggcggggacagcgagaagccgcggggtggcgggggcgacgagg

SEQ ID NO: 5443 - DNA, 420 bp, Oryza sativa
  unsure (1)..(420): unsure at all n locations
  Clone ID: uC-osflcyp141b12b1
ttcctcctcctcgtcttcaggactgaattcgtcttctgatagctcagcttgattggggtgggtgacaatgggaggtggcaaggacaagcatgacgagagcgatcaggngctcttctctaacatgatgcacggcgttgccggcggccatgggtatcctcctcaccagggataccctcctcagggctacccgccgccgccgggagcgtacccgcctcctccgggggcttatccccctcctcctggggcttaccctccaccacctggggcataccctccacagcatgggtaccctcagcctggtggctaccctccaccggtggttacccccacatggtggctacccttctgcgggctaccccggatcatctgggcaccaaggcggccatgggagtagcggtggaggacacatgggagcaatgc

SEQ ID NO: 5444 - DNA, 387 bp, Oryza sativa
  Clone ID: uC-osflcyp141c05b1
ccgtcatcttcccatcggaaggaaggtggttcttataacaaggcgcatactgtggccatgagagcgaacgtggaggcatgtatggcgtatcatcaggtgaatgggagtaagaagaacaggatccactactctgggccgttgatgcctcacggaggtaacatggaggagattctcaaagaacacgagcgtcaaatccagcaggcggtacgaagggcgcgcatggacaaccaggcaagaggcacgcaggcgttacggacggatcgctgattgatctagttatgcaagggagctgagctgcctctggtccatccctgaattcctgatgatggacagagatttttggttggctactatatatatattgttggcatgcattgaattgctcat

SEQ ID NO: 5445 - DNA, 475 bp, Oryza sativa
  Clone ID: uC-osflcyp141c06b1
tccaagcagctcgcgcctcggccctttttagagctccagctctcccttaccccttcaacaatggcggatgtcgaggtcgaggcggaggtggccgcggccggagcgccgaagaagaggacgttccgcatgtacagctaccgcggcgtggacctcgacgcgctcctcgacatgtccaccgacgacctcgtccagctcttccccgcgcgcgcccgcagaaggttccagaggggcctgaagaggaagcccatggcgctcatcaagaagctccgcaaggcgaaaaaggatgcacctgctggtgagaagccagagcctgtgaggacccacctcaggaacatgatcattgtgcctgagatgatcggaagcatcgtcggtgtctacaacggcaagaccttcaaccaggttgagatcaagcctgagatgattggccactacctcgcagagttctccatctcgtacaagccagtcaagcacggta

SEQ ID NO: 5446 - DNA, 297 bp, Oryza sativa
  Clone ID: uC-osflcyp141c12b1
ctggcgatgaaggcgccggtgtggggcaatttttacctcgtagtcgccccgctcgcgctgctcctgctggccgacgtcgtgttactgctcccttgtctcaacggcgcccgcgtcggctccgatggcggtctcggcgtcctctgcgcccagcgcagcgctggcgccgaggactacaccgtcgcggcgccagctgcgccgaaggaggaggagaagcccgagctgagcctgctcgtgggcgtcctgacgatgccgaagcggtacgagcgccgcgacatcttgcgggtggcgtacgcgctg

SEQ ID NO: 5447 - DNA, 472 bp, Oryza sativa
  unsure (1)..(472): unsure at all n locations
  Clone ID: uC-osflcyp141d01b1
tatacaatccaggattgtggggcatttttgaagaattttggcggtcatttcccctagncatgcatatcagatcattagaatcggcggagttgacggcttcactcacatgctcaaatggatcgcaaaatctggcattatatcttgatcgagaaactgatttggtaaattggacatagacagagctgccgttactagctcatgggacatgcagatcttcaagacttgtactgacaactaggagaaggggagcgatatggcttgatcaggtgtcactcatgccttcagaaacatacaaggtgcattgcctttgatcatcttattgctattgtcatcatagcttgatccggaatctgctatcatcttatgaagaatggagaataatattcatgtactgaccccaaagatttagtcactagtataagcatgccaggctcaatgggcaccctcttcaaatcatgtatgctatatgaca

SEQ ID NO: 5448 - DNA, 498 bp, Oryza sativa
  unsure (1)..(498): unsure at all n locations
  Clone ID: uC-osflcyp141d02b1
tcaaacaaaaagaaaaaatgttgcccatctgtgaaattcgcataaccctatcgcggcggcgatgtcgaacacgagggtgttcttcgacatgaccgtcggcggagctccggcggngcggatcgtgatggagctgtacgcgaaggacgtgccgcggacggcggagaacttccgcgcgctctgcaccggcgagaagggcgtgggcaagagcggcaagccgctgcactacaaggggagcaccttccaccgcgtgatcccggagttcatgtgccagggcggcgacttcacccgcggcaacggcacgggaggggatgtcgatctacggcgagaagttcgccgacgaggtgttcaagttcaagcacgacagccccggcatcctgtccatggcgaacgccgggcccaacactaacgggtcccagttcttcatctgcaccgtgccctgcagctggctggacgggagcacgtcgtgttcggccgcgtcgtcgaggcatggacgtcgtc

SEQ ID NO: 5449 - DNA, 360 bp, Oryza sativa
  Clone ID: uC-osflcyp141d06b1
ctcgtctcgcctctcgatccttgcacccctttccgacctctgccatcatcttccccatcccatccggattgccacccaaccaatcgccatttgcttttcgcttccctctcctccccccaaccactccatcatcattcgcaatccaatctcgctcttggttggcgtcgattttgacgcggtctggttcgtgaatccgacggagccgggtgatctgcggcgggacttgcagatccgagcgggcggggcggggcgggctcgctcgtcggatgtgcggatcctggtgaggcgaggcgatgcccggcgtccgcgtgaagatctaccgcgtcttcttcaagcttcttctccgccacaagctccagt

SEQ ID NO: 5450 - DNA, 532 bp, Oryza sativa
  Clone ID: uC-osflcyp141d07b1
tatgacaacaggagatgcatcaactaggatagttgaaatatggtgttgaactgtaagatttccatcttactgtggataccgcggatcaagattttgatctaaaacaatccatggaaaatcttgattcatttagtgaggcatattcctacaacattgtcaagcagatgtttattgagaatgatctgggtggccaaggccgaaaaaaacttgagagttttatgtgtggatcatattgcatcttcagctgccatgtgcaatttacagcgaatttctgcatatatagattccatttttgttttcttaaaccggatgtttgtagatcttcatgctttgcttcaaagcaacattgaaattgatttattaagggatttcaaacaatcagagaacactggagtgtccgatgcccatcctgctacccaaggagacatgaaatttgccctatgaaagcttgggcttggagaccatgctctagacttgcttgaacaagtacaagctgctgttactagaataggtagcgtactaggtctcatga

SEQ ID NO: 5451 - DNA, 535 bp, Oryza sativa
  unsure (1)..(535): unsure at all n locations
  Clone ID: uC-osflcyp141d09b1
acctattgtgcgaacatccctgttcctctgctccagtgtttacattgctacaagtccctttgcatatctcctcttcggcgagggtaccctagatgatgttctcgctaacttcgatgcaaatcttgggattccatttagttccgtctttgatgatatagtgcgagtgagctatgctgctcacgttatgcttgtctttcccatagtcttctttgcccttaggctcaacttggatggactgctcttccccacatcaaggcacatttctcgtgacaacaagagatttgccataatcactatctcactcctcacagtaatttatcttgctgccattttcataccgagcatttgggatgcattccagtttactggtgcaactgctgctgtcctgattggtttcatcttccctgccatggttatacttanggatccttatggaatcgcatcaagcgtgacaagatcttggctgtaaccatgatcgtgcttgctgtcctctccaattctgttgctttatacagcgatgcaatgaatatcttcc

SEQ ID NO: 5452 - DNA, 525 bp, Oryza sativa
  Clone ID: uC-osflcyp141d10b1
ggttcgtacgtataggatattggagccattgatcgatggccgtcgacatggatgctcgacggcggtggcgacggcaagggcaaagccccgccgcagataagcctgtcggtgctattccttgcgtgcatggtcgccggtggcgtgcagtacggctgggcgctgcagctctctctcctcaccccgtacgttcagacattgggaattcctcatgcactcacttcagttatgtggctctgtggccctattgctggcttaattgttcagccatgcgtcggcctgtacagtgacaagtgcacatccagccttggaagacgtagaccggtcatcctcactggatgcataatcatctgcatatctgtgatcgtcatcgggttctgctcggacatcggctacgctctcggcgacgcgactgaggactgcaaggcttacaggggtcctcgttaccatgcagcggcggcattcatcctcggattctggctgctcgacttctccaccacaccgtgcagggtccagctcgcgctctga

SEQ ID NO: 5453 - DNA, 298 bp, Oryza sativa
  Clone ID: uC-osflcyp141d11b1
ttctcgcgagcgagaagcattctagccgcgtgtggcgacgtgtgcccccggattccgaggcagacctcgccgccaacgccgacatgaccaccaccatcactacaatctcctcatcctcatactactacccttactcctaccctcccccgcctcgccctcgccatcggcaccaccgccgcgccgaccgcaggacccacccggtggaggccgaggcggccgaggagagccggcgcggcgcgcagggggaggctgcttggccgcggcggacgaacccggtggtggaggccgaggacgagcc

SEQ ID NO: 5454 - DNA, 460 bp, Oryza sativa
  Clone ID: uC-osflcyp141e01b1
tgctgctctagtattcagaagctgttgtctttccaaatatctggtggaaacttccgcagaagttgaactgttcttgcagaactggagggagagctttctgcaccagctcatatcactgaccagcagctttctcgagaaagaagggaaaactgattggattggtggtataggaaaccataaggatgtgttcatatcagtttatgcaaatctgcttggcctatatgcacttgctcagtcacaatctttggaacagctgaaggacagacacacagaatatttgaagaacttttcagaccttgatggggttatcacaccattcctaaaaaatcctttgatctctaacctttattcgttggtaaaagaatcacacgagacgttcaattccccaaagaagcaatgggatcaagtagggagttcagcaactgaaagttttgatccttattttcttatcagatgatat

SEQ ID NO: 5455 - DNA, 484 bp, Oryza sativa
  Clone ID: uC-osflcyp141e02b1
cccacttgtctgcagagaaacctcacttctctatatgtttggaatggctcctgtttacggcatttgatgcagagatatcaagccaaagtgcttcaaaaaaccagctttcgcagaaaaatgaacctgcaaagaagtctcttctagacaagacatgtgacctacttcgaaactttccagaatacatggatgttgtagtcagtgttgctaggaaaactgatggtcggcactgggcagatcttttacatgcagctggacgatccacagagatgtttgaggaatgcttccaacggcgatggtataggactgctgcttgctacattctggtcattgcgaagctggaaggccctgctgaccctcagtactgtgcactccgtttgctacaagctacacttgatgaatctctctatgagcttgctggggagctggatcgcttcttgctaagatctggcagagactttgaaaatgccagtacagactctgaaaa

SEQ ID NO: 5456 - DNA, 443 bp, Oryza sativa
  unsure (1)..(443): unsure at all n locations
  Clone ID: uC-osflcyp141e04b1
ttcttgatcctgatgaaattgaagaagagcagctttagagggaccgtaagaatattataaacatggatttccagaactttgtgaacaaggttaatgatcactggtcgcagccacaattcaaggggctggatcttgagtttgatgtccctcttagagagcttggattccatggtgttccatataaagcttcagctttcatcattccaacttcgacttgtttggttgaactaatagagacacccttcctgggtggtgaccctgagtgagatagagattgctaatttgagagggggggctttgggacaaagaactctgacatggctatcgtgctcaaggatttcagatggatgttcttcgcattgattccataccatcaacatcacttgatgcaaanaaggaggtggcttgacacgactgacctcaagtactatgagagcaggctg

SEQ ID NO: 5457 - DNA, 542 bp, Oryza sativa
  unsure (1)..(542): unsure at all n locations
  Clone ID: uC-osflcyp141e05b1
cagcagctgaagcagcaacagcaggagcatcatatgatgcagaatcagcatatgaagcgtcaaatgtttcagcagttccagcaaaaacaaatgcttcagcagcaactcccagcacagcaacaattacagaaacagcagcaatcacagatgcaggttccacagcatcattctggaaatgatgcaaacgagctgaaggttagacaaggagctgcaatgaaacctgggatttatcaacagcacttggctcagcgcaataacttttataatcagcaaatgaaacagggcagtgctttcccaatttcgtcaccacaaaacctccaagcatcatccccccaaatttcacaccattctcctcatggttgatcagcacaatctcttgccgtctcaagtgaagaccgggacaccattgcagtcagctaactcaccatatatgccatctncatcgccacctgttgccccgtctccataccagtggattcagagataccactcntcatttatcatcatcacttactaatactggtcaggctacacatcagcaa

SEQ ID NO: 5458 - DNA, 297 bp, Oryza sativa
  Clone ID: uC-osflcyp141e06b1
ctgtaaccatacatacttattaatacgactagtgaaatctagacatggacgatgagaatggccttgagcttagcttgggtctctctttgggtgggacatcaaggaaagtctaaggctagagatgctcctctagaacctaaagcagagcctcaagtggaagagagcagtagcaaaggtgtttcacaaactcctgaggctccttttgtgcattactatcaaacaaatgcagagaaccaagaacacagtagcaagcagagacacagccctgctgaccaccgtttgggaacttttggggac

SEQ ID NO: 5459 - DNA, 468 bp, Oryza sativa
  Clone ID: uC-osflcyp141e08b1
cccttgctgagaaaacaaacagggatatctgttgcgaaaaagctacaacctattacaatcggaactaaaagttttctaaattattgaaaaaattactagaaatatgtgtaagcatggactacattcccttcaaatctctttgtctaaactcaactttatttggaaggaaaagaagacaaaattttggtgaatagtaggaagctgggtttgaacttgagatttggtggaaatgtagttcacacctatacttatctctagtaaattttccatgaatttagaaaaaaaattcagtttcggttttcatttattcaatggttttcattggatattcctccaaaaatgtaaactagaaaccactatcctggtggaagccttggagtagtttacaattttttttatctcatatacaaaaggtgatatcggataaccatagaaattttgaatatcaaacttttgtttgtgataatc

SEQ ID NO: 5460 - DNA, 396 bp, Oryza sativa
  Clone ID: uC-osflcyp141e09b1
tcctctctctccctcttccgccgccgcgcttggtgaaggaaggagaaagcaagccatcggcccccgcctccgcctccgaagggacattgttgctagttggtgatggctgagcaggctaatcaaccgactgtccttcagaagttcggtggccagttccaccttggctccagcttttctgaaggtgtacgggctcgcaacatctgcccatctgtctcatcctatgacaggcgctttaccacaaggagctacatgacccagggccttgtcaatggtggcatcaacgtcccaatgatgtcgtcctctccaatttttgctaatgctccagctgagaaaggtggcaaaaacttcatgattgatttcctcatgggtggactgtcagccgcagtttcaaagact

SEQ ID NO: 5461 - DNA, 273 bp, Oryza sativa
  Clone ID: uC-osflcyp141e10b1
caacccttgcccaaccccccaggaggagatctttaaaaaggactccccaacttctcacgacgcggcatacccggacacggatgaagggaagaccaagcagcttgaaaggatcgtgacgcatcaggaggacacctcctgctccctggacgtcggcggaaggaccctgcatgacgatgcacaagccaggggcgacggttgcctgatcaagccatgacctgtggagccgcacgtggacacctacggaggagcagtcctcctcatgaactacgaacg

SEQ ID NO: 5462 - DNA, 359 bp, Oryza sativa
  Clone ID: uC-osflcyp141e11b1
taatgacagaaaaccttgtggggaattttcaacagccaactcagtgtttcacaccacaaccacctgtacagatgatgtttctgcgaacagatcagcagaaaattcttcacagaagaacattccattggatggagtatctgcacagtccattaagacatctgcaagtagtgggtctgaaccagtacgtcttggtggaggtttgcagcctaagaggcggagcataacagccaagccacctgggagcggaatatgattctgtaatcagcaaatgaaacagggcagagctttcccaatttggtaaccacaaaacctccaagcataatacccgcaaattttagaccattttcctaagggtgatc

SEQ ID NO: 5463 - DNA, 482 bp, Oryza sativa
  Clone ID: uC-osflcyp141f01b1
tgcccatcaggtgtcagctgtaattactggagaattctacactagagatcaatcccctggatttggaaggccctttgtgttcaacgcagagatattaaaaaggtatcggactaatggtgtacatggaacagtataattctgtgtttttctcatctagcaatagcatcttttagctgaatgattgtatttttctgtcaataggctatcactatgtagttatgctacatatgaacatgtattttatactgcttatcagttgcaaaatatgaggaatttgttctcaggcaattctacattgtctggccattccactgcgagcacctgctgtaaacctggtcttgcatgtctttagttatggctgcttagactgacaagtctttgcgcaaaatgtcgatgcacaccatgtaattctgatgagatttctctattgagcaatctttatgtatggcgtcaaaatcagaaagtcggaaagttttctaaca

SEQ ID NO: 5464 - DNA, 448 bp, Oryza sativa
  Clone ID: uC-osflcyp141f02b1
tcaagctagctagcttaatcacctagctatccgtcagtttagctagatatggctgcagttaactgcaaggtggtggtcgccgcgattgtggtggcgatggtggctgcggcgccgggggcgtcggcggcgataacgtgcgggcaggtgggatcggcgatcgcgccgtgcatctcgtacgtgacggggaggagcggcctcacgcagggatgctgcaacggagtgaaggggctgaacaacgccgcccgcaccaccgccgaccgccaggcggcctgccgctgcctcaagagcctcgccggcagcatcaagtcgctcaacctcggcaccgtcgccggcgtccccggcaagtgcggcgtcaacgtcggcttccccatcagcctctccaccgactgcaacaaggtcagctagatcaattaatcctgcttggatcgatcgatcgagcttaacacgc

SEQ ID NO: 5465 - DNA, 464 bp, Oryza sativa
  unsure (1)..(464): unsure at all n locations
  Clone ID: uC-osflcyp141f04b1
ctctcctcctcccacctcagccggcgcttacctttggagccgcctgctaatctgccggcgtgagcaccggcggagatgtgttactgctacccaacctataacgcagctcttccgcgcagtgcctctgtctctagctagggttttcctcttgggggagacgacctactatggtaaggtggggagctgaagccggcgacctgctgctgtccggaggaagctggagctcgtcgccgtcggatggacgccgatgaggccgcggggagcagcaggaggatggatctgaacctctaccttggcctcccacgcgccccgcgcccgcgccgctccgacctcggcttcgacctcgccctcagcaccccgatgccctcctccccgtcctccttcgcagnctccgtcgacgcgccgtcgacaccggccgaagctgttgatnccccgtacttcccctctgacgccgacctttcccc

SEQ ID NO: 5466 - DNA, 458 bp, Oryza sativa
  Clone ID: uC-osflcyp141f06b1
ccccccaatcccttgcgaggcgtctatagagcgttttgcattccttttctcccctgcgcctgccccgggagctcctccggcgagatccggcccttgacagccaccctcccacggctgctcgtcgtcctcacctccggcgaccggctcaggaagaaagtaacttgagccatgggaaagaggaagtcagcggctaagccaccacctaagaagaggatggacaagcttgatactgtattttcctgcccattctgcaatcatggcagctatgttgcatgccggattgattcgcgaggcacagggaggtgaggggtgatgcactcgcggggggcgatgctgggagcgctgtgctgatgcttccggagatcctgtccaagacgtggtgatgttcgggaggggcgtgggtcaaggccgggcgcagatcttctccagggggggctcgatacctggggaccccacct

SEQ ID NO: 5467 - DNA, 405 bp, Oryza sativa
  Clone ID: uC-osflcyp141f07b1
taaaggctctcaccaatccgggggggcctagtaatcctttcttccatttctccccgctccatccatggggtctgcggatgcggcctcgccggctcccggaaaggcccgccgcggcgcagcagcagctgcggaccgtggtgctgagggtgtccatccactgcctcggatgcaagaagaaggtcaggaaggtgctcaggagcatcgaaggcgtgaaggatgtgaaggtggacgccgcgatgcacaaggtgacggtgaccggcacggtggacggcgacacgctcgtcaagaggctgtacacgtccgggaagcaggccgtgccgtggcagcacccgcacgtggcgccggcgccggaggcggtcaaggcgatagaggccgcgccgcagcagcctgaggctgcgccggccg

SEQ ID NO: 5468 - DNA, 410 bp, Oryza sativa
  unsure (1)..(410): unsure at all n locations
  Clone ID: uC-osflcyp141f08b1
ccgccgccgaggcgttcaagctcgccggctttttgggtggcttcttcactctgtaccccaaggaaggtctcgccatcgtcaatggcacgtccgtggggtcggcgctcgcggccaccgtgatgttcgacgccaacatcctcgccgtcctgtccgaggtgctctcggcggtgttctgcgaggtgatgaacggcaagccggagtacaccgaccacctgacccacaagctgaagcaccaccctgggtcgatcgaggccgccgccatcatggagcacatcctcgccgggagctcgttcatgagccacgccaagaaggtgaacgagatggacccgctgctgaagccgaagcaggacaggtacgcgctccgcacgcgnncgcagtggctcggcccgcagatcgaggtcatccgcgcc

SEQ ID NO: 5469 - DNA, 328 bp, Oryza sativa
  Clone ID: uC-osflcyp141f09b1
ccttttcaaatacaatagatgttcaaatgttcctaagagacgtagaggccggacatcaccataataattacactggtggatcacatagctgggaactgccttttctccagggttggttgatggcacaaaaccgtacaggattgcgtgcaacacttcctaacaacgaggttataggagacttacctatcggtggcactgctgggactgataatgtgatgaatgaatcatcaaacatgtacagttttgaacgtgtagggccttcatcatcaattccaattactacggacagtttgagagggctaagtaaacatcgtcatatgctggcctc

SEQ ID NO: 5470 - DNA, 147 bp, Oryza sativa
  Clone ID: uC-osflcyp141f12b1
ccctgcttctggcttggcatcaggtctaaattcactggagttctgcctaaacccttgcggctctgaagctagcatactatatgtattatcaaaggctattaattcggcgcacacgctgagatacatggctgagaatgaccttgtttt

SEQ ID NO: 5471 - DNA, 537 bp, Oryza sativa
  unsure (1)..(537): unsure at all n locations
  Clone ID: uC-osflcyp141g04b1
aggatggtagaacttcctaggatcttgcaggaggcagctcaggaggctgaggacgcgaagatggtagctttctcagtacaagagcaggtgaggaaggcaagggaagataccgagataaccaaaacagctgcagccacagtaaataccaggttaagtgctgttctgaaagaaatagatgcatccaaagcatccaagaagctagcgtttgcggcggttcaagcattgcaagaaagtgaagaggcaggagatgatgagaattctccagaggagtgacacttcctctggcgagtattacacccttagcaagaaagtgcatgaagctgaacagctggcacatgagagtgtcacagaagcactgcgacaggtggagtcggcaaaggcgtctgaatcaaatagcctagagagactatgtgaagcatccagaggatgaatgagaagaaggaagctcttgaatgagcattagagagagctgagagagcacanccagggaaactaactgctgagcaggaactgaggaatggagagctgtcatgagca

SEQ ID NO: 5472 - DNA, 489 bp, Oryza sativa
  Clone ID: uC-osflcyp141g05b1
ctgctcgtccaacaacaacatcgtggtgaacgtgttcaaccagctggacgagccgctgctcttcacctggaacgggatgcagcaccgcaagaactcgtggcaggacggcctcgccgggacgcagtgccccatcgcgccgggcaccaactacacgtacaagtggcagcccaaggaccagatcggcagcttcttctacttcccgtcgctggggatgcaccgcgccgccggcggctacggcgggatcagcgtcgtcagccgcctgctcatcccggtcccgttcgacccgccggccgacgaccacatggtgctcatcggcgactggtacaccaaggaccacgccgccatggccaagatgctcgacgccggcaagagcttcggccgcccgccgggtgtggtcatcaacggcaagtccggcaaggccgccgccgacccgcccatgttcaccgtcgaggccggtagacgtaccgcttcgcgtcgcaacgtcggcat

SEQ ID NO: 5473 - DNA, 505 bp, Oryza sativa
  Clone ID: uC-osflcyp141g06b1
gcgacagagaggagcagagccgcaagaagagtctagtcatggcggggtcgtcgtccctcagcacgctctccctctgcacgcagtcgccatcaccgtcaccggtggcgtccgcccgcctcgtggcaccggctgtcctcggtttcgccggggccccgcggttcccgacgctgcgggccgcgccacggcggctgacggcgcgggcggtggccggggacgccgaggacgagtgggggaaggagccggcggcggaccagggcggtgccgccgcggcggtggccgaggcgcccgcggatgtgccggtgacgagcgaggtcgcggagctcaaggcgaagctgaaggaggcgctgtacggtacggagcgcggcctgcggcgcgttcaacgagacgccgcggagggtggtcgagctcatcacgcagctcgaggcccgcaaccccacgccggcgcccaccgaggcgctcaccctcctcacggcaagtggatcctcgcgtacaccttattttcaca

SEQ ID NO: 5474 - DNA, 404 bp, Oryza sativa
  Clone ID: uC-osflcyp141g07b1
tcgtcggcaagagcttcggccgcccgcacggggtggtcatcaactgcaagtccggctaggccgccgccgacccgcccatgttcaccgtcgaggccggcaagacgtaccggctccgcgtctgcaacgtcggcatcaaggcgtcgctcaacttccgcatccagggccacgacatgaagctggtggagatggagggctcccacacggtgcaggacatgtacgactccctcgacgtccacgtcggccactgcctctccgtcctcgtcgacgccgaccagaagcccggcgactactacgcggtggcgtccacgcggttcattcacgaggccaagtcggtgtcagccgtcatccgctacgccggctcgagcacgccgccgtcgccggccgtgccggagccgccggcggga

SEQ ID NO: 5475 - DNA, 447 bp, Oryza sativa
  Clone ID: uC-osflcyp141g08b1
agctcaccaacgcatggtgaatcaacttctgatcagcaagatgatggaaacaaatctgttcagaaccataaggataactgttcttgttctcatccagaggatgggaaaacgagtgatgcaaatcttaaggatgaagtctcactgttgcatacgagattgcaggcacttgaagctgatcaggagtttcttaagcatgtgttaaactccctaaggtgtagccctgatggactgcagtgtgtacaggcgatagccagccatttactagagttgagaagaattgcaactcagagataattttcccccctgatttcacaccttctggtcatgagctcttctcatgtagtgctacagaccttcatggtgcttcttgttagagcagcattgaagaggtctagaatcgatgtcgtgaaagatcatctgaaatgaggaaaaggagcatgcactgac

SEQ ID NO: 5476 - DNA, 446 bp, Oryza sativa
  Clone ID: uC-osflcyp141h02b1
agcccctccggcatatataatagattatgggcttgcgaagaaatatagggaccttcagactcacaagcacatcccatacagagagaacaagaacctcactggaacagctcgggatgcaagtgtcaatacccatcttggtgttgagcaaagcagaagagatgatctagaatctcttggttatgtccttatgtacttccttagaggcagcctaccatggcaggggctgaaagcaggcactaagaagcagaagtacgacaaaataagtgagaaaaagatgcttactcctgtggaggttctttgcaaatcttacccatcagaattcatttcttacttgcactactgccgttcattgaggtttgaagacaagccagattattcttacttaaagaggctattccgtgatctctttatccgggagggatatcaatttgattatgtatttgact

SEQ ID NO: 5477 - DNA, 242 bp, Oryza sativa
  Clone ID: uC-osflcyp141h03b1
gagagagagagagagagagaagggggggggttaatggagcagaccgcggaacccccccccacggagaaccagggacagagcgagcctctgacacaggcgggacgccggcgagaagagggggcgaagaggagaacgcaaggcgaggcaacgccagacacagagacagcggacacaaccagcaacgataacaccgctgaggagacaaaggaagggcaagaggaaaacagagagcgggcaaaggc

SEQ ID NO: 5478 - DNA, 531 bp, Oryza sativa
  unsure (1)..(531): unsure at all n locations
  Clone ID: uC-osflcyp141h04b1
tggtttcagatcagaggggagttttccacagtggtcgcccactctaccagcaggggtgtatagtcattgtcaggccatttatgacactgatctgcagatgctgctcagcccattatgcgaaacccagtttaagcttcctgcactgaccggtcgctctgttccaccaacatccttaatcagtaaactaataataaggatcaaggtcattatcagaactcacaaaacgtctacgtcgcacatactagatcctcacctgaagcttaacaactcgaaagctcgagcaaatgatcagaaaaggaatctggaggcgggcagagccagagcatggaaggaagccgatggtttttactcgcccgtggcccgccggattgaatgcgtggattcactcatgccagtatgccacggtcgagtctgtccgtccggccggctggctggctccattattacggntgtttggtgagatttcaagccttgtcccgccgcattgaggagatcggccggctgcgcgtgagacatcaaagctgtgctgct

SEQ ID NO: 5479 - DNA, 492 bp, Oryza sativa
  Clone ID: uC-osflcyp141h06b1
acgacgccggcgcccggctggcgcgccgcctcatccactagctagcgcgccgccgtcttcccccacgtcggccgccgctcttcttccccacctcgccggcgcagcttctcccaccgcgccgcctctcctctccaccacccagtgaactccgccgccatgtgctggagcagctctccatgcaggaatcgtgaactgctggtctgttttgctggaccgagacgattgctttgcttcatgattcttgccgatgctgaccgtgttgcattgattggaccggggcatgggaatctctgaatctgaatgagtgccttccattagagtgaacatggactcaagagttggaagtggtcctattcttcctgctctttgtccttgccgccgatgtctcagcggtcgctgagacagagttggccgttgtgcgcgtcgtgcaggaagcgcctgataggaaagctgagggcgcatgcgggcaggatgggttcaagagcgggaagg

SEQ ID NO: 5480 - DNA, 332 bp, Oryza sativa
  Clone ID: uC-osflcyp141h07b1
ttaatgaggttcaacgtttcaatccagttgatgctttccctggtgatgcaattatattcatgagggtcccgaatcttcttagagggctatcagcatcactaaatgttaggatagcttatctagacatcatgaggccatttgctgaatcaactttgctagggagtatgacacgtgggcccacagctaacagtcagtggatttatgactcacctgttaactcagaggtggagtctaaactgcggaaccttctgcttgagttgggaagcaacaaaattttaggaatacaagtttgtgcttataaagatggaaaggtcataatagataccgctgct

SEQ ID NO: 5481 - DNA, 202 bp, Oryza sativa
  Clone ID: uC-osflcyp141h10b1
tttctggtgcttggcgaacaggggggtcctcatgaaggctttttcggttcttcccccgagggggcagaggaggagcatgctgtccatctccaccggatctggctggtcccctctctccggtgacctctctccccaggcggtatgagttcagatcagcccctcagcagtcctttggcgcgagccatcggcggaggcctccatg

SEQ ID NO: 5482 - DNA, 299 bp, Oryza sativa
  Clone ID: uC-osflcyp141h11b1
acttatgttcatgaataaaaagtagcatttctatccttattatatctcttcctgctcgctaattggtttatccatttttctggaaggcttcccaggtactccctccgtcccataaaaaaccaacctagatgtgacacatcctagtactacaaatctggacattctagattcattatactagaatatgtcaaatccagtactagattcgttttttttttggacggagggagtattccttatatgctggtagattcatagttcatatcctgtagcaaacatggagtttcagtttacaaaac

SEQ ID NO: 5483 - DNA, 84 bp, Oryza sativa
  Clone ID: uC-osflcyp142a01b1
gaagtagcatagcctggaggaatcaaagcatacagagatgggtgacttttaaaaggaccaccgtggacaaagccactcaagatt

SEQ ID NO: 5484 - DNA, 447 bp, Oryza sativa
  Clone ID: uC-osflcyp142a05b1
cttttcttcttcttcgttgggcgtgggcgtcgcgagaggcgagatggctgcggcgacgttggcggcggctagcatgggggtggtgacggaggtgctggggagcgacgtcgtcgacgaggtcgaccagcccatcatcgactacattgccaacgtcctcgccgacgaggactttgacttctgtgcccccgacggccacggcatctttgacgcgctcggtgaccttctcatcgacgctcggtgcgtcgccgactaggagcactgtctcgaggtctgcagtaagatttgcgaaaaatttggaaagcatggccttggtaaacctaaacaagctatgctgagcctttttacttcttttcgtttgaacgatggaatggactattatggtgtcccccaaaagcaagcttgagtttttgttggacccttggttttcattacggacaaaacctatat

SEQ ID NO: 5485 - DNA, 422 bp, Oryza sativa
  Clone ID: uC-osflcyp142a07b1
cactactcgaatcgaatccaccacacggtaccctcctctctcctcctccgaccaccatggccatggccacgcaagcctccgccgccaagtgccacctcctcgccgcctgggcaccggcgaagccgcgctcatccaccctctccatgcccacctcgagggcacccacctccctcagagcggcggcggaggatcagcccgccgcggcggcgacggaggagaagaagccagcccccgcggggttcgtgccgccgcagctggaccccaacacgccgtccccgatcttcggcgggagcacggggggactcctccggaaggcgcaggtggaggagttctacgtcatcacatggacgtcgcccaaggagcaggtgttcgagatgcccacgggcggcgcccgccatatgcgcgagggccccaacctgctg

SEQ ID NO: 5486 - DNA, 483 bp, Oryza sativa
  Clone ID: uC-osflcyp142a08b1
gtccttcgagagagagaacaataattggatgcatggcaggcattgctgaagaagggggccaagtacataatcgtacaggggctacctctaaccggttgcctgccactgaccatgacgctggcccgcccggaggaccgcgacaacatcagctgcgccgccaccgtcaaccagcagagccacgcccacaaccgccgcctccaggccagcctccgccggctccggcggcagcacccggccgccgtcatcgcctacgccgactactacgccgcccacctcgccgtcatggcggccccggcgaggtacggcttcacggagcccttcaagacttgctgcggcgccggcggcggcgcctacaacttcgagatcttctccacctgcggctcgccggaggtgaccaccgcctgcgcgcagccggccaagtacgtcaactgggacggcgtccacatgacggaggccatgtacagggtcgtcgtcggcatgttc

SEQ ID NO: 5487 - DNA, 359 bp, Oryza sativa
  Clone ID: uC-osflcyp142a09b1
cgtttacctctccctctccccactctcgcgcctcctcccatggcttccttcccgaccaccgccgccgccgccgccgcgcaggcattcgccttcgccctcgcgccgaagccatcctcctccgccgccgcaccatccgcgctcttcccccgcaccgccgcggcggcggcgttcccgacgctggctgtgcgaggaagcgggaaggcgaggcagccggtggtggccgcggcggcgggggcggggacggggagcgagcagagggagacgatactgctccccgggtgcgactacaaccactggctgatcgtgatggagttccccaaggaccccgccccgacgcgggagcagatgatcgacaacta

SEQ ID NO: 5488 - DNA, 440 bp, Oryza sativa
  Clone ID: uC-osflcyp142b02b1
gcttttccatttgacaattggggtgaccagcaatggggtggagaggtccagcctcctgccctccctgctgcaccgactggggaatggggagctgctccagctcctgtggctgcataagggtgggatgcagtagctgttccttctgccgctgctgctgctgttgcacctgctgccgaccctggatgggaggaaggcagagctccggcacctactggctgttaggaaatgtgctgatcatcatccggcagatactggaggaaaactgagttacttaacattatgcaatggatttggtagatcttgttaagtagctccatgttaaagtattgcataatgttgagtgagaatccaattttgaatgccgacgcatctgggtactgcgtgttagctttctttctgtcaaccttcatggataacaatgtttaaaagcattttgtgag

SEQ ID NO: 5489 - DNA, 254 bp, Oryza sativa
  Clone ID: uC-osflcyp142b03b1
gcggggagtacgtgcaccacctcaccaccaacggtggcttcgtgtccttcggtacgtagcagtagcacatatcgcacgcggcatccgcgtccgctcgctcgcttgccccgcaccgcaccaaccacgcatattctccgtttcgcccccacgcggccacgccacggcaccgtgccgacgcgcgcgttttgtgtgcgcccgcaccgcgcgatcgcgagaggccggtctccgttccgcggtgacagtggccactaccg

SEQ ID NO: 5490 - DNA, 289 bp, Oryza sativa
  Clone ID: uC-osflcyp142b04b1
gctgatcttggatgccacctagttcaaggatggcgccgccgccgctcgccggcgtggtggtggtcgccgccgcgctcctgctcctcctgccggaggccgccgagccccgcactctactctcgctcgacgacttcggcgccgtcggcgacggcgtcgccaacgacacgcaggccttggtggacgcctggagcgccgactgcgccaccggcgaccacacctttctccacgttccacgacgccaagttctaccctcgctggccggttacccttgcccgaacttgcagggagg

SEQ ID NO: 5491 - DNA, 335 bp, Oryza sativa
  Clone ID: uC-osflcyp142b08b1
tcggtttcggcaccgcggggcggtggcggtggaggagacgacgggcaggcgcacgacatggtgatgccggggttccggttccacccgacggaggaggagctcatcgagttctacctccggcgaaaggtggaggggaagcggttcaacatcgagctcatcgccttcgtcgacctctaccgctatgacccgtgggatcttcccgctctggcctcaattggggacaaggagtggttcttctatgtgccaagggaccgcaagtaccgaaacggcgatcggcccaaccgagtgacgccatcggggtactggaaggccacaggggcggataggatggtgaa

SEQ ID NO: 5492 - DNA, 407 bp, Oryza sativa
  unsure (1)..(407): unsure at all n locations
  Clone ID: uC-osflcyp142b11b1
tgctcaagagcaaaaggcaaaaacatagggcagtgataaaactatttttgggcacagttagtctgtgaccatgtcttcataggcataaatgaaagggaaactcattgttaagaaactgaaatggaaacaacttttccatggtgatccaattgaccatgctaggatcttggatatcaatactgtaattcataaagtgcagaatacatgattcagttggagaaaggcaatacatgaggaagatgttttgaacaatatattatcttaggttaaactattttttttctcatctggtgttttgtacccttacaatcgtctagctgtctagctgttgtaattcatcaagtgttaccaatgttgaattggttgtactctatagcaacctagcaggactttatattttgntcttt

SEQ ID NO: 5493 - DNA, 366 bp, Oryza sativa
  Clone ID: uC-osflcyp142b12b1
cttacgcaacgtcgtcatccgctgcatcctccgccacacctccgtccttcaccgccaaagaccgctatgagcggtcgacctggggtggaggcgtggagccggccgccatcgccgcaacttcatggcataggggacggttgtccgtcgatttgaggagtgagaggcggcaacagcaataaagaggggagaggcctgccggcggctgtatggtggagaagcgccgccgcagcccgcattccctcctctcgccccttcctcttccacccgggcgattcgcaagccgccgctgtcaccgctttcgaccgccatcgctgccgtctcatgggctccaagaaccggcggcgggggtgattttgacctcgacct

SEQ ID NO: 5494 - DNA, 542 bp, Oryza sativa
  unsure (1)..(542): unsure at all n locations
  Clone ID: uC-osflcyp142c01b1
ctcttctcctttggcttcctctcttctccgtgttcttcttgggcgctttaggggttcgcttttctagattcagcctgtcagcggcgacggcgagggagctgcgagatccggccgtgagatggtggtgatccgaaggagtcatcgtcatcgtcgtcgggttggagcctcttcgtccaagaacctgccttgatcttgcagccttgttcaagcttccgagtcttttgctgatccagggtgcagtttcttagcatgtgagtaatggcagctgctgaaacaagggctgcttggcagcgtgctgctaaccgctgccgggttcaagaggacgcaaagagagctccgaaactcggttgctgcccgccatctgggcaacagcatgagaccaacaatggaaatcaaacaaatccgcaagactgccatatccccaactttatgccnttaaactggaatgcaatgaactccaatttgccaaaagatacccaatggtggcttcagttgcagcccaattttgggtgccagaatgtgcttgctagcgaggacctgaa

SEQ ID NO: 5495 - DNA, 466 bp, Oryza sativa
  Clone ID: uC-osflcyp142c02b1
ggtggcatttcccacgctcctcgaccgcctcgcccccccctctcgccgccgtcgtccctccccttcgccggctgcgatggggtgcgccgcgtcggcgacggacatcgctgagcggcggaggccggggcggtcgccgggccacgacggcgagcagcagcagcagcaggatgggaggaggcgcgggtgcaaggtggcgccggagcccaaggaggaggacggggcggcggcggcggcgttcttggcgtcgatgcccggatcccccagcttccgatactactgccagaagtccgccaccgtcgacgccatcgtcgccgatgccgacggcgacggcgacagcgacggcgacgaatgcgtcagaatcaccgagacgcctcagccgatcaagaacaatggccatggctccagcgagctcttcaaatcggcaccggaggcgagcaggtgggtcagggtcagaggcctcgcgctc

SEQ ID NO: 5496 - DNA, 518 bp, Oryza sativa
  Clone ID: uC-osflcyp142c05b1
atctatagctcgaaaggcgtcgttcttctcgcgatcgtcatccttgttctgtcaaatgtggcatcaaatgttccaacagttctactgctgggcacaagagtggcagcatcagccgcagcgatctcccctgcatcggagaagaaagcctggctgatcctggcctgggtgagcacggtggccggcaacctgaccctcctgggctcagccgcgaacctgatcgtctgcgagcaggcgaggcgcgcgcagttcttcgggtacaacctcaccttctggagccacctccgcttcggcgtgccgtcgacgatcatcgtcaccgccatcggccttctcatcgtcatgagctactgatgaacaagcctcaaatggagaagaagaagtaagtcagtagcagcaatcgaaatcacgtagcagcagtacaagattgaaggttttactactactactactactattttagctggtttcttccacaaaggtaaaagaagaatggaaggaagcagttgtggatatgatggatg

SEQ ID NO: 5497 - DNA, 402 bp, Oryza sativa
  Clone ID: uC-osflcyp142c07b1
cattatagtactgcgcttagtaattaagcagcaacgtaacttgatcttcgtgtgaccgatcgatccctcgcgcggcgaataataagtatgtggcggcggtgatggtggtggcgctgctgttggcggcgccggcggcgagcgcggtgacatgcgggcaggtggtgagcatgctggcgccgtgcatcatgtacgcgacggggagggtgtccgcccccaccggtggatgctgcgacggggtcaggacccttaacttcgccgccgtcaccaccggcgaccgacagaccacctgcgcctgacttaagcagcagaccagcgccatgggcggtctgaggcccgacctcgtagccggcattccctccaagtgcggcgttaacattccctacgctattagacctttcaccg

SEQ ID NO: 5498 - DNA, 393 bp, Oryza sativa
  Clone ID: uC-osflcyp142c08b1
tctgaataatacacatcaaaccaccaaactaaccggtggttccagtaacagtggaagggcaggggaaaaacactttctccagattgaaatatcatcatacgctggggaaaacatgccatcttacactttaaaagtatgaatacgatgtgtatttaaccacgaatgcctctagttaactggatttaggggatgattaacagactttataatggcaaacagataacaatatgtaggataagaaaatattgctccattactattctaaataaccccccattataaaatttatctctttcaaaaaaatgtatctcaaaggatgatcagacaccggagactagaaatatcacttcatgatactaggcgaagaatggggttatgtaattctctgtgaag

SEQ ID NO: 5499 - DNA, 195 bp, Oryza sativa
  Clone ID: uC-osflcyp142c10b1
gttcttcctcctcctccctcgccgtcctcacaatttgtctcttcccctaatttctccccccaatttcgtcccttctcgggtctcgaatttgtcgcccttcttcctcgcgatctgtcgcgcttcatcgccatcggcgacctcgcgcgcgcgccgccggcgctgggggggcgccggaagcctttctctcgtcgagag

SEQ ID NO: 5500 - DNA, 224 bp, Oryza sativa
  Clone ID: uC-osflcyp142c11b1
ctgctcttcccccccgcgcgccggccatggccaccgcgacgctgcccctccgcctgctcgcctccaaaaccctagccttcccctccgccccgtccctcccggcctcgcgatgctccctccccgtcgccgcgtccgcgccccgccgctgctggcggctcctcgcttccgccgaggagccggcgcccgcacccgtggaggccgaggccgaggcggaggtggtagag

SEQ ID NO: 5501 - DNA, 453 bp, Oryza sativa
  Clone ID: uC-osflcyp142d01b1
ctttctcgattcagcgcaacgaaggcgacgagctcacttggttgcagttgcagtagtagctcttgctgtgcagtgcagtgcagtgagcgtttgaggggaggtagcagtagtagctgtagttcagcttgtggcagctcccatggccagctacgcggcgcagctcaaggacatgttcttcggcctcgtcgagcgcgtcaccggctacggacgcggcgaggacaaggacgtcgctgcaggtgtagatgagcccagcaagttggcatctgaagaggttgcagtaagcagcgaagaggttgtgattgtacagcgcaatgagatcagatcaagaggcgtagatccctccgtgtcaggcgggaaacaaccagggatcaatgcggccggtatctagaggggatgatttgatgaactgaacaactgtgtccccttgaggtcttaagtactactagtagttta

SEQ ID NO: 5502 - DNA, 502 bp, Oryza sativa
  Clone ID: uC-osflcyp142d03b1
gttttaacttcctccctctcgcccggttttccctcaaccccacagatcaccagccgccgccgccgcatcagggcatcgtcgccatttttgctgtgccctacgcccacgaggccacgagtggagttcgtcgccgacgccacaaccgaccgctcgcggcatccacgccgcacctccctgatcgtcaccaccgttgctccattgatctggtcggtaacgatggaggaggcagccttgagtgggaagcggtgaggttttaccatttttgcgcacgcggctagattgaaaggatgcaattaatgtgtcctggcaatcaggcaaatcatccatctccaagtccgaccgctgacgctcgatctgaatcctctgcctgaaaatgggctgctggccggtaaattaggcagttccagagcatagagcaggaagagagtcgggaccatgactcgcaaggattttcatatcatgggggtacacagtcaagttatgctgaggatggtgagcacct

SEQ ID NO: 5503 - DNA, 453 bp, Oryza sativa
  Clone ID: uC-osflcyp142d05b1
gtgagttttatggaaccaatccaactgcatttccatatttggaggaccttgaatttgatgatatgccaaaatgggttgagtggaccaaagaagaagagaagtatgacagcgtgttccccagactccgtaaactgaagcttttgagctgtcccgatttgattaaagtgcctcccttcccgcagtccgtgagaaaggtcagtattgagaatacagggtttgtgtcacacctgaaactatcttcttcttcatcatcaaaagccaacaaagttaaattggaaacatgttctgccgctgtccttaccaatggtttgttccaccagcaacaagtgcaggaaattgttgatttgaccttgaggcactgccaagatgtaaagtttgaagagcttcatgcacttacttccctcaagaggctgcaaatatcttatttagagatgactgacgaggagttgggta

SEQ ID NO: 5504 - DNA, 331 bp, Oryza sativa
  unsure (1)..(331): unsure at all n locations
  Clone ID: uC-osflcyp142d06b1
tctcacgcnnngtccggctgtagacttgttatggctgcgcgccacccggcaacgcgccgccgacgcgccttgcgctgaggcacgtgcatatgcaccgtcgggctgactactagggctgctgctgcccgccacgaacgccaccgtcggcgtggtctactactgcgttacgattgccatctagcaagcagagcaaggatgggaggggcgccgtggctctactgcatccctggagagcatacacatcatacatctctctatgtcccacccattgtttggctggaattttattgcgttaaccatagcttctattagagatctggatgatgctctt

SEQ ID NO: 5505 - DNA, 103 bp, Oryza sativa
  Clone ID: uC-osflcyp142d07b1
gggtcgtggatgggaggtgcggcgggggtggacggtgtggaggcggcaggtgggccttcgccagatccgatggcgtggaggcagttgtggcccggcgggggtg

SEQ ID NO: 5506 - DNA, 159 bp, Oryza sativa
  Clone ID: uC-osflcyp142d10b1
agtacaactttgtatagtctgcatgtctaatatcagaatcaacgcaaacattctgttgggatgcagcaacccactaattttgttgggatagacgtgaaggaattctgggcctgtccaaaaaaaaaaaaaaaaaaaaaaaaaaaaaaaaaaaagggacaa

SEQ ID NO: 5507 - DNA, 470 bp, Oryza sativa
  Clone ID: uC-osflcyp142d12b1
gtttgtggaccatggccgccgcttcccctccgcaacggcgcagaatcgtttctgcagctgctggagctccgcgaggcgatctcgggagagatcgctcccgtgccctcggcactccgccactcccgtctcctcgcgatttcgcccgcccgctgcccgcgccaatctccatcccgcgagcagctgcggcggcggcggcggcggcgacctgtctcccttccgccgcatcctcgccgaacaacacggtgaactagtaatctagcatcacccatgcccttaagcagcaatatttctactcagaaaacccactatgaagttctttctgtgaatgaaggtgctacatatgatgaggtccgagctggatacagggctgctatcctaaacgcgcatcctgacaagtctcaggcaaaactggatttacttgtgtcatcttgtgagcatggggaattcttcagcgtgcagaaagcttggga

SEQ ID NO: 5508 - DNA, 131 bp, Oryza sativa
  Clone ID: uC-osflcyp142e01b1
ctcgactcctcgcgagccgaggcctcgaaccctaacccccattcgatttccggcgagatgcccacccgcgtctgagccttgctcgtcggcggcgaggtggggtggggcggggggcggtggcagctagggat

SEQ ID NO: 5509 - DNA, 410 bp, Oryza sativa
  Clone ID: uC-osflcyp142e02b1
gaaattgctggaagcatggacactgtggggcagtatgaatcacacattgcattcacccttcctgggctttaccgagttgtgcatggcatagatgtttttgatcccaagttcaacattgtctctcctggagctgacatgagtgtctacttcccgtacaccgaggctgacaagaggctcactgccttccaccctgaaattgaggagcttctctacagtgaagtcgagaacgatgaacacaagtttgtattgaaggacaagaacaagccaatcatcttctccatggctcgtcttgaccgagtgaagaacatgacaggtctggttgagatgtatggtaagaatgcacatctcaaggatttggcaaaccttgtgattgtttgtggtgaccacggcaatcagtccaaggacaggga

SEQ ID NO: 5510 - DNA, 454 bp, Oryza sativa
  Clone ID: uC-osflcyp142e04b1
catgaagcatttcttgagctcaatcagcaacaacatctatctccttcttgcttagttaagtccttcgccctcccaagaagaagaagatgtcttgctgcggcggcaactgcggctgcggcagcggctgccagtgcggcggcggctgcggcggatgcaagatgttccctgatgtggaggccacagccaccaccaagaccttcgtcctcgctgctccatccaacaaggcgagctctggaggaatggagatggcggtggagagcggcgagaacggcggctgcggctgcaacacctgcaagtgtggcaccagctgcagcggctgctcctgctgctcctgcaactgaatctatcgtcgtcgtcgcccggctgcatgaggatttatcgtatggatgctgctactgtcgatcagagctttgatcgaggccttaatttgcttgcattagtacccagcttatat

SEQ ID NO: 5511 - DNA, 380 bp, Oryza sativa
  unsure (1)..(380): unsure at all n locations
  Clone ID: uC-osflcyp142e05b1
cccacgcgttcgcaaatattcagaactagctagttcaatcttgcacttatctctgacttccttctcatttttgtttcattccatagctgaagcaaaatggtatgtgctgntcttgaatatttgttgctgcactcggttggctttctggttcaaatcaacatttttttgtgatgtatatatacttggtagggtgacaagaaacaagtgaagctaaaggttcggggtgcaagcgagactgaggtcaagaatgtacttcgccaagaattcaaaggtttaattaccatcttgttttttctgttgccaaaaaggaacgagcaaaactcaaaggtgtagagagggatagctaaaatttaagcggcatacaaggaaatttctttact

SEQ ID NO: 5512 - DNA, 516 bp, Oryza sativa
  unsure (1)..(516): unsure at all n locations
  Clone ID: uC-osflcyp142e06b1
cttagtccatcagttggttgagaatgctgatgagtgtatggttcttgataatgaggctctctacgacatttgcttcaggactctcaagctgaccacacctagctttggggatttgaaccatttgatttctgccaccatgagtggagtcacatgctgcctaaggttccctggtcagttgaactctgacctccgtaagctggcagtgaaccttatcccctttccccgtctccacttcttcatggtcggattcgccccgctgacatcacgtggctcccagcagtaccgtgcccttactgttcctgagctcacacagcagatgtgggatgccaagaacatgatgtgcgctgctgatcctcgccatggccgttacctcaccgnctctgccatgttccgtggaaagatgagcaccaaggaggtttgatgagcagatgatcaatgtccagaacaagaactcatcctacttcgtcgagtggatccccaacaatgtgaagtccagtgtctgtgacattcaccgag

SEQ ID NO: 5513 - DNA, 450 bp, Oryza sativa
  Clone ID: uC-osflcyp142e08b1
atgacaccctagacagcatgaaggtagtccacagtaaaattgacaaactttcaatatcaaacataccttatgggtcaaacaggtttgttactcacttggttatggcttatgctgtcacgttttggacctgctatgtactgttccgagagtatgagataattacaacgatgagattgcggtttcttgcttcagagaaacggcgaccagaccagtttacagttcttgtgcggaatatacctccagatcctgatgaatcaattagtgagctcgtggagcatttcttccttgttaatcatcctgatcattatctaagacaccaggtggtttacaatgcaaataaacttgctgatctggttgagaagaagaagaaacttgcaaattggcttgattactaccagctcaagtatgaaagaaattcatcaaaaaggcccaccactaagactggctttt

SEQ ID NO: 5514 - DNA, 344 bp, Oryza sativa
  Clone ID: uC-osflcyp142e11b1
gggcatcttcgacgccgtcctccggggatccctcgacttcgactccgacccatggcccaccatctccgacagcgccaaggacctcatccgccgcatgctccgctccccgcccagggaacgcctcaccgcccaccaggtgctttgccacccctgggtctgcgacgacggcgtcgcccccgaccgccccctcgcccccgccgtcctctcccgcctcaagcaagttctcgccatgaacaggctcaagaagatggcgctgcgtgtcatcgcccggaaccttttcgaggaggaagtcgctgggcttaaggagatgttcaaggccatggacaccgacgccagcggggcca

SEQ ID NO: 5515 - DNA, 351 bp, Oryza sativa
  Clone ID: uC-osflcyp142f01b1
atctcttccattctctgcctctcgattcgattcgagtttcttcgtttttttcccctcttaataatcttcgtgttgatttggattgtcgtcgtgttcttcgccttttctgtccgcagatctccgtgcgacgctgcccgggagcctcctctatctggattcgttcgacttgattgattgattgttcggtttgcttgcgacgtgtttgatttttttcctccccggtgattcgattcgatccgatcctatccgaccccttctctggtctcgatttctgttttgtgttgctccccgtgttcgtcctctcggcgtgttcggttgttgcaggagcggatttgatccgggattttggag

SEQ ID NO: 5516 - DNA, 448 bp, Oryza sativa
  Clone ID: uC-osflcyp142f02b1
ggttcctgattttgagtcatggctgccaagctagctcgcctccacagtctccgcgaacgcctcggtgccaccttctcgtctcatcccaatgagttgattgcactcttctctaggtatgttaaccagggaaagggaatgctccagcgtcaccagctgcttgcggagttcgatgccttgatcgaagctgacaaagagaaatatgctccctttgaagacattctccgggctgctcaggaagccattgtgctgccgccctgggttgcactggccatcaggccaaggcctggtgtctgggactacattcgggtgaatgtaagtgagttggcagtggaagagctgagtgtttctgagtacttggcattcaaggaacagcttgttgatggacacaccaacaggaactttgttcttgaggctgaatttgagcccttttatgccttctttccgcgcc

SEQ ID NO: 5517 - DNA, 424 bp, Oryza sativa
  Clone ID: uC-osflcyp142f03b1
gaagcttcctttccattaccttgtctccccaccagagatagagagaacatctggtgaatacttggtaaagaatggcgtccgcaccttcgcttgcagtgagacagtgaagtttggccatgtcacatttttctggaacggaaaccgatctggatactttgatgaaactaaggaagagtacgttgaaattcctagtgatattggaatcacattcaatgttaaacccaacatgaaggcacttgaaattgcagagaaagccagggatgccattcttagtggaaagtttgatcaggtacgtgtcaacctgccgaatggtgacatggttggtcacactggtgatattgaagccacggtagttgcttgcaaggcagctgacgaagccgttaagattattttggacgcgattgaacaagtcggtggtatttat

SEQ ID NO: 5518 - DNA, 475 bp, Oryza sativa
  Clone ID: uC-osflcyp142f04b1
gacgtcgtggagccgatcctcctggaggtggaccagatctaccacctggcgtgcccggcgtcccccgtgcactacaagcacaaccccgtcaagaccatcaagaccaacgtcgtcggcaccctcaacatgctcggcctcgccaagcgcgtcggcgcccgcttcctcctcaccagcaccagcgaggtctacggcgacccgctccagcacccccaggtcgagacctactggggcaacgtcaaccccatcggggtgagaagctgctacgacgaggggaagaggacggcggagacactgaccatggactaccaccgtggcgccaacctcgaggtgaggattgctcggatcttcaacacctacggcccccgtatgtgcatcgacgatggccgggtcgtcagcaactttgtcgcccaggcactgaggaaggagcccttgacggtgtacggcgacggtaagcagacgaggagctttcagtacg

SEQ ID NO: 5519 - DNA, 502 bp, Oryza sativa
  Clone ID: uC-osflcyp142f07b1
aattcctagtgtcgaggtgaatgatggcgtgtcaaatatgatcttcggcctagctgccaaacatttgattggcctcgacatcaccaattcaggagaattgaaaaagaactttcaggaaatatttcaagtgatggtttccatcccattcccaatatattttccagggacctcgttttaccgatgcatgcagggtaggagaaatgtatggaccacactaacaaatgtaatgaaaaagaggctaagtgcacctggaaacaaattcggcgaccttgtcgatctgatagttgaagagctacggagtgaaaatccaacaattgatgaaagttttgctatagacactctatctgggctcttgtttgctagctttgcaccgctatcgtgcaccttgactacaacttttaaagttccttaacgacaatcctgaagtttttgacaagctcaaggaggagcacgaaatgatactggagaaacgagagggtgcgaattctgggttaacagggag

SEQ ID NO: 5520 - DNA, 468 bp, Oryza sativa
  unsure (1)..(468): unsure at all n locations
  Clone ID: uC-osflcyp142f09b1
cattatcagtcaatgcgggaattcaccaattcccattgccttatctggtttatagcgagaaggttaaaactgctagcatttatgtcagggattccacaaacatttccgactatgctcttctcctctttggtggttctctcagtgagagcaaaactggagaaggcattgagatgcttggggggtatcttcatttctctgcaccaaggcgtatcatagagttgatccagagattaagaggtgaattggacaaactcctccagaggaagatcgaggagcctgcacttgacatattttctgaaggaaaaggcgttgtggcggcagcagtagaactgctgcacagccaaaacgttcaccactagatgctatctataccggttccatatagcagnnttagaactaaaataacagctataccagggagtgcttttgtatactcccttcatttccgttgcttgtagagttgacccc

SEQ ID NO: 5521 - DNA, 363 bp, Oryza sativa
  Clone ID: uC-osflcyp142f12b1
cttctggacatactctactactactagccagtaagctagctaactaactacgtggctatggcccccaccgtgatggcctcctcggccacctccgtggctccattccaagggctcaagtccaccgccggcctccccgtcagccgccgctccaccaactcgggcttcggcaacgtcagcaatggcggaaggatcaagtgcatgcaggtgtggccaattgagggcatcaagaagttcgagaccctatcgtacctgccaccactcaccggggaggatcttttgaagcagatcgagtacctgcttcgatccaagtgggtgccttgtctcgagttcagcaaggttgggttcgtctaccgggagaaccac

SEQ ID NO: 5522 - DNA, 380 bp, Oryza sativa
  Clone ID: uC-osflcyp142g01b1
ctcttgtctctttctggcctgtgtcgtggcagcggccatggtgtctgcagtgacatgtgggccgaccaaggtgccgcctggccccaacatcactgcgggctacggcaaacagtggctggaagctaggggtacctggtacggcaagccaaagggtgccggccccgacgacaacggcggcgcttgtgggtacaaggacattgacaaggctcccttcctcggcatgaactcatgtggcaatgaccctatcttcaaggatggcaagggctgcggctcctgccttgaggtcaagtgttccaagccagaggcctgctccgacaagcccgtcatcatccacatcaccgacatgaacactgagcctatcgccggctaccactttgacc

SEQ ID NO: 5523 - DNA, 394 bp, Oryza sativa
  Clone ID: uC-osflcyp142g02b1
cattcacagcttggcaatagcgccacccaccgctcgcatccacagctgctgattcgtaggaggagcaggccacggagggattcgttgattttatttggcagggaaggagatccgagaggaagaaggggaatatagatcgatggggaagtacttggagctgctcgacatgggggtgcgcattgacgggcggttacactctcactgcccgcatacggtgaggatgtactaccacccgccgccgtcctactactcgtcgtcgtcttactccgacgccggctgttcggacgacggacgacgaagaggttgcacgggcttcgaccagaagaggatgcctcgggccgtcgccgacaccgtggagatcatcctctacgccgtcgactagaagtagcctcta

SEQ ID NO: 5524 - DNA, 346 bp, Oryza sativa
  Clone ID: uC-osflcyp142g03b1
gagtctcctatgtgtggattcagtgcattggcagttaaagtcctcaagctatatgatgtccctatcagtgctagagatattttgggagacctcaagctcaaagagtgtgtcaaagcccacaccaactggcctacgtttccacaaatatttatcaaaggagagtttgttggggggtctgatatcatattagatatgcatcagaagggtcagcttaaggatgtgcttggcgatattgcacaaaagcatgagcaaaaagaatcatcatgaagatgacaatagtacgccattttggtcacgtgagctttagcatcagtatgggagctggattcttccttttcaaattttc

SEQ ID NO: 5525 - DNA, 408 bp, Oryza sativa
  unsure (1)..(408): unsure at all n locations
  Clone ID: uC-osflcyp142g04b1
gcacgttgccaccacaggctacgcaaaattctctcccttcctcctccaccacctccactccgacgatcctcctcctgatcctgtgccggccggcgatggcgtaccggttgctggagctcacgctggtctccgcgagcgacctcaagaaggtcactctcttctcgcgcatgcatgtctacgccgtcgcctccatctccgggagcaacgtccccatgcccatgcacggcacccacgccgaccgcaacggcggcagcaaccccgcgtggaacaccgtgctccacttncncgtccccgcccgcttcgacacccgcggnctcgccctccacgtccagctccgcgcccggcgctccttcggcggccaccgcgacgtcggggacgtgttcgtgcccctggacgaccttctcgccg

SEQ ID NO: 5526 - DNA, 403 bp, Oryza sativa
  Clone ID: uC-osflcyp142g05b1
gatctatccttcaccatggcgtcggagaaggaggcggcgctggccgccgtgcccaacgacaaccccaccatatttgacaagatcatcaagaaggaaataccttccactgtggtatttgaggatgagaaggttctggctttcagagacataaatcctcaagctccgacccacattgtgatcattcccaaagtgaaggatggattaactggcctatcaaaggcagaagagaggcatgtagaaatactcggttacctcctctatgttgccaaagttgttgcaaagcaggagggacttgaagatggctaccgtattgtcatcaatgatggccccagtggatgccaatctgtttaccacatacatgtacatctccttggaggcaggcagatgaactggccgccgggct

SEQ ID NO: 5527 - DNA, 493 bp, Oryza sativa
  unsure (1)..(493): unsure at all n locations
  Clone ID: uC-osflcyp142g06b1
cctccagatactgttcctcctgcagaagcagaagcagaaggagaaggagaattgaaagcaagaaattaagtgagaggagaagaagaggaggtaggatatggagaaatacgagccagttcgggagatcggggcgggcaacttcggggtagcgaagctgatgcggaacaaggagacgcgggagctggtggcgatgaagttcatcgagagagggaacaggatcgacgagaacgtgttccgggagatcgtgaatcatcgttcgctgcgtcacccgaacataataaggttcaaggaggtggttggtgacggggaggcatctggcgatcgtgatggagtacgcggcgggaggggagctgttcgagaggatatgcgaggcgtngaggttccacgaggacgaggcgcgctacttcttccagcagctggtgtgcggngtgagctactgccacgccatgcagatctgccaccgcgacctcaagctggagaatacgctgctgga

SEQ ID NO: 5528 - DNA, 438 bp, Oryza sativa
  Clone ID: uC-osflcyp142g07b1
ctttccgtggccgccgccctctcggccgcgccgccgtcctcccgccgccgcagggccttcttccaccactcctgccgcccgctcccttcgtcggcggtggcggccaaggcgttgcgcgcgtcggctgcccccgccgtcgacgaggaggcccccgcgtccccgcctccatcagatcttggtaagggagtggagaacttggtgatcataggctctggcccggcggggtacactgctgcgatttacgccgctcgggcgaacctcaagcccgtcgtgttcgaaggctaccaggttggtggcgttcctggtgggcagctgatgaccaccaccgaggtggagaatttccctgggtttccggatggcgtcactgggcctgatctcatggacaaaatgcggaagcaagcggagcggtggggtgctgagcttcaccaggaggatgtt

SEQ ID NO: 5529 - DNA, 424 bp, Oryza sativa
  Clone ID: uC-osflcyp142g08b1
gaaatcgatcgatccgattccggccggccatggcagctgctgctccggcgacggcggcggtgcggcgcatgaagctgggctcgcagggtctggaggtctcggcgcaggggctgggatgcatgggcatgtccgccttctacggcccgcccaagccggagcccgacatggtggcgctcatccaccacgccgtcgccgccggcgtcaccctcctcgacacctccgacatctacggcccccacaccaacgagctcctcctcggcaaggcgctgcagggcggcgtgcgtgataaggttgagctggccaccaagttcggcatcgcgttcgaagacggcaagcggggcgtccgcggggacccggcgtacctgcgcgccgcgtgcgaaggcagcctacggcggctcggcgtcgacagcatcgacccttacta

SEQ ID NO: 5530 - DNA, 224 bp, Oryza sativa
  Clone ID: uC-osflcyp142g09b1
cgtgaagcctcttttggatctatccattcgggtcaccgtggcagttcggtaattttggcggagaggaggaggaggacgacgacgacgacgacgtgatgggtctcctcgacaagttgtgggacgacaccgtcgcggtgtcccgtcccgacaccggtcttggtcgtcttcgcaagcacgccgtcggccgccccgccgtctgtaagatcaacgacccgacaggggac

SEQ ID NO: 5531 - DNA, 511 bp, Oryza sativa
  Clone ID: uC-osflcyp142g10b1
tcgagatcatccttgtctttgaccttggtggtgggacattcgatgtcagtatcttgaccattgacaacggtgtgtttgaggtgttggccaccaatggtgacactcatcttggaggtgaggactttgaccagagaatcatggagtacttcatcaagttgatcaagaagaagtacagcaaggacatcagcaaggacaaccgtgctcttggaaagctgaggagggaagctgagcgtgccaagagggccctcagcaaccagcaccaggtccgtgttgagattgagtccctctttgacgggaccgatttctcggagccgctgacccgtgccagatttgaggagttgaacaatgatctgttccgcaagaccatgggacctgtcaagaaggctatggacgatgctggccttgagaagagccagattcatgagattgttcttgtcggtggtagcaccaggattcccaggttcaggagctcctcagagcttctttggggcaggagcccaacagggtgtaa

SEQ ID NO: 5532 - DNA, 493 bp, Oryza sativa
  Clone ID: uC-osflcyp142g12b1
ggttatgatgctttcaacaccttcttcagtgagactggtgctgggaagcatgttccccgtgctgtatttgttgatcttgagcctactgtgattgatgaggtgaggactggttgctaccgccagctcttccaccctgagcagctcatcaatggcaaggaggatgcagctaacaactttgcccgtggtcactacaccattggcaaggagattgttgatctgtgccttgaccgcatcaggaagcttgctgacaactgcactggtctccaaggtttccttgtgttcaacgctgttggaggtggaacgggctctggtcttggttcccttctcctggagcgcctttctgtggactatggcaagaagttcaagcttgggttcactgtgtacccatcccctcaggtcttcacctctgtgggtgagccatacaacagtgtcctctttacccactccctccttgagcacactgatgttgctgttctgcttgataaagaggcca

SEQ ID NO: 5533 - DNA, 421 bp, Oryza sativa
  Clone ID: uC-osflcyp142h05b1
gcatttcttgagctcaatcagcaacaacatctatctccttcttgcttagttaagtccttcgccctcccaagaagaagaagatgtcttgctgcggcggcaactgcggctgcggcagcggctgccagtgcggcggcggctgcggcggatgcaagatgttccctgatgtggaggccacagccaccaccaagaccttcgtcctcgctgctccatccaacaaggcgagctctggaggaatggagatggcggtggagagcggcgagaacggcggctgcggctgcaacacctgcaagtgtggcaccagctgcagcggctgctcctgctgctcctgcaactgaatctatcgtcgtcgtcgcccggctgcatgaggatttatcgtatggatgctgctactgtcgatcagagctttgatcgaggccttaat

SEQ ID NO: 5534 - DNA, 557 bp, Oryza sativa
  Clone ID: uC-osflcyp142h06b1
gatttaccctcttgttcttacccactcttctgttatcatttacttcgaggattgattggccggttggtacacctatcttttccttgttagtggcaatgatttcttccttgttgccttctggatttagactacatgctacagaaggattaaggatagttagttcttgatttgcaatagaacaaaaccgttgacttgctacggtcttgtaccattctgtgtttgatcgatcccgttgtagtagtactatagtatttctcaaggtaggtttcctggaaatctcatttgggagtttgattttgttgcatcagttgtgcgaacaagcatactgtgaagctggcacgccaagcattgcatgccaaatcctggctgaagttactgaaaataaaattgtagtatcctgagtatttcaattcataacaacgacccaaaaaaaaactctagttctttttttctttttaacttgcgtgcagtaattaccaagtgtatgattacgaaatggcactataatgtccaaacgagatatttgagtagctttaatggaactcattaaataaaaa

SEQ ID NO: 5535 - DNA, 497 bp, Oryza sativa
  unsure (1)..(497): unsure at all n locations
  Clone ID: uC-osflcyp142h09b1
tcgctttttcccaaatacgcttaccaccaaaagctatagatgcagccaaaagggctggcaaagcggccgatgttttctactgcctcaagcttcttgaagcaactggaatatccactgttccagggtcaggtttcggacaaaaagaaggggtgttccacctgaggacgaccatcctgccagctgaggaggacatgcctgccatcatgaccagcttcaagaagttcaacgacactttcatggatcagtacgatggctactccaggatgtgaaatgaaaacaagatgagcactaccccaggagaagagagaaagaatctgcctcagcgtggctgatcgagcagttataattaaaaggcactgntaattaattaattaatcaatcaatcgaaaggctaattatttgctgcaacaatctgtaactcgatctacttgagaaaaaaaaaaacttttttggcttgatatgcatgatggataggataaattatttctgctctttgg

SEQ ID NO: 5536 - DNA, 397 bp, Oryza sativa
  Clone ID: uC-osflcyp142h10b1
tcgcaaaaccgcgggccgcatcccgcgccgccggcgcccaccggcggcaaccacccgccaccgcgagcgaacacccctatataaaccgccacgccacgccacggccaccaactccgaacacgacatggcgccctctctcctcaccaccccgtcccaggccctggccctcgcccccggcgccgccgccagccgcgtcggcggcggcggcggcgggtcggcgcgggtgagcttcccgtccggccgcgtccagcgccgaggcgcgctggggatgcgggtgcgggcgtcggtggcgatcgagaaggagacgcccgagagcgagccgccgtcgacgttcctgcgggaggacgggtccggagcggggtccgggtcggtgcgggagcggttcgaggccatgatc

SEQ ID NO: 5537 - DNA, 475 bp, Oryza sativa
  Clone ID: uC-osflcyp143a01b1
attaattcatctccatcgacaaagctagctaagcccagtcatggccgcctctcccgcaatgccgtcactcctcctcctcctcctcctagccgttctcgtcgcggcggccgatgcctacgactccgccgccagcgccacccccaacgccggcgccatccccgaccccaacatcttggacatggaggccatgtgccccaagacgacggacgtgcaggcgtgccagcgactggtgaagaacatgccgtccaacatcgtcgcggggaagaaggacgccaggagcatcgcccggggttgcatcgccaccgcctggttcgtggcgagggacggcgccaaggactgcaccgccgccgtggacgagtgcaagaacaaggtggaccagtgcctcgacagctgccgccacgccttcgccgtcgtgaacgacgccctggagccccagggcaccggcgacgacgccgtcaaggtccccgaggacgag

SEQ ID NO: 5538 - DNA, 454 bp, Oryza sativa
  Clone ID: uC-osflcyp143a04b1
cgtttgtttgggaagggaaggatgttgttgccactggccgcaggatcattggggccaccaggccctgggaggcagcccccggcaccatccgtgctgactatgccgtggaagttggcaggaatgtcatccatgggagcgactccgtggacaacgggaagaaggagatcgctctctggttccctgaaggtttagctgagtggaggagcaaccttcacccttggatctatgagtcttagagcttcgcgcctataatcgatcacctcttggtggctagttctcgttaaatatttgagttttgtttcagagttgtcatctggctgcctcctgagccaccattataattctgctgtgatacaatcacagttatatgttgcctgaacttatatggctttttaagtttctggattggatgtgatgggaaaataatactagcagtcagtttttgttataaatg

SEQ ID NO: 5539 - DNA, 390 bp, Oryza sativa
  Clone ID: uC-osflcyp143a09b1
ttgtaacatgagacattacaccaaaaaactaggtgggtcatctttggcctgcacgctcgggacacaacttgccgaggtgaagggtgcactatcgggcattggctcacatgccacataactcaaccagaaggctgctgaagactctagcgccacttgtctagagctcgtaaccaacgtatccatctctgaggtggaggtcaaggaaaaaggcggctaggactggccggcgtttaaggagacggtctctaacacctggacactaaaaagtgatgcaccactcaagggccctttttccgtttgcttgctttgtaataacggaggctaccgtgtcgcacaatgatggccatccctaaagctttactgccggatctgaatataagagtggcatcc

SEQ ID NO: 5540 - DNA, 556 bp, Oryza sativa
  Clone ID: uC-osflcyp143a10b1
cgtcttgccctacttctccctgccgtggcagaggaagcggcagtacagctccagcagcagcggcttcatcactcggagggcggcgcgtcctcacaaacgcccactccgtggagcactacacccaggccaagcttacgaagcgcggctgccacaccaagtacctggccacggtcctcgccattgggacggagtgcgacattgcgctgtcaactgtcgatgatgacgagtcctggcaaggagttttgcctgttgagtctggatcactgccagcactttaggatgctgtgactgtcgctggtcatccaattggaggagacacaatatctgtgacaagtggggtggtctccaggatagagatactttcatatgttcacggctctacagaacttctaggattgcagatagatgcaggtattaactcaggacattcaggtggcccagcttttaatgacaggggcaaattgtgtggtatagcttttcaatctctaaacatgaagatgcagagaatataggttatgtgatacccaccccagttattatgcatttcattcaagac

SEQ ID NO: 5541 - DNA, 285 bp, Oryza sativa
  Clone ID: uC-osflcyp143a11b1
accgggtttatgtttgatcactggagaacacaagcaattgcggcagaccttgcaattgaaaacggggaaaggaaaccaaacgctgtgatcaaatcaaattaatgaaatacaaaaggaaaaaataggatgcatacatgcgagaagctcatggatggtaatgctccattttctcctgtacagatcatgcatatatagttgcttctggttgagatgtctgaaacactctttaccatctgtggattaatcaaatacaaatacatgggcctaccgcacgacgacgaacgc

SEQ ID NO: 5542 - DNA, 445 bp, Oryza sativa
  Clone ID: uC-osflcyp143b01b1
gcttatctttgtaaaggttagcaaatcatatccaaatctctgtcagatgctattgtggcaatatttccatgtattacatgcccatacatgtcaactcacaagacatacaaggcaatattgatatgtctttccatagatatcatgatagcaacaatggtaacattatcctccttagcctatatatatgtgggtgaaggagtgtgatccaaaaaaaaattactgatcctccttagccggctgcatacgactgctcaactttaactcatcatcttggtatcgttctccaagctatctcttatgtgttggaaattattatatactttagtttgcacctatagatctaccatttcttatgtattggaataaggcatggcatccatggatgatgtggatttttcaccacattaagccacacccaagggggcaatgaactccaaggatgatg

SEQ ID NO: 5543 - DNA, 410 bp, Oryza sativa
  Clone ID: uC-osflcyp143b02b1
gcatggtgctgacaggcagctgtggttcgcatccaagcagtccctgagctacctggatggcacgcttccgggagacttcgggttcgacccgctggggctatcggacccggaggggaccggtgggttcatcgagccacggtggctggcctacggcgaggtgttcaacggccggacggcgatgatgggcgtcgtcggcatggtcgccccggagctcctcggcaagctgggcctcgtccccgccgagacggcgatcccgtggttccagaccggcgtgatcccccccgcgggcacctacacctactgggccgacccttacactctcttcgtcttcgagctcgccctcgtcggcttcgccgagcaccgccgtttccaggactggtacacgccgggctccatggggaagcagtact

SEQ ID NO: 5544 - DNA, 230 bp, Oryza sativa
  Clone ID: uC-osflcyp143b03b1
gccgcgccagaatctgctggacgaacgcgtccgcgcatctttcaatctcctaatatccacgccaatatttctatgaagacggacgagcaggggctaaacccaacgaccagcatcgggaaacggccacggaccgcgcagatctaagcggggtaggtcgccttggcgtcagacacaccgacgcgacagatggggctgaccttggtttaccttagccggacccgggggggggg

SEQ ID NO: 5545 - DNA, 390 bp, Oryza sativa
  Clone ID: uC-osflcyp143b05b1
acttaagatttaactgctttatttgagccactaaaatgctgtcagagtaacaaagcagtcagtgaaaaggcgaaaaaatgacacgcttatcataattgccttttccccaaaccttttacagtatgagtcaatttaattgcttgagacatttaaagcgtcaggaataggcattgctttccataaagattaatatgtcctacttgcacatgccagtatatggggttagcttctgacaccttaactaactaatgacacgtccatccattttcaccagaaaaatcttcatccttgtcggtactctaggaattcacattgattaaccaatcttccttgcatttataacaggacaggtgcattccacaagtgcgaacaatttttgttcttgaaacg

SEQ ID NO: 5546 - DNA, 366 bp, Oryza sativa
  Clone ID: uC-osflcyp143b06b1
gcgccggtgtctccccccaaattactagccgccctcggtcggggccgtcgtcttccgggtctcggctaccgaagattcgccgtcttcgccgtcgccgccatgaatcccgagtatgactacctctgcaagcttctgctcatcggagactcgggcgttgggaagcctcgcctgcttccggggctcgcgggccacccatatctggagagctatatcacagcccacggggccgattctaaaatccgcactgttgagcaagatgggaagacaataaagctgcaaattcgggatactgctggccaagagcgatttaagaccattacaagcagctactaccgcggtgcccacgggaccaatgctgtctatgat

SEQ ID NO: 5547 - DNA, 502 bp, Oryza sativa
  Clone ID: uC-osflcyp143b07b1
ttaaagttgaaaaatcgctgcagagtctaaattgtcaaaatttgttgaggatataatagtgcctccaagaatgattgacataattgtcgatggagaggttaatgacgaatacatgaaaacacttgagactctaagcagaaaaatcaagttcattgaagttgatgcaatggttaaatcgtccaaggctctaaaggatgttcaacctgaggttgagagacttaggcagaaagcagtctcaaagatttttgaatttgtcatccaaaagttctatgccttgagaaaaccgaaaacaaatattcagattctacagcagagtgttcttcttaaatacaagtacacgatagtttttcttaaggaacatgctaaggagatatatgcggaagttcgtgcagcttatattgataccatgaacaaggtgctgagtgcacattttcgtgcgtatattcaagcattagagaaactacaactggacatagcaacctttaccgacttacttgagttg

SEQ ID NO: 5548 - DNA, 459 bp, Oryza sativa
  Clone ID: uC-osflcyp143b08b1
ttttgatccaggccccgcgtctccggcgatctcccggccatggcgactcgccgggccctctcctccctcgtccgcgccgcctccaggctccgcggggcctcgcccgccccgcgcccgcgcgggccgctccaccgaccgtcgccatcggggtacctcttcaaccgcgccgccgcgtacgccacggccgccgcggcgaaggaggcggcgcctcccgcgcccgcgacggggaaggccacgggtggaggtaagatcaccgacgagttcaccggcgccggcgccgtcgggcaggtgtgccaggtcatcggcgccgtcgtcgacgtgcggtttgacgaggggttgcctcccatcctcacggcgctcgaggtgctcgaccacaacatccgtcttgtgctcgaggtggcgcaacaccttggcgagaacatggtgcgcacaatcgctatggacgggactggggggctt

SEQ ID NO: 5549 - DNA, 313 bp, Oryza sativa
  Clone ID: uC-osflcyp143b09b1
ctcttacaaacgccaaaaatcgccgagaagaatccgaagaaaacctcacggcggcggcggcgaccggcgaccagaatcggcgaacgggcacgggccgagcagatctaggcgagggagggagcgatggggtcgagcgagatgacggcgacggaggtggcggcgctgctggatctgaagccgcacccggagggcggctactacaccgagacgttccgcgacggctccgtctccgtcaccaccgcgcagctcccgccgcagtacaaggttgaccgcgctatcagcactgctatctacttactgctttcatcaggga

SEQ ID NO: 5550 - DNA, 330 bp, Oryza sativa
  Clone ID: uC-osflcyp143b10b1
ggttttatggggctgggccgcggtcaacttagcataatggatcagcttgttgagaagggtgtcattagtgattcattctctctgtgctatggtggaatggatgttggtggtggtactatggtacttggtgggatgcctgctcctcctgacatggttttctctcattcaaaccctgtccgcagcccgtattacaacattgagttaaaggaaactcatgttgccggaaaggcattgcggttagacccaaagatattcaacagcaaacatggcactgtcttagatagtggaaccacatatgcttacctgcctgaacaagcatttggtgcattt

SEQ ID NO: 5551 - DNA, 416 bp, Oryza sativa
  unsure (1)..(416): unsure at all n locations
  Clone ID: uC-osflcyp143b11b1
tcttttgcctgcccgacaacatcggcgactcgccggggaactacctctccctcgccaacaacaacttcacgggggagatccccaagtcgatcgcgcgcatggccaacacgctcttcgaggtgctgttcctcaacaacaagctcagcggctgcctcccctacgagctcggcctgctcgccaaggccaccgtcatcgacgccggcaccaaccagctcaccggcccgatcccggcgtcgttcgcgtgcctgcgcaaggtggagcagctcaacctggcggacaacctcctctacggcgaggtgcccaacgcgctgtgcgagctcgccttctcgtggtcgggccgccttaagaacctcacgctctccaacaactactttacgtngctcggctcctgctgctgggacctgatcaaggagggg

SEQ ID NO: 5552 - DNA, 406 bp, Oryza sativa
  Clone ID: uC-osflcyp143b12b1
cgccacctcatccacagccatggcgacctcctccgccgccgccgcgctccggcttcccgcctcccagctccccctctccgcgcgcccctcctcctcctccaccctccgtttccctccccgccgccccgcgcgccggggaggcctcgcggtctccgccttcacgaagctctccgaggcgtcccccgtcgccatcccaccggagcccgcgcagccgttgccggacgaggaagccctgccccccaagcccggggtctacggggtgtacgaccccgccggcgagctgcagttcgtcgggatatcgcgcaacgtcagggccagcgtcgagggccaccgccggaaggtgcccgccgacctttgcggctccgtcaaggtttcaatagcagatgaggagacaccagatcgaact

SEQ ID NO: 5553 - DNA, 379 bp, Oryza sativa
  Clone ID: uC-osflcyp143c01b1
gttttactctatcgccgcaggtgatctttcccgggggagaactcgcgattcgtgggcggatgcggaggaaggaaatctgtggtggaatggggtcgtgctcttggttgtctaggtctgtgcataaattgcgagcaggtatggcggaaccagagcatcctctgtgaatgtgtccattagcgccggcgacaaggtgaggtgaggtggtggcggaggcgaccgaaacggcgtccgtgctgtgctgtttggccgacgacggtcgccccgtctgctgattacgcctcccatggtcgatcttcaacggcgatcacaaccacaaccacaacttgggttccattgctcgtccaagagcggatacaccagttgcgcctgatcaaggaag

SEQ ID NO: 5554 - DNA, 437 bp, Oryza sativa
  Clone ID: uC-osflcyp143c07b1
tctttatcgatcgacaaagctatagctagcccagtcatggccgcctctcccgcaatggcgacactcctcctcctcctcctccatgctgtcctcgtcgcggcagccgatgccggcgccgccgataaggaggcctatgcggcaacaggatcaaccgctggcaaggagaccgctgcggcggccgacaaggagacctctgcagcggccggatcaaccgcgggcgccgtccctgaccccaacatcttcaacaaggaggccgtgtgccccaagacgacggacgagaaggcgtgccagcaactggtgaaggtcctgccgcccgagtttgcagagacgaaagacgccaagggcctcgccaagctgtgcatctccagcgtcgggttctcggcggagcaagttaccaaggacgccatcgccgccgtgcaggagtgcaagaagcccga

SEQ ID NO: 5555 - DNA, 394 bp, Oryza sativa
  Clone ID: uC-osflcyp143c08b1
gcttcttagctcctgcctccttctctgatcattcttgcaaaccaatcgagtcttgaacgaggtcaatgggcaaggaggtggacgtgtccactctcgaggccggcggcgcccgggactacatcgacccgccgtcggcgccgctcgtcgacgtcgacgagctgggcaagtggtcgctgtaccgcgcgctgatcgccgagttcgtcgccacgctgctcttcctctacgtcacggtggccacggtgatcgggtacaagcaccagacggacgccgccgtgaacggcgccgacgcggcgtgcggcggcgtgggcgtcctcggcatcgcgtgggcgttcggcggcatgatcttcatcctcgtctactgcaccgccggcgtcttcggcgggcacattaaccc

SEQ ID NO: 5556 - DNA, 473 bp, Oryza sativa
  Clone ID: uC-osflcyp143c10b1
tcgcctccattcccaaagctttgatccggcagcagcggcagtagcggcggcaccaacgggacgaagaggttgcggtggcagcaactcccacggcaggaggaggtgtcggcaaccacccgtgcgaggaggcccacaacaggaggcggcggtgaatcacgagcaaaagaaggcggtggtggcggcaacctacgtgaggagggtgcggctgtggcggcagcttcggtgacttgcgcgaggaggcccacgggaggaggcggttgagcccatggcggtgacttgcaggctgaaggaggcaacagcgactgcagactgtggtgcctttctcaagcggtcctccgatggctagggagatgacactcataggtggaactctaatatcttcgtccgcgggtgccctcctcctatgtgtctttttggtgttttagaccaaagtgtttcaacggggtttccgatggagtttcattcttttcttt

SEQ ID NO: 5557 - DNA, 233 bp, Oryza sativa
  Clone ID: uC-osflcyp143c11b1
gtttaatggaaggggtttatcgcgacgaggagccgtggagggggaggcgcgccgcgccgttccattccagaacatcctctcgtgggaggggtggaatcgtcttgatcatcgtcggggcgagatccgtctcgacgtgcggcgggaaatggacgattccccgatagataatctgtttgatggacatggactggattcatcggcaggcgcggacagctctagctccacgggatcac

SEQ ID NO: 5558 - DNA, 363 bp, Oryza sativa
  Clone ID: uC-osflcyp143d02b1
cactatctcatcatcgggtagctttaggccatctgagggcctttgaatggctctcggcctccttcatttttcatagcatttgtgtagtgtgtgcaaatccatcatcgcatcttcatatctgaagaaatgaaggcgaccactcagctcaagcccatggcctcctcgtctacgtcgccgtcgccgtcgcggctgccgcggagcgcgagcggcaaggcgcccacctcgccgccgtccatctgcaacgcctcgcgccgccaccaccagcagccgccgcgggcctcggcgtcgacgcccgacaccccggcgccgtagcgccaccacctcaggtcgcttgccatcagctgcatgacgatcaagaccgac

SEQ ID NO: 5559 - DNA, 332 bp, Oryza sativa
  Clone ID: uC-osflcyp143d03b1
caatccattaggagtcgactcggctgctacttaattctcctggtggtcgccgtggaggtggactgagatcacattaacaatggagaaggctgatgttgtgctcgtgagcaaggagattgccaagggcactattcactttgtacaagagggagatggctgcaccactgagactggtagtgcatatggcctcaagcctggtgtacatgggttgcatattcatgcactagatgacaccaccaatggttgggtgtgaactggaccacactacaatggtgccggaaaggagcatggtgcaccagatgatgagacccgccatgctggtgaacctggaa

SEQ ID NO: 5560 - DNA, 458 bp, Oryza sativa
  unsure (1)..(458): unsure at all n locations
  Clone ID: uC-osflcyp143d04b1
atcaaacgctacctctgcctcgagctagttaaacaggttcctctgttccatggcatggacgatctcatcctggacaacatctgcgacaggctgaggccgctggtgttctccagcggcgagaaggtgatccgggagggcgacccggtgcagcggatggtgttcgtcctccaggggaagctccggagcacgcagccgctggccaagggcgtggtggcgacgtgtatgctcggcgccggcaacttcctcggcgacgagctgctgtcgtggtgcctccggcggccgtccctggaccggctgccggcgtcgtcggcgacgttcgagtgcgtcgagacggcgcaggcgttctgcctcgacgcccccgaccttcgcttcatcacggagcagttccggtacaagttcgccaacgagaagctcaagcggacggtgcgctactactcctncaactggcggacgtgggc

SEQ ID NO: 5561 - DNA, 365 bp, Oryza sativa
  Clone ID: uC-osflcyp143d05b1
caggtatggaagaatagaaaggagctcaaggtagaggaccttggaattgtgacattatttggagttgagctttatgcgtggttctgcgtaggcgagattgttggcagaggattcaccataaccgtctataaggtctagaagagttctgattaagacctggtttataaaatacactgttagctgatgcttgtctaaatgacaaagatacctcctgccttttcacaattttgtttatggaaagtctttctagtgctggatgtcagccaagacgagcacatcgttgcaacactgcttcaataatttgctcgatctctcgattgccattttggtgtcctgtaatgtgaaatactgaaattccatctcac

SEQ ID NO: 5562 - DNA, 474 bp, Oryza sativa
  Clone ID: uC-osflcyp143d06b1
gacaaatcctcgtcctcatcgagtcaaaacaacccatgaaaccctaaaaccccaatccccccagcccaatccgccattgcctccccgatgcaagcgtccgcgcgcctctacaccgtcgccgtatccaagcgggtgattgcgggcgtctctagcacgatctcgcgctcgtgccaccggacttgccgatggaagtcacatgccgcgccgctgtccgctcaggaggcgcccaaagggccaaagaggatgaccaagcaggagaggcgggttaaaatagagaaatttgttgaggagcatcaggcatcgaatgatggtaaattccccacgatgacgactgctcgtcaacatgttggagggaggtcactacacggtgagggagatagttcaggaacttgagtacaaccagagaatgctacaactggacccgtctaaggcaggtgagctgcccgaaacagtgaacattctgagcattaaagc

SEQ ID NO: 5563 - DNA, 386 bp, Oryza sativa
  Clone ID: uC-osflcyp143d07b1
gaccgaccgtacttctggttccccgtccacctcctccccaccgcgcgatccatggcgttcgccggcatccgctccggcgtcctcagatcggtggcgggtgtggacggtctcgccgccgccgccgcggcgcgccccactcctctcctcccgcgcgtccacctcgccggcgacggcacggggcggatggcgaccaccatcgggttctgcccccgtctcagagccgcgccgccgtcctgcaagaaggcggaggcggacccggcgccgtctctccaggatgcggtggtggcggtggatgctgtgctgcgtgcccctccacctccccaagagcatggcggcaagatggcggcgattctggagtttctgaagaaacactcgctcaatctact

SEQ ID NO: 5564 - DNA, 492 bp, Oryza sativa
  Clone ID: uC-osflcyp143d08b1
tctttggaaagaggtgaaaaattattggacgaacttctggatgaggcattatcaagtgctggtaataatggtggtaaaccttgtctatctggaaaagatgttttccttttgtatgatacatatggttttccagtagagattacagctgaaatagcaggtgaacgaggtgtaattgttgacatgaagggatttgatatggaaatggaaaaccaaaggaaacaatctcaggctgctcataatgtagttaaactttctgtaggaaatgagactgagattgtcaagagtatccccgatactgaatttctggggtacgactctctttctgccactgctgttgttaaaggtcttttagttaatggaaactcagtgaatgtagtttcagaaggttctgatgtagaaatatttttagatcggacaccattttatgctgaatcaggtggtcaagtgggagataatggtttcttgcatgtctatggagaagaagatgcaaaa

SEQ ID NO: 5565 - DNA, 484 bp, Oryza sativa
  Clone ID: uC-osflcyp143d09b1
ggtctgaggtaggggaaagaagagaagagaagcaagcaacaccaacagcaacacgcaaggagtggaggactcttcaaggtctggagagtggagaggaagaggaatcctcctcagtcctcaccttcagatttcagaacacaggcaatcggccctagctgcaatccaacaagatgggcatgcctctgctgctgctgctgctgatcctcgtcgctgctggcccccaggcaggcagagctgcaaagccaatcccaaatctccagctcatgaccaaggagggcggcagttcaagaatcatccaggacgacatcataaaggcaatcaacaagcatcccaatgctggctggacggctgcacggaatccatactttgcaaactatactactgcgcaattcaaacatatccttggagtgaagccaacaccgcatagtgtgctaaatgatgtccctgtcaaaacttatccaagatcgctgatgctttcaaagga

SEQ ID NO: 5566 - DNA, 514 bp, Oryza sativa
  Clone ID: uC-osflcyp143d11b1
aatatatctctatctctctctctcctcactaaagcacaaatcctactcttatcatcctgtcttcttgcctcccttctgcctcctgctcaccaagcttcccacacaaacccaacaagagagtgagagaggagcaaaagctttggctggccgtcccccctgttaaaatgtgatgtccaatccatgggattgcgtctagtttagtcccccactcctctcctgggtcagtccctccctggccaccacctcttcttcttgcagcctcctcctcctccggggccttcttcttgttgattcttttgatggcttttgtgcttcttgtcgacctagttatgggatccggcgaggtggatggacgcgcattggagcagcaacagtagcggcggtgaagaaggcggcggtggatctggatccgaggcaccaccaccaccgggtcacccacggcggcgacggcggcggcccaagaagaggaaggcgcggtggacaagatgaggcatatgagcagcagcagcagcag

SEQ ID NO: 5567 - DNA, 323 bp, Oryza sativa
  Clone ID: uC-osflcyp143d12b1
aactaacctgtaactaatagcagggacacccaggaggtgaagctggaacatggtctgcagatgttaactatcttcaagaaccatgaatcggagacgaacattcttgaagactttgacttctatgagcagcgggagaaagccttgcaggagaatagacgtcagcagcagcctgccagcccagagctgcagaaaccagcagagaataaggccctaggagaacttatggcccacatcttagacacatttggtcagactgtccagctaaaagaaactgagaatggcgaaagcaagcctgcagttgagggtgtttctttagctgaatg

SEQ ID NO: 5568 - DNA, 455 bp, Oryza sativa
  Clone ID: uC-osflcyp143e01b1
catatacctaaactctgaagaaatggcatggttgggttgccagttctagttttacagtggcaatgaagcttgctcctaatagagagaaatttatggaggtcattagtggaacgggtgacataaaagctgatatcgagaaattctgcacgaccttttatccttttctcaaagagaatcatgattttctggccagtgttggacttgatgatctgaaggcttcttaatgcattcctatgcaacaattacccacagaataaacctgtcttacctgtctaatgaaatttagtgctgccgagggtatgctgttttccacctatctttggaaaactatagggcaataatgaatgtcgtgagcttagaacgattgggtaagcccatgggcagctatacacaatgtatgtgttgctttatgcaaaaaggtcaaactgtgaaaagcattcccgtgctagaggaag

SEQ ID NO: 5569 - DNA, 264 bp, Oryza sativa
  Clone ID: uC-osflcyp143e02b1
cttgaattacttaattattattatcattgccaattaatatccctgataaacagcagtattatcatccctagaagtgcatctcacatattgactcaagttgattaaagctacgcttggtaattggtttaagagcagctggaatactacgcaattgttctaacgaatatctagtacttgctttgtatacttaaatatatccataagtcggtgtagtggtaatatttgcttccgagattaaaacctatattaaaggaacccaaacag

SEQ ID NO: 5570 - DNA, 283 bp, Oryza sativa
  Clone ID: uC-osflcyp143e03b1
gtgtaaaccctaacccggtcgacttggacgctgtgggacacaagatcagctctactcatcgggtgtctcggccttttgagcgcggagatggctgaggagaccccagttgagactccagctgccctggttcttggggagcccatggatctgctgacggatctggaggtggaggagctgaagtgaggccctcatcatgcgcttgggacgggtctccgtgaggctgccaaggccatggagaagcatgctggtgccattctaccgtttgatgaaggctgcgacccac

SEQ ID NO: 5571 - DNA, 309 bp, Oryza sativa
  Clone ID: uC-osflcyp143e06b1
ttgttctcttttggaggcccaggggttggtccgtgtcctcttttccactccacacacgcacacgcacaagccaagcagcaagcagcggcgccgatgagaggaggagtagctgggcccaccgccggtgagccgccggggacggaggcggaggcggaggaggggaggagagctcagctggtgacgacgaggagctggagctcgggctcagccttggctccaagaaacagcagcagcagcagcatgcgccgtgccgaatcctgacggccagggacctgcagccggcggcggtgctgtcaccggactcctccg

SEQ ID NO: 5572 - DNA, 310 bp, Oryza sativa
  Clone ID: uC-osflcyp143e07b1
ctctccttcctgctatcctttgccctcctctattgccccctctcacaagagagagagcgccagactctccccaggtgaggatccagccatgacgggggccaaatccaagggcgccgtcaagcccgacgccaagtatggctgtgaagagtaagggcgcggagaagcccgccgccaagggcaggaaggggaaggccggcaaggaccccaacaagcccaagagggctccctccgctttcttcgatcttatggaggagttccgtcaggagctcaaggctaagaaccccaagcatcaaggtgacggtggtgtacg

SEQ ID NO: 5573 - DNA, 436 bp, Oryza sativa
  Clone ID: uC-osflcyp143e10b1
acatcgtctgcctccccgccccgctgctcgtcgagcaaaacgtctcgccctctccacaaaatccccaaatcgccaagcacaaccccctccccaatggcgccgtctctccctcccaccgcccccaaaaccatcgccgactacctcatccgcccctccaagcgccttcggcccacctgtcccgctcccgccgccgctgcgtcggcccccctctcctcctccagcctctggccggagcagcgccgccgcgccgacaccaacctcgcgctcgcccgggcgcgccgtcacctccgcctcgccgagtccaaagcgtcgggcggcaccgcgaagctggaggagctgctcgtcgaggagacgtggctggaggcgcttcccggggagctgcacaaaccctacgcgctcgagctctgccgcttcgtcgcccacgagaggttgcata

SEQ ID NO: 5574 - DNA, 350 bp, Oryza sativa
  Clone ID: uC-osflcyp143e12b1
gtgtagctgaggcaaccattgttgataagcagattcctctgagtggcccaaattctgttgttgggagagcattcgttgttcatgagcttgaagatgatttggggaagggtggccatgagcttagtctcagtactggaaatgctggtgggcgacttgcatgcggtgttgttgggctgaccccgttgtaggtcgctgcaagttgcagctgaagtgtcagtatcgcatccatgtcaccctttttgtcatcttcgagcctgaggcagtcgttcttgtatcacatggatttcgcaacatggatgcttaatagtatctgttgatcgttcgtctcacagtaataaaatttagttgag

SEQ ID NO: 5575 - DNA, 463 bp, Oryza sativa
  unsure (1)..(463): unsure at all n locations
  Clone ID: uC-osflcyp143f05b1
gctcgctcagggcgacgcggcggcgcgcgagcagggcgcggcggcggcgcgagaagggcgaggcagctgcgggaggattgtattggagctattgatggcacacatattagagcctctgttcgtaagaatgtggagtcctcttttcgtggtaggaagtcccatgccactcaaaatgtaatggcggccgtagattttgatcttcggtttacttatgtcctggctggttgggaggggacatcacatgatgctgtagttttaagagatgctttggaacgtgaaaatggcattcatgtcccacaaggaaaattctatctagttgatgctggatatggagccaaacaaggattcttgcctccttttcgtgctgtccggtaccacttgaaagagtgggggaataatccggtgcacaatgaggaagttgttaaccttagacactcattncttcgtattacggttgaacgtg

SEQ ID NO: 5576 - DNA, 385 bp, Oryza sativa
  Clone ID: uC-osflcyp143f06b1
cggtcgctcggtcggacgcgtgggcggacagtacgtggaggccgctcacttcgtcgtgccggagggcgcccgcgccgtggagctggtggggggcaaggagtcggcgctggtgcaggaggtgcgcaccgtgcccgggtggacgtaccgcctgtcgttcgccgtgggcgacgcgcgcgacgggtgcgcgggctccatggtcgccgaggcgtacgcggcgagggccttcatcaaggtgccgtacgagtccaagggcaccggcgggtacaagcgcgccgttctcgagttcgccgccatcgacaaccgcacccgcgtcgtgttccagagcacgttctaccacaccatgaccgacggctcgctctgcgggccggtcattgacgacgccttc

SEQ ID NO: 5577 - DNA, 396 bp, Oryza sativa
  Clone ID: uC-osflcyp143f07b1
gtttcgcggatcacctgtggtcctgtgcagccgtaccgtacgcctctgctttcctctcaccccaccgcgccaccggcgagcggcccgcgagggaggaggcgctgccgccgcctctgctgatgctgatgatgctaggggcggcctcccagtggatcctggccgccgccgcggcggcggccgtggcggcgctgctgcggctggccgtgtcgacgctggagtgggcctggtggacgccgcggcggctggagcgcgccctccgggcgcagggcatccggggcaaccggtaccgtctcttcaccggcgacgtgccggagaacgtccggctcaaccgggaggcccggaagaagccgctgccgctcgggtgccacgacattatcccgcgcgtgctgccgatgt

SEQ ID NO: 5578 - DNA, 503 bp, Oryza sativa
  Clone ID: uC-osflcyp143f10b1
gagtggaggaggaggaggagagcggcggcggcgatggcggggaaggggttgaacgcgacgggggagttcttccggcggcgggacgactggaggaggcacccgatggtggggaaccagctgcgccacgccacgccggggctcggcatcgccatcgtcgccttcgggatctacctcgtcggcgaggccgtctacaaccgtctctaccgtccctccggcgaccaccaccaccactagatcgcgtcggcggccacgcgcggagacccgcgccgcctccccgaggtgaagtggttggagcaatctttaccaagcaccaatgttgttgatcttttccagtttgagttcataaggtctgccatgaggcccatgaccatcatgtaatttgcaaccagggagacatgaatcatggacttttatatcaatgttctgggcttataatccagcatttggaaatgggagtgacacttataattctgaagttatggaattctttcatgcccttgttg

SEQ ID NO: 5579 - DNA, 589 bp, Oryza sativa
  unsure (1)..(589): unsure at all n locations
  Clone ID: uC-osflcyp143f11b1
cactttagttaagctggccgcccgcctgacggtcccgaattacttgctggactccacccacgcgtccggtcttgctggccgagcaggctgaaaggtatgaggagatggttgagtacatggagaaggttgcaaagactgtagatgtggaagagctcactgttgaggagcgcaacctcttgtctgttgcttacaagaatgtgattggtgcccgccgtgcctcctggcgtattgtctcatccattgaacagaaggaggagggtcgtggcaatgaggaacatgttactctgatcaaggagtaccgtggcaagattgaagctgagctgagcaagatttgcgatggtatcctgaagttgcttgactcacaccttgtgccctcatctactgctgcagaatctaaggtgttttacctcaagatgaagggtgattaccacaggtaccttgcggaatttaagactggtgccgagagaaaggaagctgctgagagcacaatggtggcttacaaggctgctcangatattgctctggcggatcttgctcccacccatcccattaggcttggactggcacttaacttctctgtgttctacta

SEQ ID NO: 5580 - DNA, 501 bp, Oryza sativa
  Clone ID: uC-osflcyp143f12b1
ttttctttggggcattcgtgaggaaacctcttctgcaaagtgcatccgattggaaagtgccaactactttcatatatggccaacaagattggatgaattaccaaggtgcacagcaagcacggaaagaaatgaaagtcccctgtgagatcatcagagttccacagggaggacattttgtgttcatagataatccttcggggttccactccgcggtcttccacgcatgccgcaagtttctatctggagatggagaggaaggcctctctcttcctgaaggcctaacatcggcctgagatggcgtctcgtacgacaatctcatcatagcaacccagcacgattgatggaaaatactgtgaccgttgtcgccgtcttgtttgtgtttacacgagttgcgtcaacatgtatcatgtagatatatatacacatgtgtacaattgtacaagtagtgagaaacacacgcattgctatgaaatacgaaagtcaatttccatgttacattag

SEQ ID NO: 5581 - DNA, 408 bp, Oryza sativa
  Clone ID: uC-osflcyp143g02b1
ccctctctggccgtccgaggacgccgcccgcgccggcatcctctccatctggaaggaggccgacttcatcaaggtgagcgacgacgaggtcgccttcctcacccagggcgacgccaacgacgagaagaacgtgctctcgctctggttcgacggcctcaagctcctcatcgtcaccgacggcgagaagggatgcaggtacttcaccaaggacttcaagggctccgtccccggcttctccgtcaacaccgtcgacaccaccggcgccggcgacgccttcgtcggctccctcctcgtcaacgtcgccaaggacgactccatcttccacaacgaggagaagctgagggaggcgctcaagttctcgaacgcgtgcggagccatctgcaccaccaagaagggtgccatcccggc

SEQ ID NO: 5582 - DNA, 502 bp, Oryza sativa
  Clone ID: uC-osflcyp143g03b1
atcattctctcaaaactgttcgtctgtacggtgagaagtgtggattggatttgaagtttgctctgctggttaatgcagttcaagctacagttgatgttgagattatacattcacctccttgtggccttaatttgaagttatatgccaaaactagtggcttcagcgatgtgatccgtctcttccaaggtgctgcacaatctggtcatagaattagttctgttgtggcggtggtgcgacgtagtcaccttgatctttgtatcgaagggtctccagcaggtattggtcttggtgagaagctgccccgtgtaagatgggagcacagatttggtgctggttttcatggaattgaagatgaagcggtgaagcttggtgattttagcacaatttctgtgaaagtcacctagaaagctgtcggcaagcattcggcgccgaagggatagtggagcttctatgcaaagaaaaactggaagatgttatgtgtggcaacttttgtgagctattt

SEQ ID NO: 5583 - DNA, 465 bp, Oryza sativa
  Clone ID: uC-osflcyp143g05b1
gtttgatagcttgatgggttttacaaatgatgctagttcttcccatcacgattgtatgaatcttgctgacatggtagagcggcctgttgcgctcctgtccctaaatgataccgaggagcaaaataactctactgatgagttccctgatgatacatcatcataccttcaaatgaaaccctcagattccgaaactgaaagtaattatgcctctcgagatgttgcggtaactgaatatgttgatgaaaagccactttctagaggcctgcctgatttaatggatgtcgactcacccggtcgtctatcaaaatcagcaagatcaaaacaaatcactcttgttctggatttggacgagactcttgtacattcaacattggatcattgtgacaatgttgatttcacccttcaaggtttctttaatatgaagaaccatacaagttatgttaggcaaagacctcatctgagatg

SEQ ID NO: 5584 - DNA, 411 bp, Oryza sativa
  Clone ID: uC-osflcyp143g07b1
cagccttttgcctctctttctactctctttcttggccgtctctcttatatccctcaatttaaccatcgagggcggccaaaaaaaagagagaaaggaagagcaaaataacacattacaccatggcgcgattcgtcatcatctccgtcgtcgtcgtcgccgccttcgccgctgccgctgtcgttgaggcccgggttggacctatcgacgtcgctccgaccaacctgatcaccaacccactcggtgccatcatcgacaatggccgcaagatcaccggcgccgtcgtcgacgagtgcgcctggacctgcgatcatgtcgcggcgggtaacaagaagatgtgcaacacgctgaggaagctgccgggggtgagctcgccgaaggagctcctgacggcggcggtgaagctgtcgatga

SEQ ID NO: 5585 - DNA, 324 bp, Oryza sativa
  Clone ID: uC-osflcyp143g08b1
gttattttgttatatgtttaatttgttacataatgcgagtgcgagtgtgatgcggagcaagggcaagccatggacgcacttagaggcgtgaggccaaatgtgtattgaatgatcgatgccaataagcaactaatgatggctaaagatgccagtggacattgtatgtgagctgttgagcgacaatatgataaagacagcattctatatcatctaagaataccgggtgcatgtttcactcatccagtgattacactgggtgctctgacagagcctcaagtgcaagataaggatgctatagtacgaccggtgattagtggggctaag

SEQ ID NO: 5586 - DNA, 468 bp, Oryza sativa
  Clone ID: uC-osflcyp143g09b1
cgcctcctccacccgcgggtcccctcccgtcccaccgtcatctgcctcgccgcgccgcccaaggtacccgtccccatcgcctcaccggcttcactaggggacgacccttccaaatgggacccggccgagtgcgacgcccttctccgcggcggcgagcaggtcgcctccgtgctccaggagatgctcaagctgatggaagacatggagatggatggctcgtttgaatcattggctgtggagttgatcgctcaaggagtcattgggaaaagagttgatgagatggaatctggctttctaatggcacttgattacatgatacagcttgctgagaaggatagtgacaatgagcgtaaatctctccttgaggtagtcaagcagacagtgctggatcatctcacaaaaaaatgccctccacatgttcaagtggttggacttctttgccagactgaaaagaggatagcagacatg

SEQ ID NO: 5587 - DNA, 403 bp, Oryza sativa
  Clone ID: uC-osflcyp143g10b1
attctgtgtgtgtgtcttggttgcaaaaaccaagacatacacacagaatcaaataataacaaaggtttcctagcctcaaaggatacatatatatagtttccctacaatacaatggagcctgtcaatgatttccaggaaggcatttcaacagagcatgcctttgaggcagagcctgtgccatcattgtcggaaacaataacgccacgatcaatggtggtgagcttcatccttagtgtaactctcagcatcgtcgccatgaaggtcaccttgagctctggcttcattccgtcgttcagcatcccagccggcctcctcggtttttgtgtatcccgtgcgtcgatccgcattcttgactacttcgcagtggcacaactaccattcacacgccatgagaacaccatta

SEQ ID NO: 5588 - DNA, 512 bp, Oryza sativa
  Clone ID: uC-osflcyp143g12b1
ctccctctctctcttcttcttcttccttccctctcaacccgacgacccacgcgaagcgaactctcgcgcgagacgagagtagtaaaccctagaaacctagaggagatccccaccaccaccatgacggtggatcagaggacgacggcgaaggcgatcatgccgccggtggagatgccgcccgtccagcccggaagaaaatgtggaggcgaggaaagtactggaaaccttgattccgtccaaccgataggaaaaagcgaccacggagatcacgcgatggacctacttcagttgcagagaccatcaagcggtgggccgagctcaacaatcagcaggagcttgatccacagggtccaaagaaggcaaggaaggcacctgcaaagggttcaaagaagggctgcatgaaggggaaaggaggaccagagaatacacgttgtgacttccgtggtgtgaggcaacgtacctggggcaagtgggttgctgaaaattcggagcccgatcggcaaagtagactc

SEQ ID NO: 5589 - DNA, 441 bp, Oryza sativa
  Clone ID: uC-osflcyp143h02b1
agctagctttctaagctagcacgcacccatggcgtcgtcttccacctcgagctcgctcgccgtggcagcgatggtggccgtcgtcctcctcctcctgggtgccaccgccacgtccacccaggcggcgcgcctcctcgacgaagaactccccaccgccgccatcccggcgatccccggcgtccccggagtgccggcggtcggccccgggatcccggtgatccccggcgtgcccggagtgccggtggttggccccgggatcccgttcgtgccggtgatccccggcgtgccggtgatcgtgccgatcatccccggcgtgccgatgatcgccggcatgacaaccctgccagtgccgtcatttgtgccgccgattgatcccggcgccggcgccggattccccggcgtgccgccggcgttgtcgaccaccgtgcaggaagacccaca

SEQ ID NO: 5590 - DNA, 459 bp, Oryza sativa
  unsure (1)..(459): unsure at all n locations
  Clone ID: uC-osflcyp143h03b1
ggatggtgtgatcctctttaatcatactgcttccttcagaggtcagatacaagggcctaaccatggtaactaatgatgcacagctgctttgctccagggtgaaccctcactctgctggttggatttcagccgtggattagcaactggttcatgttctgaaatttttatactaaccatcctcactctgtagtatttgaaatcaacctttcagtttgttctgaatttttatgcagaatataaccatgccagtattttggaatgagtgcagaatttgatccgtcggttctgaagaaacccggttacttattagaagaagcagagaccacaacctggcagtggctggtcacttcagtggtctccaattgcctttgaatacgacaatgaataagtgtaattaactggnggagtgcttcttgaagtagatagaaagctttgctacttttgaagaaaacaagttga

SEQ ID NO: 5591 - DNA, 451 bp, Oryza sativa
  unsure (1)..(451): unsure at all n locations
  Clone ID: uC-osflcyp143h04b1
ctccccttctcctccgcctcgcctcgcagtgtggaagaaaggaaggaaggctaaaaccctagcgagcgcgcgagcgagcgagggctctctgcttccttgcgatgacggcgccggcggacaaggggaagaaggccaagaccgacgccgacggcggcgccgccgaggagaacgagcagatcgacggcgccctcgtcctctccatcgagaagctccaggagatccaggacgagctcgagaaggtcaatgaggaagctagtgacaaggttttggaggtcgagcagaaatacagtgagattcgcagacctgtctatctccgaaggagtgacattatccaaacaantcccgacttctggctgaagcgtttctgagtcatcctctacttagtgagcttttgaccgaagaggatcaaaagatgttcaagtacctggagtctgtcgatgtggatgattct

SEQ ID NO: 5592 - DNA, 326 bp, Oryza sativa
  Clone ID: uC-osflcyp143h05b1
ctgatcttaggattgagatatgctattaggcatggtttcaagaaaatcatagtatatggcgactctcaactagtctgttatcaggtgaaaggtacatggcaaacgaagaaccagaacatgatggaactgtgcaaggaagtgagaaagctcaaagaaaacttcgtctcatttgagatcaaccacattcgacgggaatggaatgccgaggcagatcgccaagcaaacatagctattactctttccagtggtgtggtctctgaggagcgtggcgatggctagccttctccggctataacccttctagataatgggagtaactagtatat

SEQ ID NO: 5593 - DNA, 430 bp, Oryza sativa
  Clone ID: uC-osflcyp143h07b1
cttggcttggaaaatgtcaacgttgttacacaacgcggttttgttcctgttgatgagcggatgcaagttatggacgcagatggcaatgcggttccaaatttgtattgtattggagatgccaatggcaaactcatgctggctcatgctgccagtgcacaaggaatctcagttgttgagcgaatctctgggaaagacaacatcctaaatcatctaagcatcccggctgcctgtttcactcatccggagattagtatggttgggctaacagagccacaagcgagagaaaaggctgataaggaaggatttgagataagtgttgttaagaccagcttcaaggcaaacacgaaagctctggctgagaatgaaagagatggacttgctaagatgatttaccggcctgacactggagaaattcttggagttcacatat

SEQ ID NO: 5594 - DNA, 123 bp, Oryza sativa
  Clone ID: uC-osflcyp143h08b1
cagtgctccggctcgcaacttggaagaggaaagaggttgatgatgaacacctacgtagagtaaaagttcctcttcctaataaaagagtcttagtgctgatctaccggtaaggtggaggcttcc

SEQ ID NO: 5595 - DNA, 455 bp, Oryza sativa
  Clone ID: uC-osflcyp143h09b1
cttcacctgctgctgctgcgaccgccgtgaccatcaccacctcgtcgccggcgagaaacctgcagagggcgagggcgagtgcggcggagcaggggatggaggagcatggcaaggcggctgtcggctgggcggccagggacgactccggcgtcctctccccgtacaacttctccaggagggctcagaaggacgatgacgtcaccatcaaggtgctctactgcggcatctgccacaccgacctgcacgtcgtcaagaacgattggggcaacgccatgtaccccgtcgtccccggccacgagatcgtcggcgtcgtcaccggcgtcggcgccggcgtgaccaagttcaaggccggcgacacggtgggcgtgggcttcttcgtcgggtcgtgccggacctgcgacagctgcggcaaggggtacgagaactactgcgccaagatggtaaccacctgcaac

SEQ ID NO: 5596 - DNA, 462 bp, Oryza sativa
  unsure (1)..(462): unsure at all n locations
  Clone ID: uC-osflcyp143h10b1
ctgtgaccgagcggcggcggctcgttgcgatcggggcagcaccccgcttctcccgtccaatccggcggtggctcggtgacgagaggaggggcggcgagagctcggctcctccctcgcctcttctcccctccaatcccggtggcagcggcggcggcggctccgcgacaaggaagggcggcgggagcttggttcctccctcccctcttctccccttcaatcccggcggcggctcggcgacaagtgcgggacaagggcggcggctcggcaacggcggctcagcggcgacgacgacgacagcgacaagggaggggccttggcgactttgacgacgaccgcgacgacggagggcctcgtcgacaacgacggcgcgcggtggacggcgacgagcggatccggcaccaccttctncatccaccgngccacctncatctncgtccccagccaccttttcacccttccccg

SEQ ID NO: 5597 - DNA, 428 bp, Oryza sativa
  Clone ID: uC-osflcyp144a01b1
aagtttaatggagcggtgatgatcgaggtggtgctcaacgaccggctggggaagaaggtgcgcgtcaagtgcaacgaggacgacaccatcggcgacttgaagaagctggtggcggcgcagacggggacgcgcgccgagaagatccgcatccagaagtggtacaacatctacaaggaccacatcaccctcgtcgactacgagatccacgacgggatgggcctcgagctctactacgactagccgacctgcctgcctgcctgccttcgagtatggccgatcgaatcgatctttaattatgatgaataattccgtcagggtttgtgtgtcttaaaacatcttctggatatgatttggcttggggtttgtgcgaacgatgttttatactaatagaacgcttctgtgagccaaatcaacgtgatttgggggtg

SEQ ID NO: 5598 - DNA, 342 bp, Oryza sativa
  Clone ID: uC-osflcyp144a03b1
gatttctccactgactcatccccatcatctcctcttctgttcagaatctcctcctgctaaagcatttcgttgctgattttttttttttgctggaattcttgttgtggggtaaggcgcaaagcgctgcgaggcaaggcataacagctgaaagttgcaatctttatcggttttggattcctcctcctcctgctgctgctctctctcctccaaggctccaacacatcctggtcccgagagaaaaaggggagatatttttttgggggcgcatgattcgatcccttgctgtttgctgttgctgccttgctgcgcacagatttggtcctttctcggtctgcttcttgg

SEQ ID NO: 5599 - DNA, 463 bp, Oryza sativa
  Clone ID: uC-osflcyp144a05b1
gccagtaagctagctaactaactacgtggctatggcccccaccgtgatggcctcctcggccacctccgtggctccattccaagggctcaagtccaccgccggcctccccgtcagccgccgctccaccaactcgggcttcggcaacgtcagcaatggcggaaggatcaagtgcatgcaggtgtggccaattgagggcatcaagaagttcgagaccctatcgtacctgccaccactcaccgtggaggatcttttgaagcagatcgagtacctgcttcgatccaagtgggtgccttgtctcgagttcagcaaggttgggttcgtctaccgtgagaaccacaggtctcccggatactacgatggcaggtattggaccatgtggaagctgcccatgttcggctgcaccgatgccacccaagtgcttaaggagctcgaggaggccaagaaggcctaccccgatgccttt

SEQ ID NO: 5600 - DNA, 401 bp, Oryza sativa
  Clone ID: uC-osflcyp144a07b1
tgctgagaaaggcgtcttcgtactcgcctctctccgcgcctccgcgcttttcctcctcctctcccctctctcccttctccgccgccgtcgcagcatcaacccaatccgccgccatgagggagtgcatctcgatccacatcggccaggccggtatccaggtcgggaacgcgtgctgggagctctactgcctcgagcatggcatccaggctgatggtcagatgcccagtgacaggactgttggtggaggtgatgatgctttcaacaccttcttcagtgagactggtgctgggaagcatgttccccgtgcctgatttgtcgatcttgagcctactgtgattgatgaggcgaggactggttgctaccgccagctcttccaccctgagcagctcatcaatggcaag

SEQ ID NO: 5601 - DNA, 447 bp, Oryza sativa
  Clone ID: uC-osflcyp144a08b1
acggcactttcgaaagaggaggaacgacaaaggaaactcgccgaggaaagagagaaaagagcagccgcagccgaaagaagatttgcggctctggcggcacaatcaagtagcacatcagggacagcagcagcagaacatcccccacagagagcagccgcggcagacgatacttcttgttcgtgctgtttttcttccttggtcggcaaagtaccattccacaggtacaattacaagtactgcagcaccacatgtatgcatcttcattcagaaatgctggaagatgattgaggaaatcaggaaattgtatgacgagagacatgagatttaattatacctttcacctgtttttcttatgcatgagattcaataacaggtctatctaccagtcttgcttaatctttagctaatccgaatcttgttacaaatttccaaattccgagggatatt

SEQ ID NO: 5602 - DNA, 512 bp, Oryza sativa
  unsure (1)..(512): unsure at all n locations
  Clone ID: uC-osflcyp144a09b1
tctgtggctcgggaacgtcaagctgctgaggctcgagaaaggcaggctgctgctgctgctgctgctgcagcagctgcagcaaaagaaaaacagagtaaaccggacgatcttgagtccttctttggtatgggagctcgagccaatagtgcgccgaagcaaagggctccaacagcggattcgatgttcaattctcaaactcaaaatagaggggcagcatcttctgcttcagcatctatgcggaaggcatcatcaacaacaaatattgcagatgacctatctgcaatatttggaggagctcccacatcatctgaagaatttcaagaaattgaaggagagagtgaagaaagaagacgtgctaggttcgaacggcatcaaaggacccgtgaacgagcggcaaaagccctggctgaaaagaatgaacgggatatgcaggttcaaagagagcaggctgaaagacatagaatttcagaaacaatggactntgagattaagcgatgggctgctggaaaaag

SEQ ID NO: 5603 - DNA, 406 bp, Oryza sativa
  Clone ID: uC-osflcyp144a10b1
ctcggccgtaacgacacgagcacatcaacgcgaagaagaaaagaaaagaaatcctcccgcttcgctataaaaatcgcccggttcccccgtcgtccgcttcaatctatgcgggcatcatctctcttcgcggaatcggtgttcactacatctgctgctgctggacgccgtcgttgtcctcgtctcgccgccgttcccgttaccctcttcttctccaccggtcgcggttcgccggcgatggccgaggaggcgcagcagccacgcggcgcgaaggtgggcggcatccacgacgcgccggccgggcgcgagaacgacctcaccaccgtcgagcttcgccggttcgccgtcgtcgagcacaacagctaggccgaagatttaagaacaccccgccccccttctttttttcccc

SEQ ID NO: 5604 - DNA, 483 bp, Oryza sativa
  unsure (1)..(483): unsure at all n locations
  Clone ID: uC-osflcyp144b01b1
caacagaaaccacaccccgatacgactaggaaggaattcctctctgcttcttcgatccccttgttattacaatcaatcctgcaggagggtataattgcagcggcaagatcgattttttacaaaccaacatagcagaaaggatttacgccgccgccgccgcttgcgatttgtcaattgcagccagaaagaggcgatggatttcaaagttgcttcctttctcctactcctgttaatcgtcacctgcggagctgctcaaggtcaaggcaacgattttgttgtccttgatctaaaaacaactgagatcggggaagatgctagcccaatgtacaaggagcaaattgcgtcgaccaagatacctgtaactcttctgaggagcaagcacagctcactgtgctcggcttgtgaaaacatcacaagtgaagctgtcaattatcttaagtgaaaacaaatacangataagataaggacgatccttcatgacac

SEQ ID NO: 5605 - DNA, 514 bp, Oryza sativa
  Clone ID: uC-osflcyp144b03b1
caggcggcagcgacgagccatggccacacacgcagcgctcgcggcgtcccgcattccggccaccgcccggctgcacagcaaggcggcgtccaagcagagggtggacttcgccgacttctccggactgaggccgggatcgtgctccatcagccacgccgcgagggaggcgtccttctccgatgtccttggctcgcagctcgtcgccagggctaccggagagaacgccgtgagggcgccggctgaggcgaagctcaaggttgccatcaacggcttcggccgcattggccgcaacttcctccggtgctggcacgaacgcgagaactccccgctcgaggtcgtcgtcgtcaacgacagcggaggcgtcaggaacgcatcacaccttctcaagtacgactcgatgctcggcaccttaaggtcgacgtcaagatcgtcgacgaccagaccatcagcgtcgacggcaagctgatcaaggtcgtcttcaacagggaccccctcaagctgccatgggctgagc

SEQ ID NO: 5606 - DNA, 526 bp, Oryza sativa
  Clone ID: uC-osflcyp144b07b1
gagccttagcacctgtactactggtaatccatatgttcggataccagtctctccctgcttaatgtacatgtttcttgactgaaaagatggtgttacaatgctgggctatgtttagcctccgttttgctcagaagaattctacagaatgaataatgaattgccccataaatggggctttgattttggaaaaaaatagcccaaatttgctggagtatggattaggcccgtttgagctccggggtggtgatccccgcaaggatcaaagtgcagctgcaagaagaaaaggaatggaggggaaactgtaccaaacagaattctggcacagctcacatgtctcatgatatgcctatgcaaattccagttgtgtacagttttgagcacacgtcattggagccaaaggttcttcactccttcactgtcttgtcgcatctacactgaaggaagctgtttgcgtaacgctgtattctgagattcgaaattgtttctcaacaagtcaagcagagctgtgtgcctgtgacaattgtgt

SEQ ID NO: 5607 - DNA, 469 bp, Oryza sativa
  Clone ID: uC-osflcyp144b08b1
cagtcgccaggctgaggcgtcagccgcccgactgcccggaggagacgacgcgccggcgcgccgccactcgctggtccgcgctccgccgccggcccgcccgaggagacgacgtgccggctgcctctgccctccagcctccagcagtccagccgtcggccgccgcgtaggcgcgcacggcgccgtcggcgccttggcggctcgggcgctcggcgcatccggcatccccctgcggtgcccgtctccatgctccagccgccgccgcccgccggtgcggcgccgcggcgacgagttgccgcctggcgcctgcctgcctgcctacgctccaccgaggcaccgaccacggcagcctgccagcccgcaatcgcaggggcgcagggcgcccggccgcgttgtcgtcaccggtcaccgacctgccgttgccgttgacgaccaggcggctagactggtctcttactgagacaatgaccta

SEQ ID NO: 5608 - DNA, 488 bp, Oryza sativa
  Clone ID: uC-osflcyp144b10b1
tcggcttgcgctgccacttacctcgctctcgcatattctactagcgcccaggggccaggtaagcgaagatgtacaccgcgaggaagaagatccagaaggagaagggcctcgagccctccgagttcgaggactccgtcgcgcaggctttctttgacctcgagaatggcaaccaggagctcaagagcgagctcaaggacctgtacatcaacaatgcagtccagatggatattgccgggaacaggaaggctgtggtgattcacgtgccgtaccgtctgcgcaaggcattcaagaaaatccatgtcaggcttgtcagggagctcgagaagaagttcagcggcaaggatgtggtgattgttgcaacatggaggattgtgaggcctcccaagaagggctcggctgttcaacgccctcgcacaagaccttttaccgctgttcatgattgtatcttggaggatgtagtctaaccagctgagattgttgcaagcgca

SEQ ID NO: 5609 - DNA, 471 bp, Oryza sativa
  Clone ID: uC-osflcyp144b12b1
gcacaagcagctctagctagctacaggcatcagtggtcagtagagtgatcagttgcaactagctagctagttagattatatcttcagtgatggctccggcctgcgtctccgacgagcacgccgtcgcggtgtcggcggagcggctgtggaaggcgttcatggacgcgtccactttgcccaaggcctgcgccggcttggtcgacgacattgcggtcgaggggaacggtggtccgggcaccatctacaccatgaagcttaaccctgccgcgggtgtgggaagcacatacaagacccgggtggcggtgtgcgacgccgcaagtcatgtcctaaagtcggatgtgctcgaggcagaaagcaaggtggggaagctcaagtcacactcgacggagacgaagcttgaggccaccggcgatggctcctgtgtggccaagctcaaggtggagtacgagctcgaggacggcagctcactgt

SEQ ID NO: 5610 - DNA, 490 bp, Oryza sativa
  Clone ID: uC-osflcyp144c01b1
agcgagcagttagctagctgcggcgatggcctccagagcggcggcggtcgccgtcctcctcctcgccgtggcggcggcgccgctcttcgccgcggcgagcgcgcatggccgaggctaccttggtgccaagtcctggcctcctgacggcagcctgagctcatcaagctccggcgaggctgcagcggcggacgtcgacgacggccacacggactggaagtgctactcctcctgcatgagcaagtgctgtcaccgccacgacgacgacgacgacgacaaggccaatgccaaggccaacgccaccgccggcgccgccgccgtcgggctcgacgatgactacaagtgcaagaagcagtgcctcggcaactgcttcaaggacgtgccggccgtttgctaccacaagtgcgtcgacgactggtgcgcgaagctgccaccatatagctccgcgaaggtgcagtgctacaagatgtgcggcgataaatgcttccaccac

SEQ ID NO: 5611 - DNA, 400 bp, Oryza sativa
  unsure (1)..(400): unsure at all n locations
  Clone ID: uC-osflcyp144c02b1
agaatcgaaggcgtattccggtgttttaatgaaagaagcagcaaaaacacaagagataagtgcatatgatattgaatgatagtattgaacttgttgaagtctgaagaaggaagaattgatggtatacaatggtgtatgaatggaagaagcagcaaaaacacaagataagtgcatatgatatgttgtacagtaagttttgagatgaaagctgagggtgctattatccaactcattatgttcatatagtcatatgatctgcctcagtgataggtatttgtggtacatatgcaaatgacaactccagatttatatcatacagctgaaactgcaccaccaatttttttttaacgtttagccattcgtcagctctgctttgaggtactagctngagcattaccat

SEQ ID NO: 5612 - DNA, 399 bp, Oryza sativa
  Clone ID: uC-osflcyp144c03b1
ggcttgattgatacaaagccgggtttttcactcctcgggcgtgcgtttcttgacaccggccggattgatctatcatccatccatcgagtcgagtcgagatcgatcttgatctcgatctcgatcgatggaggaagccaagatgggagacgttgccaccatccgagccgttctggcgatcctccaatggtggggcttcaacgtcaccgtcatcatcatgaacaaatggatcttccagaaattggagttcaagttccctcttactgtcttgtgtgtccactttatatgctcttcgattggagcttacatcgcaatcaaaattcttaagatgaaaccactgattgaagttgccccagaggatcggtggagaagaaaaattccaaagtcatttgggttctgcat

SEQ ID NO: 5613 - DNA, 423 bp, Oryza sativa
  Clone ID: uC-osflcyp144c04b1
ggcgtccgttccttcgcttgcagtgagacagtgaagtttggccatgtcacatttttctggaacggaaaccgatctggatactttgatgaaactaaggaagagtacgttgaaattcctagtgatattggaatcacattcaatgttaaacccaacatgaaggcacttgaaattgcagagaaagccagggatgccattcttagtggaaagtttgatcaggtacgtgtcaacctgccgaatggtgacatggttggtcacactggtgatattgaagccacggtagttgcttgcaaggcagctgacgaagccgttaagattattttggacgcgattgaacaagtcggtggtatttatcttgtcaccgctgatcatggaaatgctgaggatatggtgaaaagaaacaaatttggccagccactttttgac

SEQ ID NO: 5614 - DNA, 342 bp, Oryza sativa
  Clone ID: uC-osflcyp144c05b1
ctttttgtttttctcatatatatgcaggatatatgaatctgcccgcttcaacagaggggcgaatgaaaccaaccgtcattactgcgagacggcaggagactattattcagagaagccacatagactggactacagtaaatatccagacactgatgagcagaagcggccggcgaagaccgacctaagacattctgtaagtgaagaacctgatgcggaagaggtggagaaccttttccaaagcattgagaaatacacgcttgccagtcatctagtttggggcctctggggaataataacggatcatggcaatgatattgacttcgactacaaggagtatgcaag

SEQ ID NO: 5615 - DNA, 113 bp, Oryza sativa
  Clone ID: uC-osflcyp144c07b1
tttactttttgctcgctcgctcgttaacggaggaggcgtactttctccacagacttacttgctgctatatctgcatgatccttatcgcacgataccgtactactaccggaggg

SEQ ID NO: 5616 - DNA, 293 bp, Oryza sativa
  Clone ID: uC-osflcyp144c10b1
catggattagttgagttgaccaccaccaccaccaccacaccacgacagacgggccaatccacccaaccgtctccacttccctccccaccgcgccaaattcccaccccctcctccgccgccgccgccgccgcacgtgcgcctccacctcctctccattgccgccgccgcggcacggtcaaccacccccacccttcggcggagtcgcggaggaatgcggggggggcaatagaaaattcgctcgctagcagttggcatggcggattagtttaatcttgaagtccttggtggtggtg

SEQ ID NO: 5617 - DNA, 484 bp, Oryza sativa
  Clone ID: uC-osflcyp144c11b1
gtcatgggccaaagcgttctcttccgtcagccttcttccgcatccgtcgtactacctaaccgtgccacatctctcaccgtccgtgccgcttcttcctacgccgatgagcttgtcaagacagcgaaaacaattgcatctccgggacgtggaatcttggcgatggacgagtcgaacgcgacttgcgggaagcgtttggactcgatagggctagagaacactgaggcaaaccgtcaagcgtacaggactttgcttgtctctgcaccaggtctcggacagtacatctccggggcaatcttgttcgagcagactctctatcagtccacgaccgaaggcaagaaaatggtcgacgtcctcgtcgagcaaaacatcgtccccggtatcaaagttgacaagggtttggtgccacttgttggctctaacaatgagtcatggtgtcaaggactcgatggtctatcctctcgcactgctgcttactaccaacagg

SEQ ID NO: 5618 - DNA, 265 bp, Oryza sativa
  Clone ID: uC-osflcyp144c12b1
tttctttgatccggtgtggttcgtggacatcaccgatggtggctggtacggcggcgcccacaattagctgagctaataaaaccttttttaaactgttttccatacagtctaacttgtattttattagccatgctgatggttactgcatcttcttaactggtttgccccaaacacaagttgatcccaaaactaatgacgagcccaaaatagacacaagtttggggtcgcaacccttggacacgcaaaacttcaaattatttggtgc

SEQ ID NO: 5619 - DNA, 198 bp, Oryza sativa
  Clone ID: uC-osflcyp144d02b1
acggccttcgacttcttcctctcctcgatctccctattcggcgtagcctcctgcctcgttcgctccgcccgcaaccatgttggcctactgcggtaagatcaaggacgagctcatcaagaacaggtgtcttacattggcacttcctggccaagggtataccttgcctgccggagtgatgttcacctggcacccatttgg

SEQ ID NO: 5620 - DNA, 450 bp, Oryza sativa
  Clone ID: uC-osflcyp144d04b1
acgcaacctgtatggttgccgccactctctccctgatggtctcatgagggctaccgatgttatgatcgctggcaaggctgccgtggtctgcggttatggtgatgttggcaagggctgtgctgctgctctcaagcaggctggtgcccgtgtcattgttactgagattgaccccatctgtgccctccaggcccttatggagggtctccaggtcctcaccttggaggatgttgtctcggaggctgacatctttgtgaccaccactggcaacaaggacatcataatggttgaccacatgaggaagatgaagaacaatgccattgtttgcaacattggtcactttgacaatgagattgacatgctcggccttgagacctaccctggtgtcaagcgcatcaccatcaagccttaaaccgaccgctgggtcttccctgagaccacactggcatcatt

SEQ ID NO: 5621 - DNA, 493 bp, Oryza sativa
  Clone ID: uC-osflcyp144d06b1
accgaatttgaccgtacttcttctcctgcattcaccctccggcgacggcggcgcagatctccggttggaaggtagggtgttcatcttgacacaaaatcatgcctgaatgaaactgtgccgatgcgaagatatgatatggattagctctccttccaattgatttatcgttctgtcaatattgatccgaatacgaaaattgtaagtgctgtcattttgaaggttttggaaccggaattttgcattgccatagcagtggctgcctttataaatgaagctcttggccttggcttcaaatactggatgtgtgttttggctaatcctaatccctaggtgcttgagagttgcgtgtgcaatttctgacccttttgcggtggtgtatatcaacagagaaatctctagctttttcaagggtgaagcgaattcatggacgagcacctcgcttccatctatggcacggagaaagaccgcgtgaactgcccttttactttagatc

SEQ ID NO: 5622 - DNA, 524 bp, Oryza sativa
  Clone ID: uC-osflcyp144d07b1
gcggagcgacgagatggctgcgccgccggcgagggctcgggcggactacgactacctcatcaagctcctcctcatcggggacagcggtgttggcaagagttgccttctcctgcggttttctgatggttccttcactacaagctttattaccacaattggtattgacttcaaaattagaacaatagagctggacgggaagcgtattaagctacaaatttgggacacagctggccaagaacgtttccggacaattaccactgcgtactaccgtggagccatgggtatcctgcttgtttatgatgtcaccgacgagtcatctttcaacaacattcggaactggattcggaatattgagcaacatgcctctgataatgtcaacaaaattttggttggcaacaaggctgatatggatgagagtaaaagggctgtccctactgcgaaaggccaagcactggctgatgagtatggcatcaaatttttcgaaactagtgcgaagacaaacctcaacgtggagcaggtttttt

SEQ ID NO: 5623 - DNA, 458 bp, Oryza sativa
  Clone ID: uC-osflcyp144d09b1
tcggctcgacggctcgagcttaaaaccctagagccgctcctcctcctcctcctcgcctaccccgaaacccaaatcccccccaaggcggacgcgcccgcaaagggtcgagcgcgctcatggctcgcgtgtacgtggggaacctggatccgcgcgtgacggcgcgggagatcgaggacgagttccgcgtgtttggggttctgaggagcgtatgggttgctagaaaaccaccaggttttgcctttattgactttgatgaccgcagggatgcagaagatgcaattcgtgatttagatggcaagaatggatggagggtcgagctgtcaaccaaagctggcagtggccgtggccgagatcgttcccgtggttctgacatgaagtgctatgaatgtggcgaacctggtcattttgcacgtgaacgccgcttacggattggttctggaggccttggcagtggaaga

SEQ ID NO: 5624 - DNA, 473 bp, Oryza sativa
  Clone ID: uC-osflcyp144d10b1
ctggagagttatctcagcagaacatcaaagatcgttactacggagttaacgatccagttgctttgaagcttttgagtaaggctggtgagatgccatccctgacacccccagatgatgagagtataaggacactctacattggtggccttgatagtcgagtcactgagcaggatttgagggatcaattttatgcccatggtgagattgagaccataagaatggttctgcagcgtgcttgtgcatttgtgacttacactacaagagaaggtgctgagaaagctgcagaggagctcgctaacaagttagtcatcaagggtgtgcgtctgaagctcatgtggggcaagcctcatgcaccaaaaccggaggatgatgaagctgggaggcacgggcatgttgcacaaggaggaatgctccctagggctgtaatatcttagcagcagagtggtgaccagcctcaacctcctgggatggag

SEQ ID NO: 5625 - DNA, 439 bp, Oryza sativa
  Clone ID: uC-osflcyp144d11b1
cgttcacactccctattctcaatcaccattcacataaaagaggctactcctgaaggagaagaattgataaaatgtgggaagcttaatttggttgacctggctggatcagagaatatctcccgttctggagctagggagggacgagctagagaggctggtgaaataaacaaaagcttgcttactttaggtcgcgttattacagccttggtcgagcaccttggacatgttccttacagggacagtaagcttacaaggttgctccgtgattcactaggagggaggaccaaaacttgcattattgctactgtttcacccttcgtgcattgtctagaggaaacattgagcactttagattatgctcaccgagcaaagagcatcaaatacaggcctcgggtaaaccagaaaatgatgaaatcaacattaatcaaagaactttatg

SEQ ID NO: 5626 - DNA, 367 bp, Oryza sativa
  Clone ID: uC-osflcyp144d12b1
gcgggtgatgtgtccatgattgggcagtttggtgtcgggttctactccgcctaccttgttgctgagagggttgttgtgaccaccaagcacaacgacgacgagcagtatgtgtggtagtcacaggccggtgggtccttcactgttacacgtgatacctgtggtgagcagcttggacggggtactaagatcaccctctacctgaaggatgatcagctggcataccttgaggaacgttggctcaaggatctggtgaagaagcattctgagttcatcagctaccctatctccttatggactgagaagacaaccgagaaggagatttctgatgatgacgacgaggaagagaagaaggatgctgaggagggaa

SEQ ID NO: 5627 - DNA, 351 bp, Oryza sativa
  Clone ID: uC-osflcyp144e04b1
gtcacgcgcttcgtgctcgccgccttccaccttcgtgctaccccccgccatggcttcctccctcgccggatccgccctctccttcgccacccccgtcaaggcagtcaagactaattcgatatctttcaccagcgcaaggaagggaaatgcatttctccgcctgcagccagtgcctatgagatttgctgtttgctgtgccgcaaaaaaggagacagtggagaaggtttgtgacattgttaagaagcaactcgctgttcctgagggcactgaagtttctggtgcatccaagttctcagatcttggtgctgattcactggacacggctgagattgtgatgggtctcgaggagga

SEQ ID NO: 5628 - DNA, 482 bp, Oryza sativa
  Clone ID: uC-osflcyp144e06b1
caactctatcacagagccatacatagtagcacatcatcttcttcttgcacattcctcagcagtgtccctctacagagagaagtaccaggccactcaaggaggacaaattgggctcacattgctcggttggtggtacgagcccggcacgcaagatcctgaagatgtagcagcagctgcaaggatgaatgatttccacattggatggtacatgcatcctttggtgtacggtgactaccctccggtaatgaggaagaatgttgggtccaggctaccatctttcacagctgaagaatcaaagagagtacttgaatcctatgattttgtcggatttaaccactatgtcgccatttttgtgagagccgaccttagcaaacttgatcagagcctgagagattacatgggcgatgcagctgtcaaatatgaccttccattcctgaaatcaaataatgagttcccacttcggttgacgagtgacttcatga

SEQ ID NO: 5629 - DNA, 238 bp, Oryza sativa
  Clone ID: uC-osflcyp144e07b1
gcaatacccagagggacagatagtgagcgattgcccgctcccgtgtttttgaataaaagagacttttaagttccatcacatagaaactgtttatctcagaccgctgcacatcgcgagatgtggagcgcagatgccgttgctggttttactccagtgtgtattgaggctttgtactagctcccttttttttgcctggtgattcgcaggacatttgctgaaaacattgaacccatttgac

SEQ ID NO: 5630 - DNA, 390 bp, Oryza sativa
  Clone ID: uC-osflcyp144e09b1
aggcattctagcatatacagatacagagccaggggaggtatggaggagggccttgcacgagcacgacgatgccaatagaagctgtggcggtcgcttctttaccgatggcgtcgcgcagcgccgccctgtgcttctcctccgccgtcgctgcccggagccggagcaggagccggcacggcaggatggtcgtcagctgcgacgccggggcctcagatctgctctatttctctctggctgccaagctgcttggccctcccaccagcttcgatggcggcaagctgacggtagagttcgcccacagccacgggaacagcagctccgggttccccagagcttacaccctcacccactgggacttcaccgctaaccttaccctagccgttttcgaca

SEQ ID NO: 5631 - DNA, 482 bp, Oryza sativa
  Clone ID: uC-osflcyp144e10b1
ccggcaattcttgagctcaatcagcaacaacatctatctccttcttgcttagttaagtccttcgccctcccaagaagaagaagatgtcttgctgcggcggcaactgcggctgcggcagcggctgccagtgcggcggcggctgcggcggatgcaagatgttccctgatgtggaggccacagccaccaccaagaccttcgtcctcgctgctccatccaacaaggcgagctctggaggaatggagatggcggtggagagcggcgagaacggcggctgcggctgcaacacctgcaagcgtggcaccagctgcagcggctgctcctgctgctcctgcaactgaatctatcgtcgtcgtcgcccggctgcatgaggatttatcgtatggatgctgctactgtcgatcagagctttgatcgaggccttaatttgcttgcattagtacccagcttatatgtaggcaggccttgccttttgctctgacgcc

SEQ ID NO: 5632 - DNA, 503 bp, Oryza sativa
  Clone ID: uC-osflcyp144f02b1
gagttctacgtgacaggagagagttatgctggccactatgttcctcaattagcacaagctataaagaggcaccatgaagccactggagacaaatcgatcaatctaaagggctatatggtaggaaatgctctgttcgatgatttccacgatcaccttggcatatttcaattcatgtggaccaatggcttgatttctgatcaaacatacaggctactgaatgttttctgtgactacgagtcctttgtgcatacatcttcacagtgcaataagattcttgacattgctagtgacaaaactgggaaaatatcgattcgtatagtattttcacacctactggccaggcttttttggcctcctcagggaccaaggcatggaaaggaaaagggtacattctgttggaaaaatgggagagcggtatgatccattcactgaaaagcattcaactgtatactttaatctggctgaggtgcaaaaggcactttatgttagtccgatcataacaa

SEQ ID NO: 5633 - DNA, 431 bp, Oryza sativa
  Clone ID: uC-osflcyp144f03b1
gggttggcttctccttccccttttttacctttttctcctcggttcggttccgtggttcgtctagggtttagtgggttgagatggcggcgccggatgtcgagtaccgctgcttcgtcggcggcctcgcctgggccaccgacgaccgctccctcgaggccgccttctccacctacggcgagatcctcgactccaagatcatcaacgacagggagacggggaggtcacgtgggtttggcttcgtcaccttctcctccgagcagtcgatgcgcgacgccatcgagggcatgaacggcaaggagcttgacggtcgcaacatcaccgtcaatgaggcccagtcccgccgctccggcggcggaggcgggggctacggcggcggcggtggcggctaccgcggcggtcgtggaggcggtggttccgaagaggtggcggcg

SEQ ID NO: 5634 - DNA, 262 bp, Oryza sativa
  Clone ID: uC-osflcyp144f04b1
gttttaacatatttcagtactccattttcaccagcagcaactgctgatcaacaatctgcacagctacagttctcaacacaaaatcactattatacttccaacccattttggcctgccccaataggattggtgcgaccatgttcatcaacaggactgcaatcttccacgccaggtctaaactgtaccggcatcacatcatttccattcctgcccacaaagcaaccgtctgtgggaaccccatcattaactttattttctacca

SEQ ID NO: 5635 - DNA, 416 bp, Oryza sativa
  Clone ID: uC-osflcyp144f05b1
cgcggagtggaggagggattaatcggaagcatatcaatcggcggccatgacgatcggcggcgcgtcctccagcgtcgtagtgccacgcaacttccggttgctggaggagctggagcgtggcgagaagggcatcggcgacggcaccgtcagctacggcatggacgacgacggcgacgacatcttcatgcgctcctggaccggcacaatcattggaccactcaactctgtgcacgaggggcgcatctaccagctgaagctcttctgcgacaaggactaccccgacaagccgcccaccgtgcgcttccactccaggatcaacatgccctgcgtcaaccctgacaccggactggtcgaaagcaagaagttccatatgctggcaaactggcagagggagtacaccatggagaatattctga

SEQ ID NO: 5636 - DNA, 426 bp, Oryza sativa
  Clone ID: uC-osflcyp144f06b1
ccgttggtggccaaagctctctgggttacctttttggaggcaatgaggcccctaagccagctgctaaaccagcacctgcagctgcacctgcaccagcgccagcaccagcaccagctgcggctgtggctgctcctgctgagaaaccatcacctgcaaaggctgatgccaccaagcagattccagctgggattcagggcagccggagcaataacaactaccatagagctgatggccagaacactggaaactttcttacggatcgcccttcgaccaaggtccatgctgcccctggtggtggatcttccctgggctacctctttggtggaaactgaaggagtgaccctggtgcactgtagcaccggatgaagaaggaagcctaccggtattcttgtttatcaaaactgggaaccgccatgggtttattaa

SEQ ID NO: 5637 - DNA, 522 bp, Oryza sativa
  Clone ID: uC-osflcyp144f09b1
ctgatatcttgggttcttcgatgtggttcaacactgtccttgtgatgactcactgctcttcatctcctcctgaaggaccagatggttatcctctggaatatgactcctatgcccgttattgcaagaatgtggtgcagcgtcatatccaggtggctgcttctaacacacagatggagaaccctgtagttcttgttgacaatcatccaatgtgccgacggaacaccaaaggtgaaagagttctacctaatgggaaggtatgggtatcagaacttttactgctatgtggggcgaccaagttgttggcagaagcaaattccttgcttaagttccaagatagcttccttctgtcacaagcaaataccagactgccttcactgcctcatcttctttcatcactccttaaacctaatccatcatcaagatcagaagatgttggcattgacatgacccgagtgtcagatgatgaggatgaatctgatcagcttccgccatttcggttctgaggaatctgaatatgaaaaa

SEQ ID NO: 5638 - DNA, 420 bp, Oryza sativa
  Clone ID: uC-osflcyp144f10b1
cgaataatttctccccaatctcgcgaggctctcgtcgtcgaatcgaatcctctcgcgtcctcaagatgcagatctttgtgaagacattgaccggcaagactatcaccctcgaggtggagtcctctgacaccatcgataatgccaaggctaagatccaagataaggagggcatccccccggaccagcagcgtctcatcttcgctggcaagcagctggaggatggcaggacccttgttgactacaacatccagaaggagtcgacccttcaccttgtcctccgcctccgtggtggcatgcagatctttgtcaagactctgaccggcaagactatcacccttgaggtggagtcttctgacaccatcgacaacgtcaaggccaagatccaagacaaagagggcattcccccagacccagagcgtt

SEQ ID NO: 5639 - DNA, 494 bp, Oryza sativa
  unsure (1)..(494): unsure at all n locations
  Clone ID: uC-osflcyp144f11b1
cttctctctctctctctctctctacaacttctcagctaagctaagccaagctagagccatctagctacttttgctgctttctctctcctcctgcaacacacgacctagctgagagctgagctgagttgcgccggccatggcagcatcgcataggagcaggagcacggcggcgcagctcgacgtcgacgaccaggcggcggccgatcagctgatgacgatgatgcggcggccagcggcggtactacaggatgaggccgccgccgaggaggaggcctccgcggcggcagcggacctgcagctggagctccggcgagggccgtggaccgtcgacgaggacctcaccctcgtcaactacatcgccgaccacggcgagggacgctggaactccctcgcccgcgccgtcgggttgaagaggaccgggaagagctcangctgcggtggctgaactacctccggcccgacgtgaagcgcggcaacttcactcgcgacgagca

SEQ ID NO: 5640 - DNA, 319 bp, Oryza sativa
  unsure (1)..(319): unsure at all n locations
  Clone ID: uC-osflcyp144g01b1
gggacacgaaacaggggaatccggagcaaagtgcgacgcgagcgcgcgaggaagcagcagccatggcgctctccctctccacctccttcctcccgacccaagccgccgcggcggccacgaggaccaccctccgctccctcgtcccctcccagaggatgcggtgctcgatgcggaagaaggggctgcacccggagatctacgaggacgcgaaggtgtactgcaacggggagctggtgctggtgacggggggaaccaagccggagtacacggtggacgtgtgggccgggaaccacccctactacgttggngacacgtcggc

SEQ ID NO: 5641 - DNA, 338 bp, Oryza sativa
  Clone ID: uC-osflcyp144g02b1
ggtgttcagttctcctcctccttcttctccatcgccggcgagagagagagagttagctagctaggatgggttctacagccgccgacatggccgcggcggccgacgaggaggcgtgcatgtacgcgctgcagctggcgtcgtcgtcgatcctgccgatgacgctcaagaacgccatcgagctgggcctgctcgagacgctgcagtccgccgccgtcgccggaggaggggggaaggcggcgctgctgacgccggcggaggtggccgacaagctgccgtccaaggcgaacccggcggcggccgacatgggggaccgcatgctccggctggttgccttctac

SEQ ID NO: 5642 - DNA, 473 bp, Oryza sativa
  Clone ID: uC-osflcyp144g03b1
gcgcataagtggcgctgcagcggttcgatgtgtaccgccgcaacgcggagttcatcgacgccgtcaacctgcgcggcgacctcacttaccagctcgccgagaacgagttcgcagacctcaccgaggaggagttcctggccacgtacaccgggtactacgccggcgatggccccgtggacgactccgttatcacgacgggtgccggagacgtcgacgccagcttctcctaccgcgtggacgttccggacagtgtcgactggagggcccaaggcgccgttgtgcctcccaagtcccaaacgtcaacatgcagtagctgctgggcgttcgtgacagcggcgaccatcgagagcctgaacatgatcaagacggggagcttggtctctctgtcggagcagcagctggtggactgcgacagctatgacggcggctgcaacttaaggtcgtaccggcgggcgtacaaaggggttgtcgag

SEQ ID NO: 5643 - DNA, 462 bp, Oryza sativa
  Clone ID: uC-osflcyp144g04b1
atgttctgttcttccccacatcaaggcacatttctcgtgacagcaagagatttgccataatcactatctcactcctcacagtaatttatcttgctgccattttcataccgagcatttgggatgcattccagtttactggtgcaactgctgctgtcctgattggtttcatcttccctgccatggttatacttagggatccttatggaatcgcatccaagcgtgacaagatcttggctgcaaccatgatcgtgcttgctgtcctctccaattctgttgcttatacagcgatgcaatgaatatcttccgtaaggaagaggaggcatgaatgtcagactccaaaggaatgtcatcaaatatcagtgatgaaggaagcgtggcttcatgttatgagacacagatgctgtgaagggaaattattttctggaatccagcgaacgaagatttcttggtcagcggtcgagg

SEQ ID NO: 5644 - DNA, 526 bp, Oryza sativa
  Clone ID: uC-osflcyp144g05b1
gctttaacatgagcaaacttagtgcagcgatcttgcacgacagaaacttgtgatttgcagccccaactggatctatgatccacaatacagactgtccaacttgaaggaatacgctctgaagacatgaatcagataggtgttcagtccaactctgcactaagttctgaacagctcacccagcctcttccagtggcaccattagtgtttaattatcaaagatttagtgacgaacctctcaaaaatgagctggaaagattaaaacataccagcaatgttcttagtaaagttcatgaacaaaagagaaaacaactcctagtggagtataaccaagaaatggagaagctaaaacagaaatatgactcattacttcaaaaggaagattctttttacgctcagaaagaggcagaacttgatactatctacaggaaagtctttataaaccaatcactggctgagaatcttcgaggaaatttctaccattatctgcagctcaaggggatccacgagacccacaattgggcagctg

SEQ ID NO: 5645 - DNA, 318 bp, Oryza sativa
  Clone ID: uC-osflcyp144g07b1
ggttggcttgtcctccccctctttaccttttcctcctgggttcggttccgtggttcgtctagggtttagtgggttgcgatggcggcgccggatgtcgagtaccgctgcttcgtcggcggtctcgcctgggccaccgacgaccgctccctcgaggccgccttctccacctacggcgagatcctcgactccaagatcatcaacgacagggagacggggaggtcacgtgggtttggctttgtgaccttctactccgagcagtcgatgcgcgacgccatcgagggcctgaacggccaggagctcgatggacgcaacatcacc

SEQ ID NO: 5646 - DNA, 372 bp, Oryza sativa
  Clone ID: uC-osflcyp144g08b1
cttcttcctccttcgacgagagcaagcaagaagccatggcggactacaaccgctacggctacggcggctacggctccaccccgtcagcgccacccgcctcctcctacggctacaccaccacgccctccgccccaccggcctcctcctcctcgtcctacggctacggacatggcggcggcggttacccgtcctccacctacccaccgccgccgccgtcgtcgtcgcaggcgtatcccatggggatggggggcttcctggtgttcccgccggggacgcacccggacgtggagcgcgccttcagggccgtggaccgcgacggcagcggctccatcgacgagcgggagctgcaggacgcgctctcctccgcctacc

SEQ ID NO: 5647 - DNA, 518 bp, Oryza sativa
  Clone ID: uC-osflcyp144g10b1
aatccggcggcggcgatggcggcggcggctacggcgaggtccggattccggcgcatgttctccatctcggccttctccccgcccaagccgcccaccccgcccccgaaggccgacccctcccccaacctcttcatctcaggcttaagcaagcgtacaacaacagatgggcttaaagaagcttttgcaaagtttggggaagtcatacatgctcgagttgtcacagatcgtgtcactggattctctaaggggtttggcttcgtaaggtatgctacagttgaggatgcagctaaaggaatagaaggaatggatggaaagtttctcgatggatgggttatttttgctgaatatgctagacccagaacaccaccgcagcaaccagaaatgaactcacagccacaacaatcatggggccctccatccagttcctggggtgcacagtagatgaagatacaatcttggggccctctatctggccgtggggctcacagcggatcgacaagttattgattctatattta

SEQ ID NO: 5648 - DNA, 513 bp, Oryza sativa
  Clone ID: uC-osflcyp144g11b1
cgcttcgcttcctcccctctctaagccggggaagctaagccatggcgtccgtcaccgcccgcaccccggtcgcagccctccgctcgtcggcgtcgctcaagtctaccttcctagggcaatcctccacccgcctcgcccgcgcaccgactacgaggcgtaatgttcgggcggaggccaagggagagtggctccccggcctcccttctcccacctacctcaacggcagcttgccaggcgataacgggttcgacccgttgggtctggcggaggacccggagaacctgcggtggttcgtgcaggcggagctggtgaacgggcggtgggcgatgctgggggtggccgggatgctgctgcctgaggtgctgacgaagatcgggttgatcgacgcgccgcagtggtacgacgccggcaaggccacctacttcgcgtcgtcgtcgacgctgttcgtcatcgagttcatcctgttccactacgtggagatccggcggtggcaggacatcaagaaccctggct

SEQ ID NO: 5649 - DNA, 387 bp, Oryza sativa
  unsure (1)..(387): unsure at all n locations
  Clone ID: uC-osflcyp144g12b1
tcggcaatttgtttcactgccacaggtagtgttgatgatcatacttggatagcaaatttgtgagagccttctgtggcgcttgacgacaccattcggattgttccatcacttccatacttagtgctggttgtgagattagcattagactacaatgtccaatccttcagtcttctgcacgtgtaccctaagttatatgggttctgttaaatgngcacagcttaccaangttgagggaacatccatagctatgaatttttgcacaacatgtgtagggttctgacggaactaagcatatacaagattgcgaaaactttcgaaaattttctcaactttaaatcttttgataaagtaaaaaaaaaaagaaagaaggctatagtcacacgagac

SEQ ID NO: 5650 - DNA, 248 bp, Oryza sativa
  Clone ID: uC-osflcyp144h03b1
ccctcgcgcgcgctcttgctcgccttgtcaacgagtgcgtcgccggtcccgacgctacgagagagttagcctcgccgttggtggaggatgccgtggcactctttgttcattctgtcgcgctcctagcagccaccggctttgtttccgacggctgcgacctcagctacaaggtcaacgagctcgctccggtctacgctaacaagggtcgtcccttgcacaatccaagagagacatatcggtactttgac

SEQ ID NO: 5651 - DNA, 424 bp, Oryza sativa
  Clone ID: uC-osflcyp144h04b1
gagtatttgtagtaaagaggaaaggggggagtgagtctcccgagcaacggctctccactactagcccacagctcccaagaatctctgccatttcttgagttggtcgatccatcggggagggagagaggtcgaggaggcggcggaaggggagaggatggggtctggatctttcctcaagctgctggccaacaacttcgacgtcctcgccgggccattagtttcacttgcttatccattatatgcctctgtgagagcaatagaaacaaaatctcctgttgatgatcagcaatggctcacttactgggtgctgtactcgtttatcactttgtttgagcttacttttgctccagtaattgaatggcttcctttttggtcctatgcaaagttgttcttcaactgctggttggtcttaccttgcttccat

SEQ ID NO: 5652 - DNA, 446 bp, Oryza sativa
  Clone ID: uC-osflcyp144h05b1
gtgctccctaaggatccaaagaaactggtgaaggcaaatcttgcaatcctgatgacgaacaaaccgttgttttggctggatcaaatcaatcagagacacaacctgagaagaaaagagatcttgtagcctcagatgtatcatcgtcatctcaatcattaacaacagtaactgaagctaatgccccaaacgaagtagcatctatggtgactgaggcaaatgattcttcctccaatgatgatgaaagagatgcaggagaggatgctcaagaacagatgtctagtggaggcgaaaatgagaaatcttcaccatctgaaagtgaaaagaatgattcaccaggtgccaaagagacggccagtaagctttttgctgctgctgctccattcaatccctccactgtttcagcttttgggtcaatggccattccaggtttcagagaacatggagga

SEQ ID NO: 5653 - DNA, 375 bp, Oryza sativa
  Clone ID: uC-osflcyp144h06b1
attatgagttcagatcgagccgagctcctctggccctgtcgggcggcggttatacgctgcaggctgctgccaccccggcacgcgcggtaggtcgttgcccgtacaaccaccaccactccgtcaccgtcagccatcgtgcgtgcagacacctcctctcgcgcgcgccgtcgatgtacctcccactccgatgacgcgccgtccgttcagccaccgtgtgcgccgtcgatgtacctccccctccgccaccgacagtcaccgtgcgcgccggcgatgtgccttcccctacgtggacgcgccgtgaggagcagccggcgtccggagctggacacgcgggcgccagaagtctgtagtcgttgacgcgcctccgggagctgc

SEQ ID NO: 5654 - DNA, 473 bp, Oryza sativa
  Clone ID: uC-osflcyp144h08b1
gtcgtcgtcgtcgtcgtctctctgcacgcgagaaaacgggagaggcggccggcgcggcgcgcggccactagtcatcccgccagggcgcgcgccatgtctctgcacgctcgcgtcgcgctcttcgccgccgcgctcgccgccgtcctcgccgtctccaccgccggcttcatctcaaatgaggcggtgggcgcgtcgtcggcggcgagcggcggcgcggggcggagcttgctgcaggcgaagaaggattgcccggtgaacttcgaggaggcgaactacacggtgatcacgagcaggtgcaaggggctcgatgtacccgccggccgctgtgctgccaggcgctcaaggacctggcgtgccccttcaccgcctacatcaacgacgcccagaccacctgcgccgccttcatgttcagctacatcaacctctacggcaggtacccgccgggcctttttgccaacacctgcaggagggcg

SEQ ID NO: 5655 - DNA, 333 bp, Oryza sativa
  Clone ID: uC-osflcyp144h09b1
tctaattattgatcccagcgttaccatgatgactgtggaggaaaaaccagatgtgacttacaatgatgttggtggatgcaaggagcactttgagaagatgcgtgaggtggttgagcttgctatgctttacccagaaaagtttgtcaaacttggtatcgatcctcctaagggagtactgtgttatggccctcctggaactgggaaaacacttcttgctagggcagtggccaaccgcacgggtgcttgctttattcgagtcataggaagtgagctcgttcagaagtatgttggtgagggggcccgcatgggtcgggaactttttcaaatggcacg

SEQ ID NO: 5656 - DNA, 514 bp, Oryza sativa
  Clone ID: uC-osflcyp144h11b1
tcgtttagcagcggcagaacgccgtcatgctgacggagggcgccggggccgcgatacgggtgcccgagtccaaggggaaggagaagatcgcggcggtcatcagggagatgatggtaggggaagggaggggcgcggcggtgcgtgctaaggtagctgagctacagaagatggcgacagatggcctccgagacggtggcgccgtcacgtcagcgcttgatgaggtggtggacaagtggacaggaggggagaagtaggtggcatattgacaaaatacacttggccatatatatgcacctccttgatggctgtacggtgtgtctacttctcttgtctcttttttatcatcgtgcactggattttcttgttaggtagtacgtgtggttcgcatgtatgtgaagagattagatttataatttgagtcccattaataaaaggggaccatgtgtttataaaaatgccttatggctaaaaaaaaaagaaaaaaaaagggccgcccgttttaaagatccaagtt

SEQ ID NO: 5657 - DNA, 495 bp, Oryza sativa
  unsure (1)..(495): unsure at all n locations
  Clone ID: uC-osflcyp144h12b1
cgcgatcgcacagccggagaccgaatcggataagctcgccggagtaatcgccgccgatgccaccgccgccgtcgtcgctcctcttggccgcggtcgttctcgcttcggcggcggcggcactcgctgaccctcctccccctccgtccccgacgccgtggccggagcggttccacgcggtgcttttcacgaacctgacccagacgagcggcggcgggaagctgcagatgaccgacctctactacgactggcctggggggcgcaacctcaacctcgtcgccggccagctctccggcgacccggtctacgacgtcgagtggaccaacggcacctcctactacttcgactccgcctcctgccgcaccttgctgttccccgtcggcatcctgccccccgactggctcgccgccggcgctcgctacctcngacgagaggccgttgacggcttcgactgccacgtctggaccaaggtcgacttcatctggtactacgaggacg

SEQ ID NO: 5658 - DNA, 513 bp, Oryza sativa
  Clone ID: uC-osflcyp151a05b1
attcataccaacgtacgaagaattttgagaggctggctttcctatatcttattactggttacatggacaaggtgggtttcatgtgcaaaattgctggacagaacaataacctgatgggtcaattccacaatgctctgtatcttggtgatgcgttgaagagagttgagatcctagagaatgctggacagctacctcttgcttatattactgctaccacccatgggctcacagaaattgctgataggcttgccgctgagctgggtgaaaatattccttctcttcctgaaggaaaagctcgctctcttttgatcccccctgctcctcttacagccagtggtgattggccattgcttagggtgatgcatggtatctttgagggtggactggatgcttctgggaaggctgaacttgaggaagacgatgaagctgctggtgctgactggggtgatgaggaccttgatatggtgatgcaagcgaagcgatggcaaaaggtggcgaccgttttgatgctga

SEQ ID NO: 5659 - DNA, 489 bp, Oryza sativa
  Clone ID: uC-osflcyp151a07b1
gatatcctcacccctctctttttctttctcttcctctctcactctctttctcttcctctctctctttctctcctttgcgtgtggccaacgaggaggcgccgagcagcgggcggtaggcggcgtcgagcagcgggcggcgggcggcggcggctcggcttcctcggctcggcgaccgacaacgacgacggccgcggtgggagcggcgacggcgggcagcgggagcggctacggcggctcggcggccgacaacgacgacggccgcggcgggggcgacggatccggcaccggtgacgacgatgggtggcgggggcgatggatccgccgccggcgaggacgctgggcggcgggggcgacggatccgtcgccgacgacgacggccgcggtgggagcagcgacggcgggcggcgggagcggctactgcggcggcgggctcgtagcggggtcacgacggcggcttggaacctcggctcggcggccgacaacgacgac

SEQ ID NO: 5660 - DNA, 518 bp, Oryza sativa
  Clone ID: uC-osflcyp151a08b1
cttatatcaaatgctgagctttcttctgctgatagtcgcaggatggtatctggtcccaacgggtataattctgcttcaactgcaagagaggaacctggctcgagaattcctgatcgctctggaagaatagcaccaaatacacagtttgctggaccatcgaacaggcctgccagccaagagggccgttcagggaataaattatactctgaggatgatttaagagagaaatctatttccgccatccgggaatattacagtgcaaaagatgagaaagaggttgctttgtgtattgaggagttgaatgctccaagtttctatccctctgtcgtatcactgtgggtaaatgattcttttgagaggaaagatatggaaagagagttgttgacaaagcttttcgttagtctttgcaacagtcgaaataatttattgagcaagtctcatctcactgcaggacttgcgactgtccttggttcattggaagatgctctaagtgatgctccaagagctgcagagtatct

SEQ ID NO: 5661 - DNA, 507 bp, Oryza sativa
  Clone ID: uC-osflcyp151a09b1
ttgcttaatcaagatgaagcggaccatcatcgtcaaagtggacttggaatgcgagcgctgctatgccaagatcgacagggtgctcaccaggatcagagacaagggtgagttcgtcatcgacgacatcgagttcgacgtgaagcacaacaaggtgatcgtgtcggggcccttcgacccggacaagctcgcagacaagctctgctgcaaggcgtgcaagatcatcaaggagatcgagatcgtcgacctcccgccgccgcctccgccgccggcgccggagccggagccggagccacccaagaaagaagagccccagccaccgcctcctaaggaggaggagaagcccgagccgccgccggcggtgattatcgtggagccaccggcgccggcgcccgagccggagcccgagccgccgaagaaagagccgccgtcgtcgtcgtctcccaagaggagccatgcccgccgccgccaaggtccgtgaggtccttaccctggccctaccctacccgt

SEQ ID NO: 5662 - DNA, 518 bp, Oryza sativa
  unsure (1)..(518): unsure at all n locations
  Clone ID: uC-osflcyp151b02b1
ccggtcacgaccaatgccgccgaccgccgccgtcgccgtcgccgtggccgcggccaccgcgctcccttctccctcctcctcctcctcccaccgccgcctccccgccaccgcaaaatccgtctgggtaaaccccagcctcccgagctcccagcccttccatcgccggaaacccgccgagccccagcaccagcgccaggaccacgtgcccgacctccccgcgctcctcgcggccctctccgccgcgcgcacggcctccgacctggccgccgcggtctccccgcaccgccccgtctccccgcgcctcctcggcacgctcctctcccgcctccccgacgcgcgccgcggcgtcgcgctcctcgacctcctcgcgccagacctccccgcctccgcgctcctcatcccgtacaacctcctgctccgctccgcgtgccgcgccgggatgctccgnctcgcctncggcctnctcctggagatgcgggacagaggggtcgcccccgacgcgttctcgtactccacgc

SEQ ID NO: 5663 - DNA, 534 bp, Oryza sativa
  Clone ID: uC-osflcyp151b08b1
tcgattagttggagcagggagaagcattaagatatcttcataggtggcttcagaatcaccccaaatatgggggtatcgcccctccacagccaactgattcaccttatggtcctgatgttattagattgtttaatgaggctgcccaaatgtcacctgaggatgctgatgtccatatagttctaggagtcttgtacaacctatcaagagaatatgataaagctatagctgctttcaagacagcgctgcagctgaaaccacaagactattctctctggaataagctaggtgcgacccaagcaaacagcatccagagtgctgatgcaatattggcctatcaacaggctctggacttaaagcccaattatgtgcgtgcatgggctaatatggggattagctatgccaaccagggattgtatgaagactctattcgatactatgtacgggcggttgctatgaatccaaagctgacaatgcctggcagtacttgcggattcttttagaacgcttacgagctgaatgaacgctgcatggatt

SEQ ID NO: 5664 - DNA, 450 bp, Oryza sativa
  Clone ID: uC-osflcyp151b11b1
tttgttttcctgcactctccttgctagtggtgtgactgtgaaggtggcggagcctgcatggaagggctgacgagcgagcagatggtggcgttccaggaggcgttcttgctcttcgacaagaacggcgatggatgcatcaccttggaagagctggctgcggtgactcgttctcttggccttgagccgaccgatcaggagctcaacgacatgatgagggaagttgatacagatggcaatgggatcatagattttcaggagttcctgagcctcattgccaggaagatgaaggatggggatggcgacgaagagctgaaagaagctttcgaggtcctagacaaggatcagaatggttttatctccccaactgagctgaggacagtgatgaccaatcttggggagaagatgacagacgaggaggttgagcagatgataagggaggcggattccgtt

SEQ ID NO: 5665 - DNA, 540 bp, Oryza sativa
  Clone ID: uC-osflcyp151c02b1
tgttgattcaagggaacatcaaaggcactgatatttaccgaaatcttcatcagtacaaggacgctcaaagagttcctgggttcttaatcctgacagttgaggctcctataaactttgcaaacaccaactacctaaatgaaaggattaaaagatggatagaagaagaaagttctgcaggaaccaaacaaagtgaactccatttcgtaattttggatctgtcagctgtccctgcaattgatacaagtggcatatcgttcctcatcgacttgaagaaatcaacagagaagcatggactagagcttatacttgtgaatccaactggagaggtcatggagaagatacaacgagcgaatgatgctcatggtcatttcaaatcagatagtctgtacttaaccactggggaagcagtggcttcactctctacattttccaagatgacagcgccttagagctgattctaaggctgtcattttcattattattctaactgcgctgctaagtttgcaatgcaagattttccaccctgttctcttaacaata

SEQ ID NO: 5666 - DNA, 458 bp, Oryza sativa
  Clone ID: uC-osflcyp151c04b1
gttcacctatgtcgctgtcctgctcgacaatgaggccatctatgacatctgccgccgctccctcgacattgagcgcccaacctacaccaacctcaacaggcttgtgtcccaggtcatctcctcactgactgcctccctgaggttcgatggtgctctgaatgtggatgtcaacgagttccagaccaacctggtgccctacccgaggatccacttcatgctttcctcctacgccccggtgatctcggccgagaaggcctaccacgagcagctctccgtggcggagatcaccaacagcgccttcgagccgtcctccatgatggccaagtgcgacccgcgccacggcaagtacatggcgtgctgcctgatgtaccgcggcgacgtggtccccaaggacgtgaacgccgcggtggccaccatcaagacgaagcgcaccatccagttcgtggactggtgcccca

SEQ ID NO: 5667 - DNA, 558 bp, Oryza sativa
  Clone ID: uC-osflcyp151c07b1
tcggcgaaggtaggctcaagcgttgattctgctcgtttagctagcccgcctctgacgctgcattatggagggagtaggcttgtagctagcccgcctctgcacgctatatttcaaggaatcagagatccatacagacagagacgttcagccatcagacctgcagaggcaatccatccatggcatctatcgttcctgtactcctgcgcctgctgctcctgctgctcccgcttcccctgatccgagaccacctctggccgagccaccgccggccaacgccgcaggacgatgcgggtgagctccacccgatcttcctggtgcccggggcgagctgcagcgacctggaggcgcggctcaccgaggcgtaccggccgtcgacggcgcactgcggcgcgatgaaggggaagggatggtttgggctgtgggagaacaacacggagctgctggtccacgactacgcggactgctcacttgagcagatgacccttgtctacgaccccggcgccaacaagtaccggaacctgccccgcgtcgagacccgggtgcccaacttcggttccg

SEQ ID NO: 5668 - DNA, 504 bp, Oryza sativa
  Clone ID: uC-osflcyp151c08b1
ttcgagttaccaaccttcctaagctttggaagacatggtctatcctcttcttttgcttgagccacacaaatccagtttcctcaacatagccacactccattatgtccttcaagggaagaaggccatttgggaggcctgcttccttgagcaagagccttgtgcattgttgacagatctcatcatcatagtagacctcggccttggccttgatttcatcagcaataacaagagccatcttctatgtatctcttctttttttcagctctgaggcagtttttggaggcttggctttgtatggtattatggctggcgttgttcatagtgaaacttggctacctttatataggaaatgccttgtcaaattgtgccttaacatgcataggattttccatcttgccattgtcaattaaggatggacaatatatcatgctcatataaaagctgtaggggcctctggctgagagtacttttgcaatgatgcaaaaatatcatcccataaactgt

SEQ ID NO: 5669 - DNA, 536 bp, Oryza sativa
  Clone ID: uC-osflcyp151c10b1
tggctgctccaaccccgaccgctccctcatcctcgccttccgcaccatcgccaacatggccgacaggttaggtcttgtggctacaatcaaggaccgagccaatgaaatatataagaaggtggaagatctcaagtctatcaggggaagaaatcaagatgccatattagctgcctgtttgtatattgcttgtagacaagaggatcggcctagaactgtaaaagaaatatgttcggtcgctaatggagcaacaaagaaagagataggccgagcaaaggaatttatcgtgaagcaactggaagttgaaatgggtcaatctatggagatgggaaccatccatgctggagatttcctgaggcgtttctgttcaactcttgggatgaacaatcaagctgttaaagcagcccaggaagcagttcagcgttcagaggaacttgatataaggaggagtcctattttcattgcggctgctgtcatttacatgataacccaactctcagatgataagaagcctctgaaagacatatccttggctactg

SEQ ID NO: 5670 - DNA, 486 bp, Oryza sativa
  Clone ID: uC-osflcyp151c11b1
tcgcttatgaaaacaatgatcatcagataatcagatgtgtacttgtaatcctgtatcctaacttcctaaggtatttaagaatgggctataaggggagacctttctgcagtaatggtaaaagagtggcactgagactctcttgcagtccaaattaaaatggtcattgagataccgagatcgatctgaactctgaagggtggtacaaatggtaaaaaaggagcttgtttgtgatatgcaaaatggactaatgatctcatagctatttggcatgttctcttccatctttttatgctgttctgcaggccaagtaaccctgttctcagtgcatacattgaatttgtaaatgaatctctttgctttatgatgtagtggcgctgttgcttacaaaatttcaacggaacaagataagcagacagctctggagcatttggagtaagagagaagcattatgatgagaagatttaccttgatttggatatggacttc

SEQ ID NO: 5671 - DNA, 537 bp, Oryza sativa
  Clone ID: uC-osflcyp151d01b1
gttcatgcaccttcccaggaagagattcactgatttcgctcttgtgaggaaggagatagctgatgaaactgacagagaaactggtcgttcaaagcaaatatcatcggtccctattcatttaagcatatattctccaaatgttgtgaacctgactcttatcgatcttcctgggcttactaaagttgctgttgagggtcagcctgacagtattgttcaggacattgaaaacatggttcgctcgttcatagaaaagcccaattgtatcattctggctgtttctccagccaatcaggatcttgcaacttctgatgcaattaagatttcacgggaagttgaccccaaaggtgaaaggacgtttggtgtgcttacaaaaattgatctaatggacaagggcaccgatgctgttgatatattggaaggcagatcataccggctccaacaacaatggattggtgtcgtcaatcgatctcagcaggatatcaacaagaatgtggacatgattgctgctaggcgcagagagcgtgaatatttttcact

SEQ ID NO: 5672 - DNA, 519 bp, Oryza sativa
  unsure (1)..(519): unsure at all n locations
  Clone ID: uC-osflcyp151d04b1
ctttagcacacccaagagagagtagtggtagttccagagcggtctgcttgcgaagttgcgatgcctgccatggccaagcccgcctcccgcgctgccaagcccgcgtcggcgccgaagaagcagaaggcaaagccctccgccgccgccggtggctcctcccacccgccttatttcgagatgatcaaggaggcgatcacggtgcttaaggagaggaccggctcgagcgcgcacgccatcgccaagtacatggaggagaagcacggggcgtcgctgccggccaactacaagaagatgctctccatccagctgcgcgggttcgcttccaagggcaagctcgtcaaggttaaggcctcctacaagctctccgacgctgccaaggactcgcccaaggccaagcctgccgtcctcgcccccaggcagcagcgccgaagccagcgaaggacgccgtcaaacccaagaaggacgccgtcggtgncaaacccaagaaggccccccccgctggcaccaagcgcaaggcgc

SEQ ID NO: 5673 - DNA, 495 bp, Oryza sativa
  Clone ID: uC-osflcyp151d05b1
aaaagagagtgaaattttgctattggtagattcctcccctgaccacggagcagcgaaccactcccaaaacgccaccaaaaccctcctctccccacctccgccgccgccgacatggccgtcgtccaccgcctcctccgccgcggcctctccgccgcctctcccctcccctctcttcaggagctcgggaggcgtccggcgagctcgtcggcggcggcggcgggggacgcggcggctgagctgcggggcgcgcgggaggacgtcaagcagctgctcaagtccacctcctgccatcccatcctggttcggttagggtggcatgatgctggtacttatgacaagaacattactgaatggccaaagtgtggtggtgccaatggtagcttgagattcgaaattgagttaaaacatgcggctaatgcaggtcttgtgaatgctttgaagctgatccagcccatcaaagacaagcatgcaggtgtcacttatgcagatctgttt

SEQ ID NO: 5674 - DNA, 476 bp, Oryza sativa
  Clone ID: uC-osflcyp151d06b1
gttaactcgataaacattaaacaagctgtgtgaacttcttttttcgtgacaagtttaattctttctcgatcgatcgtcgtgatggctgacgagagcggcggctacaacaggtccagctccggcggcgccgacgagtacggccgccggccgggaggcggtgccggtggctacaacaagcccggtggcaccgacgactacgacagcggctacaacaagtccgccggcggcgacgacgacgactacggccgcaccggcggcggcgggtacaacaagtccggcaccgacgacgactacgacagcggctacaacaacaggtcaggggctaacgagaagtacggccgcaacaagtccggcgacgacgagtacagcggcggcggcggcgccgaagccgacgaggagtacgtcgacgggttgtcgtcccgggacgaccccgagaagtacaggaaggaggagaaggagcacatgaacaaggagcg

SEQ ID NO: 5675 - DNA, 431 bp, Oryza sativa
  Clone ID: uC-osflcyp151d12b1
tcggtcagccacacctctctccatcctctcgttctctctctgtctcctcttctctctcccccgacggagaggagagaaggcgaggagccgggggagatgggatcggactcgccgcccaagaaatggggcctcagggagcagcgcgaagcctacctccgggggttctccctcgccgacgacgatggagatgggcgcgtgacggggaaagacgcgctcaagttcttcgccatgtcgaatctctcccgccccgagctgaagcaggtctgggcaatcgctgattccaagcgtgagggttatctcggattctcggagtatatgaccgcagtgcagctggttactcttgcacaagctgggaatgagattagtcaggacacccttgcacatgcagatttggagacgctgctacctccgacaatggaaggtctggacac

SEQ ID NO: 5676 - DNA, 529 bp, Oryza sativa
  Clone ID: uC-osflcyp151e02b1
tttggctatgattattggtatcaacctcgtcacaagacaatgatcagttcatcatggggagcacctgcagctttcaggactggttttgatcttcagcatgtgcaggatggtctctatggaagacatctgcacgtgtatgactggcctggtggtgagctcaagcagacactagatttaggcagtacaggtcttcttccacttgaggtgaggtttttacatgatccatcaaaggatactgggtatgtgggctgtgctctgacaagcaacatggtcagatttttcaagactgcagatggatcatggagccatgaggttgctatatctataaaaccattgaaagtgcgcaactggattctgcctgaaatgccaggactgataactgattttgttatctcctctggatgatcgctatctctacttggtcaactggctacatggtgatatcaggcagtacaacatccacgaccctgcgaagcctgtgttggctggacaagtatgggcaggaggcctttttcaaaagggcagtgag

SEQ ID NO: 5677 - DNA, 492 bp, Oryza sativa
  Clone ID: uC-osflcyp151e05b1
gattaatactgatcccaacagttctttgtcttctccctccttgctccaaatggccggcaccggcttacgattccggcagggcgccatcttcttctcaggagctcatgctgctgctcatccaagaacaaggactcctcaccaccattgctcacctcagaggacgcacgatgcgagaggaaggtgccgcctcacggctaagtccgcaaatggacgcccacagatcagtgcctccttcagagatgtggcgatagatggggcacagtctgaagatggggcgccagagcagggaggatccaccgtcagcatcaccgtcgtcggcgcctccggcgatctcgccaagaagaagatctttcccgcgcttttcgccctgtactacgaggactgccttccggagcattttacagtttttggttatgctcgtagcaagatgagcgatgaagagctcaggaacatgattagcttgactctgacatgccggattgatcagaggga

SEQ ID NO: 5678 - DNA, 465 bp, Oryza sativa
  Clone ID: uC-osflcyp151e06b1
cgacttttgtaagattaaggggggaggaattggagggcagaggccgtcattttaatcagtggaaataaaatccacgcattttatatatttaatttaacccccaattttaacttagcagcacactagctagctagctgctaagttaactatttgatcaggttacagttgctggcctgacagttaattaatctcttgctggatgattagttgctatcagctacacgctctcgctagctggcactgtactaatacatactcccatctattcgcctgagaaaatatcgaaaagtagcagcaaagaggagcaggcaagatggtgatgaaccctgacgccgtccgcaatgtcgttggaatcatcggtaacttgatatcgttcgggttgttcttgtcgccattgccgacggtcgtgacgatcgtgaagaagaaagacgtggaggagttcgtgccggatccgtacttggtgac

SEQ ID NO: 5679 - DNA, 471 bp, Oryza sativa
  unsure (1)..(471): unsure at all n locations
  Clone ID: uC-osflcyp151e08b1
tcggtcagctccagccacacgagcctagttcaggtagatacaatggcgtccaccgcctctttcatgctcgccgtcttgctggcggtggccgtcgcggcggcgccggcgagggcggtgcgatgcccgccgagcgacaagcaggcgctgatgagagtgaagcagtcgctgggaaacccggcgacgctgtcgacgtggtccctggcgtcggcggactgctgcgagtgggaccacgtccggtgcgacgaggccgggcgcgtgaacaacgtcttcatcgacggcgccaacgacgtccgcggccagatcccgtccgccgtggcggggctgacggcgctcatgtcgctgtcgctgttccgcctcccgggcctctccggccccatcccggcgtgcctcaccgngctctgcaaccttcagttcctcaccatctcccacaccaaacgtttccggcgtaatcccggactcgcttgcgcggat

SEQ ID NO: 5680 - DNA, 468 bp, Oryza sativa
  Clone ID: uC-osflcyp151e09b1
tcgtttgattctatcaggagggatgtgctagcgaattcttgttagcaacaaatggacatattgctcggcacatccccaccgagaataccaagatgacgttctctggtacacaggacaagtgcaatgcttgtgacaagaccgggcatttcattgatctccttaccgcggacagtatttcctaccacaagtcttgcttcagatgcagccactgcaaaggcacactttcgatgtgcagctattcgtccatggatggggttctttactgcaagacccattttgagcagctattcaaggaaacaggcaccttgaagaagaacttaccctcaggtacaaaggcacacagtgaacaggctaagattcccagcaagctgtcctctgtgttctggggaacccaagacatgtgtactgtctgcaagaagactgtgtatccattggagaagatgaccatggagggtgagtgttaccaca

SEQ ID NO: 5681 - DNA, 536 bp, Oryza sativa
  Clone ID: uC-osflcyp151e10b1
tcgctcaatgattgatgaagatgatgggactgtttctccaaaaagaactattgaagaatcagtggataagtccactcatgctgatgcgattaagactgctttgatggaagctgtttcaagtggaaaattatcagcaagagaacatttggaatcctgtagtaatgaagaagaagaagaagaagaagaagaagaagaagaagtggccatcaaacaaggcacagatttcgaagagcaacggaaggctcactatgatgaattccgcaagatgaaggaactgcgtcggaggggaacgccgtcacaagagggtgatgaatgatgactctggcaccgtcgcacaactcggaagcatatgatcagcgaatcctcggcatgttaaatattggcagtggcaggaatgttttacagatatcctactaaaccttaaaaagctcatgtgactatctgttctcttgcttaattattagtactggtcctaggacagtaccaggtaaaaattttggctcttattatggaggtaaagaaaatcttgatcgatc

SEQ ID NO: 5682 - DNA, 416 bp, Oryza sativa
  unsure (1)..(416): unsure at all n locations
  Clone ID: uC-osflcyp151f01b1
cttctcacgacattctcgcgctctcccctcctgtgaagatcggtggttgcgagcggcgtcacggtaaagcggagcaaattactcctatatattaccctgcagcgtagaccgatcgatcgggcggcggcggcggcgtatggctgggagcgcgaggtcggcggcagcgaagcacgcctaccggatgttcgcgccgtccaggggcgcagcggcgaggtgccccggaagccccggggcggacgagttcgacgagtcggacgtgtggggctcgtacggcgcggccggcgtggagtccagccccgccgagctaggcgcccggggccgcgcgatcccgttcgcccgcgccggccggaaggccccgctggatcgggccgccggctcgctgncggtgaacataccggactggcagaagattcttg

SEQ ID NO: 5683 - DNA, 340 bp, Oryza sativa
  Clone ID: uC-osflcyp151f02b1
gatctttttgcgaccacattcgcgactgggttcggggcactcctgagggaacattggtctccatgggtgtgtactctgatggctcgaatcgcgtgcctgctggcctgagctactcgctcccagtaacatgcagtggtggcgaatggaccattgttcacggtttcccgatctaccaggtgttaaggaagaagattgacgcgactgcccagctgctgtcggaggagaagacgctcgcttacttatgcctcaactaaaactaagcaattcccacagggacacgatagtgagcgattgcccgctcccgtgtttttgaataaaagagactttttagtttcatctt

SEQ ID NO: 5684 - DNA, 489 bp, Oryza sativa
  Clone ID: uC-osflcyp151f06b1
gtttcagtggtgttgaaagctcaaggtggtcaacttataattcccgttgctctgctgcatgttgctgcctttgcacttgggtattggttatcaaaagtttcctcttttggggaatcaacttctaggactatctctattgaatgcgggatgcagagttctgcacttggatttttacttgcccaaaagcacttcacgaatccactcgtagctgttccatctgctgtcagtgttgtatgcatggcgcttggagggagtgctcttgcagttttttggaggaacagagggcttccagcaaatgacaaagacgatttcaaggaatgaaacaccaacaccctccagtttctagtcattacctagcgttgttttttagttcagtggagttatcacagcattttttttgttacccatattttagcaagttgattatcagtaggacttgcctacttggtaggtctgttgaattgcactcttatcttcaaataagctgca

SEQ ID NO: 5685 - DNA, 474 bp, Oryza sativa
  Clone ID: uC-osflcyp151f07b1
ttgattccactcttccgcttctcctcccaatctggccgcccaagaaaaacactgaaccttcgccttcctctctcgtccgatcgacctttgcatggcagcagtagctagctccaaggggcgggtgatcgctggaagcttcgttgcccgcgtcctggccggcaaggccgactccccgaggagatttgtgagcgcttcagcctacgacaagaacgtggaagagcaggtgcgcccggcggtggtgccggacgatgtgatcggcagcgtctggagccctgacaagtactggggccctcacccgaccaccggcgtgttcgggccagcggcggtggacgccaaggcggcggtggtcgatggcgcggtcaatgcccgcgccaaaggtggcgccttcgtgctccaccaaaaggtttggtttcgccccctcgaggaccgtgagaagcctcccgtcgcctgatcgacaggcctaatacgagcctt

SEQ ID NO: 5686 - DNA, 538 bp, Oryza sativa
  Clone ID: uC-osflcyp151f09b1
tcggttaatggcggtgcagctgcaagtgagacatacagtcaagcgagcagtggtccaagggatattcatgttgttgaaactggaaatatggtaatttcaattcaagtcctccgcaatgtgaccaacaacttcagtgatgagaatgtccttggccgtggtggctttggcactgtgtacaagggtgagcttcatgatggcacaaaaattgctgtgaagcgaatggaggctggtgtgatgggtaacaaggggctaaatgagtttaaatcagagattgctgtgctgaccaaggttcgccatcggaacctggtgtcactgcttggctactgtctcgatggcaatgagaggattctagtgtatgagtacatgccacaggggacactgagtcaacacctgtttgagtggaaagaacacaatctgcggccgttggaatggaagaagagacttagcattgcgcttgatgttgcaaggggtgttgagtatcttcacagccttgctcagcagacctttatccacagagacttgaaacccatcaacatac

SEQ ID NO: 5687 - DNA, 255 bp, Oryza sativa
  Clone ID: uC-osflcyp151f10b1
tctttctttgtttcttcttccccctttcgccttccccctctttcctgattccccacctcctccctcgccgccgccgccgccgctgactcccaccgcgaccgcctcccccgccggcgcggtttcggaggaggcccggcgcctgcaggaggaggagggagggagggaaggagggtcttgcccgtctcctccgccgctgcctcgagcggatcccgacgccggccgtactgttcatagctcgcccacgccttgcagcgc

SEQ ID NO: 5688 - DNA, 545 bp, Oryza sativa
  Clone ID: uC-osflcyp151f11b1
tcggtggagacgagcgacctgagagagagagagagagaaggcaagggaaggaggagaagaagggggacgaagcggacgaggcgcgcgcgcgccatctttgctttgcttcctctctcttccctctcctctcctctcctccggtcgtcggcctccccggccggccggcgcctgcccgtgcttgaggcgcggcggcggatacggggggtgacgacatggccgacgggggagagaagtgccgggacgcggccggcgagggcggcggcggcggcgacctgtacgccgtgctcgggctcaagaaggagtgctccgacgccgacctcaagctcgcgtaccggaagctcgccatgagatggcatccggacaaatgctcatcctccagcagtgcaaagcacatggaggaagccaaggagaagttccaggagatccagggcgcctattccgtcctctcagactcaaacaagcggtttctctacgacgtgggggtatatgatgatgacgacaatgacgatgacaacctgcaggggatgggggacttcattggtgag

SEQ ID NO: 5689 - DNA, 477 bp, Oryza sativa
  Clone ID: uC-osflcyp151f12b1
tcgaatgatcaagagtggtaggctctctcacccatacaaaggtattgcggactgctttggccgcacaattaaggatgaaggtgtgattgcactgtggagagggaacactgctaatgtcatccgttactttcctacccaggccttgaactttgccttcaaagaccatttcaagcgcatgttcaactttaagaaggacaaggatggttactggaagtggtttgctggaaacctggcttctggaggagctgctggtgcttgctctctcttctttgtgtattctctggattatgctcgtactcgtctggctaatgatgccaaggctgcaaagaagggtggtgggaggcaattcaatggacttgttgatgtttaccgcaagacccttgcgtctgatggtattgctggtctgtaccgtggattcaacatcttctgtgttggtatcattgtctatcgtgggctgtactttggaatgtatgattc

SEQ ID NO: 5690 - DNA, 299 bp, Oryza sativa
  Clone ID: uC-osflcyp151g01b1
gtttgcatcaacacaaaaccctagactcgcacaggtcgagacgagagaggctagcagcaacattcttccacaatggctagccttgcaatcttcgccgctgtagccttcggtcttctcgccgcctcagtgtcgtcgccgtcggcggctttgaacaccgtcggtgattcaagggggtgggcagtgccgcccacaggctcagagtcgaacaaccattggggtgtaaagaatagtttacgcgtatgccacgttgtggagttcaagtacgcgaaccaaccggtggtggtggtgaaccacgaggg

SEQ ID NO: 5691 - DNA, 551 bp, Oryza sativa
  Clone ID: uC-osflcyp151g02b1
tttatattttggtgttaaggattataaattgacttactacaccccggagtacgaaaccaaggacactgatatcttggcagcattccgagtaactcctcagccgggggttccgcccgaagaagcaggggctgcagtagctgccgaatcttctactggtacatggacaactgtttggactgatggacttaccagtcttgatcgttacaaaggccgatgctatcacatcgagcccgttgttggggaggataatcaatatatcgcttatgtagcttatccattagacctatttgaagagggttctgttactaacatgtttacttccattgtgggtaacgtatttggttttcaagccctacgcgctctacgtctggaggatctgcgaatttcccctacttatttaaaaactttccaaggtccgccttatggtattcaaggttgaagggataagttgaacaaatacgggtcgcctttaatgggaagtactattaaaccaaattgggatatttgaaaaaatatggtagagcatgtatgagtgtctagcggtggacttg

SEQ ID NO: 5692 - DNA, 450 bp, Oryza sativa
  Clone ID: uC-osflcyp151g03b1
cgttaacccttgtactgcgccgccgcctgctgcactgacctccccgccgtcgtcgcgagccccgcggcttccggctgccgtcgccgcgagccccgtggcttccggctgccgcctcccccagcagtaacctccccgagcgccgaggcttgcggtgctcgcggcgccgccgtcgccccgagcgacagccccccgcgcgcctggtctgctcgcggtcacttagtcgtggaggagcgcgatgcgagggcaaacaggccgtggatactcgcgtcgccgccgtcgacgccgtggccggccccgcgcgcggcaaggagcggtgcatcgctgctgccgggcctatcggcggttggtagagcgctggtggtgggctatcggtgctgccaaatcgccgccgtcgacgccgtcgccggccccgcgcggcaaggagcggtgcatcactgctagcggatctat

SEQ ID NO: 5693 - DNA, 364 bp, Oryza sativa
  Clone ID: uC-osflcyp151g04b1
gtatggtgcatcccttctgcgctcatagctggttcttgcctggcttttacatctgctgcgctggacgttggcggcaacactaccagagtggacaatggcaaagagtactatccctacacagtcgagaataagcccgctcattgactgaagttctgtacgtgtagcccaagtcctgcaaaaccgtcagctcggtgaattttgaagctgatgcttactttcatgtctgttttgttgatgtactagctcctttgcaaatccttggcattgttgtgctcgagagagacctatacaacagtctcggaataaatatttttgcttgctttatcgtgatcatcgatcacaataaacgccttcacgatgcttg

SEQ ID NO: 5694 - DNA, 545 bp, Oryza sativa
  Clone ID: uC-osflcyp151g05b1
ggttctgctgaggactgaggtaggggaaagaagagaagagaagcaagcaacaccaacagcaacacgcaaggagtggaggactcttcaaggtctggagagtggagaggaagaggaatcctcctcagtcctcaccttcagatttcagaacacaggcaatcggccctagctgcaatccaacaagatgggcatgcctctgctgctgctgctgctgatcctcgtcgctgctggcccccaggcaggcagagctgcaaagccaatcccaaatctccagctcatgaccaaggagggcggcagttcaagaatcatccaggacgacatcataaaggcaatcaacaagcatcccaatgctggctggacggctgcacggaatccatactttgcaaactatactactgcgcaattcaaacatatccttggagtgaagccaacaccgcatagtgtgctaaatgatgtccctgtcaaaacttatccaagatcgctgatgctttcaaaggagtttgatgccaggtcttgatggtcacagtgtaacacaattgggaccatac

SEQ ID NO: 5695 - DNA, 499 bp, Oryza sativa
  Clone ID: uC-osflcyp151g07b1
gtctgctcgccatcgccattcccctcgctgccctcctcctcccgacaagcgccggcatgctccagccttcgattgcccagaccaagaaacgggaggatggtgggggtgcggaggatgtgaaaggcgcaagatgttgctgctctcatgggagctcagatggctggatacatcgacggcacaaaggaggagccgccgggcaccatcatcaccaagaaggacgacaaggatgtgcgggtcaccaatcccgcgcataccgagtgggtggcgcaagagcagcaggttctcagctacctgttgctctccctctcacgtgatgtcctcatccaggtggtctcaattcccactgctgttggggtttgggatgccataagtgggatggttgcatctcactcccgtgcgcgtgtgaggaacacacgcatggctttgacggccacgaagaagggcaatctgaaagctgccgagtacgtggccaagatgcggggtcttgctgatgacatgg

SEQ ID NO: 5696 - DNA, 462 bp, Oryza sativa
  Clone ID: uC-osflcyp151g08b1
tcgaacaaaggagagggagctcaagtgggcacatgctcagaggaccctccatggactgcagccgcctgatgccaagatgttctcggagaaggctggctacaatgagctcaatcagatggctgaagaggcgaagaggagggcggagattgccaggcttagggagctccatacgctcaaggggcatgtagaatcggttgtgaagctcaaaggcctcgacattgagaccatccagcagtcttacaccgtgtgatccagcctgtccataaagaaagaaaaaagaggattattttttttccagattttcctgtttcgctttaacttgactgcaattctgcaatcacctacgtgtacttgaaccgaattgctgtaatctttgtcccttctgctccagctttctactacatggtagtgttatataatttttggtcacctgaaaatatataagtgtttgaggtgaagcac

SEQ ID NO: 5697 - DNA, 517 bp, Oryza sativa
  Clone ID: uC-osflcyp151g09b1
tcggatagttttcatagcccctattactactttccttgttcggctagtcagcgtgcattacagtagaaaggcgacctctgttctgtttggaatgtggctatctttatggccattcttgtttgagaagatcaacaagaccaatgtggttttctctggtgaaagtgtacttccaaaaaagcgtgtcttgttatttgccaaccacaggactgaggttgactggatgtatttgtgggatcttgcattgaggaaaggctatttaggatatatcaagtacatccttaagagcagcttgatgaaattgcctgtttttagctgggcatttcacatttttgagtttatcccagtagaacggaaatgggagattgatgaagcaattatccagaacaaactgtcagcatttaaggaccccagagaccccctctggttggccgttttccctgagggcactgattatactgagaagaaatgcatcaagagtcaagaatatgcttcggagcatggtctgcctatacttaaa

SEQ ID NO: 5698 - DNA, 560 bp, Oryza sativa
  Clone ID: uC-osflcyp151g10b1
tcgggcgccggctgcgagcggctggttgcggccgtccgcgaccgcgcggctctgcgaggcggggttcttcaccgattacgccaaccccgccactacgcggatctgcatcggccggaggcggagcggtgcgccgagaaacattgcagggcttcaagttgcatcatccaatttgggccgatgcaaaattgctcatgttaaaagtggagatgctgatggttacccaacgactgaagatttgtcaattgacgaggaaaccctgcagcgtaatttacagacagccatccaggaagaagattattcccgggctgcaaagataagggatgatctgcgcatcctccatgaagataccaaagcttccctccttgcagcaaacacacggttttacaatgctttcaagaatggcgatcttgcagcgatgtactctttatgggctaagggtgaccatgtatatgttatccatcctgctgcgggtcggatatcaggttatgacgtggtcatgcaaagctgggagatggtatgtggcgcagattatgagtttccactaaacattgatctgaaaa

SEQ ID NO: 5699 - DNA, 405 bp, Oryza sativa
  Clone ID: uC-osflcyp151g11b1
ttgcgcgaatctttcatcaagacgaaggcagctaaggagcacctgattgctggatgggcaccaaaagtgaatgcgtaagagcctgcccttatgctctggtgctgcttggacaccatgctgtttatctgatcggtccatgtcagtggtgggcactactactactcttgtgtagcttgggtgcatgattgggttggaataatgtagcctcatccgttgagtaccttgatatggttgttgcaagtgtgcactttttctatgaactatctcctgctggcttaagtcgaaaccgtgggtcggtttggccttatgttcaactaagagagtgcatatactgtaatggaacctttgctagtacaatatgttatatgaataatggagatgcagcctgcagctgctcttgcttgg

SEQ ID NO: 5700 - DNA, 500 bp, Oryza sativa
  Clone ID: uC-osflcyp151g12b1
gtttcccaggccgacgccgccctcaaggccgggaaatggcaaagaaccaagtacgttggagtttctctggttgggaagacacttgcggtcatgggctttggcaaggttggttcagaggtagccaggcgggcgaaagggctcggtatgcatgtgattgctcatgatccgtacgcccctgccgatagggctcgtgccattggagctgaactggtctctttcgatgaggccattggcagagccgacttcatctcccttcacatgcctctcaccccagcaacatccaaggtcttcaacgacgaatcctttgctaagatgaagaatggagttcggatcatcaatgtggccaggggtggagtgatcgacgaagatgctcttgtcagagcccttgactctggcaaagttgctcaggcagcccttgatgtcttcactgaggagcccccagccaaggacagcaagctagtcctccatgagaatgttactggtacaccccatcttggagc

SEQ ID NO: 5701 - DNA, 424 bp, Oryza sativa
  Clone ID: uC-osflcyp151h01b1
gtttttgtctgggccggcatccatgcgatcccaagaaaggtatggctggacccgagcgggaagcagcttctgcagtggccaatcgaggagctggagacgctcaggggcaaatcggtcagcgtctttgacaaggcggagaagcccggggaacatttacaagtcacgggcctcggaacctaccaagctgacgtggaggtgagcttggaggtgtccggtctggaaaaggccgaggcgttggacccggcgctcggtaacgacgccgagaggctgtgcggctcgaacggctcggacctgaggggcggggtggtgtacaggcttggggagctggtctccgcccgcctggaggagaaaaccgacgtcttcttacgcgtctgtaaaccagacgggcacggtgccaagcccgtcgtacttatgtgcaccgacc

SEQ ID NO: 5702 - DNA, 463 bp, Oryza sativa
  unsure (1)..(463): unsure at all n locations
  Clone ID: uC-osflcyp151h02b1
gttattgtcaacaaataatcggctatcaaattgagctcgttgtctccgaaccccacgccatggccggcggcggcgacggcgacggcgaccgcgaccgcggctcgcccgaggcggagctccggcgcgggttcaagacgctcgccgtgacgcggcccgacccgtccgccgcggtctacgaggtccgcctcaaccgccccgcccggctcaacgccctcagcccggacgccttcgcggagatcccgcgcgccatggcgctcctcgaccgcgccccctccgcgcgcgccgtcgtgctctccgccgccggcccgcacttctgcgccggcatcgagctcggctcccccgggagccccgccacggtcccctccggcgaccccgcgcccgcggccgaggggctccgncgcgccatcctgaagatgcaagcggccctcacggccatcgagcggtgccggaagccggtggtcgc

SEQ ID NO: 5703 - DNA, 482 bp, Oryza sativa
  Clone ID: uC-osflcyp151h07b1
tctctttccattggtgttcttttaatcggtgagaaagcaagtgctccaagaattgcaaaggggagaggagagatgagagagtgaagaacaactacataactaaagcatctctctctctctcctctctctctctctagaacacaagaacaatttagcgattactagctagtgttcatcaaaactgaacttggacaagaaatttacctaaagttagtattccacgatgagctttcttgagcaggcaaccgagcggaaggcaccaccgccggcgaggctcggctccatcaccaagctgacggcggcatcgtcgttcttcgccaacctattctccaccttcctcgggccagtgagctcccccgagccgaggccgaggcgcagcttcgacggcggcgccaccggcgtcgggcttggcatcgtcgcggccatgagccacgcctgcctgacgaccgaggccgagccgatcgccatcggctgcgcggctc

SEQ ID NO: 5704 - DNA, 440 bp, Oryza sativa
  Clone ID: uC-osflcyp151h08b1
tctgctaggcgggcggaatcgcggaagcagggggatcccgcagccgaatcgggccggatctcgccggcgatgatgccgtcggcgtcggacgccgcggcggttttttattttttttgttctttttatttttgctttttaatttctattattatcttattctttttctttttttttttttattcatttttctttttcttattttttttttttttttctattttttcatacttatattttttttttatataaatattttttgtttcttttttattctctttctttatatttatatatttctcctattcttttctaatttgtttttttgttatttttttcattttcttttcttatattcagtttttttatacttattatctcttctaattattctttttatcgtactatttttttttattttttttcctctacttctctttttt

SEQ ID NO: 5705 - DNA, 525 bp, Oryza sativa
  Clone ID: uC-osflcyp151h12b1
tcgctttagcttaaaaagcgagccctaccatttcctctctctcttcttgtcatcctcctcatctcttcttcctccctcgtctcaccaacagcgaggtgactgagagaagctagcttgggagaataatccatggcaggcaagatgtctacaattgtgatgatggcggatcttgaatgtgacagatgctacaggaagatcagaagggtcctctgcaagctccaagataaggcgagcatcaaggccatctcgtacgacgagaagaacaacacggtgacggtggcggggccgttcgacgccgacgaggtctcggacaggctctgctccagcgccggcaaggtcatcaccgacattcgcgtcgtcggtggtgccaaacccatgccaggcggcggcggcggtggcgccaaggcgcacgccaacaagcccgccgtgaaggaccgcagcgcaggctgcggcggctgcggcggcggaggaaagccggagatgatcaagaagcacgtcaagttcgagatggcggacgacatggac

SEQ ID NO: 5706 - DNA, 543 bp, Oryza sativa
  unsure (1)..(543): unsure at all n locations
  Clone ID: uC-osflcyp152a03b1
tttacgtgtccgggattggttggggaccaccncgcccgccgggagggggcggggtttctttaacttcctcctctcttcctaccacgagnnnagngaatttgggactgatggtggaccagcagcaaaggccttgaagccaaaattcaatctatttacgcagcaagtgtccaagagcttaggaatggcagtgccacatattgatataaagactgtcattgctgctaccatgtttcttaaaggctttggtggtcttctgttcatcatcagcagctcatttggagcattcctactgctcctgtacttagcagttataacacctgttgtgtacgacttctacaactatgaaatggagtcttcacaatttgctcagcttttcgtcaagttctcacagaatttggcactttttggtgccctgctttttttcttgggaatgaagaactctattcctagaagacattccaagaggagggccgggaagaccaagacaaactgaaaccagccactgtagtaggggaagctatttgcgctccttatggttgcata

SEQ ID NO: 5707 - DNA, 468 bp, Oryza sativa
  unsure (1)..(468): unsure at all n locations
  Clone ID: uC-osflcyp152a06b1
caacagcccncccccaccagggggggtccttttaatgcctcgtgccgttcctcccccgcctccacctncatntccaccaaatccaggtgctcctccaagctaccagccccatgcaccaaatccgcaagcaggctatacaaactatcagggtggtgggcctggttaccaaggtagagcccctggctatcaaggtggcaaccaggaataccgaggtccacccccacccccaccctctgcttaccagggcaacaaccctggataccagggaggaggcgccaggtaccatggtggcaacccacctccttatcaagccggcaacccacctccttatcaagccggcaaccctgcctttgctggtggcgcaccaggctaccaaggccaaggaggcaaccctagttaccaagcaggcagcgataactacaatgccggtgcgccggcctataagagggatgagccagggaggaatta

SEQ ID NO: 5708 - DNA, 503 bp, Oryza sativa
  Clone ID: uC-osflcyp152a07b1
tcactcccaccctacctctcctccgccacccggcgcgggtcggttataagctcggagccagtgcgccccggcggccggagcccggagggacaacgcaacgatctctctctagctagatcgagctagagctatagcttagctcagctaattataatatatagctaggaattgattaacaattaatggggaagcgcagcgcgccccggtaccccgacgacggcggcggcggcggcggcgggatttgctgcgtgctgtgctggtgctgctgcttcctgttcctgatcgtcgcggcgctcgccggcgcggcggcgtacgccctgttcctgtacaagcccaaggcgccgtcctactcggtgagcaacatgtcggtgtcgcagttcgacttcaactccaacgacctgacgctctacaccaagctggtggccaccgtgcgggccgagaaccccaacgagatgaacggcatcatctacggcgacggcttccggacggttcgctcctaccgc

SEQ ID NO: 5709 - DNA, 554 bp, Oryza sativa
  unsure (1)..(554): unsure at all n locations
  Clone ID: uC-osflcyp152a08b1
ttacatangcttcttgccttcaacagttgctaaaagtagtgatgtttgaaaggaaagacaattaaaataggccctcatttctccgcagcttgctgattgggaagaatatattgattgtagatgataataaagtcaatctcagggttgctgcagctgcgctcaagaaatatggtgccaaagttcattgtgttgaaagcggcaaagatgcagtctccttacttcaacaaccacactgctttgatgcatgctttatggatgttcagatgccagagatggatgggtttgaggcaactagacaaataaggcaaatggaggtaaaagcaaacgaggaaaggaaggcgttggatttaatggagggttcaacattcgtcgagtcccatttgcctgttctggcaatgaccgcggatgtcattcaggcgacatatgaagaatgtataaaatcgggaatggatggttatgtgtccaaacctttcgacgaggagcagttataccaagctgtctccagattagtggtgggaacgaaggaatcagcggtatgatgatgggctggctag

SEQ ID NO: 5710 - DNA, 510 bp, Oryza sativa
  Clone ID: uC-osflcyp152a09b1
ttggatgcgtgggctagctccggccaccaactttgacgcgttcttctcctccgcatcccccatcccctcctccccggcggcggcggcggcgcggaggcggcggcacgggagcggctagtggtttcgtcggcggaggcggaggcggggccaagatgttcgggcgcgcgccgaagaagagcgacaacaccaagtactacgagatcctgggggtccccaagaccgcctcccaggacgacctcaagaaggcgtaccgcaaggccgccatcaagaaccaccccgacaagggcggcgaccccgagaagttcaaggagcttgcacaagcttatgaggtattgagtgacccggagaaacgtgaaatctatgaccaatatggtgaagatgccctcaaggaaggaatgggtggaggcggatcccatgttgatccatttgacatcttttcatcattctttggaccttcttttggtggtggtggcagcagcaggggcagaaggcaaaggaggggagaggatg

SEQ ID NO: 5711 - DNA, 491 bp, Oryza sativa
  Clone ID: uC-osflcyp152a10b1
tgccgtagtcaacccaaagcgccatggcggacgaccacgccgccttcgacgacctcgtcgacggcggacgccccgagggcgatacgcattcacgtgaagacggattatcaaaaccaagagataaagatagagaaagagaaaaagacaaggacagggaacgccacagggaccgtgacagagatcgaggaagagaccgagatcgggacaaggacaaggaaaaagacagagacaaagaaagggacagggatagggacagggacaaggatcgggatcgccaccataggcatcaccgtgaaagaagagaacacagagatcgctctgatgatcatgatcgccacagaagccgtgattctgaaaggagaagagaccatgaacgggatgggcgtcgcaagcatcggtctcgctcacgctctcgttctaggggcagggatcgcagatctaggtctcgctctcgttcaaaaagcaagcgagttagtggatttgatatggcg

SEQ ID NO: 5712 - DNA, 534 bp, Oryza sativa
  unsure (1)..(534): unsure at all n locations
  Clone ID: uC-osflcyp152a11b1
ngccttgaatacttaactcatgagnngnagggagggacgnatgttaccttaaacagaaactaacgtaagtgtccgatttaaagctggtgttaaggattataaattgacttactacaccccggagtacgaaaccaaggacactgatatcttggcagcattccgagtaactcctcagccgggggttccgcccgaagaagcaggggctgcagtagctgccgaatcttctactggtacatggacaactgtttggactgatggacttaccagtcttgatcgttacaaaggccgatgctatcacatcgagcccgttgttggggaggataatcaatatatcgcttatgtagcttatccattagacctatttgaagagggttctgttactaacatgtttacttccattgtgggtaacgtatttggtttcaaagccctacgcgctctacgtctggaggatctgcgaattccccctacttattcaaaaactttccaaggtcccgctcatggtatccaagttgaaagggataagttgaacaaata

SEQ ID NO: 5713 - DNA, 270 bp, Oryza sativa
  unsure (1)..(270): unsure at all n locations
  Clone ID: uC-osflcyp152a12b1
ttaaatccgtatgcgtgcgctaagcctgtaacacaacagcatacgattcttttgtcgcagcatacgtgccccgnaacagccactgatgtatattgacacctcccatttcatttgatcctctagactgcaagtaggaaacggcaggttgcatgctattagctgaagtagtagcggttttgtttcttggtgagctttggatgtgtgtttgtgggaaaacccagaatgataaaagaatataggagtaaggatgcagacatttgtatgcactgt

SEQ ID NO: 5714 - DNA, 547 bp, Oryza sativa
  unsure (1)..(547): unsure at all n locations
  Clone ID: uC-osflcyp152b01b1
ttcataagtagtccctgttttagatagngcaactcagcatcttttggatgaaaatatccagttactaagccagattgccgaaaatatcgaaattttcaagacggtggagaatatggatctctttctgcggacgaataataatatcagaacagttcttaaaagaatgagtgagacgcctggtatcatgggtcagatgcctcccttgccagtacctgtaaatgaaggcagcctgaatacacttctccaaatggacagaatggttggtgcctatggtataccatgaaactcccatatggacgcgggactgatgtaaaagatcctgtttggaaagggggagagatgtattgcatagcatcctatcggggaagttgacagagaggagcctttgcctgatttgtactaatggcatgaagacaaccaaaggatgctagagcttagactaaccaaggtgccacgggataagtaatgttttttgaggattttctttctctttttcctttgaattgttttagctgccgtgtgtctatccttgattattggggaagac

SEQ ID NO: 5715 - DNA, 324 bp, Oryza sativa
  Clone ID: uC-osflcyp152b02b1
tccgcgccgagcaactcactctgcctgaagccacggagaaaaagcttgggtgttttcttggaagccaagagtgaggcgcgcagaagaagaagaagaagaagaagaggggggaggaggaggagcccctcggctgaccccaccgagcgccacgccccccacggccaccctctccccgaagctgcccggccactcctccagggcctccaccgcctcccacgacgccccgaacggctcccgctcttctcccccgcccgcacccaccaccgccaagacctcccgccttccccgccccgacaggccccgcccactccttccctcgcccgc

SEQ ID NO: 5716 - DNA, 540 bp, Oryza sativa
  unsure (1)..(540): unsure at all n locations
  Clone ID: uC-osflcyp152b03b1
gctgtaagtcctactctagcaagcatgcgcgccgccgnccatgtcgtttccatcgccggcttgctggtgatggccatggcgccactggcctcctcgtacccatggccgacctgcaacggcagcagcaactacacggcgaacagcgcgttccaagagaacctccggatcctgaacgccaccctccccagcaacgtctccacctcgccgggcctcttcgccaccgccaccgtcggcgcggcgcccgacacggtctacgccctcgcgttctgcccgccagtcgacaaccagaacgcctccggctgccgcgcctgcgtcgccggcggcttccaggacgcgccgagactgtgcccctccaacagggccgtctacatcctctacaacttctgcgtcttcaccttctccggcgtgaacttcctcggctccgccaccaacccggcggaccaggaggcgcagctctacaacgccctcaacctcaccatccccgacgtcggcgccttcacagggccacctacgagctcctcaacgccacggtcgattacg

SEQ ID NO: 5717 - DNA, 505 bp, Oryza sativa
  unsure (1)..(505): unsure at all n locations
  Clone ID: uC-osflcyp152b04b1
cagatancttattaccaaaagcaagaacaccangagagcccgattctttttattcctctctctcctcctcccccccctcctcatccacatctccatccattgcaatgctgcagattcccagctaggttcagagaaggtcaccaacctcctcttctacctgcacgacaccctcagtgggaaggatccaactgctgtcccagttgctcgtgctgagaacgctgtacccaagcctgataatccggtacccttcagcacgatctatgtggtcgatgatctgctgacagaggggcctcagagagaatccaaggtggttgggaatgcgcaggggatgtacatttcgacagccaagaaagggctcacgcttgttcttgggatcgatttcgagctcactgatggcccctacaaaggcagctcgttcgtcgtgtactcgcggaacccggtcatgcaggggaatggcagggagctcgccattgttggtggccgcggtttgttcaagatggctcga

SEQ ID NO: 5718 - DNA, 502 bp, Oryza sativa
  Clone ID: uC-osflcyp152b05b1
tttacgtgtccggcatttgatgcttagcagaagcagaggcagaggcagcacaggttgatttttattccatcgatcgatcggcagctagcgctcacagtactctcgatcgctcgctcgcgctggtccgttgattcgttgtcctagatagatagctaaaggggggccatggcatcgacgacagcgccgtcgaggaccaactctcgggtgaactactcgaacgagatccatgacctctccaccgtgcagagcgtctccgccgtccccagcgtctactaccccgagaaatccttcgccgacatcttccctcctaacctcctcaagaaggtgatatcggaggtggtggcgacgttcctgcttgtgttcgtgacgtgcggggcggcgttcatctacggcgaggacatgaagcgcatctcgcagctggggcagtcggtggtcgggggcctcaaagtcaccgtcatgatctacgccaccggccacattttccgcgcccaacatgaacccg

SEQ ID NO: 5719 - DNA, 566 bp, Oryza sativa
  unsure (1)..(566): unsure at all n locations
  Clone ID: uC-osflcyp152b06b1
attttaaataggagagagnacatgagataggggngganctgtcatagtcttcgagaggagtcaatttgcaaccagacaaaaaatctaaccaatatatagtgttgcaggcttgcagcaaaccaagaaatggcctactccactaatcaggtgttttcgtttatttagttcttcaaaacctacttgcatccctaaataagggcagtttcagacttcaacttgcattttgttttctatagataattagcatccctaaaataagagcagtttcagacttcaacatgcattttcctgatagataatgagcatccctaaattagagcagttttattcttcaacatgcatgtttttttatagataatgatactccaacatgcatggtattaattgtgaaagtcttagctacaattttcatagaaacatgttcataacggtcgcactacgaaaatataataatattaattaaagcattcttgatggaaaattggaaatgcacattgaaaatggatcttccaccaccgtatacaacttggtgaagaatctaaaatcaagtgtcataatttttttag

SEQ ID NO: 5720 - DNA, 556 bp, Oryza sativa
  Clone ID: uC-osflcyp152b08b1
ttagtggaagccggtcctgatttgatcgcctttgaaacaattcccaacaaattggaagctcaggcttacgttgaacttcttgacgaatgtaacatcagtatccctgcatggttctcatttaattcaaaagatggagttcacattgtgagtggagactcgttaattgaatgtgctactattgctaatgggtgttcgaaggttggtgcagttggaataaattgcacacctccaagatttatccatggcctgatactctccattcgaaaggtcacagataagccaattctgatatatcccaacagcggagaaagatatgatgctgagaaaaaggagtgggtggaatcaactggcgtgtcagacggtgattttgtttcctacgtaaacgaatggtgcaaagatggggctgtcctcattggcggctgctgcaggacaactccaaacaccatcaaggccataagtagatcacttaaccaacgccactcttcgctgcatttacctgtggcatagagttgcacgctcctttaggtgtgctactcatgctggtacctgaacctga

SEQ ID NO: 5721 - DNA, 86 bp, Oryza sativa
  Clone ID: uC-osflcyp152b09b1
catgactagaccgtgagcggcgcatggcatgcggcggcctgtttaggagggaggctgctcttctcagctgggcgaggagggagacg

SEQ ID NO: 5722 - DNA, 478 bp, Oryza sativa
  Clone ID: uC-osflcyp152b10b1
ttcatcattagcttctagctagcttaattaattaattagtcatgttggaggagaagtaccttcatcacctgttccaccacaagaaggacgacgagccggccaccggagtagactcctacggcgagggcgtctacacgtcggagacggtgaccaccgaggtggtcgccggcggccaggacgagtacgagaggtacaagaaggaggagaagcagcacaagcacaagcagcacctcggcgaggccggcgccctcgccgccggcgccttcgccctgtatgagaagcacgaggcgaagaaggacccggagaacgcgcacaggcacaagatcacggaggagatcgcggccacggcggcggtcggcgccggcggctacgccttccacgagcaccacgagaagaagaaggaccacaagagcgccgaggagtccaccggcgagaagaagcaccacctcttcggctgatcgacctcatcacaacgtcg

SEQ ID NO: 5723 - DNA, 270 bp, Oryza sativa
  Clone ID: uC-osflcyp152b11b1
tacgtactcctgaagcggcaggaactaaggaagatagaacagattaacactaggagtcggtggatctaaggaagaagcttggacgactagaagagtaatagtactcaattccaaatggactggaaatgattctgtaatcaaatgcctctaacaagctgtggtaaccttggaccgtctatgatttaaatcgttgttgattgggacctcccttttatatcatgtaacttagctgctgttgcgagttctctgaaatgcttgtcactttttttt

SEQ ID NO: 5724 - DNA, 526 bp, Oryza sativa
  Clone ID: uC-osflcyp152b12b1
ttcgatctcctcccctctgatccggcgcggccatggcgtcttgcttgagcagcacggtggtttgagagacggagagcagcttggagcgggtgaggcggcagctctcgtccacctccagccgccacctccttcagggccctctcctgaagcgatccgatacactaagaaaatggaatgaacggtgggttatacttgatcctgcaactggaaagatggaatacaagattcgtagaagtgatgcagctgtgaggggaataatagtgtttgattcaacaagcactgtgacgttgtcgccaatgaactttcatggactgccgaaatatgatggatgctgtttctgtatccacacggactaactttttttaaccttacattcttttgcatgggtgatatttattttgggaccctctattttgttttattcaatgactaatgttctagatattggaaccccacagaaaaaggaatattttctttgtgcagaaactcctagtgctgcaagagcttgggtgtccactttacatgc

SEQ ID NO: 5725 - DNA, 556 bp, Oryza sativa
  unsure (1)..(556): unsure at all n locations
  Clone ID: uC-osflcyp152c01b1
acagtanatagcctgcgaagggagngngcatnnctactttgatgttttcagggaactctcaacacaacccctttttggngggagatcgagctatccaatatgttcctgaacgtgtgagctcagcagctggatatacctgtttcttacaactgaggtaacatggtaataatacttcatttggtaagtggcatgctgacatttctccaacaggagaggatttctgcagataccacttcgtaatgtcccataactgatttagtcatacatttattatccgtgtaaatttgcaaagcgttggccatgtcctatgcaattgattttaaaccatctatctgcacatatctaattaaagtataaaacaatttataaactctacataatggacattttagctgcatgccacttgtcaattgagcacacaatatactgactaaattcaatttaacttgatcatgattcatgtggaaggtgtttattaggaattaatttattgatatggccagagacttgtttatttttagctatttatttgtctttcccatagaaatgatcaaat

SEQ ID NO: 5726 - DNA, 483 bp, Oryza sativa
  unsure (1)..(483): unsure at all n locations
  Clone ID: uC-osflcyp152c03b1
tttcgatttactcgcccgggctttataccaggacgaccggcnccaggcgcggggggcggtttgataccnggacggcaagagttcactcaccgccatggctgaccggacgctggtgaggtcgtcgtctgccgcgccggagaaagatgtggcggcgctgtgcgacgtggtgcggcagtgcgtgaggaggccggagggggggaagagagcgataagcatgggcgaggtggcgaggctggtgaggggcatcgccgggttgtcgccggagcaggcggcgccgagggagaagcccctgtggtgggcggagcttgagatcgcctcctccgaaaccgcctgaaattcagttgaggccccaaaattagttagtttcagagtacatatgcgtttgaaagcctgaaactgaaattcagtgcgttctctcttctttctggtatcatataccctccgtcccataaaaaactaacctagtccacatcataatacaac

SEQ ID NO: 5727 - DNA, 485 bp, Oryza sativa
  Clone ID: uC-osflcyp152c04b1
ttccctactacccacaccctgcaatccaaacgcaggcaaatctagcacaaaattcatcccaggactcccagtctcctgtactccccttgcccaagatgtgcagcgagctttacttcttgattccgaacaggagagaagcattacgacttgcatgctccttgcccaagttctagtcatcatttccaagagcaaaaccatcttgttggctttaatactgatgcagtaactatggtgacaaattctgtgaccagattctgaaggaaaccttacctgcatggaagagggagacccccagcccagcatctccttggcacgcactcccgcggaaggcgcggcggcggcagtcgactcggatctccttgagcagcctctctcagccgacaccgcctggcttgaagtggcagcaaacacttcacgctcacccaactactatgcaaccccctccaactgcctgacagatggttttgtcgccaccccacacctgc

SEQ ID NO: 5728 - DNA, 530 bp, Oryza sativa
  unsure (1)..(530): unsure at all n locations
  Clone ID: uC-osflcyp152c07b1
gaccggttcggaatttttggtttgactcacgcgccttaggtgatcaccaccaccaggaggaacccggggcggggcttgttttaagncgtcttttcttaccatgccccaagaggaagaccagggagcctaaggaggagaatgtcactcttggacccactgtccgtgaaggagagtatgtgttcggagttgcccacatcttcgcatccttcaatgacactttcattcatgtcactgacttgtctggaagggaaactcttgttcgcattactggtggcatgaaggccaaagctgaccgcgatgagtcatcaccatatgcagctatgcttgcttctcaagatgttgcacagcgttgcaaggagcttggtattactgctctgcacatcaagctttgtgccactggaggcaacaagacaaagacacccggtcctggggctcaatctgcttttagggcttttgctcgctctggcatgaagaatggtcgcattgagggtgtgacccccgttcccacggacagcaccccgaaaaaggga

SEQ ID NO: 5729 - DNA, 528 bp, Oryza sativa
  unsure (1)..(528): unsure at all n locations
  Clone ID: uC-osflcyp152c08b1
tccgtcttctcgccttcgncttcttccccgacacgtcacctcgtcgccgatggagtcccactactgccgcggcggcggcggcggcgatggggactcgctcttcgaggggatggtcctcttcaccccgtccctctccgtcgatcccgatcccgcgccgcccgtcgccgaggcccccgaccccaagccgcccacccctcgcgacgatgccgccgtcgccggagctgacggggcggcctcccagcagcagccgccgccgcctctggatgaggacctgttctccgatctcaccctcctgtccccgcagtcccccgtcgacctgagcggcgcccaccaaggtcaagatcaggaccactccgccgncgcgcccccctcgccggtgccggctccggctgcacccgtcgccgttctggcccggcaggcgtcctcctcggcctcctcgtcgctccgcaagaagaagagggccgtgccgcatcggtatggccgctcgtcttaacccgcgccttctttcccttctgcccgtgcaattgc

SEQ ID NO: 5730 - DNA, 399 bp, Oryza sativa
  Clone ID: uC-osflcyp152c09b1
cgtagagctggagcagagcgtcaacgacctgaaagctgatatgtgtactgatgtgcctaccaagaaggccgacgaggcgaagcctgccgactccacataacttggccgcagaccagagattggcccgtaacgatttggcatcggtgatggatttttcagcgttttatgtgtatccgatattagttttcttggaccattgctgttgaatgactcgagagtgattttatgctatgagcgttctcctctagagtatctgctgctgctgctgctaaagcgatgtgtttggcttgtatgcaaatttgattttagcagaatgccacagatgtttgcttgctgataacaagccgcagctgctcgccttttataatgcttcagttcgagtattcagttgtgcccttt

SEQ ID NO: 5731 - DNA, 541 bp, Oryza sativa
  Clone ID: uC-osflcyp152c10b1
tccgtaccaccgcagcacgccgcctccccgcccagcgacttctgttactccggcgaagatgtgcgcctccaggttccaccagtaccaggtggtggggaggggcctgccgacgccgaccgacgagcaccccaagatctaccgcatgaagctctgggctaccaacgaggtccgcgccaagtccaagttctggtacttcctccgcaagctgaagaaggtgaagaagagcaacgggcagatccttgccatcaacgagatttttgagaagaacccaacaactatcaagaactatggcatctggctgcgttaccagagtaggactggctaccacaacatgtacaaggagtaccgtgataccaccctcaatggtgccgttgagcagatgtacactgagatggcttcccgccaccgtgtcagattcccttgcattcagatcatcaagactgctactgtccactttaaactctgcaagcgtgacaacactaagcagttccacaagtcagatatcaagttcccactggtgtacaggaaggtcaggccccct

SEQ ID NO: 5732 - DNA, 521 bp, Oryza sativa
  unsure (1)..(521): unsure at all n locations
  Clone ID: uC-osflcyp152c11b1
cccttgataccatccgcaaggagaagacgcacancaacagggttgttataggccacgttgacttcggcacgccgaccaccacgggccatctgatctacaagctcggaggtatcgacaagcgtgtgattgagaggctcgagaaggaagccgctgagatgaacaagaggtccttcaagtacgcgtgggtgctcgacaagctcaaggccgagcgtgagagaggtatcaccatcgatattgccctgtggaagttcgagaccaccaagtactactgcacggtcatcgatgcccctggtcaccgtgacttcatcaagaacatgatcacgggtacctcccaggctgactgtgccgtgctcatcattgactccaccactggtggttttgaggctggtatctccaaggatggccagacccgtgagcacgctcttcttgctttcactcttggagtgaagcaaatgatctgctgctgcaacaagatggatgccaccactcccaagaactccaaggcccgttacgatgaaatc

SEQ ID NO: 5733 - DNA, 287 bp, Oryza sativa
  Clone ID: uC-osflcyp152c12b1
cgctccctcgagggcggcttcttcacctacggcgagatccttgactgcaagatcatcaacgacagggagacggggaggtcacgtgggtttggcttcgtcaccttctactccgagcagtcgatgcgcgacgccatcgagggcatgaacggcaaggagctcgacggccgcagcatcaccgtcaatgaggaccagtcccgccgattcggcggcggaggcggaggctacggcggcggcggtggcggcttctgcggacgtcgtggaggcggttgatgcggaggaggtggcgg

SEQ ID NO: 5734 - DNA, 544 bp, Oryza sativa
  Clone ID: uC-osflcyp152d01b1
atataactagcaatcctgagattagccacagggaggcattcattgctgctgcaaagaactgggctcatcttccccggctccattttggcctcagcgtcgccgacggcggcggcggcggcggcagcaactaatcgcggcggcgcggcctgccggccggccaccgatcgccggcgtgcacgccggcgcgcggcggcggccggtcgagaatgcgcgcgcaggagggacgacgacgatatattattatcgcgtgtgcccctctctcttcgccgcgtaattaattaatcagttaattaattacgtacgacctactgtgttatgctatcgatccgtgttaattaattacctacgtatcttgattaattagtctcgtattatacgtactattatacgtacgtgctgtgctatgtacgtagacaacaaaaaaaaatgtgcgtgatgagttctactacgtacgtacgtactgtgttctagtgttttaatttgtatccgaaccaaggagttgtttaaataactgcatgcacatgcactggacttgaatctggag

SEQ ID NO: 5735 - DNA, 549 bp, Oryza sativa
  unsure (1)..(549): unsure at all n locations
  Clone ID: uC-osflcyp152d02b1
ctttttgtgtgtcctcctggaacaggcaagactctgcttgcctaagttacagcaggagagtctggtgtgcccttcctgtctatttctggatcagatttcatggaaatgtttgttggggttggaccatccagggtacggaacttattccaagaagctcggcaatgtgctcccagtattatatttattgatgagatcgatgcgattggtcgtgcaagaggccgtggagggttttctggttcaaatgatgagcgtgaaagtactttgaaccagctgcttgtagagatggatgggtttggtacaacttctggtgttgttgttcttgctggtacaaataggcctgatattttagataaagccttgctaaggcctggaagatttgatcgccaaataacaatagacaagccagatataaagggccgtgatcaaatattccgcatatatcttaaaaaacttaaacttgacaatgagccatcattttattcgcanaggctagcggctttgacacctggatttgcaggagctgacattgccaatgtttgtaatgaagct

SEQ ID NO: 5736 - DNA, 548 bp, Oryza sativa
  unsure (1)..(548): unsure at all n locations
  Clone ID: uC-osflcyp152d06b1
gctttctttattagcctatgngnctcgngagaaacggcctggattccatcaccataaaaaggctgttgctatgaatgcacttgttcgtgtatcagctgtccttactaatggacaatacttgttgaatcttgactgtgatcactacatcaacaatagcaaagctctccgagaggctatgtgcttccttatggatccaaacctaggaaggcgtgtctgttatgtccaattccctcagaggtttgacggtatcgatagaaatgatcgatatgcaaacaggaacaccgtgtttttcgatattaatttgagaggtctcgatggtctccaaggaccagtttatgtgggaaccggttgtgtgttcaacagaacagctctttatggttatgaaccccccattaagcagaagaggccaggttacttctcttcgctttgtgggggacgaaagaagacaaaaaagtcgaaggagaagagcacggaaaagaaaaagtcacacaaacatgtggacagttctgtgccagtttttaatcttgaagatatagaggaagggattg

SEQ ID NO: 5737 - DNA, 544 bp, Oryza sativa
  Clone ID: uC-osflcyp152d08b1
tcgttgagctacgctcgagccggccggaagccatggccacttcttagcagcgtcagatcgagcacttccacctccccgtgcgggggctcaccctccacgtcgcgcaagccggcaaaggggagctcgggacggtggtgttcctgcacgggttcccggagatatggtactcgtggcgccaccagatgctcgccgtcgccgccgcagggtaccgcgccgtcgcgccggactggcgtgggtacgggctctccgaccagccgccggagccggaggcggcggtgtacgacgacctcatcgaggatctcctcgccatcctcgacgccctcgccgtgcccaaggcattccttgttggaaaggattttggggcaatgccagcttacgactttgctctccgtcacccaaaccgcacatgtggtgtgatgtgtctgggcatccccttaggcactgctggtttggcctttgacacattgccagaaggattctacattttacgttgggcgcaaccaggaagagcagaagctgactttggcagtatgatgtaaagaga

SEQ ID NO: 5738 - DNA, 518 bp, Oryza sativa
  unsure (1)..(518): unsure at all n locations
  Clone ID: uC-osflcyp152d09b1
tttgacttacgcngccttaatcatgcctccttattataannctatcattagaggattcttcactgncatggtttcatactctacctggaatggagtaaaaatgcacgcgaaccatcacctaatcactgattttctcaagaacaagctccgcttcaggggttttgtgatttctgactggcaaggcattgaccggatcacttctcctccgcataagaactattcttactcaatcgaggctggaattggtgccggcattgacatgatcatggttccttatacctacacagaattcattgatgacctgacagagcaagttaacaacaaaattatccccatgagcagaattgacgatgctgtctacaggattctccgagtcaagttcaccatgggtctatttgagagcccttttgctgactctagcctcgccgatgaacttggaaagcatgagcaccgtgagctcgcgcgcgaagcggtcaggaagtccttggtgctgctgaagaacggaaaatccttctact

SEQ ID NO: 5739 - DNA, 561 bp, Oryza sativa
  Clone ID: uC-osflcyp152d10b1
ttccatattcaagttgtcttcgaacaccgctgcctgtggttaccttactgaagaagttgcttcaaatgcgtccaaggttgttgaaggaaaaaaggaacctgccatgtttcgtctgtttggtgtggatttgatgaaatgtaccagcatatctactaccactgatgacaagtcaagtgtgggagcaggagaagcttcagccaaaggtactggttctcacgaagactctggtcagctgtcagcattctcaaaagtgacaaaagagcatattgctgcggatgaaagcccccaagagatccaaagccatcagaattacaccgctagaactcgcataaaggttcaaatgcatggaaatgctgtgggcagagctgtggatctagctaatctagacggatatgagcaactgatgaatgagctggaagagatgttcaatataaaggacctcaaacaaaaatggaaggtggctttcactgatgatgagggtgacacaatggaagttggagatgatccttggctggaaatttgccagatggtcagaaagattgtgctctatcccattgaaga

SEQ ID NO: 5740 - DNA, 568 bp, Oryza sativa
  unsure (1)..(568): unsure at all n locations
  Clone ID: uC-osflcyp152d11b1
ccctggctggatatccagcccctcgnctgcgataatggaactggtattgtcaaggctgggctctgtctacacgatgcgcccagggctgtcttccccagcattgtcggccgccctcgccacactggtgtcatggtcggaatgggccagaaggacgcctacgtcggcgacgaggcgcagtccaagaggggtatcttgaccctcaagtaccccatcgagcatggtatcgtcagcaactgggatgatatggagaagatctggcatcacaccttctacaacgagctccgtgtggccccggaggagcaccccgtcctcctcaccgaggctcctctcaaccccaaggccaatcgtgagaagatgacccagatcatgtttgagaccttcaacacccctgctatgtacgtcgccatccaggccgtcctctctctgtatgccagtggtcgtaccacaggtattgtgttggactctggtgatggtgtcagccacactgtccccatctatgaaggatatgctctcccccatgctatccttcgtctcgaccttgctgggcgtgatcccactgattacctca

SEQ ID NO: 5741 - DNA, 543 bp, Oryza sativa
  unsure (1)..(543): unsure at all n locations
  Clone ID: uC-osflcyp152d12b1
tgagtaggaggaggaagaacaggaggaagatggggcgggtcaatgtgcagctgaagcggatcgagaacaagatcaaccggcaggtgaccttctccaagcgcaggtcggggctgctcaagaaggcgaatgagatctccgtgctctgcgacgccgaggtcgcgctcatcatcttctccaccaagggcaagctctacgagtacgccaccgactcatgtatggacaaaatccttgaacgttatgagcgctactcctatgcagaaaaggtccttatttcagctgaatctgacactcagggcaactggtgccacgaatataggaaactgaaggctaaggttgagacaatacagaaatgtcaaaagcacctcatgggagaggatcttgaatctttgaatctcaaagagctgcagcagctggagcagcagctggaaaattcgttgaaacatatcagatccagaaagagccaactaatgctcgagtccattaacgagcttcaacggaaggaaaagtcactgcaggaggagaatnaggtcctacagaaagaac

SEQ ID NO: 5742 - DNA, 554 bp, Oryza sativa
  unsure (1)..(554): unsure at all n locations
  Clone ID: uC-osflcyp152e01b1
ttttactcgnccggattgactattttgcactatctntgcaatnctttgggctgtctatcttcatgcttcttttgcttgcataggccaagacatccttggaatctgcctgatgataactgtgcttcaaatggcacgcttaccaaatatcagggttgcatcagctcttcttagtgctgcatttgtgtatgatgttttctgggtgttcatttcacctcttatattccatgaaagtgtcatgattgcagttgctcgtggtgataactctggggaagcaattccgatgctcttaagaatacctcgtttctttgatccatggggtggctatgacatgataggctttggtgacattattttccctggattgctagttgcattcagctacagatttgatagagcaagcaaaaggggcctcttcaatgggtattttctatggctgacggtgggatatgcctgtggccttttccttacctatcttgcgctcttcctgatggacgggcatggtcaacctgcgctgctgtaccttgttccatgtacattagggcttattgttatac

SEQ ID NO: 5743 - DNA, 555 bp, Oryza sativa
  unsure (1)..(555): unsure at all n locations
  Clone ID: uC-osflcyp152e02b1
ttcttttacttcnccgcatttatactcaccaagaagccggcggcggggcgggattttttccctaagctgcacaatcctctccctccagcggctaaatgcggaagggcaaggtctggctcgaccccaatgaggcaacgagatctcatggccaactccgcagaacatcgaagttggtcaaggatgggttcattatcaagaagccccaaagattcactccaggtcccgtgcacggagagcccatgaggccaagcagaagggacgtcactctggctatggtaagcgtaggggtaccagggaggctaggctccccaccaagatcctgtggatgaggaggatgcgtgtgctcaggcgtttgctgcgcaagtatcgtgaggccaagaagattgacaagcacatgtatcatgacatgtacatgaaggtcaagggtaacatgttcaagaacaagcgtgttctcatggaaagtatccacaagtctaaggctgagaaggcaagagagaagacactctctgaccagtttgaggctaagcgtgccaagagcaaggccagtcgtgagag

SEQ ID NO: 5744 - DNA, 531 bp, Oryza sativa
  Clone ID: uC-osflcyp152e03b1
caagataagatgctctagattaaaattactcttttgtgctgtttttggttgtatcattgtttgatttatttggggatcaagatggggttttttttttttttttgaaggaatcggactcgactcctatgagggacgatggacgaaaaatcgcgggtgaaaaggacgtgacgaccggaaaaatacgaatatttatatatatgtgtgtgttggaggaataccacgaggaccttcggccgggcctaccaaaaccaaggacaagcaagggcgcaggccggaggtaagcggcgaaggtcgaagagacaacataggcgaaagccacacggcgaaagttgtggcatggagtatacaaccttcgctgaagatggaccttgccggagggacatacggtcgaaggccgcgaggcgaaagccttgccacgaagggcatgggtttcgccgagtgtacaacctcaccgggagaaggcccagcgggccatcgcgccttccggaggctccgccaggactaggccagccacttgacccattaggagcc

SEQ ID NO: 5745 - DNA, 466 bp, Oryza sativa
  unsure (1)..(466): unsure at all n locations
  Clone ID: uC-osflcyp152e06b1
cgattagttcctcaccggcggcggcagcccccacaacgagcgtttagtttacggaggaggtacgttgacctccgcggcggcggcgntcgtcgacctcgctagtggtgggcatccccgacgacaagcttcgaggatacagagaaggtaagatgacctcgccgcctccgacgtcccccacggcgagcgtcgagtctgtggaaggaggtacgacgacgacgaccttaccagcaacgacgtctccctgattagcgtggagactgtgggaggaggcgtcgtccccatccaccaaggagctcaccgagcttggccaccatgtcctcttgaaagcttcgccatcgtctcctcctaggcatgtgttgttgctccgtgctcagggctcaactctcggtttgttgcagtttggtgtgtatgtctcgttgcactttgaatatttgggtgtttcattatctttgggtagatgttgcat

SEQ ID NO: 5746 - DNA, 349 bp, Oryza sativa
  unsure (1)..(349): unsure at all n locations
  Clone ID: uC-osflcyp152e08b1
cggaccggccggaatttctgtttgactcacgcgcccttggtacccaaacctgaagagcgncagggaanggancgacttgatgggnnacggaaagctcaacatgcacaggannccncnncagaacaacaaagncacngaggagggcngggggaagcacgacaccanccgcanngaggancnngnccacgagaacangacngncggnccacacttcaaggaggccaacaacnnccngnggcccnncaagcngaaggcaccacncggnggccncaagaagaagaggaaccacnangncgagggnggngangccggcaaccgngaggaccacancaacgagcncaaccggagg

SEQ ID NO: 5747 - DNA, 568 bp, Oryza sativa
  unsure (1)..(568): unsure at all n locations
  Clone ID: uC-osflcyp152e09b1
tttgattctacgcgcccgtacttggatatctagctagctnctttctttcttcctcttttcctgtgtggcacgcgccttcaatttacctcttcggtgagtagacgcatcgagatcggggggaaatgtcggtccagtttacatcggagcatgtttgctatgtcaactgcaactattgcaacactatccttgtggtgaatgtgccaaacaattgttcctacaacattgtgactgttagatgtgggcattgcacaatggtgctctccatggatcttgctccttttcaccaagcacgcactgttcaagatcaccaggtacagaacagaggatttcaaggtaataactttggaagctatgacatagcttccagaaatcagaggacatcgacagccatgtacccaatgccaaccagtcagcagcaagtgtcacctatacgtccccctgagaaaagacagcgtgtcccatctgcatacaacagattcatcaaggaggagatacagaggattaaaaccagcaatcctgagattagccacagggaggcattcagtgctgctgcaaagaactgggctca

SEQ ID NO: 5748 - DNA, 339 bp, Oryza sativa
  unsure (1)..(339): unsure at all n locations
  Clone ID: uC-osflcyp152e11b1
cggaattttcggtttgactcacgcgncataggtacgtaccccgccccaagcccgcgccggcggcgggttgattaaaaccctgcgcgctgtcgccacgcgccgngctagcgctgnggaggcggctttctcccgaggccggcgcggtgtcgtcggaggaggaggaggaggagggaggcgcggagcccgagggggaagacgacgaggacctcaaggagtacgtaggaaaccctcacgcaagcgacgacagcgcgcaaaatcgcgaggatcatcgagcaagacgaaaccgctgagaaggacgaggctgtatatgacagacagaccggaagaagccagggataa

SEQ ID NO: 5749 - DNA, 465 bp, Oryza sativa
  Clone ID: uC-osflcyp152e12b1
ttagatgatgaacaagaagaggaggagagatgaagaagcatgatatggaaggaggaggaggaggaataagcaaggtggtgagggagcacaaggccaggctctacatcatccgccgctgcgtcgtcatgctcctctgctggcatgactgatccaatccaatccaatccatcaaccaacccatatgcagcaatgccacctcattctagctagtcctgaattcttcatcagtcgtcgtttatcatttttttctcttcttcttgttgtaattctctatcttcttcttcttctgatcttcaagcccgcttatatccattagctcattaccaagcttgtatatatgtctatttagtcttctaaccaatgatattatagcaagctagatatatagcttaatatttaaaaaaaaaaaaaacaaaaaactaaaggacaagccaatgcaaaaagaaccaaatccatgaaaacgag

SEQ ID NO: 5750 - DNA, 535 bp, Oryza sativa
  unsure (1)..(535): unsure at all n locations
  Clone ID: uC-osflcyp152f01b1
cttaattacntcgtcttcctctcctcttccttcttcttccaccatggctgcaaccgcttcgtcctcctccaccgccaccgcctcgccgctcctcctcccctcggcccgccgcccgctcccttcctccaaaccgtggcttcccgacggcagggcgttcaggggcagcagggcgctgagttcagcggcgcggcgatgcttctgctgctgctgcaggtgcgaggccgccggtgaggcgggaacggcgccgccgccgcagcagcgcggagtggatgacggcggcgtggtctgtaccagcgccacccggtcccggaggaggagcgttcttggagtcgccgtgggggtatcgtcggcgctggcgctcggcctggccgcgttcgatgatgccctcgccgccgggctgcctcccgaggagaagcccaagctctgcgacgccgcctgcgagaaggacctcgaaaatgtgcccatggtgactacagagtctggtcttcagtacaaggatatcaaagtgggtgaaggcccaagtccacccattggc

SEQ ID NO: 5751 - DNA, 549 bp, Oryza sativa
  Clone ID: uC-osflcyp152f03b1
ggcgactcccgccgcttcccctctcctgctgccgctccccctttcttttccggccttcaccttcccgcctcgccgcgccgtcccctgcgcccgccgcctcgtcttgcggcctccccgcgccggacgccctcgcctccgggacccgcctcccgcggcacccccaccggcggcggaggaggtcggcgaggaggaagaggacgacgatgcccccccgctcaggctcctcgaaccgccccaggaggacgaccccttcccgcccgagatggagccggccgaccccgacttctaccggatagggtacgcgcggatgatgcgggcgtacggggttgagttcttggaaggccccgatgggatggccgtctatgcctcccgggacgtcgacccactccgcagagctagagtgattatggagattccattggagctgatgctgactataactcaaaaacgcccttggatgtttttccccgacattattccactaggccatcccatatttgacatcattgaatcaacagatcctgagaccagatgtgatctaaggttagc

SEQ ID NO: 5752 - DNA, 440 bp, Oryza sativa
  unsure (1)..(440): unsure at all n locations
  Clone ID: uC-osflcyp152f06b1
ttcgattccgtcgccgctatacgtgctcttcctccctcctaagcctngnaaatagctttgctttccccctttcttcacttagttctaatatgttgcgaactgcggtaatcggtgtacccctcaagaaggcaaggcaatttgaccctaaaatgttgccattttaacatccaaaaaaaaaaaaaaaaaaaaaaaaaaaaaaaaaaaaaaaaaaaaaaaaaaaaaaaaaaaaaaaaaaaaaaaaaaaaaaaaaaaaaaaaaaaaaaaaaaaaaaaaaaaaaaaaaaaaaaaaaaaaaaaaaaaaaaaaaaaaaaggggggggccctttttagggacccaagtttctccccccgggggggggaggtaaaaatttttttaagggggacccaaaaaaaaaaacacggggcccggttttaacaccggggggcgggaaaaaccccggg

SEQ ID NO: 5753 - DNA, 209 bp, Oryza sativa
  unsure (1)..(209): unsure at all n locations
  Clone ID: uC-osflcyp152f07b1
gaccggaccggaattttcgttttgactcacgcgcccgtcaatacctaccaccccaagacgcnagcggcatgggagctttttttgagaggtttccatggttctttcccccctgccgaaggtggtgatggggtcgctgtcgttcgaggtgctctggatgctgcccagagatcccctcgatgccgaagctgccgatcgggcggacgagcccg

SEQ ID NO: 5754 - DNA, 373 bp, Oryza sativa
  unsure (1)..(373): unsure at all n locations
  Clone ID: uC-osflcyp152f08b1
ggtanctcctccccctctttaccttttcctcctggggtctttttcgaggntcgtctagggtttcgtgcgcttgagatggcggcgccggatgtcgagtaccgctgcttcgtcggcggcctcgcctgggccaccgacgaccgctccctcgaggccgccttctccacctacggcgagatcctcgactccaagatcatcaacgacagggagacggggaggtcacgtgggtttggcttcgtcaccttctcctccgagcagtcgatgcgcgacgccatcgagggcatgaacggcaaggagctcgacggccgcaacatcaccgtcaatgaggcccagtcccgccgctccggcggcggaggcgggggctacggcggcggcg

SEQ ID NO: 5755 - DNA, 575 bp, Oryza sativa
  Clone ID: uC-osflcyp152f09b1
ttgtttcgactccacgcgtccttcatacctcgcgccgcgcggctgctccggccaccaaagtttctctccgatggcggtgagagtcccttccatggagctgcaccgccccccgccgtccgtatccggtgtccgaggaaaaagctgccttcaaaagcctttccttgtccaagcaaagagattagagggattggagaaggcaaacccaaggtcacgaggaaagcaaagtttggaacaagtgaagaaaagagcaccactgatccgtgggacagtgagtccacctctaccagtaccaggtcacataactcaacctccttacgttggtaaaaaggatgcttcagagatagcaagtgagatacaaatgcatgacaaagtgagcattattcacatgaaagctgcatgtgagcttgctgctcgtgttcttgaatacgctggaactttagtgaaaccctctgtaacaacagacgaaattgataaagcagtgcacaagatgatcattgatgctggagcctatccatcccctttcggatacggagggtttccaaaagcgtgtgcacatctgtgaatgaatgcatctg

SEQ ID NO: 5756 - DNA, 550 bp, Oryza sativa
  Clone ID: uC-osflcyp152f11b1
ttaaatccacccgagcattcgaagcttgtagaagaagccctagcctctcctcctcatcaccgatggcccgcaccaagcagacggcgaggaagtccaccggcggcaaggcgccgaggaagcagctggcgacgaaggcggcgcgcaagtcggccccggccaccggcggcgtgaagaagccccaccgcttccgccccggcaccgtcgcgctccgggagatccgcaagtaccagaagagcaccgagctgctgatccgcaagctgccgttccagcgcctggtgcgggagatcgcgcaggacttcaagaccgacctccgcttccagagctccgccgtcgccgcgctgcaggaggcggccgaggcctacctcgtcgggctcttcgaggacaccaacctctgcgccatccacgccaagcgcgtcaccatcatgcccaaggacatccagctcgcccgccgcatccgtggcgagagggcctaggcgtgatctgctcgagaggctgtgataccctggtagttctagtgtggttcctgtgtctagtctgcacatgtagagat

SEQ ID NO: 5757 - DNA, 429 bp, Oryza sativa
  Clone ID: uC-osflcyp152f12b1
ttcagtcttcgcgcacagacgcgtaacaagcaagggcaggggggctatgaactgagacgacggtatcgcaccagccaaaaggcaccaactagcgccctagctgaagaagctcgatagccctgcataccaaagaacgagagatcacttacccacgaaacacaggaaggaatccaaggagctcttggacatgaacgtcgagcaggagggatgggcatgggccataacgaagcggctcataacgttggttgggggacaagaacggacgaactccatgatgcaagctatgtcaacagagtgaagaggctgacccgatcagagaaaagactgaagctgaagcagcgacattgaagcgcaacacgcagcactgcacgccacagaactgaccgaactgtgctccagaggccagggacaacacaccaacacactggc

SEQ ID NO: 5758 - DNA, 443 bp, Oryza sativa
  unsure (1)..(443): unsure at all n locations
  Clone ID: uC-osflcyp152g02b1
tctctactcgtccggtactanatatgggaagcatggtgttagtgctggaattaagagtgtagtagatgatgaagctggggaatcgaatggtctccaaagcggtcccatgtgcaatgcctgtgagatggctgttgtatggatgcagaaccaacttgcacagaacaagactcaggatctcatcttgaactacattaatcagctctgtgacaagctcccaagtccaatgggagaatcatctgtggactgtggcagccttgcatccatgcctgagatttcattcaccattggaggcaaaaagtttgcactgaagccagaagagtatattctgaaggttggtgaaggagctgctgcccagtgcatcagtggattcacagccatggacatccctcctccccgtggtcctctctggatcctgggtgacgttttcatgggtgcctaccata

SEQ ID NO: 5759 - DNA, 480 bp, Oryza sativa
  unsure (1)..(480): unsure at all n locations
  Clone ID: uC-osflcyp152g03b1
ccgttagtccggccgaggctgaggccgaggaggcggcgcccttcgtggccgaggtggctgacaccaacgaggcggagccagctgcggccgagccggcggcggaggaggtgaaggaggccgagcccgagccggccgagccggaggccgagcctgccaaggaggaggtggcgccagagcccgccgccgccgccgaggcggaggccaaggaggccgagccggcggcgcaggtggccgaggaggtgaaggaggaggaggcggcgccggcgccggccgccgaggaggtgaaggtggaggaggcggcgccggtcgcggagccggaggccgagaaggccagcgagtgagtgcatgccggggaaggctggctcgccgtcgtcgtacaccgtggagtacatgcatggnccgcgcgcgccgtcgtcgtcggggactcgccggagttgtacgtacgtgtgcgtgtagcgagtgatgagttgagtgaagctg

SEQ ID NO: 5760 - DNA, 563 bp, Oryza sativa
  unsure (1)..(563): unsure at all n locations
  Clone ID: uC-osflcyp152g04b1
ttttacgtgtccgattatgngtgattccagcgtgngttcgagggtggccccgtgtttatttcagaagactccaacacgcaccggcatttgtgtgagttcgttggacttgacatggaaatggcaatcaaaggccactactctgaggtttgtgatgttgtggataggctgtttgttgctatgtttgatcatctgaacaagaactgcgccaaggaacttgaggccattaacaggcagtatccgttcaaacctttgaagtacttacccaagacactgcgcattgagtatgacgaaggcatccggatgctcaaggaagctggggtccacgtggaggccatgggagacctcaacacagagtctgagaagaagctgggcgagctggttcataccaagtatgacactgatttctacatgctctgccggtacccgtcggcggtgaggccattctacaccatgccctgctccgacgacccacgctacagcaacttcttcgacgtgttcgtccgaggggaggagatcatctcgggagcgcagagggtgcacgtccctgaggtcctggcacgaca

SEQ ID NO: 5761 - DNA, 571 bp, Oryza sativa
  unsure (1)..(571): unsure at all n locations
  Clone ID: uC-osflcyp152g05b1
tttacgtgtccgcttcatttgtgcttacacataggatcatctgatagatcacataattctgatgttacatccaatggtggagtatctggaatagctccagttaataaagctgaaactgctcccacttcagagaaaaacctaacattggaagcattgtttggggctgcatttatgaatgagctccaatccaaggatgcacctgtttctatccgaggatctgcaactagcggtcctaactatgagttcgcagagacaggcaaaacttcaattgcatcaagccatgaaggatattaccctggtgaacaggtcctacccttcggcaccattaaagatggagttgcccctaaagaatcaggaactggcaacaggaatttagcattatctggcccaagtcagggcagtgctagcttagataagaaaagcttggagattcagttgcctgaagaagataatttgtttacagtgaacgactctttggatggtcaaaagcctgatatttttccatcggtgagatccagtagggttgaggggctactaccagaaaaggcagntgatgatcttaattataggc

SEQ ID NO: 5762 - DNA, 553 bp, Oryza sativa
  unsure (1)..(553): unsure at all n locations
  Clone ID: uC-osflcyp152g06b1
cagctacattatggatgattgggtgctgngccggatttacaacatgaagggcgggctggagaagccgccggccgcggcggtggcggcggcggggatggtgagcaacggcggcggcgtcgagaggaagccgatggtgggggtgaacgcggcggtgagctccccgccggagcagaagccggtggtggcggggccggcgttcccggacctggcggcgtactacgaccggccgtcggactcgatgccgcggctgcacgccgactcgagctgctcggagcaggtgctgtcgccggagttcgcgtgcgaggtgcagagccagcccaagatcagcgagtgggagcgcaccttcgccaccgtcgggcccatcaaccccgccgcctccatcctcgaccccgccggctccggcggcctcggcggcctcggcggcggcggcagcgaccccctcctccaggacatcctcatgtactggggcaagccattctagacgaccaaaaaaaaaaaaaaaacaaccgcattggcagcaatggtgtcacttgacaccgtgcaggctagctag

SEQ ID NO: 5763 - DNA, 459 bp, Oryza sativa
  Clone ID: uC-osflcyp152g07b1
accggccggaatttccgtgttgacttacgcgccgtaattgcaacgcttgagctcaatcagcaacaacatgtatttccttcttgcttagttaagtccttcgccctcccaagaagaagaagatgtcttgctgcggcggcaactgcggctgcggcagcggctgccagtgcggcggcggctgcggcggatgcaagatgttccctgatgtggaggccacagccaccaccaagaccttcgtcctcgctgctccatccaacaaggcgagctctggaggaatggagatggcggtggagagcggcgagaacggcggctgcggctgcaacacctgcaagtgtggcaccagctgcagcggctgctcctgctgctcctgcaactgaatctatcgtcgtcgtcgcccggtgcatgaggatttatcgtatggatgctgctactgccgatcagagctttgatcgaggccttaat

SEQ ID NO: 5764 - DNA, 466 bp, Oryza sativa
  Clone ID: uC-osflcyp152g08b1
gctaaacctccccctctttaccttttcctcctcggttcggttccttggttcgtctagggtttagtgggccgagatggcggcgccggatgtcgagtaccgctgcttcgtcggcggcctcgcctgggccaccgacgaccgctccctcgaggccgccttctccacctacggcgagatcctcgactccaagatcatcaacgacagggagacggggaggtcacgtgggtttggcttcgtcaccttctcctccgagcagtcgatgcgcgacgccatcgagggcatgaacggcaaggagctcgacggccgcaacatcaccgtcaatgaggcccagtcccgccgctccggcggcggaggcgggggctacggcggcggcggtggcggctacggcggcggtcgtggaggcggcggctacggaggaggtggcggcggcggctaccggcgccgtgagggcggctacggtggcggcggc

SEQ ID NO: 5765 - DNA, 393 bp, Oryza sativa
  unsure (1)..(393): unsure at all n locations
  Clone ID: uC-osflcyp152g09b1
gctgaaagctgcgcgagatgatgcgctgggccagggcgcgtggtgaggcctgcgccgccaaggacggccgcggctgcgagggctgcggcggcgcgcggttcgtcccgtgctgggagtgcggcggcagctgcaaggtggtcgccgccggcgccaccgccgccgccgccgacgtcgagcggtgcgccaagtgcaacgagaacggcctcatgctgtgccccatctgccactgattgtgctccaccgccgcgaatccttctagcgtttaatccgcgcccatgtatatttatccataatatactcgtataattgtgagtttaaactacactctattagtggtttataaatgagaattgaaatggtatatagtgcttgtnaaaaaaaaaaaacagaaaa

SEQ ID NO: 5766 - DNA, 501 bp, Oryza sativa
  Clone ID: uC-osflcyp152g11b1
tttagtctcttccatctcattctcctaattgtcatcactagcttctagctagcttaattaattaattagccatggcggaggagaagcaccaccaccacctgttccaccacaagaaggacgacgagccggccaccggagtagactcctacggcgagggcgtctacacgtcggagacggtgaccaccgaggtggtcgccggcggccaggacgagtacgagaggtacaagaaggaggagaagcagcacaagcacaagcagcacctcggcgaggccggcgccctcgccgccggcgccttcgccctgtatgagaagcacgaggcgaagaaggacccggagaacgcgcacaggcacaagatcacggaggagatcgcggccacggcggcggtcggcgccggcggctacgccttccacgagcaccacgagaagaagaaggaccacaagagcgccgaggagtccaccggcgagaagaagcaccacctcttcggctgatcgacctcatcac

SEQ ID NO: 5767 - DNA, 556 bp, Oryza sativa
  Clone ID: uC-osflcyp152h03b1
acgatgcgtcgcttcccctttccccccctcctccgccgggcgctttcatcccccacccactccactgtccccgctctccccccattgccgccgccgcctgcgacggccgcgagctcatcccgagacgacgtctctagctagcatcgagcgttctttctctcctcgggctctcgttggtgagataaggcaaatcaagagagcaaaattttggtggtacatgtggtgattctatgtcgacaaggcgtcatcttgcagtatttaccactgcaagcctcccatggatgacaggaacggccatcaacccgttgttccgggcggcctatcttgcaaaggatggggatagggaggccaccttggtaatcccctggctttctctgagggaccaagaattggtttacccgaataagattgtgttcggttcgcctttggagcatgaggcctatgttcgccgctggattgaggagaggatcagtttcagaccttccttcagcatcaaattctaccctgcgaagttctctaaagaactgagaagtattctacctgttggagatatcac

SEQ ID NO: 5768 - DNA, 527 bp, Oryza sativa
  Clone ID: uC-osflcyp152h05b1
caagtggctttcagacaagcccctgcgtcttccccttcaggacgtgtacaagatcggtggtattggcaccgtgcctgtgggtcgtgttgagactggagtcctcaagcctggtatggtggtgacctttggtcccagcggcctgaccactgaggtcaagtcggttgagatgcaccacgaggctctccaggaggctcttcctggtgacaacgtcgggttcaacgtgaagaacgtcgcggtgaaggatctgaagcgtgggtacgtggcctccaactccaaggatgaccctgccaaggaggctgccagcttcacctcccaggtgatcatcatgaaccaccctggccagatcggcaacggctacgccccagtgctggactgccacacctcccacattgccgtcaagtttgctgagctggtgaccaagatcgacagacgatctggtaaggagctggagaaggagcccaagttcctcaagaacggtgatgctggtatggttaagatgattcccaccaagcccatggttgtggaga

SEQ ID NO: 5769 - DNA, 130 bp, Oryza sativa
  unsure (1)..(130): unsure at all n locations
  Clone ID: uC-osflcyp152h06b1
cagcaaattaaccccaccattgcttgcaaagctggncgtgtcacttcttctgttaagctctcccgcggtgcgcgagagcaagctaagctaggtcgggcatggggaaggacgaggtgatggagagcggcgg

SEQ ID NO: 5770 - DNA, 512 bp, Oryza sativa
  Clone ID: uC-osflcyp152h08b1
tgcatactctcctctcctctccaccgccgccgatctccttctcttcaggcgccgccgtcgtgtcgcctcccggagctccggtgctgccaccagcctacgcagcgccgcctcctcctcctcctccggcatccgccaatcgccgccgcctggttcgtcggggagccccgcgccctaacgttttctagaggcgccgcggatccagcgcgaatcgatcgagaggtaaaggggaagttgatttgagtcggcggccgaagaaggaagccatgaactcgagaagcaactaccgcagcaccagaacttctctttttgatggcattgaggagggcagaatccgtgcaacatcctattcttcacatgagatagatgagaatgagaatgatcaagctattgatggattgcaggatcgagtcagcattctcaagcggttgtctggtgatatccatgaagaggtggaaactcataaccgtatgctagaccgaatgggcaatgatatggattcgtcaggggttttc

SEQ ID NO: 5771 - DNA, 540 bp, Oryza sativa
  unsure (1)..(540): unsure at all n locations
  Clone ID: uC-osflcyp152h10b1
tgaatagctgagtgtttctgagtacttggcattcaaggaacagtttgttgatggacacaccaacagcaactttgttcttgagcttgattttgagcccttcaatgcctccttcccgcgcccgtccatgtccaagtccatcggaaatggggtgcagttccttaaccgtcacctgtcgtccaagttgttccaggacaaggagagcctctaccccttgctgaacttcctgaaagcccataaccacaagggcacgacaatgatgctgaatgacagaattcagagccttcgtgggctccaatcatcccttagaaaggcagaagaatatctgatgggcattcctcaagacacgccctactcggagttcaaccacaggttccaagagctcggtttggagaagggttggggtgactgcgcaaagcgtgtgcttgacaccatccacttgcttcttgaccttcttgaggcccctgatccggccaactttgagaagttccttggaactattccaatgatgttcaatgttgntatcctgtctccgcatggata

SEQ ID NO: 5772 - DNA, 538 bp, Oryza sativa
  Clone ID: uC-osflcyp152h12b1
tctggttcgctacgcgtccttcctccctcaagattgagtaataatccaagctcaatatacgtgccaatccgtcgaagaaggaagcagcggcgatggcggcgaggtccggcgaggtgcgggcgacggtgctgggcatggcggtgctggcgctgcttctgctgctcggccaccacgcggcggccatcgaggccaacgtcggcgtcacccgccaggccagcttcagcctgaacggcggcgccggcgccggcgccggtgctcgcgctggcgctggtgctggcgctggcgctggcgtcggcgctggcatcggagctaacgtcggcgttggcgctcgcgccggcgtcggtgctggcgtcggcgctggcgtaggtgcgaaggtcggtgctggcgtcggtgcgaaggtcggtgctggcgccggcgttggagcacgcgctggcgttggtgcgaacgtcggtgctggcgtcggtgcgaaggtcggtgctggcgtcggcgttggcgctggtgctggcgtcggtgccaaggtcggtgctggcgttggtgc

SEQ ID NO: 5773 - DNA, 491 bp, Oryza sativa
  Clone ID: uC-osflcyp153a02b1
gaggtgcctgaagacgcaaccaagggtagggatgttttgaatgtataacccccaccggacgagcttttggctgtatcagatttagggaagactgctacaacatcactccctgataatttggtgatgcatacttctatgggtgatattcacttgagattatatccagaagagtgtccaaaaactgtggagaatttcactacccattgccggaatggttattatgataatctcatatttcatcgtgtgattaaaggctttatgattcagactggagaccctttgggggatggcactggtgggcaatcaatctggggaagggagttcgaagatgaatttcacaaaagcttgagacatgataggccttttactctttcaatggccaatgctggaccaaataccaatgggtcccaattctttatcacaactgtggcaactccatggctagacaacaaacacacagtgtttggtagagctgtgaaaagggaggatgt

SEQ ID NO: 5774 - DNA, 435 bp, Oryza sativa
  Clone ID: uC-osflcyp153a05b1
ggccctcatcctccccctctttaccttttcctcctcggttcgtgtttcgaggttcgcctagggttcagcgggccgagatggcggcgccggatgtcgagtaccgctgcttcgtcggcggcctcgcctgggccaccgacgaccgctccctcgaggccgccttctccacctacggcgagatcctcgactccaagatcatcaacgatagggagacggggaggtcacgtgggtttggcttcgtcaccttctcctccgagcagtcgatgcgcgacgccatcgagggcatgaacggcaaggagctcgacggccgcaacatcaccgtcaatgaggcccagtcccgccgctccggcggcggaggcgggggctacggcggcggcggtggcggctaccgcggcggtcgtggaggccgcggctaccgaggaggtggcggcggcggct

SEQ ID NO: 5775 - DNA, 545 bp, Oryza sativa
  Clone ID: uC-osflcyp153a06b1
ttcttctctattcgtccgctgcatcacagctatggaagctatgatgtcaacagtgtgaacttgtataattcaccactaggcccttctggattcaatttacattcacaagccggaggaacatttttgggatctagtccagatattagacgacgatcttatctctatcatggtggtggcattcgattaagccctgggtgtccagggcctatgtctcttggggcaagtccatcacaatttactccaccaaattctcagatgcaaatcccaagtactgctacaggaaagtatggatccacttctcctgcaaggagcagccatggctcattgggaaaagctgctgctgtaggccaatacaatagaagaagaaatcttggtcacccacctatatcaatgccgcctcatgaatacacatctcagctgatccagggacaccatggggatggcaccattagtaatcactatgatggctatgctcgtggacattctggttacccacacagtgcactccctaatcctggtcatttcagttggagaccacatacatg

SEQ ID NO: 5776 - DNA, 485 bp, Oryza sativa
  Clone ID: uC-osflcyp153a09b1
catcctcctcctcagcagcagactacccagaactgaaaggccttaatcttaatagaggagtagatatagcctgctaatgtgctcatcagatgctaaataatgccaatgcacctgtgatgtacagctagctggaaacaagtgatggtatttattgacgcagcgaacaaggcctgaagactgaatgaagttgctttcagtttcaggctttcagcaacttgggctggtatagatgctctctctgtatctgatgttccattgcgtgataggcagcaggagaagaggatagccgaaaggcttttgatgcggcaatgtgtactgccgcaaagcaacgtgcatttggttgcagagccgaactcttggcacctgtggtcacttgcttgataaggtgtatcaacactgttgctattatataatttcaagtctgcgttttctatattgttatagatattgctgctgttgtattccttgaatctgatatgtacttc

SEQ ID NO: 5777 - DNA, 472 bp, Oryza sativa
  unsure (1)..(472): unsure at all n locations
  Clone ID: uC-osflcyp153a10b1
tccttggacagacaagaanggactggcatgcttcttgacttcttttggccatcaaaacattccagactgtctaagcggcaatgggccctttgcttatggaatctacaaaggggctgtgcctgttattaccagcaattcactggctgttaaaatactctaccctatattttggggactcatgactctcagtacttttggtaatgatcttgagcctacaagcaattggcttgaggtgattttcagcataatcaatgtacttagcgggttgatgctcttcacattgctgattggaaacatacaggtcttcttgcatgctgtcttagcaagaaagcgaaagatgcagctgcggctccgggacatggaatggtggatgcggcggaggcagttgccgtcccgcctgaggcagagggtccggaagtacgagcgtgaacgctgggcggccatcacgggagatgaggagatggagatgatc

SEQ ID NO: 5778 - DNA, 471 bp, Oryza sativa
  Clone ID: uC-osflcyp153a11b1
ttgactccacgcgcccctcaagaaacagacccctctcactcccactaccagggatccttgcaagatccggtcgttgagctcgatcgacacgaagacgacgacgacgaacgcgggagctccggtgtggaacgacaacgaggcgctgacagtggggcccagggggccgatcctcctcgaggactaccacctgatcgagaaggtggcgcacttggcccgggagcgcatcccggagcgcgtggaccacgcccgcggcgcctccgccaagggcttcttcgagtgcacccacgacgtcaccgacatcacctgcgccgacttcctccggtccccgggcgcccagacccccgtcatcgtgcgcttctccaccgtgatccacgagcgcggcagcccggagacgatccgcgacccgcgcgggttcgccgtcaagatctacacccgcgagggcaactgggacctcctcggcaacaacttccc

SEQ ID NO: 5779 - DNA, 505 bp, Oryza sativa
  unsure (1)..(505): unsure at all n locations
  Clone ID: uC-osflcyp153b01b1
gtgataacataagaatgctagggggcagcaaggctcatatccaattaagttgttctacacttcaaacatgcccatcattctgcactctgcactgattaccaacctctacttcatatcacagcttctctacaggaggtacagtggaaattttctggttaaccttcttgggaaatggaaggaatctgagtactctggccattcggttcctgttggtggtctcgcttactatgtaactgctccatcaagtttggctgatgttcttgcaaatccgttccatgcgttgttctatgtggtcttcatgctgtcagcttgtgctctcttctcaaagacatggattgaagtatctggctcatctgcaaaggatgttgctaaacagctgaaggaacagcaaatggtgatgcctggccatcgtgagtcaaacttgcagaaggaattgaacagatacatccccactgccgctgcatttggtggagtgtgcattggtgcatngactgttctagctgat

SEQ ID NO: 5780 - DNA, 488 bp, Oryza sativa
  Clone ID: uC-osflcyp153b03b1
gtcataccacagaactcactcgccgccgcctccgccgcgccaagttctcctctcctccttctggatggcccgcacgaagcagacggcgcgcaagtccaccggcgggaagggcgccgaggaagcagctggcgaccaaggcggcgcgcaagtcggcgccggccaccggcggcgtgaagaagccgcaccgcttcaggccgggcaccgtcgcgctccgtgagatccgcaagtaccagaagagcacggagctgctcatccgcaagctccccttccagcgcctcgtccgcgagatcgcccaggacttcaagaccgacctccgcttccagagctccgccgtcgccgccctgcaggaggccgcggaggcgtacctcgtcgggctgttcgaggacaccaacctgtgcgccatccacgccaagcgcgtcaccatcatgcccaaggacatccagctcgcgcgccggatccgcggcgagcgcgcttaggccatcagccca

SEQ ID NO: 5781 - DNA, 332 bp, Oryza sativa
  Clone ID: uC-osflcyp153b04b1
tttttattctcgcgtccgcgacgtcgttccagacctgaaatcctatcttggtgcccggttttctttcagggacggcgacatgccccatgagatgacattctaagttagtcggtacaagtttcaagttctgaggaagtctttttgcctagtgtgtttctgtacttctgaattttgtacccgggtagtgaactctccatttctgttgaagtctgcctgtcaaatattatgagaagattaagagaaggattatctactttggtggttcatggttaccgtacctactcaaatgtgcaatgcataacatttgagccataattaagctattgcgttgc

SEQ ID NO: 5782 - DNA, 496 bp, Oryza sativa
  Clone ID: uC-osflcyp153b05b1
ggcctcgctggtagctgtgccttgctgttgctggcccaggctcctttggggttcacgtgatgcacattccagctgtgggttcaagaggatcagataatggtgtttgctgcagcaatatgccggtacctgggagatatgaagcagcagctctgctcttgaacctgaacattctgggcttcatcagacgctacatgcaaccgcataagcttgattgcttcctaacgtgacaggaaaggcaatctttctgtcagcaggcatggtgttgatacatcagaatcatttgatcgccgtgcatgactctggatgttttctagtcgatgcttgtagatagtggtggcaactaacatttagacctggtagccccatcccgtgtataggtatcccatgtcaccgtgtacatactatagaattagatgagttaaccttgtggtgtcgtttcctgttagcgaaatagagctcttgtgcagctgggaaataccattttagcatgctgcag

SEQ ID NO: 5783 - DNA, 505 bp, Oryza sativa
  Clone ID: uC-osflcyp153b08b1
tcggtaagaaacatctagagtgaataagaaagatggggttcgttcgagccctgttcctgctggctacggtgtgcgtggcggcgcacgcgaaggactaccccaaggaggagggcgcgaaggcggaggggccggccgccgcctcggggggcggcggcggcggcagcacccacgacgtggtgaagctgggcggcaagggcgacggcaagacggacagcaccaaggcggtcaacgaggcgtggacggcggcgtgcgctggcaccggcaagcagacgatcgtcgtccccaagggcgacttcttgacgggtcccctcaacttcaccgggccatgcaagggcgacatcgtcattcagctcgacggaaacctgctcagctccaccgacctcgccttattcaagtcgaactggatcgagatcatgcgcctcgaaagcctcgaaatcagcgggaagggcaagctcgacggccagggcgccgccgtctggagcaagaactcctgcgccagaaatac

SEQ ID NO: 5784 - DNA, 523 bp, Oryza sativa
  Clone ID: uC-osflcyp153b11b1
ccctcactccagcattatgggcttgtggtcctacaacagttgctcaagggatccattacaaatagaagctcttgtttcaaagcaggatttcttagttttcttcttgattggttctcagtagaggaaactgatgatactgtcataaaaattgccgagttgattcagattattggtgggcacagtatttgcgggaaagatatacgaaaaatgtttgccctcctgcgtgatgagaagattggtgtcaagcagaagcgtaattcattgcttttgacaagtcttagtcacatgctcaaggaaaagggacctgaagctttctttgaatttagtggtcatgactctggcattgaaataaaatcacctgttcaatggccttacaataagggcttatccttttgctgctggttaaaggtggaaagtttccttgagaatagcatgatggggcttttctcctttttcaccgaaagtggaaaaggatgtttggctatgcttgggaaagatgctctaatctttgagtctatcagtc

SEQ ID NO: 5785 - DNA, 498 bp, Oryza sativa
  Clone ID: uC-osflcyp153c01b1
cccctcagtccaaagagagcgccatttgacctctttgacacttggaagaagcaaaacaacatcaagctgtacgtacgccgggtgtttatcatggacaactgtggggggttgatcccagagtggctcagctttgtcaagggcattgttgattctgaagaccttcccctcaacatctcacgtgagatgctccagcagaacaagatcctgaaggtgatccgcaagaaccttgtgaagaagtgcgtggagctcttctttgagatcgctgagaacaaggaagactacaacaagttctacgaggccttctccaagaatctcaagcttggcatccatgaggactccaccaacaggaccaagattgctgagctcctgaggtatcactccaccaagagtggtgatgagttgaccagcctcaaggactacgtaacccggatgaaggagggccagagtgagatctattacatcactggtgagagcaagaggctgttgagaactccccct

SEQ ID NO: 5786 - DNA, 529 bp, Oryza sativa
  Clone ID: uC-osflcyp153c02b1
ttctgactccatgcggccgaccctcacactcaagaaaaacagcgctaatggcccagaacatgaccattgcggtggccctgctccttgccacccttgtggcggacatgggaaaggagccagagacgctagaggaggcagagagagctgggtgcaaagaggaatgcagtgagcagaaaaagaaagcccccatcgacgagaaacaaggtgacgacttctgcttcatcaagaccaagtgtatatttgaggcccataagggagtgaaggatctaaaggcggatagatgcatagatttctgcaacaatgagtgtaatgcaatatataaggaggatcccgacacaagcaagaagtgtgcagaaagttgcgaagctgacgctaaggaggcccaggtactccttgataaagtcgtcgcttatattcaaacagcgaaacaagcatgattatatgatgtagtacctccccatctgttccttcatgatgaccgagcgacgacattattaatgggtctcacccaacgggcagccctgcatta

SEQ ID NO: 5787 - DNA, 53 bp, Oryza sativa
  Clone ID: uC-osflcyp153c03b1
agcaatgaacactgtacttgcatgatgatgatatactacagtgttacatagat

SEQ ID NO: 5788 - DNA, 530 bp, Oryza sativa
  Clone ID: uC-osflcyp153c04b1
tgtttattctcgcgtccgcgcatcattacctcttcaggaaatgtatggagcctgtggagaagtgcctgagggatgcaaagatggacaagagcactgtccatgatgttgtccttgttggtggttcaactagaatccctagggttcagcagcttctgcaggatttcttcaatgggaaggaactctgcaagagcattaaccctgatgaagctgtggcatacggtgctgccgtccaggctgctatccttagtggagaggggaacgagaaggtgcaggatcttcttctccttgatgtgactccactgtctcttggtctcgagacagcgggaggtgtgatgacagtgctcatcccaaggaacaccaccattcctaccaagaaggagcaggtcttctccacctactccgataaccagcctggtgtgttgattcaggtctatgagggtgagaggacacggaccagggacaacaatctccttggcaaatttgagctgtctggaatccctcctgcccctaggggagtccctcagatcact

SEQ ID NO: 5789 - DNA, 423 bp, Oryza sativa
  Clone ID: uC-osflcyp153c08b1
catcaaagctgccaagaagcagcagcagcccgctgccaatgccatcgggagaaacacctatgcctaccagcaggtaaaaatggacggggcaccctacctgcgcaaggaggacctgaagatgtacaacagctacaaggacctctccctagctctagagaagacgttcggcaccttcaccgaaactgggaacactatgaatgaggtgaagggctctgaagctgtgacaacttatgaagacaaggatggagactggatgctggatggagatgtcccagggccaatggtcggagaggcatgcaaacgcttgaggatcatgaatggttgcgaagccattgagcttgcaccaagagcagaggacaagtacaagaacaagagctgaaaatgaagcaggattaagatgctgagcatggcgccataagaatg

SEQ ID NO: 5790 - DNA, 463 bp, Oryza sativa
  unsure (1)..(463): unsure at all n locations
  Clone ID: uC-osflcyp153c09b1
tttgattccacgcgcccgatcagtggactagnggagtgacgagagcncgtcggttttgcttggctaaaatcgccgatagaaacttgaggaatcgagcagctcgccgcgcagccatgggtacgcgacgcgaagggctcctcctcctcctcctcctcgccgccgtactgctccagcccctcctcgcggcggcggcggcggagggcgtggtccgcatcgcgctgaagaagcggcaggtcgacgagaccggccgcgtcgggggccacctcgccggggaggatgcccagcggatcctcgcgcggagccacggcttactcaccaacgacggcgccagggccgcctcgaggaaggcgagggctgaggccgagggcgacatcgtggcgctgaagaactacctcaacgcgcagtactacggcgagatcgccatcggcacgccgccgcagatggtcaccgacatcttcacacc

SEQ ID NO: 5791 - DNA, 529 bp, Oryza sativa
  Clone ID: uC-osflcyp153c10b1
ttgtgttttttcacgcgtgccctcacctcatcaggtggacaagaatggatatgccgcggttgatgagtcctttataattcctcttacatctggttcacaagataatgttgggccggaataccgagccacgattgacattgatgttgagcttcctacaaacactaagaaaacttcagatgggaaggctggaactcaactcttctatgagccggatgaattgatgccagagcgtggatctgaagatgcttcatttggatatgatccggcaatggattacgaaagcaacatgatggtcagagccgtcaaggttgaagacagtaatgacgaggatgtctcacatagtaatgatggcgatgtaaagaaaccagagaaggagaagataaggggtacaaaggatggttcggataaaagaaagaaggatgcaatactcaggaggctctctgctccaaagaccccactcaatgatgcacagaaacgtgcacagaacatgcgagcatataaagctgatctccagaaactgaagaaagag

SEQ ID NO: 5792 - DNA, 379 bp, Oryza sativa
  unsure (1)..(379): unsure at all n locations
  Clone ID: uC-osflcyp153c11b1
cggggcggaatagttgggatgacccacgcggggactcaaagaacgcgagcggccaccctaganaggggggggtttttgaaagggtatcctccgttgtccccccnggaaaaagattgagtgggaagaaaaaaaaaaaaaaagggggctaatgggggtattctccaaggaggggaaacctatttaaaaggaaagacggaaagtgggacctaaagaaagaaaaaggggggggaaaaaaactaaaggggaaaaaaggggacacttccaggtgaaaagacagggtagggacaaaaaaagcaacagacatatgaagggcagagggggcccctttttgcgaggcactaaggaagggcaccaccagggaaaaaaaagaagcgcaaaa

SEQ ID NO: 5793 - DNA, 410 bp, Oryza sativa
  Clone ID: uC-osflcyp153d02b1
ttttctccatcgcgccgggctacttaaatgcaaggctgctgctgctgcatataacttcacgcatgtagagttttgcctagaccgccacacagaacaaggatcaatatcgccaagaagcttgaactttgggcatctcaacattgcaagaatgatacttgcggagctgcgaatcctattgaattgcacacaccatggtgggtggcaatcgggagactagaaccatgaatcgatgatacgaaggatggctaggagctgtatcacccatagcaggggaggagatgtttgatcacacgattttgattgagatgtgcctcgcacacttgccagtgatggtgctgagaagagcaatggactggatcgactgtgaaatgcttactgcggcttgtggcctttgtctgcaacaagagcct

SEQ ID NO: 5794 - DNA, 515 bp, Oryza sativa
  Clone ID: uC-osflcyp153d04b1
gccctaatagacgagacgagggagagaaggagaagagggggttcttcgcgggcgtcgtcgtgttcctccccccctctctctcctctcctctcctctcgatctccatccttccttccatccattcctccccgcacccttcgcattgctctcgtcgtctcgattcggtcgaggatctccaggaaaagaggaggaagcgatatgggttgcttttcatgctgcggagcggatgatgtcggcaagaagaagaagcgcgacgatccttacgtcccgatccctgatccagggggaaactatggacgtagcaagcccgggcccccagccccttcgcgttctccccccaccagcagaaatctgccaattgcagtaccggcaattccccttgatgaaataaagggaataaccaagaacttcagcagtgatgctctcatcggagaaggctcgtacgccagagttttctttggtgtgctgagagatggcaggagatctgcggtgaagaagctcgactccagcaacag

SEQ ID NO: 5795 - DNA, 461 bp, Oryza sativa
  unsure (1)..(461): unsure at all n locations
  Clone ID: uC-osflcyp153d06b1
caagggcaaccgcagggctggacaaagtgtctatgtttccttgaggatcacacactgnggagtttgttatgctgatgttgcatggacaaggaatatactcaacaattcgatgtaccctttagtccctgggcatgagatagcaggagttgtaactgaggttggtgcagacgtcaagagcttcaaagtgggtgaccatgtaggtgttggcacatacgtgaattcatgccgggactgtgagaactgcaatagctctctagagaactactgctcacaacatgtcttcactttcaatggtgttgacactgatgggactgtcacaaagggaggatattctactcacatagtagtacatgagaggtattgctttaaaatacctgatggctaccctttggaaaaggcagcacctttactttgtgctggcattacttgatatagtccgatgatgcggcataatatgaacc

SEQ ID NO: 5796 - DNA, 485 bp, Oryza sativa
  Clone ID: uC-osflcyp153d09b1
ggcgctgatgccgctcccccgggacgaggccatcggcggcttcattttcgtctgcaacaacgacaccatggaggaaaacctcaagaggcagctcttcgggcttccatcgagatacagggattcagtgagggcgatcaggccagggctgcccctcttcctctacaactactccacccaccagctccacggcatcttcgaggctgcgagctttggcggaacaaacatcgatccgacggcgtgggaggacaagaagtgccccggcgagtcgcgcttccctgcacaggtgaaggttgcgacgaggaagatctatgacccgctggaggaggacgccttccggccgatcctccaccactacgacggccccaagttcaggctggagctcagcgtcgccgaggcgctctcccttcttgacatctttgcagacaaggatgacgcctgaggctactgcttccctgctgctgcttgctgaaagaaatcaggggact

SEQ ID NO: 5797 - DNA, 495 bp, Oryza sativa
  Clone ID: uC-osflcyp153d10b1
gccctggatctaagtaatttacctcctccacctgctgctccttctcccgagcggatcggccctgctcctcctcctccgccgccgacaccgccgccgcagataggagaagatggccgcacttgataccttcctctttacctcggagtctgtgaacgagggccaccctgacaagctctgcgaccaagtctcagatgctgtgcttgatgcctgcctcgccgaggaccctgacagcaaggtcgcttgtgagacctgcaccaagacaaacatggtcatggtctttggtgagatcaccaccaaggctaacgttgactatgagaagattgtcagggagacatgccgtaacatcggttttgtgtcagctgatgtcggtctcgatgctgaccactgcaaggtgcttgtgaacatcgagcagcagtcccctgacattgcacagggtgtgcacggccacttcaccaagcgccctgaggagattggtgctggtgaccagggacacat

SEQ ID NO: 5798 - DNA, 308 bp, Oryza sativa
  Clone ID: uC-osflcyp153d11b1
catagggattaacgtttggtgtatatacgtcaattgattttagtaatcacagctgtcctgtaataatagaactactaaagttgatgaaatacggattatcgtgcgctaaaaaaaaaaaaaaaaaaaaaaaaaaaaaaaaaaaaaaaaaaaaaaaaaaaaaaaaaaaaaaaaaaaaaaaaaaaaaaaaaaaaaaaaaaaaaaaaaaaaaaaaaaaaaaaaaaaaaaaaaaaaaaaaaaaaaaaaaaaaaaaaaaaacgggggggggggtgggaaaaatggggcgggacaaaccctggggggacggaagg

SEQ ID NO: 5799 - DNA, 446 bp, Oryza sativa
  Clone ID: uC-osflcyp153e02b1
ggcagtcactccccctctttaccttttcctcctcggttcggttccttggttcgtctagggtttagtggcccgagatggcggcgccggatgtcgagtaccgctgcttcgacagcggcctcgcctgggccaccgacgaccgctccctcgaggccgccttctccacctacggcgagagcctcgactccaagatcatcaacgacagggagacggggaggtcacgtgggtttggcttcgtcaccttctcctccgagcagtcgatgcgcgacgccatcgagggcatgaacggcaaggagctcgacggccgcaacatcaccgtcaatgaggcccagtcccgccgctccggcggcggaggcggcggctacagcggcggcggtggcggctacgcggcggtcgtggaggccgcggctacgaagaagtggcggcggcgggtaccggcgccgtgaggg

SEQ ID NO: 5800 - DNA, 498 bp, Oryza sativa
  unsure (1)..(498): unsure at all n locations
  Clone ID: uC-osflcyp153e03b1
ttttgattcatcgcggccgatccatcatatcatcagcaaccaattcgcaccgatcgatcgatcgttcgatccagcaactagatcaacagtactagctaggaagcatggcccgtgcacagttggtggttggtcgncctggtggcagctctgctcctcgccgccccgcacgccgacgtggccatcacctgcggccaggtcaactccgccgtcgggccctgcctgacctacgcccgcggcggcgccgggccgtcggcggcctgctgcagcggcgtgaggagcctcaaggcggcagcaagcacgaccgcagaccggcgcaccgcctgcaactgcctcaagaacgcggcccgcggcatcaaggggctcaacgccggcaacgccgccagcatcccctccaagtgcggcgtcagcgtcccctacaccatcagcgcttccatcgactgctccagggtgagctgagccatcgatcagagagacggatcatatatatacagcagcgcg

SEQ ID NO: 5801 - DNA, 497 bp, Oryza sativa
  unsure (1)..(497): unsure at all n locations
  Clone ID: uC-osflcyp153e08b1
ctcnaaatgcaagccaactgaacgaactcaagaacagattctaacaattgtagctgattcctctctgcttctcgttgttcttggttggttgttgctgtagaagaagaagaaagaagaagatgtcgacggtgactcgtgcctacttggatcagaagctcgcactcgccaagcgctgctccagagaggcgacgctcgccggagccaaggctgcggcggtggcgacggtggcatccgccgtcccaacgttggcgagcgtgaggatgctgccatgggcgaaggccaacatcaacccgacgggtcaggcgctgatcatctgcacggcggctgggatggcatacttcgtcgccgccgacaagaagatcctctcgctggcgaggaagcactcgttcgagggcgcaccggagcaccttaagaacacctgctttcagggcaccggcccgcctcacccagcctttttaagccatgaggaacactgaactttcacagtgactgatgga

SEQ ID NO: 5802 - DNA, 530 bp, Oryza sativa
  Clone ID: uC-osflcyp153e11b1
ttgttgtttcacgcgtccgatcaatccttcctcccagccaagatctttcttcctgctcctcttcttcaggactcaattcgtcttctgatagcttagcttgattggggtgggtgacaatgggaggtggcaaggacaagcatgacgagagcgacaaggggctcttctctaacatgatgcacggcgttgccggcggccatgggtatcctcctcaccagggataccctcctcagggctacccgccgccgccgggagcgtacccgcctcctccgggggcttatccccctcctcctggggcttaccctccaccacctggggcataccctccacagcatgggtaccctcagcctggtggctaccctccacctggtggttacccccaacatggtggctaccctgctgcgggctaccccggatcatctgggcaccagggcggccatgggaagtagcggggaggacacatgggagcaatgctggctggaggcgccgctgcggctgctgcagcctatggggcacacaagatctcttctcat

SEQ ID NO: 5803 - DNA, 513 bp, Oryza sativa
  Clone ID: uC-osflcyp153e12b1
gccctcggctcaacagaggaggggcgccgatctccatctggctatcagagcaggggaggggaagggaaggtatcctgaaagatgcttaatcttatcaaaataaaggataaaaagaaagagcaggcagcaagtgctgctggaaaggctcctgtgaagaagcaatctgctggagagctccgtcttcacaaagatattagtgagctaaacctacccaagagcacatcaatttcttttcccaatggcaaggatgatctgatgaattttgagatcatcgtccgacctgatgaaggatattacctaggtggcactttcgtctttacttttcaagtctctccctcttatcctcatgaacctccaaaggtgaagtgcaagaccaaggtataccatccaaatattgatttggaaggaaatgtatgcctgaacattttgcgtgaagattggaagcctgttctcaacatcaacactgttatttatggccttaaccttctttttacgcaaccaaacgatgaggat

SEQ ID NO: 5804 - DNA, 502 bp, Oryza sativa
  Clone ID: uC-osflcyp153f01b1
ggcatgatggctcttcactctccccctgttcctgcaggggtcaggcactgcctgctacaagagtggtgcaggtgattcggctagctcagcgcgaagatgggggagatcaccaatgtcacggagtaccaggccatcgcgaagcagaagcttccgaagatgatctacgactactatgcatctggggccgaggacgagtggactctccaggagaacagggaggccttcgccaggatcctgtttcgcccacgcatactgatcgacgtatccaagattgacatggccacaacagtcctggggttcaagatttcaatgcccattatgattgctccctctgccatgcagaagatggctcacccagatggagagtatgcaactgcgcgtgctgcatcagcagcgggcactataatgacattgtcatcatgggctacttcaagcgttgaggaggttgcctcaactggacccaggattcgtttcttccagctttatgtttacaaagacagga

SEQ ID NO: 5805 - DNA, 503 bp, Oryza sativa
  Clone ID: uC-osflcyp153f02b1
ctcctcccaccgccccccacatccggttccccgaggttgcatttctctgcagccttgcgaggatcggatgaacccatcgtcaccagacgaattctccaactgagtactctgctcccataatcctattgatccacacagcgaggggcactgcaagaagcatgcagtgcccaatggacgcagctgcaagtggaacttcgcctgtgatgcagttccatggcattgttgatgagccaccctcccattcatctccgctgcacacggggctggaacgttcgcagcgccattgctatggtcatgaaaccccaggagaattcccccttgctgtgagcccctccattgtgctacatgtgctctccacctgcgagctagatcctaaagatctcgctgcactggaggctacatgtacattcttcagtaaacctgcaaatttcgagccaaactttgctctatcgcttcagaggttgcggcatttgatatgtgccataaaagacccatggttaagc

SEQ ID NO: 5806 - DNA, 524 bp, Oryza sativa
  Clone ID: uC-osflcyp153f04b1
ttgctctcgcgtccggcgcatcatgaaaattcaccagcaactgtaaagagcaagacagaatagcaacaagaaaacgaactacatgagaagagaatggatgacagtcaggagtgcatgtctgaggagggtagaataagtgaagggctatcttgtgctaaaagccacgtaattagctcttctgatcctgcatgttctaaagagaaaaatcccagagctgaaggtgaaggacataaggatttggacctacagaaaaacaacgccaccaagaaggacaaacctgctgctaaaccaataatagtcccaattgtgttgaggatgtctgattttgatcacaaggcattgttagaggaatggatagccaccagggcttccagggataattgtcttcctcaggatcatcgaaagcttataaacaaccttaagcttattcaggactatctttgttcttttgaatcacagggattgaccgttgttgacatttcagcgaactcattccctcagacactagattggcttcacagcta

SEQ ID NO: 5807 - DNA, 478 bp, Oryza sativa
  Clone ID: uC-osflcyp153f05b1
aacctccgcccctcgccaggaatgtcaccgccaacgacaaggactaggcaccgcgggaggatctccggcccgaatctcgccgtgcgccccaactctaggccagcggcagatctggtcccgctggatccggcctccgtagtccacagcctcgccgcggacggcatctcctcgccggagtcgctctcgctgctccctcaccagccgccaccctgcagcgcttccccccaacatcgacagcaacaaagctccctgaagttcaacatctgtgttttcccttttctgctaaggtcagtgaacttatcccaaaaccacagccgaagacaagattgaatcataaggtcgcttggatatatggggacatttcaaactagatgtgtttaacgtatatgaattatagttgcatgtagcatgctgaatagaacttgaatagatcggtgaatgaaaaatgtggatgggatatatataacttggattatgt

SEQ ID NO: 5808 - DNA, 500 bp, Oryza sativa
  unsure (1)..(500): unsure at all n locations
  Clone ID: uC-osflcyp153f06b1
gaaactcaccgttcctctctcaaaaccgcgggaatcaatgaatctttgttcgcgtcgcgccacgagttattttcccccaagaaaagttggagtgagggatgagtgctatggcgatgtcgtcgctgaacccgaacgcggcgccgttcatcccggcagcgttcaggagggtggaggacttctcgccggagtggtgggagctcgtcaagaccacggcgtggttccgcgaccactggttcaggcagcaccagatgtacgaggacgctgcggcggaggaggaccaccaccgccaggtgttcgacgacgacctcgccgcgctcctgcccgacgactcgctcgacctcctcgacatggtcgacaccgacgacctcttctacacccccgacccccccgtccaccacaagccgacgacgactgccaccctcgacgccgacgtgctcagggcgctcagcctcaactcgncgaggttgggcggcgcccggatggtgaggcacgccgagaag

SEQ ID NO: 5809 - DNA, 463 bp, Oryza sativa
  Clone ID: uC-osflcyp153f08b1
ctcagagagacaggggagaaaaccctaatctcaaggcctcggctgtgagcgctcctcccgtctctcccccaacccgccgccagccaccgagctcgccaccgtctgcgttgcctcgccgtgctctaggttctcggatggaggccgaggcggcggcgaagagggcgcgggagagcggtgacgcggcggcggccggtgccggcgagcaggcgggtatctctgccgtcatccctggatggttctccgagattagccccatgtggcctggtgaggcacactcattgaaggtcgaaaaggtactattccaaggaaagtcggactaccaaaatgtgatgggttttcagtcctccacgtacggcaaggtgcttgtgctggatggagtgattcaggtcactgagagggatgagtgtgcttaccaagagatgattacccacctgcccctttgctttatcaaagatcccagaag

SEQ ID NO: 5810 - DNA, 497 bp, Oryza sativa
  Clone ID: uC-osflcyp153f09b1
cctacctcatgctgggactcgacagaagcctacagctttttgtgcctaaagcaaaatctgtctcccgaacagggaagtgttttatgccccaactacctccgttgacacgatgcgaggtaggatcgaatatattgttcaagaaaaaggaaaagccacagaatccacagtaccgaggatcacaaaatggaacaaccaatggcgctgatcccttagcccttcctcaactctgtgtacgcttgaatacgcttcaattcgtgcgaggtgaactcgagaacttagagaagaagataaaaacaggcttgcggaatgtcgagtcagctcaggcagatgttaccgatggattggacatcaaatttgagctttgtcagacagcctgtcaagagggcattcagcagttatgtgagacaactgcatataaggtgacattctatgatttggggcacgttctctgggatatcctttatattggtgacattgcatcaagtaggatcgagata

SEQ ID NO: 5811 - DNA, 461 bp, Oryza sativa
  Clone ID: uC-osflcyp153f10b1
ctcccatctcgaaaagcttcattagcagagtgatcgacatggtaattaaatggcgtcgtcgttgtcgcccatggcgatgttcgtcgtggtcctgatgtgcgcctcagcaatggccgcccaggcgcgcctcccgccggggtctagcccgctggtggcggcgtgcacggcggggccgttctccaagctgtgcgtcaaggacctgggccaccgcctgctggacatccagacggtgctgacgtcggtgtcgaaccacggcgccgccatcgccggcgcgccggggcaggtggacttcaggtccctggtcgccgtcgccatggaggccgccacggagtccggcgcggtggcggcgacggtgttcgaggggaagctccccgggttcaacaagtccgtgccggacttcaaggcctgcctcgacaactgcagcgtgacggtgtcgagcgccatgaaggagatccacggcg

SEQ ID NO: 5812 - DNA, 501 bp, Oryza sativa
  unsure (1)..(501): unsure at all n locations
  Clone ID: uC-osflcyp153f11b1
ggcggtcncttgctagggatcaatagncggattattcctgtgccgttgcaacagaaatagaattggcaaagagattgaaggagttctttctgaaggaaacagggtaagtatatttgttacaccaaataattttcatgcgtggaacatgatgacaaaggctccattcgaagtagatagtagcttatagattatagattattctgattttgtttatagcttttcgagggcacaaataaattttaaaaaatatttaaaaagttgaaaaatgaacttttaaatgtatcataagcaattttttctatgtagatttttttccaaaaatataacgtttaggagtaactagtagctgaaaagaacagggccaaaaaagatgttccatttccagtccactgtcaataaatattagctatgttgctaacattttcctgtactattggaatgaaactgtctgaagtccaagtatagcttaattgtgtattaaggtgtccatactgtcttacc

SEQ ID NO: 5813 - DNA, 495 bp, Oryza sativa
  Clone ID: uC-osflcyp153f12b1
gtccatccgcctgcccctgctcctcctcctcgccggcgtcgtttccgccgcggcgccactgctcgccaccgcccagctctccgccgacttctactcctccacctgccccaacgtcgagaaggtcgtctccaccgtcatcgagcgcaagttcaaggaggaccctaccacctgcgccctgctcctccgcctgctcttccacgactgcttcgccaatggatgcgacgcgtcgatcttgatcgacccgctgtcgaaccagagcgcggagaaggaggcggggccgaacatctcggtgaagggctacgacatcatcgacgagatcaagacggagctggagaaggagtgcccgcaggtggtgtcgtgcgcggacatcgtggcgctcagcacgcgcgacagcgtgcgcctcgccgggggccccaactacgacgtgcccaccggcccgcgcgactcgctcgtctccaaccgcgaggaagggcgactcgcttccccggccggaca

SEQ ID NO: 5814 - DNA, 507 bp, Oryza sativa
  unsure (1)..(507): unsure at all n locations
  Clone ID: uC-osflcyp153g01b1
atcgatccgaacgcgagagcgaggagagcgcgagatctcggctgctgcgacggcgatggcgctctccgaccgctcccgcgagtcgctcctgccgagcttcctctactcgacggcgggggcgcggccgtacaccgcgggcggcggcggcgccgccttccgcctccccgccgcggcggccccgggaggtgaggagggggcgcgccgatcgagatccaggcgcccagggagaagatcgagatgtactcgccggcgttctacgccgtctgcacggccgggggcatcgccagctgcggcctcacccacatgggggtcaccccgctcgacctcgtcaagtgcaacatgcagattgatccagcaaagtacaagagcatcacatctgggtttggaatattggctaaggagcaaggagtcaggngcttcttcaagggctggggtcccactcttcttggctacaagtgctcaggcgcctgcaagtttgggttttatgaattctttaagaagtactac

SEQ ID NO: 5815 - DNA, 442 bp, Oryza sativa
  Clone ID: uC-osflcyp153g02b1
ggggatcatggaggaggaggcaagcgcaccccatgggagtgatggagaagctcagacttccgcgaaggagcccgcgtcaccgctctgctatcgccgattcggtctttttcttccagcagttgtcagaccaatgttggattcttgggagacagcaaaacaagttcctccacctgcgctgaatgatgttgttgcaggcgtcaccggcaagaaaaaggagtgacttggcatcttttccacttgctaatgttgtcgcaacgatttctctttgttttgactccggatgggaagcctctcccagtccagatgattaggatcatccattcatatgtccagcacagtgtgaaaacagtactaccatgtgatcggcaaaataatcgtgttgtacctgaacttactttcaacataatgaaattaatgctgcaattttcagctttgagcttgc

SEQ ID NO: 5816 - DNA, 369 bp, Oryza sativa
  Clone ID: uC-osflcyp153g03b1
cgactggagaaagaaaccacctgatcgagcccgtatctttgcagttcgcaggagaggaggacgagtcgttcgttgtgcagcaggaggcggcggcgaagatgtcgtgggagacgtacgtcgacgatcacctgatgtgcgagatcgagggccaccacctcacctccgccgccatcgtcggccacgacggcaccgtctgggcacagagcgccgccttcccgcagttcaaaccggaggagatgaccaacatcatgaaggacttcgacgagccggggttcctcgccccgaccggactgtttcttggaccaaccaagtacatggtcatccaaggtgaacctggcgctgtcattcgtggcaagaaggggatcagga

SEQ ID NO: 5817 - DNA, 514 bp, Oryza sativa
  Clone ID: uC-osflcyp153g05b1
gactcaggcccctggtgacatttgtggttgtccagaagaggcaccacacaaggctcttccctgaggtgcatggaaggcaagatctgacggacagaagtggaaatgttcgtccaggaaccgtggttgacactaacatttgccaccctagtgagttcgacttctacctgtgcagccatgccggaatccagggaacaagcagaccaacccactaccacgttctccatgacgagaaccgttttagtgccgatcagctgcagatgctcacttacaatttgtgttacacctacgctcgatgcacccggtctgtctctgttgtccctccagcctactacgctcacctggcagcattccgggcgaggtactacgatgagccccccgccatggacggagcttcgtcggtcggcagcggcggcaaccaggcggcggccggcggccagccaccggcggtgcgccgcctcccgcagatcaaggagaacgtcaaggacgtgatgttctactgctgatcgaatcggcg

SEQ ID NO: 5818 - DNA, 506 bp, Oryza sativa
  Clone ID: uC-osflcyp153g06b1
agacctgaactacaagtgcatacaatggaaatcaggcaggacgatatgcaggcaattctcaaagcatacctgcaaacgtcactacacaatatgagcggagttcactgacacctgaaagccagttcaatggttccgcactgcagaatcaagtttctaggggctccaatatactggcattgggaccaccacagcaacaacatcagcaaaattttgaattctcagcactaggtggccagtccatgcagcccaccggcttgaatcctttcgatgactggtcgcaaccgcaggagaaccggagtggggttgacgactacctgatggaggagatcaggatgcggagccacgagatattggagaacgaagagatgcaacagatgttgcggattttgagcatgggtggcgcgtcaaccaacctgacggaagacggcttcgcatttcctaactacatgccatcaactgcccccaacttcaactgtggggatgaccgtgcccgcccacctgggaaa

SEQ ID NO: 5819 - DNA, 504 bp, Oryza sativa
  unsure (1)..(504): unsure at all n locations
  Clone ID: uC-osflcyp153g07b1
catccgtctcgacgtggccgcctccgctccttgcgccatctctcggctgaacaggggaggggcgccgatctccattggcgagcagagcagggcgcgggaggggagggggatcctgaaaacacttggtttcccaaatgaagcacatattcaagataattgctatgctggtggcagtctcagctatttggattgcccttcttgaaaccgcgactgttcctcgaagttatacttggttgcttcccatctacttggtagtggcacttggatgctatggcctttttatggttggatttgggcttatgttcttcccaacttgcccgcaagaagctgtactactacagcaggatatcttggaggcaaaggaattcctatcaaagaaaggtgttgatgttggctctgaataatgtcaagatcgatgatagatgacttgaggctagtttggggacaactttgtgctcccttatatgagttgttttggnggctttatagctaggtatatgtcac

SEQ ID NO: 5820 - DNA, 334 bp, Oryza sativa
  Clone ID: uC-osflcyp153g09b1
gcggtttccaactcaactgcgggcactcaccaatggcggcgtcgtttctcctcgtctcgctcctgctcaccggctagcggagcgccagagccatcacaccctcaagctgaagcggcggcggtgttcccgaaggaagccctgccgaccaactccggctacctccccatcacgacaaccaacgcctggctcttcttcgcctactacgaggccacgcacccgctcacgccgccggcctgcacgccgctcctcctctggctgcagggcggccccggctggtccgggctcgccggcaattgcttcgagctcggcccctacttcgtcaaccgcgacgcgc

SEQ ID NO: 5821 - DNA, 486 bp, Oryza sativa
  unsure (1)..(486): unsure at all n locations
  Clone ID: uC-osflcyp153g12b1
gcgcgtcaacccactccgatcgcaaatactctctgtcggcgatagtagcagcagcagcaatggccgccctcgccgccgcatccaccgccttcgccgccaagccgcgcctggcgcgcgcgccgtcgtccccggccgcgcggttctccgtgtcgtgctccgcgtcgggcaacaacggcggcgccggcgagatggcgcagtcgctggcggcgtcggccaagacgttctccgcggcgctggcgctgtcctcggtgctgctctctcgggcggcgacgtcgccgccccccgccgccgccgacatcgccgggctgacgccgtgcaaggagtccaaggcgttcgcgaagcgggagaagcagtccatcaagaagctccagtcgtcgctcaagaagtacgcgccggactccgcgccggcgctcgccatgaacgccaccatcgagaagacgaagcgccgcttcgagaactacngcaaggtcggcctgctctgcggcg

SEQ ID NO: 5822 - DNA, 514 bp, Oryza sativa
  Clone ID: uC-osflcyp153h01b1
gtgtgcttaactggctgggtcctggagtctgccctaaagttgttgaaaagggtttcagatgtataatgagtaaccaaggtgtatggtaccttgatcatcttgatgtttcctggcaagatttctacactagtgagccactcgctggaattaataacacagcacagcaaaagcttgtacttggtggagaggtttgcatgtggggtgagacagcagacacctctgatgttcagcaaacgatatggccacgagcagctgcagcagcagagcgtatgtggagtcagttagaggccatatctgcccaagacctggaaacaaccgtcttggctcggttacactatttcagatgcctgctgaatcaccgtggaatcgctgcagctccagtcacaaactcttatgctcggcgtgccccaattggtcctggttcatgcttcattcagtaaacagggagctgcagagcaaaataggcataagaggggtatttgccttcatacacctttcacactttaaacaaaat

SEQ ID NO: 5823 - DNA, 457 bp, Oryza sativa
  Clone ID: uC-osflcyp153h02b1
ctgctaactggttctgaggtccgcatcattgatgatgacatgccctttgctcaatttgctgttgccttcaatggagcatcatggatagatcctgattctattgccttggatggtcatgcaatccatgcttggctcatggaacaagagtgctggaggagggaaacacatgggttcagagcttgtacaaagggtagcgatcaatgacattgctgagagtataatggcatttaatacaaattacaaggacactggcctctttggtgtctacgctgttgctaagcctgactgcttggatgatttggcttttgcaatcatgcaagagattagcaaactgtcataccgggttactgaggaagatgttatccgtgcacgtaatcagctgaaatcttacatccaactgcacctcgatggttccactgctgttgttgaggatattggccgtcagttactcatctat

SEQ ID NO: 5824 - DNA, 493 bp, Oryza sativa
  Clone ID: uC-osflcyp153h04b1
cacagtacgcactcacacactcagcttaagcgagcgagcgagtgaactagagagagagacagagatggcgagtgttgcctccttcccggtgatcaacatggagaacctggagaccgaggagaggggcgcagcaatggaggtcatccgcgacgcctgcgagaactggggcttcttcgagatgctgaaccatggcatcgcgcacgagctgatggacgaggtggagcgggtgagcaaggcgcactacgccaactgccgggaggagaagttcaaggagttcgcgcggcggatgctggaggccggcgagaagggcgccgacgtgaagggcatcgactgggagagcaccttcttcgttcgccaccgccccgtctccaacctcgccgacctgcccgacgtcgacgaccactacaggcaggtgatgaagcaatttgcgtcggagatcgagaagctctcggagagggtgctggacctgctgtgcgagaatctgggcctggag

SEQ ID NO: 5825 - DNA, 101 bp, Oryza sativa
  unsure (1)..(101): unsure at all n locations
  Clone ID: uC-osflcyp153h05b1
gagatgatgatgctttggcaacaccaactcgatcatgaggtcgttgaacaaaatcgaggcgtttctacccaaagacaacgagntgggggggcggataccca

SEQ ID NO: 5826 - DNA, 417 bp, Oryza sativa
  Clone ID: uC-osflcyp153h07b1
gtaggcttctcctccccctctttaccttttcctcctcggttctgttccgtggttcgtctagggttcagcgggttgagatggcggcgccggatgtcgagtaccgctgcttcgtcggcggcctcgcctgggccaccgacgaccgctccctcgaggccgccttctccacctacggcgagatcctcgactccaagatcatcaacgacagggagacggggaggtcacgtgggtttggcttcgtcaccttctcctccgagcagtcgatgcgcgacgccatcgagggcatgaacggcaaggagctcgacggccgcaacatcaccgacaatgaggcccagtcccgccgctccagcggcggaggcggtggctacggcggcggcggtggcggctactgcggcggtcgtggaggccgcggctacgagg

SEQ ID NO: 5827 - DNA, 463 bp, Oryza sativa
  Clone ID: uC-osflcyp153h08b1
catcatatcaaaagaatgtcgaggcttcacataataagggtctgaagactgttccaaatagcattcgctcagagaactatgtcatcacctttgaagttgaggaagaaaaagtttcctttctttggaaaaaagtaccaactcaaatttgcaaatgaatcaatgttcgagaatcactgcctggtccactttcccagctttatgagattagcaagggaggcaggacttgaatatgtagagatccagaatttaaccgagttttacgatgataacagaactcagtttgctccattgctgggtggttatggttccagtttggtggatccgcgtggaaagcttgtcgctcgttcgtttgatattttaggcttgtattcaacttttgttttccagaagcctgacccagatgcaatgccaccaattggtaacacccgattgcatgatcctgagaatgatcaagagaggaatg

SEQ ID NO: 5828 - DNA, 490 bp, Oryza sativa
  Clone ID: uC-osflcyp153h09b1
gcggtccccgacctccacagctccgactgcatcgctcagctccacatcgccaccaacgagccatgccccggccaggagccatccaagatcgtgccaatgtcggaggggacccttggctgccgtcgccggcaagacccactaccgatcggcgttgtgcgcgtccgtgaccatctgcggcccaatcaagaagaagatcatagaccacttccacaagaagccggtgccacccaagccggagccaaagccggagccacccaagcccaagcctgagccggagcacccattcctcgaccacatccacaagaaggagaagcacttcttcgaccacttgcacaagaagcccgtgccacccaagcctgagcctaagcccgagcccaagccgcagcctgcgccagagtaccacaaccctagccctccggcgaattaagcatggaagtttgcatgcatgcatggttcgtttgggtagtacgtttggtgttggtgcatatga

SEQ ID NO: 5829 - DNA, 501 bp, Oryza sativa
  Clone ID: uC-osflcyp153h10b1
tcgtacatcccccaaatcctcttcttctgctccgacctcacctttcctccttcctccgccgactccctcccctccgccattgcagcctcgcctacggccttgagctcgtcgccgatccccgccaccgccgcgacctctgcctgccccccatgcctcggccggcgaaaatcaggaaaaaacatgagaatgtgtttgatcaattgatcaaggcgataaaagctcctgtggactttgatctgccgcctgtattgaaagaatggaagtcaaattactatgtaccaattaagcggaatgcttatatgactcggaaacgcgttgaggatgatggcattttttgttcctgtaccccttctggatcatccgcaacttgtgacaaagattgccaatgcgggatgttgttctcttggtgttcgtcgacctgtaaatgtgagaataaatgtgctaacaaaccgtttcagcataggactttgaggaaaaccaaattaattaagacagagaaat

SEQ ID NO: 5830 - DNA, 507 bp, Oryza sativa
  Clone ID: uC-osflcyp153h11b1
tgctcgatggctgttgtctggatacagaatcagctgcgacatatccaaacaagggagctcattttgcaatatgctgaccagctctgcgagcgtctcccaagccccaatggcgaattggcagtcgactgcgatgagatctcaaacatgccgaacctttcattcaccatagcaaacaagaccttcaccttgacaccagagcagtacgtagtgaagctggagcagcaaggtcaaactgtttgcatcagcgggttcatggcgttcgacgtgccacctccacgcggccactctggattcttggagacgtgttcatggctgcataccacactgtcttcgactttggcaaaaacaggattgggttcgccgagtctgcttgaattgcttggctagggccttcaggatcatacaacatatcaagtattgtaatgtttgttaggcagcttgtttactcggtattgtaacctgggaatgtctaaaggtatagtgcattagtagtagcatgcaaaacct

SEQ ID NO: 5831 - DNA, 507 bp, Oryza sativa
  unsure (1)..(507): unsure at all n locations
  Clone ID: uC-osflcyp153h12b1
cttcaggaggcggaaagggaagcancgggccccagggtccttttgcagcggtggctcactcaccacgctctgctctcaccaaactgtgtcttatctccttccaagagcccaancccctgttcttctttttttttgtttgttcttgttaggatcattttcttgagctttcaagctcagctgcagcactccccccgttcgtttgcagctgcagcagagatcttggttagttggatttttagcttccgcgttttttgagcgagttcttggttaattgctccaatccgagaaaaatcactaagtgtgctgtgcttgcctgcctccccccttgtattctgggcttcgattcgagcgaattcgaagccccggcccaaatgtatggattgtcccacccctcctttgtgtaaaaagcgggttccatcgcgtgacccgcacggctcggccgatcgaaaagcagcttgaagaagaaaaagtgagagctcttgattcgattctggtcgtagcaacagc

SEQ ID NO: 5832 - DNA, 322 bp, Oryza sativa
  Clone ID: uC-osflcyp154a03b1
cgagtcatgcttcgatttgatccgcgcgcggagaagacgaagcgtgagagagagggcgcggatttgcgccggttgaagatggtggatctagcaacggccccctcccttacaaagcgctgagcaggacacatgctctcaggtctgcgagctggagagcatatttcagtcctccagccatgaacaggcagatgatgacaatgccaggaaccaagccctagagtttctaaatgagctgggctgacttctacatagagcaaacataatatctaaacacgataaggctcctctagcatcctttaacatatggcgatccacaaatctt

SEQ ID NO: 5833 - DNA, 503 bp, Oryza sativa
  unsure (1)..(503): unsure at all n locations
  Clone ID: uC-osflcyp154a06b1
cagaatcctcctcgtgtcggngggaccccgagccgagcgatcgatctaatcgaatcccccgccgtcgccgcctcctcgccgtcgagctcgaccgcgccgccgcgttgcccccctctcctcctcctcccccggcgacgcgtcggtcgctgagggagcttgtcttggtgctcgccgcgttaaaccccgcgaggcggcgagcaggggctgtgatggtggtgatcgagcaggagccggaggtcgaggagacgccggcggcggcagaggagccggctgccgaggagcaagcggcgggtggtgcggccggaggggaggcggcgagggcggatggggaagacgaggaggaggccttcgaggacgcgctgaccgacgagcagctccgggagaaagctagaagccaagcaaatgatgcaaaggcagaagggaacaagttttttggtgctggagaatatgagagggcattgtcgcaatatgagacagctttgcaaatggctgctgagctggaa

SEQ ID NO: 5834 - DNA, 385 bp, Oryza sativa
  Clone ID: uC-osflcyp154a07b1
tgtctccacgccgccttgctagatcaccggagaatctgaagggtataggaacggggggtttcttaaactgtgtgcgtttaaaattggcacctttaggtcatgaaaaaaatgcaaaactgaaggaggcgtccatttctggtatcacatctgtttattctcatattgattcaacagcagtgctaaattttattctaaacttatctgttgaggagcaaaacctcttgaggcgtgcactgaagcaatacacacctcgcattgaagttgatttagtgaactacttacagagcaagaaagatcgttcccgtcccaaatcttatgatcaagcagattatggaacttcttccgaagatggttacgcgcttgcatcaaagaaaagctatccatt

SEQ ID NO: 5835 - DNA, 536 bp, Oryza sativa
  unsure (1)..(536): unsure at all n locations
  Clone ID: uC-osflcyp154a09b1
ggtanatgatactgctggttttgaggcattggagaatgaaggtatggatatggaaattgacttatctaatcttggaactgtgaacacaatgtttgctgcacttttcagcaagctcggtgttccaatcaagaccacagtatctcctaatgttcttgaagaagctatgagtggaacagttacagtgagacctctcccagttggatcatcagcaacgggaaaggttgacaagcaaagtgctcatttttatggtgtaacaataagtgaagaacaagctcagtcaggcattgtagtcagagtcacctcagccgcacaaagtaaatttaagctgcttttctttgaacaagaaattaatggaggttatggactagctcttcaggaagatagtcagaagactggtaaggtgacatctgcaggcatgtatttcttgcattttcaagtgtatcgtatggattcaacagtgaatgcgttggcaatggccaaggatcctgaggctgcattctttaaaagggttgaaggtcttcagccgtgcgaagtgt

SEQ ID NO: 5836 - DNA, 509 bp, Oryza sativa
  Clone ID: uC-osflcyp154a10b1
gtcagaagacggaggtgctcctctcgactcgagtttggagattattccccccgcagaggccgtcgcttggcgcttgctcgcggagatggcgatgaccgtcgaagtgctcgctggacttgcatttatgttctcaacaagtattcttttgcaaatactggcttgtgctctgtacaataattggtggcctatgttagcagctcttatgtatgtccttgtaccgatgccatgcctattcttcggtggtggatctacccagttcttgactagcagagatggtggagggtggttcaatgctgcaaaattcctgactggtgcatctgccatgggaagcattgcaatcccagcaattctgaggcacgctggcctaattgagactggagccatgttcatcgagttcacgtccttttttatccttgtatgcacagtgatgtgcttccatagagctacactggatgaagattggtaaaggctcgaggcacatggacacaagaggtaaatctgtttcatgg

SEQ ID NO: 5837 - DNA, 517 bp, Oryza sativa
  unsure (1)..(517): unsure at all n locations
  Clone ID: uC-osflcyp154a11b1
gtcnggactggaggaagaagagatcgaacagcaatttgcgaattgctgatcgatcgcgagacgatgagcagcagcagcaggccggtgtgcgtcaccggcggcagcggctacatcgcgacgtgcctcatcaagaagctgctgcagcgaggctgcggcgtgcatgcgaccttgagaaatctcggagatgagaagaagacggcgctgctgaggaggatgcccggcgcggcggagcggctggtgctgttcgaggcggacatgtacgacgccgccaccttcgagcccgccatcgccggctgcgagttcgtcttcctcctcgccaccccgctaattcatgatccgcttagcaccaagtacaagaacaccaccgaggcggctgtggacgcgatgcacatcatcctgcagcaatgcgagcggtcaaagacggtgcggcgcgtcatccacacggtctccgtcanccgcgcgtcaccgctcagggaggacggcgaggggtacaaggacttcatcaacgagtcatgct

SEQ ID NO: 5838 - DNA, 423 bp, Oryza sativa
  Clone ID: uC-osflcyp154b02b1
ccggtcgagccaatctctcgctgcgtctctctcgcgctctccactagcaccggatcgggtcggctcgcgcggcggcagcagcggggcggcgtggcgccgagggaggggaacgccggtgtggggagggcggcggctaggggactcgccggcgacgagctggtttgggtatgagaggggttacccatgcggcgccgaccacgagcgtcccccgccgcggatccatggacggcctactcatcaacgactcctacctctcgcttactatacgtggtggccgcgaccactcgtaatctcctcctataactgttagacgatctggcctgtcccccacactctctgatcccgctctctctatctgattggaatcgatgcgaagcgatcttctacacctcgatgacgtcgaacgcaacttggatcgggagg

SEQ ID NO: 5839 - DNA, 544 bp, Oryza sativa
  unsure (1)..(544): unsure at all n locations
  Clone ID: uC-osflcyp154b04b1
ggcgtcnggtgtaaaactgctcattcctttaatttctccagcttccacacaacagtcgatccatcttctctacgaaacttgcctctgcatctggcttttatccttttatgatgcagccgttgattatttgtccactacaagggttatgccaagacttgtagaggttgtgaaaggttcaacaaaagagaaggttgtcagggtcgttatcatgtctatccgtaacttgcttgcaaagggtgcgtttgctgcccaaatgattgatcttggactgccacacatagtacagaatttgaaagctcaagcatggactgatgaggatttattagatgcgctgaatcagctagaaataggactcaaagacaaccttaagaagctgagttcatttgagaagtacaagcaacaagttcttcttggccatcttgactggtctccaatgcacaaagacccaagtttctggcgcgagaacattaataattttgaagaaaatgatttccagattctacgtgtgcttatgacaatcatcgacacatcggccgacacgact

SEQ ID NO: 5840 - DNA, 468 bp, Oryza sativa
  unsure (1)..(468): unsure at all n locations
  Clone ID: uC-osflcyp154b05b1
cganctcctttcttccccgcaatcaattgctcaccggcggagaggccgacgccgccgccgcgttcttcctcctcctgagccctaaaagggaatccagctcgaggtcgaaccaaccaaaagcttggcggcgtcgcggagacgcggccaacctgctccacatacaccgcccgtttcgccagtgtcttttctctttttactggcgcgcgcgcgggcgcgggcgcgggagaggcgagggagtggtggtggcgcgctgcagggggggctgcttggctgcggagtgcggacgacggctataaagagggcggaaagagagcgcccgatcccgctactcatcagctgccgtctcctctgtgtgtgtgctcgcgcgcgcgctccggntgctcctccttgggttcttgatttgctacacgcgtttgcttgctcaccacgtgtttgatggaatacctgtgagtttgcaggcctgatact

SEQ ID NO: 5841 - DNA, 85 bp, Oryza sativa
  Clone ID: uC-osflcyp154b07b1
cctacacacctccccgcgggggtcaccgacgagggcggcccctgggggcgcgcgttccccaaggcgaatgtcgctggggttggtg

SEQ ID NO: 5842 - DNA, 509 bp, Oryza sativa
  Clone ID: uC-osflcyp154b08b1
cctttggcaggtatcctctcccttcactatgatcgcccaacagtgcttgcaatagggactgtcttctgggccttatcaacaggggctgttggagttagccagcatttccggcaggttgcattctggagagctgtaaatggccttggacttgctattgtaataccggcacttcagtcgttcatcgctgacagctacaaagatggtacacgtggcgcagggtttggtttactaagcctcatcggtgcagtaggtggtataggtggtagcattctagccacaatcatggctggaaatgactattggggtttggcaggatggcgtgttgcatttattatggttgctctcgtcagtttgataattggcattcttgtgtacttatatgcgactgacccaagaaaaatccctggtaatcatcttcttgacgacgatgactatgagaggttacatttggccagcaaagatgttcttccaccttcttctatatgaggggattctttggtagcaacaag

SEQ ID NO: 5843 - DNA, 349 bp, Oryza sativa
  unsure (1)..(349): unsure at all n locations
  Clone ID: uC-osflcyp154b09b1
nctctatacatacgacacagggaacatcacaccaacatatgaactaggtcgcccgcgactgttcttcccctttcctggctggccgaggcgagcgaacgactgacgcgcgcgggcgcaagcgccactgatcataacatgcaccggcggtgctgccttctgcgcgcgcgcggctagagcgcggcatcgacatggcgcccatgacaagtgcagaccactgcacgggcaccccggcaccggcgggcgcgcacaggcgctgcatctaacacgtgcacgatcacaacatatgcggcgctgactggcccgtcgactgggcgctcacgcggcaagaagggcgggtaccctacaaggc

SEQ ID NO: 5844 - DNA, 551 bp, Oryza sativa
  unsure (1)..(551): unsure at all n locations
  Clone ID: uC-osflcyp154b10b1
gatanactctactactactagccagtaagctagctaactaactacgtggctatggcccccaccgtgatggcctcctcggccacctccgtggctccattccaagggctcaagtccaccgccggcctccccgtcagccgccgctccaccaactcgggcttcggcaacgtcagcaatggcggaaggatcaagtgcatgcaggtgtggccaattgagggcatcaagaagttcgagaccctatcgtacctgccaccactcaccgtggaggatcttttgaagcagatcgagtacctgcttcgatccaagtgggtgccttgtctcgagttcagcaaggttgggttcgtctaccgtgagaaccacaggtctcccggatactacgatggcaggtattggaccatgtggaagctgcccatgttcggctgcaccgatgccacccaggtgctcaaggagctcgaggaggccaagaaggcctaccccgatgcctttgtccgtatcatcggcttcgacaacgtcaggcaagtgcagttgattagcttcatcgcctacaagccccc

SEQ ID NO: 5845 - DNA, 470 bp, Oryza sativa
  unsure (1)..(470): unsure at all n locations
  Clone ID: uC-osflcyp154b11b1
ngtcatgtttctcttgttaatttcttgagatcctgacaatctgttatcagagcctctcttgcttctcaaattctcttgattctgcggtgaaattgttccttggggtggattggagctgatcttcggatcggcaccgcgaaaaggaaacttgccccctaaggttcgcggaattcggagcgagagcagtaggtacctgatccagatccgaggccatggagactgataagaagttggacctccttctgcaacttgtggaagggaatgagaagaaacgagttgaggctgatgagcgcaccagggcggagtaccaagatctcaagcgtacggtggagtcacggattcctgccgtggagaagagggtggatgaactgggagccgcgttccaggagttgaatctcaaggtggacaagctcgagagtaagatgatgcaagctgccaaggtgagatncggacaggaagtcagctcaaag

SEQ ID NO: 5846 - DNA, 527 bp, Oryza sativa
  unsure (1)..(527): unsure at all n locations
  Clone ID: uC-osflcyp154c02b1
cagagtgacaggccggctgcgatgngcatcggccctaaccaccacattcccttctaccgccagttgtaggaggagaagaaggcgatgctctacagcatattgacccaggtggacgagcaacacaaggctgcagtgctgaccagattaatggacgcgatcaaagccctcgaaaacgaagcaagggaccattacctcgaccgcgccgagagcatgagcagttcggagttcgtgcagatgctggtaatcgacgggtgctacatccttggcaagttcgtgctgcctcactcctgctgccccagcacttcagacgacggggcgcagaacgggagtgcgatgcagaacatggaattggtgcgcgacgtgttctaccgcctggataaccagatacccttctgtgtcctcgacgagatccacaaggtgctccatggtaagatcatccgctcgtgcacggcggtcgccgacgtgttggtaacccacgtcggtgatctgctcgagaacctgagctactccagggtgcacgcactcga

SEQ ID NO: 5847 - DNA, 457 bp, Oryza sativa
  Clone ID: uC-osflcyp154c03b1
ggccattgctggcaaagaacatcaagttgacgaagcaattaaccgatctgggtctttgctggagaagctgaagtcaatgtctgctgagataaaagtccggtcttgccattccctggagagagtaatacagcatgtgaggtctttcatctcaattctaaagcagggagcagaagaagcaacgcagcgatttacagatctaggggctgctgcagctttgaaggcaaagaagttgtcatccgaagcacaggacaatgtctacgtgtttggttcaaccattggggataagtcgaagagggtggtggaggactgcaaagagggcctggagaagtttgtacacagattcaagacagactagccagtaactattagtgtctacaccaacagttgatagttcctgtcaaacttgagaaagaggaaaccgattaagttcttggaataaattccttcatgagtgctg

SEQ ID NO: 5848 - DNA, 506 bp, Oryza sativa
  unsure (1)..(506): unsure at all n locations
  Clone ID: uC-osflcyp154c04b1
gagctgcaaagctcttcctgaataaaggagacacggnaattttttacttgcttccatattttgtcaacttctagcacaatatctgttacctgaaaaatctgtccatagaagttaacccaaccttttttttctacataacttcttttaaaatccatcaacctttttgtgcccacctcagctaaaagttactgttcatggatactacatcaaaatgaaggtacttcctggctaaaatggttctagtttaggtttgaacttggaaaaatcaagccatgctagttttttttatgttttctcgaaaacagttattttttatgttagacatgggtttggaattataaattaagagcttgtagttacaattcttgatatgcatttggatagaatcttcgttgaaattcatatacttgtcctgtgcatattaaaaagtttgagggctttcagccaggcatatgattgactaaactgttgttaattatcctttatatcgtgaactgaacttttga

SEQ ID NO: 5849 - DNA, 551 bp, Oryza sativa
  unsure (1)..(551): unsure at all n locations
  Clone ID: uC-osflcyp154c05b1
cacctcagtattagaaatcctttgtctcttctgctctcactgttgttgtcacttttgttgttcattcccttgtctgtagcagacttaacctctgaaaagcaagcccttctagactttgcctctgcagtgtatcgcggcaacaggctcaactggagtcaaagcacatcattgtgttcttggcatggcgtaaaatgctcaggagatcagtcacacatatttgaattaagggtaccaggtgctggtctcattggagcaattcctccaaacactcttggaaagcttgactctctccaagttctgagcttacggtctaatcgtttagctggaagccttccatctgatgtgactacgcttccttccttacgatccatataccttcagcacaataacttttcaggagatttgccttccttnttgaatcctaacctcagtgtagtggacctctcctacaattcctttaccggtgaaattcctataagcttacaaaacctttctcagttatcagtcctgaatttacaagaaaattctctctctggatcccatcctgatct

SEQ ID NO: 5850 - DNA, 511 bp, Oryza sativa
  unsure (1)..(511): unsure at all n locations
  Clone ID: uC-osflcyp154c11b1
cataaatccaatcaaagagaggtatagttggntgatatctgtgtatatataccatggcctatttgacgaccatggacgtcgccggagacgccggaggtggccgccgcccaaacttccccttgcagcttcttgagaagaaggaggagcagccgtgctccagctcggctgcaggaggtggtactgggccatcatcggcgggtggcaacgggaacaatggatcgggaccgggcggtgccggaggggagatgcagctgcggaaggcggcgccgaagcggagctccaccaaggaccggcacaccaaggtggaagggagggggcggcgcatccggatgccggcgctgtgcgcggcgagggtgttccagctgacgcgggagctggggcacaagacggacggcgagaccatcgagtggctgctgcagcaggcggagccggcggtgatcgcggccaccggcaccggcaccatcccggccaacttcacctcgctcaatatctccctccgctcctccggatc

SEQ ID NO: 5851 - DNA, 411 bp, Oryza sativa
  unsure (1)..(411): unsure at all n locations
  Clone ID: uC-osflcyp154c12b1
atancttcgtagcattgagctctgctttccttacagacgagaacagagtttatatcgcgttttcaaccggcgaagatgaagaccgggaacaatgggtgcggcaggatcgggaggctcgaggacagggaggccctgcagagcgacaacgtcgagctcagagcacgaaacgaccccttcataaccaccgactacatgacatacatgttcaaggatgacactgcgcacgggcagtggaagcatcatgaggttaaggtgaaggactccaagaccctactcttcggtgagaaggaggacaccgtgtacggctggaggaaccctgaggagatcccatggggtgagactggcgctgagcttgtagaggagtccactggagttatcactgacaaggacaaggccggtgctcacctgaag

SEQ ID NO: 5852 - DNA, 504 bp, Oryza sativa
  unsure (1)..(504): unsure at all n locations
  Clone ID: uC-osflcyp154d02b1
ngagctactcgccaagcggagaaagaaaaggagaggagaggaacagtgcaaacgttccccccgtccccccaacctcgggcgttgcccaatggcgaatgattcctcctccttccctcgcagcctccttatcccgctcgccgccggcggctgctccgacgatgacgacggctacgacgagggcccgtcggacaccgtctccttcccctccttctggccgccgttcccggccatcttgtctgattccgactccgacgtcgccttgttccctcttcctcctccccacgtggaccactgccctgcgccgcagggcgccgcgtcggcgttcttcgggctcggtttccgtgaggaggatgaccacgatggcggcgagtgggcgccgccgggcgaggtggagttgcctctctgttgggattgcctgcagctggaggagcccgaccaccagaggtgggacatcggcgtgaacggcggcggcggctacgagtgggagcaggtcggcatcagggt

SEQ ID NO: 5853 - DNA, 532 bp, Oryza sativa
  Clone ID: uC-osflcyp154d03b1
gcgaattctagggcagaacccaacggaggcggagctgcaggacatgttcagcgaggtgtacactgacagcaacggcaacatcgaattcaaggagttcctgggcctgatggcgcgcaagctgagggacaaggactccgaggaggagctgaaggaggcattccgcgtcttcgacaaggaccagaacggtttcatctctgccaccgagctccgccacgtgatggccaacatcggggagcggctcaccgacgaggaggtccgcgagatgatcagcgaggccgacgtcgacggcgacgggcagatcaactacgaggagttcgtcaagtgcatgatggccaagaagaggaggaagaggatagaggagaagagggaccacgacggcggcagcaggacgaagagtgcagggccctccgccgcgccggcgagcaagcgtggccagaagtgcgtgatcctgtaataattgagccagcactgagattctcatgagtcaatgagctacacgaatgatgtgtgttgttgaaaatggcaaaacaat

SEQ ID NO: 5854 - DNA, 406 bp, Oryza sativa
  unsure (1)..(406): unsure at all n locations
  Clone ID: uC-osflcyp154d05b1
gncctgnacgggtccggttcgatttcggtttttccttcggttctggtgttggtgggaaagcattgcttccccggatgttgagtaccgctgcttcgtcggcggcctcgcctgggccaccgacgaccgctccctcgaagccgccttctccacctacggcgagatcctcgagtccaagatcatcaacgatcgggagacggggaggtcgcgcgggttcgggttcgtgacgttctcgagcgagcaggccacgcgcaacgccatcgaggggatgaacggcaaggagctcgacggccgcaacatcaccgtcaacgaggcccagtcgcgccgttccggacgccaaagctgcctgcggctacaaacagcgcggnggaggcagaggctacggtggcggcggctacggaaaaagctg

SEQ ID NO: 5855 - DNA, 508 bp, Oryza sativa
  unsure (1)..(508): unsure at all n locations
  Clone ID: uC-osflcyp154d06b1
ccgcccganggacgaccaggacacgctcggggttgtttggagccatagccgcggttcccaggagctgtacgactccatcgccgccggcaacttccccgagtggaagctgttagtccaggtgatcgacccggaggaggaggagaggttcgacttcgacccgctggatgacaccaagacatggccggaggacgaggtgccgctccggcccgtggggcgcctcgttctcaaccgcaacgtcgacaacttcttcaacgagaacgagcagatggcgttcgggccggggctggtggtgccggggatctactactccgacgacaagatgctgcagtgcaaggtgttcgcgtacgccgacacgcagcgctacaggctggggccaaactacctgatgctgccggtgaacgcgcccaagtgcgcccaccacaacaaccactacgacggcgccatgaacttcatgcaccgggaccaggaggtggactactacccggcggccacgcgccgtttcgcacgc

SEQ ID NO: 5856 - DNA, 329 bp, Oryza sativa
  unsure (1)..(329): unsure at all n locations
  Clone ID: uC-osflcyp154d07b1
ctcnggacttccagctcgcgccgtcgccgtcggcggccgtcctgcggctgcgccgcgtctacttcgccgtcgtggacgccggcgtggagcgctgcggcgaggtgctcggggccgtggacgtggaccccatgggtgccatcgtcgtggtcaccaacgtcttccaagaagagaggacgagctggagctcgaggtctggccatggcgatggcagtagggtttgcagctatgggcaggtggtagggaagggcaggtcgatggtgttgccgatcggccatggcggcatggaggtgacgaagctagggctaggccgtagggtaggaggagggggg

SEQ ID NO: 5857 - DNA, 460 bp, Oryza sativa
  unsure (1)..(460): unsure at all n locations
  Clone ID: uC-osflcyp154d08b1
gtanacccttacaactgcaacttgttgcaaatccttggttgttgtgtatggaggtaattgtgttctccaaattggggttgctgctggctctccagaggatggtaatgcagttatggtggatgcacagaagttcatgcaaggttccctttatagaagtgccatggaatccaagaagcaatcttacctagcaaatcttgccttatatcctggaaggactgaactaccattcttgccagctaacacgcaggccctaatattgcaaccaattggtgataaaggaattgcagttattggtggtgacactataagggggttcactaatcttgatcaggtgctatttctaatctacagcctcctaacatatatagtaccacgttttgttttgggtgattcgcacagataatacagagaaaaacaatctatatgtgtaagctaaagatcacagtttttaaaaacaaac

SEQ ID NO: 5858 - DNA, 480 bp, Oryza sativa
  Clone ID: uC-osflcyp154d09b1
ctaagcggaccagattggaggaaaactcgctagggcgcttgttacttgcaactcttcctctaatcccgcttcggaaagatatccaaatcgaagaaaaagaaaaaaaaattagaaagcgtgattagccattcctcttctcatctctagccacttcgcttcagcttttcttctttcttgatcgcgagcaaaaagggagagagaaaaaaaaaacggtaaaaggacgtgattagcaaggatggtggcgatcgagaaccagagccagggccagcgggcggcggaggcggcggcgcagccacggatccccagggaggcgcggcggctactgcacgagatggcggcgtcgtgggcggacgttgccgactgccgggcgctgcaggtgattccgctcaagggcgccatgaccaacgaggtgtaccaggtgcgctggctcaacggcgccccggccaccgcctaccgccgcaaggttgaagccgaagcagt

SEQ ID NO: 5859 - DNA, 528 bp, Oryza sativa
  unsure (1)..(528): unsure at all n locations
  Clone ID: uC-osflcyp154d11b1
atancaggggccatgaacgctttggttcgagtatccgcagttctgacaaatgccccttacattcttaatcttgactgtgatcactatgttaacaatagcaaagctgttcgtgaagcgatgtgtttcatgatggacccttctgttggtagagatgtctgctatgtccaattcccacaaaggttcgatggcattgatcgcagcgatcgttatgccaataggaatgttgtgttctttgacgttaacatgaaagggcttgatggcctccaaggtccggtttatgtgggaactggttgttgtttctataggcaagcgctctatggttatggaccaccatcactgcctgcgcttccaaagtcttctgtctgttcatggtgctgctgctgctgtcctaagaaaaaagctgaaaaaagtgagaaagaaatgcatagagactctcgacgtgaagaccttgagtccgccattttcaatcttcgggaaattgacaactatgatgagtatgaacgctcgatgcttatctnccagatgagc

SEQ ID NO: 5860 - DNA, 277 bp, Oryza sativa
  unsure (1)..(277): unsure at all n locations
  Clone ID: uC-osflcyp154d12b1
gtcgagcctccgttcttggaagcgagagagagggagggaggagggaggcaattgccgaggcttccgccggaggaaagggacagctccggccccagcaccctgctgctcctgtngctcactcaccacgctatcctctcaccaaactctctcttatccccctccaagatcccaacccccaagcttcactagcttgttcgggctgaggaggaccatgctctggatctttcaagcccagctccagcactcccccacgctcgatggcagctccagcacagat

SEQ ID NO: 5861 - DNA, 489 bp, Oryza sativa
  Clone ID: uC-osflcyp154e02b1
cgcgcacctcaacaaacggaataacatttcgaggcccaggagtgaatgaatcaactgctgctagggagcttggggctattccagctgatgcatcttcccatccaaacactagcactgtttcagaaagcaatactgatacagctccggtaaatttggatggcaaccatactggatcagatcaagctaattcgacctctttgaaaggtcaacaagagcagcaagcaaattcaacggatgtgttgaacaaccagataaaactcttcattgacctcacatcagctgctgagttgaattatcgaccaaatgggaccctggcttcggcttcaactgatgctgaaaatgccacttctgtagatagaggccatgatggtaataccggaaccaataaggctgaggaaggagatacaggcaaagacttagatttatcgacaaaaatcatgaacaaggccattagtgaagatgagttgttcttgaatgataggagatctc

SEQ ID NO: 5862 - DNA, 359 bp, Oryza sativa
  Clone ID: uC-osflcyp154e05b1
tgaagtagattaaacctcctctatattttgaccgagaagcggaaaattgctggtgtcgatctatcatcctttgagaagatactggagaatcttgtaatcaaagtggtgcccatggaaaatttaaatggtcgaaaacgtgttgaagaaggggagctttgtgataggagaaatggaagaggagttgatcttaatagaaattggagtgttgattggggaaagaaggaaaaggactacgacccatatgaggaaaatcctggcactgctccttttagcgaacctgaggctcagatcatgcgagagctatccaagtcatttaaaccacatatgtgggtgaatgtgcattccggaatggaggcctt

SEQ ID NO: 5863 - DNA, 526 bp, Oryza sativa
  Clone ID: uC-osflcyp154e07b1
gtcacagcatgcccgttcaagaaaatatcgaacttcttctcgatcgaagccatcttgaacgcatccaagggtatgacaaggttgcacattgttgactatggtatacagtatggattccagtggccaatcttcttccagcggatctcgaagagacctggtggccctccaagtgttcgaatcaccggtgttgacttaccacagccgggattccgccctgcacaactcattgaggcgacgggccgtcggttgcatgactatgcccgtatgttcaatgttccatttgaataccatgctattgctgccaagtgggacactatccgtgtcgaagatcttaagatagacaaagacaaggatgaacttcttgttgttaactgccttttccggatgagaaacatgatggacgaaatggtgacagatgacagcccaagaatgcaggttctgaagacaataagaaagatgaatccaaatttgttcatccatggcgttgtcaatggcacctacaatgcgcccttcttcgtgacacgat

SEQ ID NO: 5864 - DNA, 351 bp, Oryza sativa
  unsure (1)..(351): unsure at all n locations
  Clone ID: uC-osflcyp154e10b1
ttccnctctctctcctcgcttccccgcgccgccgccgccgccttctgagctcggcggcagtatgtgcacgataggtggtgtggtgctttgctccggcgcagcgtgctgctgatcgcgcgcgcgatgcccgcgtggtggccacggaagtcgaggtcgaaggcgaagggcgtggggaagccccccggggcaggggcggcctccgcggcgtcgtccccgcgcaagtcgctcgacctcgttgacctctccgcctccccctcggtgaccccccgggcgagggagaaggcgcgcagcctcgactcgccgttggccgccgcgccgcggcatgggggcggacggtgtggtggggggttc

SEQ ID NO: 5865 - DNA, 489 bp, Oryza sativa
  unsure (1)..(489): unsure at all n locations
  Clone ID: uC-osflcyp154e11b1
ttgcctgatgccgccgccgctgcctctcctcctcctcccctcgcctccgatccaatccggtctctttcagtcttttttcttgagggggagatggcggtttctttcaccaacgttagctcagaggcaggcctcanaaagctcgatgagtaccttctcactcgcagctacatctctgggtaccaagcctccaatgatgacttggctgtgtactctgcattttcaactgcgccctcttcaagctataccaatgttgctaggtggtttactcacattgatgcactcctacgtctgagtggagttactgctgatggtcaaggcgtaaaggtcgagtcgacagctgttccttcagcttcaacccctgatgttgctgatgcaaaggctcctgcagctgatgatgacgatgatgacgatgttgacctttttggtgaggagactgaagaggagaagaaggcagctgaggagcgtgctgctgctgtcaaggcttctggc

SEQ ID NO: 5866 - DNA, 416 bp, Oryza sativa
  Clone ID: uC-osflcyp154f01b1
tttggttgagaagacaagctcatcgctcaaattcacagtcctgatcccgaaagggcgcatttggacaatggctgcaggtggtggtgctagtgtcatatatgctgatactgttggagatttgggatatgcgtcagagcttggaaattatgcagaatacagcggcgctcccaacgaggaggaggttctgcagtatgctagagtggttttggattgtgccactgctgatcctgatggccgtaagagagctcttctcattggaggtggtatagcgaacttcactgatgtcgctgctacattcagtggcatcattcgagctttaagagagaaggaatccaaattgaaggctgcacggatgaacatttacgttcggagaggtggtccaaactaccaaactggccttgccaaaatgcgtacac

SEQ ID NO: 5867 - DNA, 442 bp, Oryza sativa
  Clone ID: uC-osflcyp154f02b1
gctggtgaagcgcgagggcaaagcgcatgcatagcagccagtagttgacggcgagcttccgctcctcatcgacgctggccgaccaccccaagctccccaaggggaagacggtagccctcgtcgtgcttgacggatggggcgaggccaacgccgacaagtacaactgcatccatgtcgcccatacgcccgacatggattcgctcaagaacggtgctcacgagaggtgcagattagcgcaggctcatggaacagctgttggtcttcctagcgaagatgacatgggcaacagcgaaatggggcacaatgctcttggtgctggtcgcatttttgctcagggtgctaagcttgtggaccttgctcttgcctctgggaaaatttatgatggagaggggctcaattacatcaaagaatggtttgacaagggtaccctgcaccttattgg

SEQ ID NO: 5868 - DNA, 543 bp, Oryza sativa
  Clone ID: uC-osflcyp154f03b1
tggctgccgtgctatccgctttcctctcctccggctcctatccctcctctcctcctgctcctcgtcctcctcccctagatgccagccgcggcctgaccctcaccgctggggagcccccctcccattcttcgcttcccccgcggttgcgctcccggagcggcgttccagcggccacagctttccctcattgtacacatgatgggttgcttcactgtcctgagatccaagaagaagaagcctcttgctctcaccaagaaatcggttgatgcaagggaaagcacgtcctcaagactcccagagccagaagcgcatgtgccatcgttacaatctgctcctcctagttttaggaacaaggctaaaatccaccaatcggaaaagaaagcttcttacagcagagcgcgcgtgctgtctgctccttccagcctaattgtggctgatcaggatggtcttccatatgccgaattcgatgatcaagatgactccaggggcaagggaggctctataaagggccaccgtttctctaatccactgccccttcctctc

SEQ ID NO: 5869 - DNA, 539 bp, Oryza sativa
  Clone ID: uC-osflcyp154f04b1
cgactacctcctcctcctccgccgccgccgcctcgggtgcccttttattcaccgtgatgtcggtttctccctccggcgccagcctcgtcctctcctcgccccccgcgcccggggcccggccccagccgcgccccgcgcgggtgtcggtcgccgccgccgcgcccgccgcgcgacgcggggtcgttgccgccgcagcggtgtcgagccccgccgtgtcgtcctctgctggtaaagatgccaaacagattcctaaggactttcttcatattgatgatttcgacaaggatacaatcatgaagatccttaatcgggctattgaggtcaaggcaatgataaagtcaggagacaggagcttccaacctttcaaagggaaatcaatggcaatgatatttgccaagccgtcaatgagaacccgtgtttcatttgagacaggattctttttgcttggtggccatgctatctacctgggtcctgatgatatccagatgggcaagcgtgaagagacccgtgatgttgctcgtgtgctttctggatataat

SEQ ID NO: 5870 - DNA, 519 bp, Oryza sativa
  unsure (1)..(519): unsure at all n locations
  Clone ID: uC-osflcyp154f05b1
gaactanactgcaatgcggatggcccaatnnttagaggaacattctaagattgcacgtgtctactatcctggtctgccaagtcacccagaacatcacattgccaagagtcagatgaccggctttggtggtgtcgttagttttgaggttgctggagactttgatgctactaggagatttattgattctgttaagataccctatcatgccccatcatttgggggctgtgagagcattattgatcagcctgccatcatgtcttactgggattcaaaggagcagagagaaatctatggaatcaaggacaacttgatcaggttcagcattggagtggaggattttgaggatttgaagaatgacgttgttcaggcgcttgacaagatctaagcacctgattgcatcctcatcatgagagttcatctatctgatcttggttgcctctgcatcacgtggagaactttgatattccagctgagaattgcgaataagtttcttcattaggtcccattatctagtcttta

SEQ ID NO: 5871 - DNA, 390 bp, Oryza sativa
  Clone ID: uC-osflcyp154f06b1
cgaagaagaaaagcaggagcaatgggcgcgggaggcaaggggggcatatggacagggcaggccctgcagagcacctacgggcaagatcgcaggagtgaacgaccccaacatcacggaaaggaaagggccacactggccaaagcatgagacggagcacgggcagtggaagcacaaggggggaaagggaggaggacgaagacccttctcttcggcgagaaggtggccacagcgacaggctgcaggaaccctgaggagaacccatggggagagactggcgctgagtatgctgtggagaccactggtgttttcactgacaaggacaaggacagggctaacctgaagggaggtgctaagaaggacgtcatcactgctcccagcaaggatgccccc

SEQ ID NO: 5872 - DNA, 369 bp, Oryza sativa
  Clone ID: uC-osflcyp154f07b1
ttcgaccggatgactggacatcctactcgctgaccttgctgatatgcctcgcgtgcacgctgatgctgcgcgcccgagcgacggcggcggaggaggaggtggcgccgatgccgacggggccgaggacggtgccggtgctgggcccgctgctgttcctcgcgcggagggatatcgacgtcgagccgacgctgcggcggatcgcggcggagcacgggccggtgttcacgttcgcgccgctggggccgtcccggccgacgatcttcgtggcggcgcgtggcccggcgcaccgcgcgctggtgcagcgcggggcaagtgttcgcgtcgcgcccgcgcggcgtcagcaccggcgtcgtgctgctcaccagcggc

SEQ ID NO: 5873 - DNA, 536 bp, Oryza sativa
  Clone ID: uC-osflcyp154f12b1
ctacttgtagctctcgacccccgcatctcatccctcctctcgcttagttcagatcgaaatctcaaatggcgaagattaagatcgggatcaatgggttcgggaggatcgggaggctcgtggccagggtggccctgcagagcgacgacgtcgagctcgtcgccgtcaacgaccccttcatcaccaccgactacatgacatacatgttcaagtatgacactgtgcacggccagtggaagcatcatgaggttaaggtgaaggactccaagacccttctcttcggtgagaaggaggtcaccgtgttcggctgcaggaaccctgaggagatcccatggggtgagactggcgctgagtttgttgtggagtccactggtgttttcactgacaaggacaaggccgctgctcacctgaagggtggtgctaagaaggtcgtcatctctgctcccagcaaggatgcccccatgtttgttgctggtgtcaatgagaaggagtacaagcctgacatcgacattgtgtccaatgctagctgcaccaccaac

SEQ ID NO: 5874 - DNA, 373 bp, Oryza sativa
  Clone ID: uC-osflcyp154g01b1
tggcttgatcagccaaatcctgctgatcctgcacagactgacggttatcacatttttatacaggacaaaccagaatataagaggcgtgttcgtgttcaggccaagcagtaccctgctttgctttgaggacattggcctaataaagttactacccgattcatcatgcacatccgcatagtagtttgcaaaatctcagattattgcaccagaaaatatcggattttatgggatataacctaaaatggaatgtttgaagaactgtccaatatcattgtggactttttgtgctgacattaccatttgtgctgtgtgaagaacagaaatagctttgtcaactgttgaaaccgcttgagtgatggatgctaatttggat

SEQ ID NO: 5875 - DNA, 356 bp, Oryza sativa
  Clone ID: uC-osflcyp154g03b1
tgcctccgccgccgagtggctcctccgccccgccggcgtctactggttaaggagccactcccgcctcgaccacgtcctcgcccgcgacgacatccccgtcgccgccgccttccgccgcgcccgcctccgcaaggacccctccgcccacttcctcctcgccgtcaatctccaggtgccggggcggccggacgcgtacagcgcggtgttctacttcgcggcggaggcggcgatcccggcggagtcgctgctggggcggttcgtccacggcgacgacgcgtaccggaacgcgcggttcaagatcgtgaaccggatcgtgaagggccccgggctggtgcgcgccaccgtcgggaactacg

SEQ ID NO: 5876 - DNA, 542 bp, Oryza sativa
  Clone ID: uC-osflcyp154g05b1
cttgtcagctgcgctgttccagttcttgccacccttcatcagaagagagctgctgctccatcaagaatcagacaactctgcccagctgtcccagattgatactgagcaattgttggcccacttagtagaagcagaaatgataaagagaacaaaagaaggaagatacaagggaaggaagttcagctctgtatgccatttctttggatatcaggctcgaggatccgtcccatcaaactttgactgtgactatgctcatgctcttggccgtatctccttgcatatgatagcagctggcttgactgggtacatggcaactgtggctaatctgaaggaccctgtagacaagtggcggtgtgctgctgctcctctaactgcaatgatgagtgtgaagaggcatttgcgtggtcctggagcaatcccgataggaaagcctgccattcatccttctccaattgacctgaaagggaaggcttatgagttgctgcgagagaaagcatcaagttttctccttgatgatttctacaggactccaggaggcattc

SEQ ID NO: 5877 - DNA, 519 bp, Oryza sativa
  Clone ID: uC-osflcyp154g06b1
gtgactggacagaaacagtgcgcttcttccactgctataaaagtgtaggggaccggatttcatgttgatcatcctatgtttcttgagaaggtatggggcaagactggaccaaaattatacggtcctaccactggagatgactaccgggacaaccagttgcggttctgccttttatgcctcgctgctttggaggctccaagggttctcaatctcaacaattctgaatatttctcgggaccatatggtgaaaatgttgtcttcgttgcaaatgactggcacactggagtcctgccatgctatctcaagagcatctatcaggcaaaaggaatgtatgtgaatgctaaggttgctttctgcattcacaatattgcctaccagggtagatttgccagagaagactttgaacttcttaatctaccggacagtttcctgccttcatttgattctattgatgggcattttaaacctgtagtaggtagaaagattaactggatgaaggcagggatcactgaatgtgat

SEQ ID NO: 5878 - DNA, 424 bp, Oryza sativa
  Clone ID: uC-osflcyp154g07b1
ctattttctccttcaccgcggtgcttatgagggcacactgcagtggaaatgacatcaaatcatcataatttaaagggatcaatgcattggttgttgatcataggccagtccgtgcaaaggttaccaagtatcacttgcaaagacttggagttaagaccgaactgacagctgagctaaatcagttcatttctaaattaaactctggatcactgactgcaaagctagtgctaatagacaaggaaacctggcttaaggaatcccattgcacgcctcttctggttaacaaattgaggaataatgacaagccagactctcctaagttatttcttttggggagctctgcaagttctcccaagggcggttcagatacatccagggaacataacttgaatgtaataatgaaagccgttcgtgcaagcatgct

SEQ ID NO: 5879 - DNA, 442 bp, Oryza sativa
  unsure (1)..(442): unsure at all n locations
  Clone ID: uC-osflcyp154g09b1
acttgagttagatgctaccccaattgnccctgctctaaagagtttctttgatgatgctctgaactcgacaggaagtgagctaaacttcaaaaccatagatgatggcttacgcgctgatctctaccagtacccatttaatgtaccggcatactacgcattgatactgctaccaaccactgggctggaaggcatagcactctatgctgatcccaattttaaggtgctcgctgcctcggacccttactttgcgaaaaggctactcactgatcccaatccatatctcagagatgctgtaattgagctactattcaaggatggaaaattcagatggaataggcttgaaaatcttcttgttcaagggagccaagatagagagtttgcagcaaaagatgctttgcaaccagctataaagcttctacttggtcctgatggggaggaattg

SEQ ID NO: 5880 - DNA, 486 bp, Oryza sativa
  Clone ID: uC-osflcyp154g10b1
tcataatcccaaagctaagcttcgagctcccccattgatcagtgtgctagctagtagctggttggttaaaaggcctttttgttttgtttgagttggagcagaggagaagaatggcggctctgcttgtggtcgtgttggttgccatgtcggccatggtggcgacggccaactttaaccaggagttcgacatcacctggggcgatggccgtggcaagatcctcgaggatggccagctgctgacgctcacgctggacaggacgtccggctcagggttccagtccaagcacgagtacctctacggcaagatcgacatgcagctcaagctcgtccccggcaactccgccggcaccgtcaccgcctactacttgtcgtcgcaggggccgacgcatgatgagatcgacttccagttcctggggaatgtgaccggggagccgtacacgctgcacaccaacgtgttcacgcaggggcaaggccagcgcgagatgc

SEQ ID NO: 5881 - DNA, 255 bp, Oryza sativa
  Clone ID: uC-osflcyp154g11b1
gctagaccctatcaactctccattttgaacctgtagattttatttggatagccgtgggtaatcaaacctttgatccaacagcaaaattattgcctgtgcagccatttggtgaataatccgcttcggatgtttggtaccgcatgagagaaaccatttgaaacccatgttgggatgcatcattttgtgtttcttaacatcaaattaaaccaagttgcatccaatgcttacttgaggagtagaaataagtcgatgctg

SEQ ID NO: 5882 - DNA, 433 bp, Oryza sativa
  unsure (1)..(433): unsure at all n locations
  Clone ID: uC-osflcyp154g12b1
gctaaaaaaatctcggagtgcataactgagtaagctttgctcaatggcggaggagaacaagtccggctccggcgacctgatggcgagcggcaaggtagtcgcggaggcaaccatgtcggtgttccagcagaagagcgtggagggcgtcgacaagaaggaggtcgccggcgccgccgcggacctgctgcactcggcgtccacctacggcaagctcgacgacaagccggtcgggcagtacatcgacaaggcggaggggtacctcaaggacttcagctccggcagtggcggggccgcaccgccaccgccggcagccggagacgccggagcgccgaagccagcggcggaggagcccgccaaggagcctgcgccggctgagaaggaggaaggcaagccaccgtcgtcgtcggaagggntcggtctcgacgacgtcatg

SEQ ID NO: 5883 - DNA, 494 bp, Oryza sativa
  unsure (1)..(494): unsure at all n locations
  Clone ID: uC-osflcyp154h02b1
acgggagttatttcgcataaccaaacaacccaacccaacccagccaaaatcccagccctccgccatgcctcgcctccacctcctcctcctcgccgtcctcgccgtcgccgacgcggcggcggaagcggcggcggagaagaagccgacggcgcacgaggtcctggagtcctacgacttccccgtcggcatcctccccaagggggtcacctcctacacgctcgaggccaccacgggcgacttcacggcgacgctcgacaccggcgacgacgacgactcatcctcctccacctgcgagttcgccatcgagggctcctactcgctccgataccagcgcgccatcaccggccgcatcgccacggggcacctcaccgacctccgcggggtcgccgtcaaggtcctcttcttctggctcaacatcgtcgaggtcacccgccgcggggaccgcctcgagttctccgtcggcatggtctncggcgacttcaccgtcgacaact

SEQ ID NO: 5884 - DNA, 534 bp, Oryza sativa
  Clone ID: uC-osflcyp154h03b1
ttagctcacagtccagttctaccacgtacaacagcagaagttagagagggagaagaagacattggatgacgcggagcttagctagccagccatggcgaggcgctctccttgcctcgccgtcgccatgctcctgcttggggcgttggcggcggcgagcgccttcattgatgaagcggcggctgctggccgggggctcggccatggcgcccgcttcatgagcaagcagggtcgtgtgacatacgagaagctgccggagccggagccgaagccaaagccaaagcctcatcctaaacccacgccaaaacctgagcccaagccagagccggagccaaaaccagtacctgagcctgagcctaaaccgggaccaaagccagaaccaaaacctgagcctaagcctgaacctaaaccatacccagagccaaaaccggagccgaagccagagccaaaacctgagccggagcctaaacctgagccttagccagaaccaaaaccagaaccaaagccgtacccagagccgaagccagagccaaaacc

SEQ ID NO: 5885 - DNA, 526 bp, Oryza sativa
  unsure (1)..(526): unsure at all n locations
  Clone ID: uC-osflcyp154h05b1
cggactgngtgggtggaagctcacctccggccgctctccgccgctgctctcctcctttcccccgctgcgccgcttcccaccgccgatgctgcttctgcgaggagagcatcccccggtggcaggaggaggagcagcgtgagggccagcgcgggcggcgggggctggctgtcgggcctgctcggaggcaagggcggcggcggcgcgccgacggcgatgacggtgacgccggggaccgtgaaggcgggggaccccgtcctgcacgagccggctcaggacgttgcccccggggacatcccctcggagaaggtccagggcgtcatcgaccggatggtcgccgtcatgcgcaaggcccccggcgtcggcctcgccgccccgcagatcggcgtccccttgaagattatcgtcctggaggatacccaagaatacatcagctatgctcccaagaaggacattgaagcgcaggatcgccgtcctttcgatcttcttggtatcatcaatcctaagcttaagacgacgagtaaaaaga

SEQ ID NO: 5886 - DNA, 511 bp, Oryza sativa
  Clone ID: uC-osflcyp154h06b1
ggcttgttgaagcagtcccgggagggctggggttcgaccggttattggaccgagatcgagggagcgtgggtgctgaagcctaaatcacaggagccctcgttcgttgttcacttcgttggtgggatttttgttggagctgctcttcagatcacttatcgtttcttccttgaacgacttgcagacaagggagctttggtgatcgcaacgccatatgctagcggctttgatcatttcttcatcgcagatgaagttcaatttaagtttgacaggtgcttaagaaacatggttgaacctgtaaatgaccttcccacatttggtgttgggcattctttgggatctgtgatccaccttctcattggatcaagatacgctgtgcagcgaagtggaaatatattgatggcctttaacaataaggaagcaagcttggcagttccattattttcgcctgtaattgttcccatggcacagagttttgggccaatattttcccagttgacatcatatccaacac

SEQ ID NO: 5887 - DNA, 482 bp, Oryza sativa
  unsure (1)..(482): unsure at all n locations
  Clone ID: uC-osflcyp154h08b1
tcgccgagtatttacattcccacccccgggaagctgatgatggtactctcctgaagaagttcaaggaagataatacagntgttcctgatcagcagcctgtcattaagaagaatgtggcattaatagagaaaatagagagtctgaataacacagctagaaatgttgatgcacgtaatattacagaaccattcccatccaaacaagccaaggagatgcaaaaaagtacaagttcaaaggaagatcagaaactaccaaatgaacctgttcttgaaccttcacagtctgaattaactgaaatcatcacagctggaaagcttggcgaatcaactcgtgatcgaacacataggagaggtgattcttcaagaagcagtcaccatggttcttctaaagacaggttagttaataattttgcaggagaggggctgagagaaaattctgcagctgattcttcaccaattgttggtcgaggaatagccaacatg

SEQ ID NO: 5888 - DNA, 276 bp, Oryza sativa
  Clone ID: uC-osflcyp154h10b1
acacacacaccagtccatatgggagcactgctagaaggagcgagagagcagcagaaggcagccgagcaagatgccgatccgcaatatcgccggggggagccaccaggaggtgtaccacccgggagcactcaaggcggcgatggccgagttcatctccaccctcatctgcgtcttcgccggccagggctccgggatggccctcaagaaggcgaacggccggggaacgaacaaccccggccggccgaacccggcgggggtggcccacgccttcgccct

SEQ ID NO: 5889 - DNA, 315 bp, Oryza sativa
  Clone ID: uC-osflcyp154h11b1
agtaaatcggatctcagcaaaggctgctatggaacacccctacttcgacagcctcgacaagtcccagttctagtttgtaccatgtgattgacgaagtccatgttctgttgtgtcatttgattataaacgtgttgctgttagcagcaaggaaattcgttttgcctacttagcaccctactttgtgatccaacaaggaaatccgtttgccatctaggcaacttgaatgcagtttgaatgtaaaatgggtttgtttctatgctgtatggcatatgtattatggacaagaaggttgcaatatatttgcctgtttctttg

SEQ ID NO: 5890 - DNA, 531 bp, Oryza sativa
  Clone ID: uC-osflcyp154h12b1
ccctggattgtttactcggcacattaattatgctgccactgatgctgtaggagatcatactttgtttgctggcgatgacctcatccagtcagatgtgatactggggtcaaagaaaattgaggcccctgtattatttcggggaattggacatgcgggtaatccatctaacagcttgggcctgaaagtcttatccgcctctccgtcagcatactcagcaaacccaaagtctaagttggcttcccctccatctctcacagggtcggctatatcactgggttctgttatgcaggcaagaaacaatgctcgggtcttgatatctggatcactcgatctgtttagcaacaggttcctaaaatctggtgttcagaaggccggtagcaagataaggcatgagaaagctggaaatgaacaatttgtgacagaaacaagcaaatgggtcttccatgagaggggccatctaaaggcagtgaatgtcaagcataacatggttggggagacaaatgagccttgcatgtaccgcatcaatgatga

SEQ ID NO: 5891 - DNA, 484 bp, Oryza sativa
  Clone ID: uC-osflcyp155a01b1
aaggatcttcgggttccccaagaagctgtttcttgcgtggtcgcctaccaaggagaagaaggccgcgaacgggaagggtggcggtggcggtgtgtctgttgatctcaagcgaaaggagcagcagcaggcggcggcggcaggggttggcgtcaggagccccggttctggtagcaaggatgaaatgttctttgactcgcgggcatggttagattctgattgcgaggacgacttctacagtgtgaatggagattttactccgtctcgtggcagcactccaaactaccaacccagaacacaaacagttatgagcaatgtctttgtacctgataatgtacagaattccaaatcacctgaaccttctccaactggaaggagaaaactagccgagctcttgcaggaggcgatgcagaatggttccgaagatagcaccgatgcatctgttccagacatcagcaagaatgagatgcagcaattccagcctatt

SEQ ID NO: 5892 - DNA, 537 bp, Oryza sativa
  Clone ID: uC-osflcyp155a02b1
gtcttattcctcgccaccacacccacccacccaccaagggcgtcctcccgcctcctcctcctcgccgcgctgctcgccacggcggcggtgctggcggcgtcccaaaagccgaaggccgccacgccgacgaaggccacgccggcgtcgcccggccccgcggcggcggcggccgacggccccgcgccgacgaacgtgacggcagcgctggagaagtccggcaagtacaccaccttcctccggctcctccacgagagccgggtggacacccagatcaacagccagctgatggacagctacaacgggctgaccatgttcgcgcccacggacgccgcgttcgcggcgctcaagccgggcacgctcaactcgctgtcgtcgcaggaccagatccagctgatgctctactgcgtgctcccgcggttctacagcctggccatgctcaccaccctcggcggccccgtgaacacgcaagcgttcggcgccgacggcccgtacaagaacaagatcaagccgtcgaacaacaacgtcaacatctccacc

SEQ ID NO: 5893 - DNA, 531 bp, Oryza sativa
  Clone ID: uC-osflcyp155a03b1
acgttttcgtcttcatcgcgctcgcctccgagggcaccgacgtccgcgccctcttcgagctcaccctcctcgaccagagcggcaaggccaagcacaaggtgcactcccacttcgaccgctccctcgagtccggcccctacaccctcaagtatcgcggctccatgtggggttataaaaggttctttcggcggactgctcttgagacatcggattttcttaaagacgattgcttaaagataaattgcactgtgggtgttgcggcatctactatggattactcaaagccacattcgatacatgttccagaatctgacataggctaccattttgggacactgttggacaatcaggagggtgtggatgttatatgtaatgtggcaggagaaaagtttcatgcccatcagttggtcttggctgcccgatcttcctttttcagatctgaactttttgagcatgaatcagatgaagagaagaatgaagttgatactagcaatgaaatcaaagagattgtcattgatgacatggagccaa

SEQ ID NO: 5894 - DNA, 383 bp, Oryza sativa
  Clone ID: uC-osflcyp155a05b1
ctataggtaaagggggcacccccggggggcccggcccggaattccggggggggcccaacgcgcccgttgtactgcgtgccgtacctctcgcgggatcccagggacccccgacgcgagagtgtccccaatgccgcgccctgcaccgccgcgcgcgggcactggactgccgtacgctgcactcccgcacccgcggcggcaccgacggaggcgcctgcggaatccgagaggtcaatcccgccgccacaggtggagcggcgacagcagctggaccaggaggcggcggacggaaaccaacactgatatgacaggaagcccctagaacagatcttttacaagcggtaccgatgactcccgctccgagagcaacggcgatgaaaccgtta

SEQ ID NO: 5895 - DNA, 560 bp, Oryza sativa
  Clone ID: uC-osflcyp155a09b1
cgtactcgtgggctcgactgctcggggacggggtgggggctgcaggccatggatttcaggcacgtcgccctcgtggcgctgctcctccgctccgaggggttcgagcactaccgctgcgaccgcaacctctgcatggggatgaacctcaacaacatggccaagatgctccgctgcgcgggcaacgacgacatcatcaccatcaaggccgacgatggctccgacaccgtcaccttcatgttcgagtcgcccaaccaagataagattgcggatctcgagatgaagctgatggacatcgacagcgagcacctcggcatccctgactccgagtaccaggccatcgaccgcatgccgacctctgagttttccaggatctgcaaggatctgagcagcataggagacactggtatcatctcggcgaccaaggagggcgttaagatctcgaccgctggagatattggaactgccaacattgtctgcaggcagaacacgactgttgaccagccagaagaagctacaatcatagagatgcaggaaccggggcactaacctttgccctgagg

SEQ ID NO: 5896 - DNA, 549 bp, Oryza sativa
  Clone ID: uC-osflcyp155b01b1
cacgtttcccaacgggctgggagtgatgttcgcggtggcgcagctgatcctgtacgccatctactacaagtcgacgcagcagatcatcgaggcgcgcaagcgcaaggaggccgaccatgtcgccatgaccgatgtcgtcgtcgactccgccaagaacaacccctcctccggcgccgccgccgtcgccgccaacggccgctactagctcacgccgccctctttacttcaccagctagccagtcactcaggaggcatggccaccgatgaggccttcatgacttactagcaaagtggagtactacctttagctaagccgtcccaaagggatattactacatgtctcaaattaattagctaatctaatcaccatcaccctgcctaatccgctgctgttaattagtatggcagagagcaaaagaagaacaaattgagctgcacttcttatatgtactctcaagtgcagtgctactattgtcagtcccattgggggtaatgtactgtcttatttacaggaggagggcctggctgctcttttaaaaacagctagcc

SEQ ID NO: 5897 - DNA, 561 bp, Oryza sativa
  Clone ID: uC-osflcyp155b02b1
cacctttttggcttcctcccctctctaagccggggaagctaagccatggcgtccgtcaccgcccgtaccccggtcgcagccctccgctcgtcggcgtcgctcaagtctaccttcctagggcaatcctgcacccgcctcgcccgcgcaccgactacgaggcgtaatgttcgggcggaggccaagggagagtggctccccggcctcccttctcccacctacctcaacggcagcttgccaggcgataacgggttcgacccgttgggcctggcggaggacccggagaacctgcggtggttcgtgcaggcggagctggtgaacgggcggtgggcgatgctgggggtggccgggatgctgctgcctgaggtgctgacgaagatcgggttgatcgacgcgccgcagtggtacgacgccggcaaggccacctacttcgcgtcgacgtcgacgctggttcgtatcgagttcatcctgttccactacgtggagatccggcgggggcaggacatcaagaaccctggctgcgtcaaccaggacctcatcttcaagagctacagcctcccgccg

SEQ ID NO: 5898 - DNA, 536 bp, Oryza sativa
  Clone ID: uC-osflcyp155b04b1
gccggtcctctctcgccggcgccgccgccgccgccgtagggaggaatctccggcgaggacaccactctcgcggatgcagctcgtgacagcgatggcgacgcacaatcgatccgagacgacggcagcgacgcggatttggcctgcggtggtggcggtggctaggatgcgaacctgcggcggcgacaggggctcggatgcaagctgtggcggcggcggcgactcggtttcggtcagctgcggcggcggcctcacggatgcggctcgcggaggcggcggccacgcggatgcggcccgcggcggcggcggccatgccgatgctgccctcggcggcgacggcagcgcggatgtggcccccggcggcgaaagctgcaccgatgcaccccgcggcggcgacaggtgcgccgttgcagtccgcgacggcgtccgtggtgcggatgtgtcctgcaatggcggctgggatgcgactcggatgaactccttttattgaaccttctccattgagttaccaagacagcatggttttcgccaccatcttt

SEQ ID NO: 5899 - DNA, 561 bp, Oryza sativa
  unsure (1)..(561): unsure at all n locations
  Clone ID: uC-osflcyp155b05b1
aatgttgcctaacatatcataaggagaactttgcctatgagcactgggatgaaattcttgatatttgcaatcagtatgatgtggcattatccattggcgatggtttgagaccaggttctatttatgatgcaaatgatagcgctcagtttgcagaattgctgactcaaggggaactcacacgccgagcttgggcaaaagatgtgcaggtaatgaatgaaggcccagggcacattccgatgcataaaattcctgaaaacatggagaagcaactggagtggtgcaatgaagcacctttctacacactggggccactgacaactgatattgcacctggttatgatcacatcacctccgccattggtgctgccaacattggggctcttggcactgcacttctctgttatgtaacaccaaaggagcaccttggattgcctaaccgtgatgatgttaagacaggcgtgatatcctacanaattgctgctcatgctgctgattttgcaaagggccatccctatgcacaagcattggacgatacactaagcaaggccagattgagtttag

SEQ ID NO: 5900 - DNA, 496 bp, Oryza sativa
  unsure (1)..(496): unsure at all n locations
  Clone ID: uC-osflcyp155b06b1
cctgtactcgatcccaagcgttggcgcaagtatggcaactaccggctgagcttcatggagcgtcactgcccaccggcggtggagcgcaaggagtgcctggtgccgccgccgcaggggtacaaggcgcccatccggtggcccaagagcaaggaccagtgctggtacaggaacgtcccctacgactggatcaacagccagaagtccaaccagcactggctccgcaaggaaggcgacaagttcatcttccccggcggcggcaccatgttccccaacggcgtcggagcctacgcagacctcatggcggagctcatcccgggcatgacggacggcacggtgcgcacggcgctggacacgggatgcggcgtagccagctggggaggcgacctgctggggcgcgggcggtgcatcctgacgctgtcgctggcgcccagggacaaccacgaggcgcaggtgcagttcgcgctggagcggngcatcccggccatcctggggatca

SEQ ID NO: 5901 - DNA, 559 bp, Oryza sativa
  Clone ID: uC-osflcyp155b07b1
ccgtttcaggctggtactattcgcaagaacggtcatattgtcatcaagaaccgcccatgcaaggttgttgaggtctccacctccaagactgggaagcatggacatgcaaaatgccactttgtggccattgacatcttcaatgggaagaagcttgaagatattgtgccctcctcccacaactgtgacgtcccccacgtgaaccgtactgattatcagctgattgacatttctgaagatggatttgtcagcctcctgactgaaagtggaggcactaaggatgacctgaggctccctagtgatgaggctctgcttactcagatcaaggatggattcgccgaggggaaggatctgattgttaccgtgatgtctgccatgggtgaggagcagatctgcgctctgaaggatattggccccaagaactagaataccttgttaccgtgtttggctacctgtctggtcgctctaagtttggagctggtcttgagattatatataaacttttgatttgagcgtaagttaagaagacatatgggccgttgttccatcttgcggtttatac

SEQ ID NO: 5902 - DNA, 488 bp, Oryza sativa
  Clone ID: uC-osflcyp155b08b1
cgatctacgaggcggagccccttctactatgattgatcctcttcaccctcctcggcgccatcggttcgctcggtgaccgcggcagcttcggggacgaccagccggtgacgagcctcgacaaggccgtcagtcccccgggcaagggcttccgctccgcgctgggcctcagcgagggcggcccgctgttcggcttcaccaaggccaacaagctgttcgtcggccggctcgcgcagcttggcatcggcttctccatcatcggcgagaccatcaccggcaagggcgccctcgcgcagatcaacatggagaccggggaccccatcaacgagatcgagccggtcgtgctcttcaacgtcggcttcttgttcatcgtcgccatcaaaccgggcaccggcaagtttgtcagcgacgacgacgaagagttgaattacgaggatcgatcgatctaccgaggtttcgccgccattgttgtgcttgcgcatcattgagac

SEQ ID NO: 5903 - DNA, 561 bp, Oryza sativa
  Clone ID: uC-osflcyp155b09b1
gtttttgacgccgcgccccccaagccgcctccgcagcggaaggaggaagagcagcagcagcagcagcaggaggaggcgggggcgtttgtgccttatccggaccctgtacaggtgggcgagatcacgctcgagcagctcgcggcctacgacggcaaggaccccgcgaagccgatcctaatcgccatccgcggccaggtctacgacgtcacgcgcgggaggctcttttatggtcctcaaggaccatattccttgtttgctgggagggatgcaactcgggcccttgcattgatgtcgtttgaccctattgacctcactggagatttggatggccttggtccagacgagctagaggtcttgcaagattgggaagataagtttaaagagcggtatcctacggtgggccaccttgcttcagaaaatgcagcggatggtaaccacggtggcgcagcttgatcacgaggaaggaatgctttactccatcggtttgtcagtttctctgttcttttttactggattgcaagtgggtagatctgatcatatgatgctctggtaggctctgtt

SEQ ID NO: 5904 - DNA, 494 bp, Oryza sativa
  Clone ID: uC-osflcyp155b10b1
gtgatcacaaaaatattattggtaagcaaacttcaataagtgagctcctagaatctgaagacagcgctgaaaatggcgctgaaatgttctctaaaactgacatgactggaaggaataacatgaatcaggcgtctgcatcaagcttttcaagcattgcacaaagatttcttgctaatacacttgagcgaagaactcccaaatacactgatcttcctatgtcatctgatatagttaacactgatgcaaacgggactgatgaatctacccaaatatcttctctagcccccaatgaaacaacattcgaggcatctcaatttgagaagaaaacagaaaatgacacaaatggactgcccaaatcgtcactcttctctagtagccattactctgagaaatcatctccgccgcttgagtacatgaaaatatctttccaccctatgagtgcatttgaaatgccaaaattggacctagagttctctgatgaaaatcttcatgag

SEQ ID NO: 5905 - DNA, 559 bp, Oryza sativa
  Clone ID: uC-osflcyp155c01b1
gcgatttaacacaaggaggctggctgccagcagcccgagggcccaatcctttgcatcaataactgcggcttctttggcagcgcggcgaccatgaacatgtgctccaagtgccacacggagatgatcatgaaggaggagcaggccaagcttgctgcctcctccatcgatagcattgtcaatggttgtgacggtgggaaggagcatattgttgctgccagtggtagcacggcggtggcggtggctcaggtcgaggcgaagacgctcgttgtgcagcctaccgatgtcgcgggcaccagcgaggaggttgctgtagtccccaaggtcaaggaagggccgaaccggtgcgctacctgtaggaagagggttgggctgacgggattcaactgccggtgcggtaacatgtactgtgcgttgcaccgctactccgacaagcatgaatgccagttcgactaccggactgcggctagggatgccatcgcccaggcccacccagtggtgaaggctgagaagctcgacaagatctaaggcggctaggggcgtggaatggattgcacctaca

SEQ ID NO: 5906 - DNA, 557 bp, Oryza sativa
  Clone ID: uC-osflcyp155c02b1
ctaatttttgccgagatcgagcagttcagtgtgtctgtcagaggccttaatgtcgtcttgagcagccgccgcctggagatcaataagatctgatgttctgatcaagctgacgatacatatacaactcacatctgcaggttggttcctttgtgtccaaaccaaggaaaggaaaggcacagtcatctctctctctccctactcctcatctccagccacatctgctgcttcgtctccttctcctgagatctctcgatcttcaagaggaggaaacctaggtgaccttgctctctggtggccacgccatgggagccgtcaagaggtctagctttctcctcgtcgtcgtcgtcttcgctttgctcctcctgacctccatggcagcaggagggaggaagatgttgatcaacaagcatcaagtgcaatcaatggagacgtctgatgatgaatccatgcatcaagggcaggaagacgacgaaatgctggcgatggtccacgagagaattctgaggcaggtgaagacgaacgactactggacctacgaccctaccccaaccatggct

SEQ ID NO: 5907 - DNA, 363 bp, Oryza sativa
  Clone ID: uC-osflcyp155c05b1
ggtgaagctaagcttcttacagaagactgggaaggagcggctcaggatctaaaagaggctgcccagaaatctccccaggacatgggaatccgagaagcactaatgagagctgaaaagcagcttaagttaagcaaaagaaaagattggtataagatccttggcatttcaaagacggcatcagctgcagagattaagcgtgcctacaagaagttggcactgcagtggcatccagataaaaatgtagataagcgagaagaagcagaaaacatgtttcgagaaattgctgcagcttatgaggttcttggggacgaagataaacgtgtaagatacgaccgaggagaggatcttgatgagatgaatatg

SEQ ID NO: 5908 - DNA, 562 bp, Oryza sativa
  Clone ID: uC-osflcyp155c06b1
gtccttctcggcgcggccacaccacggcggccgtcgggtcccacacggccggcgcgatcgctcgccgcggctcgtggggacgggccgtcaatggcgcctgcattcgcgcctacaacccccccccccaccccaacccacgcgcgtgccaacgatcctctgcctcctcgccgccggcttccaccggtggctccgcgtggagcccgccaccacgggcggggccgctctgctctccgaccggcgccgtcgccagcagccatgcttctcgaggaacgtggaatagctcatacttgctcaagaatcttcggcctggttgattcatgtcagatactccattgaagagataggcttgccggatgatcggaaagaataagctgcatgctatgcttgagcggattccttttggtagacagcctaacatgacctgctggctgagtccctctgccttgaattgtaggcagaagtgagatagcacttgctgctttatgttctcagacagaagatttgccattgacatttttgctgttaagtggagaaacttacaaattcctggtgcggctggtcc

SEQ ID NO: 5909 - DNA, 233 bp, Oryza sativa
  Clone ID: uC-osflcyp155c08b1
ctttgctcccacctaaacagtaagagcacacagcccaaaccggcgggagatccgaagcgcagccaagaacgcatcactgtcctcttcgtcttcgtgcatggagttgaccggcctgacgcgggcggtggcggcggccaccgtgacgccgccggcgccgcgccggggatggggcgagctccggttcgcgccgctgctgcccggcgagcggcatgggaggaggaaggtggtggtgg

SEQ ID NO: 5910 - DNA, 555 bp, Oryza sativa
  Clone ID: uC-osflcyp155c09b1
atatgtagtgctccatagaggattatgtcatagccactctgcattagtcaaggggtcaatgtgtttaagcaaattgatcaagcaagttgcatacccatgggagagcagaatccatatgcccacatagattatccagacaccaatctcttcttcatctctgcatttgggtaaaggtttagataggtagccatgaacagcttagatgatgttccaaagccacactttgtattgataccattcatggcacaaggccacaccatccccatgattgacatggcacatttcctagccaagcatggcgccatggtcagcttcatcaccaccccggtcaacgcggtacggattcaatccaccattgacagggcaagagagctcaacatcccaatccggtttgttcccctccggctcccctgtgccgaggtaggaatgctcgatggctgcgagaacgtcgaccagatcttggagaaagaccaggtgatgaagatgacagacgcctatggcatgctgcacaagcctctggtgctgtattcttcaagagcaaaacgtcccaccttc

SEQ ID NO: 5911 - DNA, 548 bp, Oryza sativa
  unsure (1)..(548): unsure at all n locations
  Clone ID: uC-osflcyp155c10b1
cttttctgagcctctagaagctcacctgacccttacaccagtaaaaaaggatgaacctcccattgaggaaaagaacattaactcatcagatggtggtgcattggaaaaaaaggatgcttcaagatcacacaggaaaaatggttttgcaagaccactcttgaaatgtgcagaagatgttatactaaatggtgatgtcgcaagtacttctgggaaagccattgcaagtttacaggtggaagcttctgatttggcaaacttcctcaccatggaccgaaatgggggttacagaggttctcaaactctcctaagatctgtactgtcagagaagcaggagctatgcttctctgttgtctcattgctctggcagaagctcattgcatctcccgaaatgcagatgtctgcagaaagtacatcagctcatcagggttggagaaaggttgtggatgcgctttgtgacgttgtttcagcctcaccgaccaaggcttcagctgctatcgttctgcaggtcaagatattggtattggtatatttacatacttgntatcata

SEQ ID NO: 5912 - DNA, 479 bp, Oryza sativa
  Clone ID: uC-osflcyp155c11b1
ttctgtaggagatcgccgccgccgccgccgccgggtgggactggttcgtgcccccccgccgtgcgtgtaccacgggcttgggggattgatcggtagcgatggcggcgccgccggcttgggcttgggccgactacgattatctcatcaagctgctcctcattggcgacagcggtgtaggaaaaagttgtctcctcctacggttctcagatggctctttcacgactagtttcattaccacaattggtattgacttcaagataaggaccgttgagttggatggtaaacggattaaattgcaaatctgggatactgctggccaagaacgctttcgaactattaccactgcttactacaggggagcaatgggcattttactcgtttatgatgtcaccgatgaatcttcattaacaacatatgaaattggatcagaaacatcgatacaacatgcctctgataatgtgaacataaatttggtgggg

SEQ ID NO: 5913 - DNA, 573 bp, Oryza sativa
  Clone ID: uC-osflcyp155d01b1
gctccggtgaccactcccaacccaggccccactaggggggcagccttgtgtcggattagggttcttgaagcttcttctatgcaggcgccgccgatcgcctcctcgccgtcgcctgcgtggaccgccatccagcccgcgccggcgaggctctgctgctcccgccgcggcgccctacgcctcgaagccaaggccggctggaggccggcggcccgagggccgcgggtgccaggcacgggcgccgtcctcgcctacgaggtggagggcccctttcacctactcgacgcgcgcaacgagcaagagctcattctgcatatcacaaaggaagtggagaaagggaagctgcctgcagatgtcgctgccaatctagaagagctatactacaactacgaggacgcggctatgcagagcagggatccaaatgcacacgacatcgtgcttgcaaacatggcggccctgaccgactgtgctctgctcgatgtagagaactcggttaccttttcgccttataacaaagctgctagggaaccattcgcctattacatgtttggtcagaactacattaggcccgttgtg

SEQ ID NO: 5914 - DNA, 563 bp, Oryza sativa
  Clone ID: uC-osflcyp155d02b1
cctccttctcctcctctccgctttcgctttgaccaaacccaaaccacgcgcagcgctcccatcgcccagggcaacgccacgaaacctagccccaccgactcgcctcgcctcgcctcggaatcccccaacaccagagcgcggcggcgaccatggagccctcccccgtcggcggcgggtccgcctccgggtcggtggagcggtggcgcgcggaggcgtcgcgggcgttccagcactacctggatcgggcggcgccgcacacggcggggcggtgggccggcacgctcgtggccgcggcggtgtacgcgctgcgggtctactacgtgcaggggttctacgtcgtcacctacggcctcggcatctacctcctcaacctcctcatcgggttcctctcccccatggtcgacccggagctcgaggcgctcgacgccggcccggccctccccacccgcggctccgacgagttcaagcccttcatccgccgactccccgagttcaagttctggtatgccatcacaaaagccttttgtgttgctcttctgatgacattcttctctgtattcgac

SEQ ID NO: 5915 - DNA, 498 bp, Oryza sativa
  unsure (1)..(498): unsure at all n locations
  Clone ID: uC-osflcyp155d04b1
gctccttccttctcctctgtctcctcctctctagagagagaaacagaaaaaaggaggagactagggctctgctcctccccctgcgccggttggtcggagctctgcctcctcctgattctgctgtcccctcccctccccgatccacctcctcctccatctccttctcctcccgccgatccgatgcgtcatcactagcctcccctcccgcgcttccaccaaccactgcccctccaccctcacctcgtggtttggtaatttggttggccgcttgtccccttccatccaccgatccaccttcccgttgctgcggggatggccgtcgtcgagacctccgccgaccacgccgcgcctccgccgcccgagggggacgccggggagagggagatgcgggatctggaggacctgctctccaagctcaaccccatggccgaggagttcgtcccgccttcccttgncgcgctttccccaccggctacgcctattaccccacccccaccc

SEQ ID NO: 5916 - DNA, 121 bp, Oryza sativa
  Clone ID: uC-osflcyp155d05b1
gcggttgtagggggacggggagcggcagtggcggcggcggcggaggggaagctggacgagctgcggcggaggatggggaaggcggacggcgacctgctgaggatcgtcggggtggggggcg

SEQ ID NO: 5917 - DNA, 432 bp, Oryza sativa
  Clone ID: uC-osflcyp155d06b1
ccctcctctcctcgtccctcctccccgccggcgccgtagcagatttaatcctcaatggcggccttcaacaagctcggtagcttcctcaggcacagtggcttgacaagcagtgcctcggccggctcttcccctgccatgttcaatgctgctcgtctgatgtccaccaagcttttcgttggtggtctttcttggaatactaatgacgattcgctgaaagaggcattcaccagcttcggggatgtgactgaagctcgggtgatcaatgacagagaatctggaaggtcaagagggtttggctttgctagctttgccaatggcgatgatgccaagagtgccatggatgccatggacggcaaggaacttgagggacggagtatccgcgtgaacttcgcgaatgagagacctccagggaaccgaggtggcggcggctat

SEQ ID NO: 5918 - DNA, 524 bp, Oryza sativa
  Clone ID: uC-osflcyp155d07b1
cttttggatgtggcaccccttaccctcggtatcgagactgtcggtggagtcatgaccaagttgatccccaggaacaccgtcatccccaccaagaagtcccaggtgttcaccacctaccaggatcagcagacaaccgtctccatccaggtctttgagggtgagcgcagcatgaccaaggactgccgtcttctcggcaagttcgacctatctggcattccagcagcaccaaggggcaccccccagattgaggtgaccttcgaggtggacgccaacggcatcctgaacgtgaaggctgaggacaagggcaccggcaagtcggagaagatcacgatcacgaacgagaaggggcgcctgagccaggaggagatcgaccggatggtgcgcgaggcggaggagtttgcggaggaggacaagaaggtgaaggagcggatcgacgcccgcaaccagctcgagacctacgtgtacaacatgaagaacaccgtcggcgacaaggacaagctggcggacaagctggagagcgagga

SEQ ID NO: 5919 - DNA, 556 bp, Oryza sativa
  Clone ID: uC-osflcyp155d10b1
ctcttaacctgcagtttgttcagcgtctccatactcgctttctattactccccatgctccaagacgttacaagaagcagccagcgtcctccatttcctgaatggtcaagcaatggaaagcacagaagtgtttgctttgtgaacaaatccacgggtcaaattctagttgcagagcccccaaactttttgacaatacacgatgctattgctattgttgttagttacagattaggggcacccgtgatcttgccgattgcttcagtatttgcatgcccagatggcacagagaaagaggtgcttaaaatactccgtctgggcactgacattggagtttcaaaacgtgaaggaaggcacaatggttccctgggagcagagttgttgtcccaagatgctcgccaggttcaattccttcctttaagaccattctatagtggagaaattgtggcatggaagacggggaaagagggtgaaaagctcagatatggcagggtccctgaagatgtaaggccatcagctggccaagctctttacaggtttccagcagagacttctgctgg

SEQ ID NO: 5920 - DNA, 561 bp, Oryza sativa
  Clone ID: uC-osflcyp155e02b1
cacactctgtcaccacaacagccaccaactcctctcaacttcttgatccggcggcggcggcaagatgttcggcggcggcggcggcggcgggaggaagccgctggactacgaggagctgaacgagaacgtgaagaaggtgcagtacgcggtgcggggggagctgtacctgcgcgcctccgagctccagaaggagggcaagaagatcatcttcaccaacgtcggcaacccacacgcgctcggccagaagccgctcaccttcccccgccaggttgtggcgctgtgccaggcccccttcctgctcgatgatcccaacgtcggccttatcttccccgccgacgccatcgcgcgggccaagcactacctcgccatggcacccggtggactaggtgcttacagtgattcccgaggtatccctggtattaggaaggaagtcgccgagttcatcgagaggcgtgatggttatccaagtgatccagaacttatttacctcacagatggtgccagcaaaggtgtgatgcaaatgctgaataccattatcagacatgagagagatgggattct

SEQ ID NO: 5921 - DNA, 469 bp, Oryza sativa
  Clone ID: uC-osflcyp155e03b1
cgcgttttgactccactactgcggttgcatatactactacacttgcagttgcatccagagcccgccccgcgtctctactcgctccgccgcgccgtcgtctctcccgacttcggcgacaagcgagcgacgcaggccaccgcgcgcggttcgttttcgcgagggaggccgtcgccgaccagccgccatggtctcgccggacaccatacgcacgggcatcggcgtcgtaggcaatggaaccgccctcgtgctcttcctctccccagtgccgacgttcatacggatctggaagaaggggtcggtggagcagtactcggcggtgccgtacgtggcgacgctgctcaactgcatgatgtgggtgctgtacggcctccccgcggtgcacccgcacagcatgctggtcatcaccatcaacggcaccggcatggccattgagctcacctacatagccctcttcctcgccttctccctc

SEQ ID NO: 5922 - DNA, 531 bp, Oryza sativa
  Clone ID: uC-osflcyp155e04b1
gcgcaccttctgctgaaagtcgggaaaggcaatggcggcagtaagatctattgggtctctcccagtgcctaatgtgcaagcactggcaggaacttgcaacggttcatacgaccagatgtcttggaggcacattacgacagaggctacttgtgaggaggtcatcagcaactaccatggggacatggcgatgacaatcattgatctcagtaggttgttttgtccacaatcatcagcagcagagtgtgtgaagctgacacctgcctgccagtgtcggggattctttcaggtcatcaagcatggagtgccagaggaagtgattgataacttcaggagcatcattattgagttcatgagcctgccactggatgccaagacggagtcctaacagctgcccaacagccttgaaggctatggacagacctttgttgtctctgaggaccacaaactagactggcgagacatgttgtaccttcaagtgcatcctaccgagtcaagggacttgcgattttggccagtcaccctgcatctttc

SEQ ID NO: 5923 - DNA, 568 bp, Oryza sativa
  unsure (1)..(568): unsure at all n locations
  Clone ID: uC-osflcyp155e07b1
cttttgtctcattgtctcctccgctccttgcgccgctgccaagacgagtcgcggctgaacaggggaggggcggcgatcttcatctggcgagcagagcatgggaggggatcctgttgatgaagctcccgtaactgaagaagaaccaccaacagtttccataattgatgtattctgagactgatttctctttcaaggatgccaacaaactgtgctctcttgttcggaagcagaaagcacttgccaaaaagaaaaggaaatggctgcggtctctgattccaagggaagacggtctcatcaaacctatcaaacgacccaagtttctaaaagatgcgcaagtgcaccatttacaccattcttggggtttcaaattgtactgattggaagcttgctgtctactaatgtgatcatgtcttgtaaacaaatgatctatttgttgctcatttcaaaatattgaattgttttgtaatatcacaccatgggtacttttatgctttattacntgaagcactaagaacataaatggatgatcaggtggcatttcaatatatggttctatgtattcatcttt

(The sequence listing continues in the following parts.)

We claim:

1. A substantially purified nucleic acid molecule that encodes a plant protein or fragment thereof comprising a nucleic acid sequence selected from the group consisting of SEQ ID NO: 1 through SEQ ID NO:43701.

2. The substantially purified nucleic acid molecule of claim 1, wherein said plant protein is a rice protein.

3. A substantially purified rice protein or fragment thereof, wherein said rice protein is encoded by a nucleic acid molecule that comprises a nucleic acid sequence selected from the group consisting of SEQ ID NO: 1 through SEQ ID NO:43701.

4. A transformed plant having a nucleic acid molecule which comprises:
(a) an exogenous promoter region which functions in a plant cell to cause the production of a mRNA molecule;
(b) a structural nucleic acid molecule comprising a nucleic acid sequence selected from the group consisting of SEQ ID NO: 1 through SEQ ID NO: 43701 or complements thereof;
(c) a 3′ non-translated sequence that functions in said plant cell to cause termination of transcription and addition of polyadenylated ribonucleotides to a 3′ end of said mRNA molecule.

5. The transformed plant according to claim 4, wherein said structural nucleic acid molecule is a complement of any of the nucleic acid sequences of SEQ ID NO: 1 through SEQ ID NO: 43701.

6. The transformed plant according to claim 5, wherein said plant is cotton, wheat, rice, soybean or maize.

7. The transformed plant according to claim 5, wherein said plant is maize.

8. The transformed plant according to claim 5, wherein said plant is soybean.

9. The transformed plant according to claim 5, wherein said plant is rice.
